(19) United States
(12) Patent Application Publication
(10) Pub. No.: US 2004/0253606 A1
(43) Pub. Date: Dec. 16, 2004

(54) Methods of detecting soft tissue sarcoma, compositions and methods of screening for soft tissue sarcoma modulators

(75) Inventors: Natasha Aziz, Palo Alto, CA (US); Wendy M. Ginsburg, San Francisco, CA (US); Albert Zlotnik, San Diego, CA (US)

Correspondence Address: HOWREY SIMON ARNOLD & WHITE, LLP, C/O M.P. DROSOS, DIRECTOR OF IP ADMINISTRATION, 2941 FAIRVIEW PK, BOX 7, FALLS CHURCH, VA, 22042, US

(73) Assignee: Protein Design Labs, Inc., Fremont, CA

(21) Appl. No.: 10/723,860

(22) Filed: Nov. 26, 2003

Related U.S. Application Data
(60) Provisional application No. 60/429,739, filed on Nov. 26, 2002.

(51) Int. Cl. C12Q 1/68

(52) U.S. Cl. 435/6

(57) ABSTRACT

Described herein are methods and compositions that can be used for diagnosis and treatment of soft tissue sarcoma cancer phenotypes and soft tissue sarcoma cancer-associated diseases. Also described herein are methods that can be used to identify modulators of soft tissue sarcoma cancer.

### PRIORITY INFORMATION

[0001] This application claims the benefit of U.S. Provisional Application No. 60/429,739, filed Nov. 26, 2002.

### FIELD OF THE INVENTION

[0002] The invention relates to the identification of nucleic acid and protein expression profiles and nucleic acids, products, and antibodies thereto that are involved in soft tissue sarcomas; and to the use of such expression profiles and compositions in diagnosis and therapy of such cancers. The invention further relates to methods for identifying and using agents and/or targets that modulate these cancers.

### BACKGROUND OF THE INVENTION

[0003] Background on Soft Tissue Sarcomas is available, e.g., from Montgomery and Aaron (2001) Clinical Pathology of Soft-Tissue Tumors Marcel Dekker; ISBN: 0824702905; Brennan, et al. “Soft tissue sarcoma” pp 1738-1788 in DeVita, et al. (eds. 1997) Cancer: Principles and Practice of Oncology (5th ed.) Lippincott-Raven Philadelphia, Pa.; Pisters, et al. (2001) Cancer Management: A Multidisciplinary Approach (5th ed.) PRR; p 127-137 in American Joint Committee on Cancer (1992) Manual for Staging of Cancer (4th ed.) Lippincott, . Philadelphia; Schajowicz (1994) Tumors and Tumor-like Lesions of Bone: Pathology, Radiology and Treatment (2d ed.) Springer-Verlag, NY; Cotran, et al. (1999) Pathologic Basis of Disease Saunders; and various websites, e.g., NCI, Memorial Sloan-Kettering Cancer Center; cancerindex.com; cancersource.com; cancernetwork.com; and sarcoma.net.

[0004] Soft-tissue sarcomas are rare, representing only about 1 percent of all cancer cases. According to the American Cancer Society, approximately 8,700 new cases of soft-tissue sarcoma are diagnosed each year in adults and children in the United States. The age-adjusted incidence is 2 cases per 100,000 persons. There is a slight male predominance, with a male to female ratio of 11:10. The age distribution in adult soft-tissue sarcoma studies is: <40 years, 20.7% of patients; 40-60 years, 27.6% of patients; >60 years, 51.7% of patients.

[0005] In the United States, of the 8,700 new cases of soft-tissue sarcoma are identified annually, 4,400 patients die of the disease each year. The five-year survival percentages of soft tissue sarcomas range from 30% to 95% based on subtype and grade. The range for extremity sarcomas is 90%-95%, for trunk sarcomas 50%-75%, and for retroperitoneal lesions 30%-50%. In each of the three locations, higher-grade sarcomas have a poorer survival rate.

[0006] In a survey of approximately 5,000 soft-tissue sarcoma patients admitted to Memorial Sloan-Kettering Cancer Center from 1982 to 2001: 32 percent of sarcomas were found in the lower extremities; 18 percent in the viscera (organs located within the chest and abdomen, such as the stomach, kidney, uterus, etc.); 15 percent in the abdominal and retroperitoneal region; 13 percent in the upper extremities; 8 percent in the trunk and 14 percent in other sites.

[0007] The histological subtypes of soft tissue sarcomas include malignant fibrous histiocytoma, liposarcoma, fibrosarcoma, synovial sarcoma, rhabdomyosarcoma, and leiomyosarcoma. They occur over 50% of the time in extremities; the remainder occur in the head and neck and retroperitoneum. In addition, many of these tumors dedifferentiate. This results in a variety of overlapping patterns, making uniform classification difficult. The current histopathologic classification is based on the putative cell of origin of each lesion. Such classification based on histogenesis is reproducible for the more differentiated tumors. However, as the degree of histologic differentiation declines, it becomes increasingly difficult to determine cellular origin.

[0008] Liposarcomas are malignant tumors that develop from fat tissue. They can develop anywhere in the body, but they most often grow in the retroperitoneum (tissue at the back of the abdominal cavity). Fat tissue may also originate from other locations, usually in the arms, legs, or body cavities.

[0009] Rhabdomyosarcomas are malignant tumors that resemble developing skeletal muscle. These tumors most commonly grow in the arms or legs, but can also develop in the head or neck area, as well as the urinary and reproductive organs.

[0010] Synovial sarcomas are malignant tumors made up of cells that resemble the cells in joints. (“Synovial cells” line the joints.) However, synovial sarcomas do not necessarily arise in a joint, and the name is probably a misnomer, since the cancer cells are probably quite different from normal joint cells. Synovial sarcomas can arise in any location in the body, and they often appear in young adults.

[0011] Fibrosarcomas are cancer of the fibroblast-type cells in the body. Fibroblasts form scars and do other important connective functions. Fibrosarcomas often occur in tendons and ligaments (fibrous tissue), usually in the arms, legs, or trunk. Fibrosarcomas are rare, accounting for fewer than 7% of primary malignant bone tumors. The five- and ten-year survival rates after radical surgery have been reported at 28% and 21.8%, respectively.

[0012] Chondrosarcomas are tumors of cells that form cartilage. Chondrosarcomas account for approximately 14% of malignant bone tumors. The incidence is greatest in individuals between 30 and 60 years of age, and among males. The most frequent sites of chondrosarcomas include the pelvic bone, long bones, scapula, and ribs. Less frequent sites include bones of the hand and foot, the nose, the maxilla, and the base of the skull. At present, chondrosarcomas remain nearly totally refractory to chemotherapeutic efforts inasmuch as chondrosarcomas usually have a poor blood supply. Consequently, drugs given intravenously generally do not reach the tumor in concentrations that are high enough to be therapeutically effective.

[0013] Malignant Fibrous Histiocytomas occur most commonly in the extremities (70-75%, with lower extremities accounting for 59% of cases), followed by the retroperitoneum. Tumors typically arise in deep fascia or skeletal muscle.

[0014] Leiomyosarcomas are malignant tumors that develop from smooth muscle tissue. They can arise anywhere in the body but the uterus or gastrointestinal tract are two relatively common locations.

[0015] In the majority of cases of soft-tissue sarcoma, no specific etiologic agent is identifiable. More commonly, an injury brings a preexisting neoplasm to the attention of the individual. However, a number of predisposing factors have been recognized.

[0016] Soft tissue sarcomas occur with greater frequency in patients with von Recklinghausen's disease (neurofibromatosis), Gardner's syndrome, Werner's syndrome, tuberous sclerosis, basal cell nevus syndrome, and among Li-Fraumeni kindreds (p53 mutations). The occurrences of bone tumors are also associated with hyperpara-thyroidism, chronic osteomyelitis, old bone infarct, osteochondromas, and enchondromas. Immunosuppressed patients such as renal transplant recipients and persons with autoimmunodeficiency syndrome (AIDS) have a higher risk for soft tissue sarcomas.

[0017] Soft-tissue sarcomas have been reported to originate in radiation fields following therapeutic radiation for a variety of solid tumors. Exposure to various chemicals in specific occupations or situations has been linked with the development of soft-tissue sarcoma. These include the phenoxy acetic acids (forestry and agriculture workers), chlorophenols (sawmill workers), Thorotrast (diagnostic x-ray technicians), vinyl chloride (individuals working with this gas, used in making plastics and as a refrigerant), and arsenic (vineyard workers).

[0018] Soft-tissue sarcomas have been reported after previous exposure to alkylating chemotherapeutic agents, most commonly after treatment of pediatric acute lymphocytic leukemia.

[0019] Related conditions include Reactive pseudosarcomatous proliferans (non-neoplastic lesions that mimic sarcomas), nodular fascilitis (infiltrative or pseudosarcomatous fascilitis), proliferative fascilitis, proliferative myositis, myositis ossificans, malignant giant cell tumor, malignant lymphoma of bone (reticulum cell sarcoma), Ewing's tumor (Ewing's sarcoma) and Osteosarcoma (osteogenic sarcoma).

[0020] Signs and symptoms of soft-tissue sarcoma depend, in large part, on the anatomic site of origin. Since 50% of soft-tissue sarcomas arise in an extremity, the majority of patients present with a palpable soft-tissue mass. Pain at presentation is noted in only one-third of cases.

[0021] Because there are so many varied subtypes, and because their characteristics are so different, the risk and seriousness of soft-tissue sarcomas can vary widely. In some patients, sarcomas are minor, non-threatening tumors that can be cured with simple surgical excision. In others, the tumors can be large and much more aggressive, and require chemotherapy and radiation therapy as well as surgery. In addition, the capacity of sarcomas to metastasize to other sites also varies widely. If metastasis occurs, it can sometimes be cured with surgery, but at other times it can be a life-threatening problem. In general, bone and soft tissue tumors tend to involve contiguous tissue and muscle, and aggressively metastasize early to the lungs via the hematogenous route. Occasionally, soft tissue sarcomas can spread to regional lymph nodes.

[0022] The prognosis for patients with adult soft tissue sarcomas depends on several factors, including the patient's age and the size, histologic grade, and stage of the tumor. Factors associated with a poorer prognosis include age older than 60 years of age, tumors larger than 5 centimeters, or high-grade histology. While low-grade tumors are usually curable by surgery alone, higher-grade sarcomas (as determined by the mitotic index and the presence of hemorrhage and necrosis) are associated with higher local treatment failure rates and increased metastatic potential. Some histological subtypes such as rhabdomyosarcomas, synovial sarcomas, and malignant histiocytomas are considered poor prognosticators due to their high grade. If there is distant metastasis to the lymph nodes, lungs, or other bones, the prognosis is also lowered.

[0023] Standard treatment options include: Surgical excision, surgical excision with preoperative or postoperative radiation therapy, and if the tumor is unresectable, high-dose preoperative radiation therapy may be used, followed by surgical resection and postoperative radiation therapy. Today, doctors often give chemotherapy (Doxorubicin and ifosfamide) before surgery to patients with large, fast-growing sarcomas.

[0024] The development of advanced surgical techniques (e.g., microvascular tissue transfer, bone and joint replacement, and vascular reconstruction) and the application of multimodality approaches have allowed most patients to retain a functional extremity without any compromise in survival. Limb-sparing surgery employing adjuvant radiation to facilitate maximal local control has become the standard approach for large (T2) extremity soft-tissue sarcomas. In most centers, upwards of 90% of patients are treated with limb-sparing approaches. Amputation is reserved as a last resort option for local control, and is used with the knowledge that it does not affect survival.

[0025] Improved methods of diagnosis and prognosis of soft tissue sarcomas and effective treatment would be desirable. Accordingly, provided herein are methods that can be used in earlier diagnosis and prognosis of such cancers. Further provided are methods that can be used to screen candidate therapeutic agents for the ability to modulate, e.g., treat, them. Additionally provided herein are molecular targets and compositions for therapeutic intervention in these and other metastatic cancers.

### SUMMARY OF THE INVENTION

[0026] The present invention provides compositions and methods for detecting or modulating soft tissue sarcoma associated sequences.

[0027] In one aspect, the invention provides a method of detecting a sarcoma cancer-associated transcript in a cell in a patient, the method comprising contacting a biological sample from the patient with a polynucleotide that selectively hybridized to a sequence at least 80% identical to a sequence as shown in Tables 1A-11C. In one embodiment, the biological sample is a tissue sample. In another embodiment, the biological sample comprises isolated nucleic acids, such as mRNA.

[0028] In another embodiment, the method further comprises the step of amplifying nucleic acids before the step of contacting the biological sample with the polynucleotide. Often, the polynucleotide comprises a sequence as shown in the Tables. The polynucleotide can be labeled, e.g., with a fluorescent label and can be immobilized on a solid surface.

[0029] In other embodiments the patient is undergoing a therapeutic regimen to treat a disease associated with these sarcomas or the patient is suspected of having a sarcoma-associated disorder.

[0030] In another aspect, the invention comprises an isolated nucleic acid molecule consisting of a polynucleotide sequence as shown in the Tables. The nucleic acid molecule can be labeled, e.g., with a fluorescent or radioactive label.

[0031] In other aspects, the invention provides an expression vector comprising an isolated nucleic acid molecule consisting of a polynucleotide sequence as shown in the Tables or a host cell comprising the expression vector.

[0032] In another aspect, the invention provides an isolated polypeptide which is encoded by a nucleic acid molecule having polynucleotide sequence as shown in Tables 1A-11C.

[0033] In another embodiment, the invention provides an antibody that specifically binds a polypeptide which is encoded by a nucleotide sequence of the Tables. The antibody can be conjugated or fused to an effector component such as a fluorescent label, a toxin, or a radioisotope. In some embodiments, the antibody is an antibody fragment or a humanized antibody.

[0034] In another aspect, the invention provides a method of detecting a cell undergoing such a cancer in a biological sample from a patient, the method comprising contacting the biological sample with an antibody that specifically binds to a polypeptide encoded by a nucleotide sequence of Tables 1A-11C. In some embodiments, the antibody is further conjugated or fused to an effector component, e.g., a fluorescent label.

[0035] In another embodiment, the invention provides a method of detecting antibodies specific to a sarcoma in a patient, the method comprising contacting a biological sample from the patient with a polypeptide which is encoded by a nucleotide sequence of Tables 1A-11C.

[0036] The invention also provides a method of identifying a compound that modulates the activity of a sarcoma-associated polypeptide, the method comprising the steps of: (i) contacting the compound with a polypeptide encoded by a nucleotide sequence of Tables 1A-11C; and (ii) detecting an increase or a decrease in the activity of the polypeptide. In one embodiment, the polypeptide is encoded by a nucleotide sequence of Tables 1A-11C. In another embodiment, the polypeptide is expressed in a cell.

[0037] The invention also provides a method of identifying a compound that modulates the sarcoma, the method comprising steps of: (i) contacting the compound with a cell undergoing such cancer; and (ii) detecting an increase or a decrease in the expression of a polypeptide encoded by a nucleotide sequence of the Tables. In one embodiment, the detecting step comprises hybridizing a nucleic acid sample from the cell with a polynucleotide that selectively hybridizes to a sequence at least 80% identical to a sequence as shown in the Tables. In another embodiment, the method further comprises detecting an increase or decrease in the expression of a second sequence encoded by a nucleotide sequence of the Tables.

[0038] In another embodiment, the invention provides a method of inhibiting neoplastic properties in a cell that expresses a polypeptide at least 80% identical to a sequence encoded by a nucleotide sequence of Tables 1A-11C, the method comprising the step of contacting the cell with a therapeutically effective amount of an inhibitor of the polypeptide. In one embodiment, the polypeptide is encoded by a nucleotide sequence of Tables 1A-11C. In another embodiment, the inhibitor is an antibody.

[0039] Other aspects of the invention will become apparent by the following description of the invention.

[0040] Tables 1A-11C provide nucleotide sequence of genes that exhibit changes in expression levels as a function of time in tissue involved in cancer compared to normal or unaffected tissue.

### DETAILED DESCRIPTION OF THE TABLES

[0041] Table 1A lists about 523 genes upregulated in chondrosarcoma relative to normal body tissues. These genes were selected from 59680 probesets on the Eos/Affymetrix Hu03 GENECHIP® (DNA microchip) array. Gene expression data for each probeset obtained from this analysis was expressed as average intensity (AI), a normalized value reflecting the relative level of mRNA expression.

[0042] Table 2A lists about 763 genes upregulated in dermatofibrosarcoma protuberans relative to normal body tissues. These genes were selected from 59680 probesets on the Eos/Affymetrix Hu03 GENECHIP® array. Gene expression data for each probeset obtained from this analysis was expressed as average intensity (AI), a normalized value reflecting the relative level of mRNA expression.

[0043] Table 3A lists about 625 genes upregulated in fibrosarcoma relative to normal body tissues. These genes were selected from 59680 probesets on the Eos/Affymetrix Hu03 GENECHIP® array. Gene expression data for each probeset obtained from this analysis was expressed as average intensity (AI), a normalized value reflecting the relative level of mRNA expression.

[0044] Table 4A lists about 906 genes upregulated in liposarcoma relative to normal body tissues. These genes were selected from 59680 probesets on the Eos/Affymetrix Hu03 GENECHIP® array. Gene expression data for each probeset obtained from this analysis was expressed as average intensity (AI), a normalized value reflecting the relative level of mRNA expression.

[0045] Table 5A lists about 595 genes upregulated in synovial sarcoma relative to normal body tissues. These genes were selected from 59680 probesets on the Eos/Affymetrix Hu03 GENECHIP® array. Gene expression data for each probeset obtained from this analysis was expressed as average intensity (AI), a normalized value reflecting the relative level of mRNA expression.

[0046] Table 6A lists about 977 genes upregulated in rhabdomyosarcoma relative to normal body tissues. These genes were selected from 59680 probesets on the Eos/Affymetrix Hu03 GENECHIP® array. Gene expression data for each probeset obtained from this analysis was expressed as average intensity (AI), a normalized value reflecting the relative level of mRNA expression.

[0047] Table 7A lists about 973 genes upregulated in soft tissue sarcomas relative to normal body tissues. These genes were selected from 59680 probesets on the Eos/Affymetrix Hu03 GENECHIP® array. Gene expression data for each probeset obtained from this analysis was expressed as average intensity (AI), a normalized value reflecting the relative level of mRNA expression.

[0048] Table 8A lists about 712 genes upregulated in soft tissue sarcomas relative to normal soft tissues (muscle, skin, bone, adipose tissue). These genes were selected from 59680 probesets on the Eos/Affymetrix Hu03 GENECHIP® array. Gene expression data for each probeset obtained from this analysis was expressed as average intensity (AI), a normalized value reflecting the relative level of mRNA expression.

[0049] Table 9A lists about 1078 genes upregulated in malignant fibrous histiocytoma relative to normal body tissues. These genes were selected from 59680 probesets on the Eos/Affymetrix Hu03 GENECHIP® array. Gene expression data for each probeset obtained from this analysis was expressed as average intensity (AI), a normalized value reflecting the relative level of mRNA expression.

[0050] Table 10A lists about 501 genes upregulated in soft tissue sarcoma relative to normal body tissues that are likely to encode proteins amenable to modulation by small molecules, peptides, or antibodies. These genes were selected from 59680 probesets on the Eos/Affymetrix Hu03 GENECHIP® array. Gene expression data for each probeset obtained from this analysis was expressed as average intensity (AI), a normalized value reflecting the relative level of mRNA expression. The protein products of these genes often contain one or more domains indicative of have oncogenic function or of transducing intracellular signals, or of being modulatable by small molecules, peptides, or antibodies (e.g. pkinase, death-domain, 7tm, phosphatase, or ion_transporter). Certain predicted protein domains are noted.

[0051] Tables 1B-11B list the accession numbers for those Pkey's lacking UnigeneID's for tables 1A-11A, respectively. For each probeset we have listed the gene cluster number from which the oligonucleotides were designed. Gene clusters were compiled using sequences derived from Genbank ESTs and mRNAs. These sequences were clustered based on sequence similarity using Clustering and Alignment Tools (DoubleTwist, Oakland Calif.). The Genbank accession numbers for sequences comprising each cluster are listed in the “Accession” column.

[0052] Tables 1C-11C list the genomic positioning for those Pkey's lacking Unigene ID's and accession numbers in tables 1A-11A, respectively. For each predicted exon, genomic sequence source used for prediction is also listed and cross-referenced. Nucleotide locations of each predicted exon are also listed.

### DESCRIPTION OF THE SPECIFIC EMBODIMENTS

[0053] In accordance with the objects outlined above, the present invention provides novel methods for diagnosis and prognosis evaluation for soft tissue sarcomas cancer (sometimes referred to herein as sarcoma disorders or STSD), as well as methods for screening for compositions which modulate those cancers or similar disorders. Also provided are methods for treating these cancers. and related conditions.

[0054] In particular, identification of markers selectively expressed on these cancers allows for use of that expression in diagnostic, prognostic, or therapeutic methods. As such, the invention defines various compositions, e.g., nucleic acids, polypeptides, antibodies, and small molecule agonists/antagonists, which will be useful to selectively recognize those markers. For example, therapeutic methods may take the form of protein therapeutics which use the marker expression for selective localization or modulation of function (for those markers which have a causative disease effect), for vaccines, identification of binding partners, or antagonism, e.g., using antisense or RNAi. The markers may be useful for molecular characterization of subsets of soft tissue sarcoma cancer or related diseases, which subsets may actually require very different treatments. Moreover, the markers may also be important in related diseases to the specific cancers, e.g., which affect similar tissues in non-malignant diseases, or have similar mechanisms of induction/maintenance. Metastatic processes or characteristics may also be targeted. Diagnostic and prognostic uses are made available, e.g., to subset related but distinct diseases, or to determine treatment strategy. The detection methods may be based upon nucleic acid, e.g., PCR or hybridization techniques, or protein, e.g., ELISA, imaging, IHC, etc. The diagnosis may be qualitative or quantitative, and may detect increases or decreases in expression levels.

[0055] Related conditions to these soft tissue sarcomas include, e.g., soft tissue tumors (e.g., fibrosarcoma, liposarcoma, leiomyosarcoma, histiocytoma, fibrohistiocytic sarcoma), smooth muscle tumors (e.g., rhabdomyoma, rhabdomyosarcoma) tumors of the blood and lymph vessels (e.g., angiosarcoma, lymphangiosarcoma, Kaposi's sarcoma), perivascular tumors (e.g., glomus tumors, hemangiopericytoma), synovial tumors (e.g., mesothelioma), neural tumors (e.g., neurofibroma, neurofibrosarcoma, malignant peripheral nerve sheath tumors, granular cell tumors, plexosarcoma, ganglioneuroblastoma, neuroepithelioma, extraskeletal Ewing's sarcoma, schwannoma, neuroma, ganglioneuroma), paraganglioma, extraskeletal cartilaginous and osseous tumors (e.g., chondrosarcoma, osteosarcoma), pluripotential mesenchymal tumors, epitheliod sarcomas, rhabdoid tumors, desmoplastic small cell tumors, and alveolar sarcomas. These markers may be similarly useful for addressing these related conditions, e.g., diagnosis, therapy, prognosis, etc.

[0056] Tables 1A-11C provide unigene cluster identification numbers for the nucleotide sequence of genes that exhibit increased or decreased expression in soft tissue sarcoma cancer samples. The tables also provide an exemplar accession number that provides a nucleotide sequence that is part of the unigene cluster.

[0057] Definitions

[0058] The term “soft tissue sarcoma cancer protein” or “soft tissue sarcoma cancer polynucleotide” refers to nucleic acid and polypeptide polymorphic variants, alleles, mutants, and interspecies homologs that: (1) have a nucleotide sequence that has greater than about 60% nucleotide sequence identity, 65%, 70%, 75%, 80%, 85%, 90%, preferably 92%, 94%, 96%, 97%, 98%, or 99% or greater nucleotide sequence identity, preferably over a region of over a region of at least about 25, 50, 100, 200, 500, 1000, or more nucleotides, to a nucleotide sequence of or associated with a unigene cluster of Tables 1A-11C; (2) bind to antibodies, e.g., polyclonal antibodies, raised against an immunogen comprising an amino acid sequence of Tables 1A-11C, and conservatively modified variants thereof; (3) specifically hybridize under stringent hybridization conditions to an anti-sense strand corresponding to a nucleic acid sequence of Tables 1A-11C and conservatively modified variants thereof; or (4) have an amino acid sequence that has greater than about 60% amino acid sequence identity, 65%, 70%, 75%, 80%, 85%, preferably 90%, 91%, 93%, 95%, 97%, 98%, or 99% or greater amino sequence identity, preferably over a region of over a region of at least about 25, 50, 100, 200, 500, 1000, or more amino acids, to an amino acid sequence encoded by a nucleotide sequence of or associated with a unigene cluster of Tables 1A-11C. A polynucleotide or polypeptide sequence is typically from a mammal including, but not limited to, primate, e.g., human; rodent, e.g., rat, mouse, hamster; cow, pig, horse, sheep, or other mammal. A “soft tissue sarcoma cancer polypeptide” and a “soft tissue sarcoma cancer polynucleotide,” include both naturally occurring or recombinant forms.

[0059] A “full length” soft tissue sarcoma cancer protein or nucleic acid refers to a soft tissue sarcoma cancer polypeptide or polynucleotide sequence, or a variant thereof, that contains the elements normally contained in one or more naturally occurring, wild type soft tissue sarcoma cancer polynucleotide or polypeptide sequences. The “full length” may be prior to, or after, various stages of post-translation processing or splicing, including alternative splicing.

[0060] “Biological sample” as used herein is a sample of biological tissue or fluid that contains nucleic acids or polypeptides, e.g., of a cancer protein. Such samples include, but are not limited to, tissue isolated from primates, e.g., humans, or rodents, e.g., mice, and rats. Biological samples may also include sections of tissues such as biopsy and autopsy samples, and frozen sections taken for histologic purposes. A biological sample is typically obtained from a eukaryotic organism, most preferably a mammal such as a primate e.g., chimpanzee or human; cow; dog; cat; a rodent, e.g., guinea pig, rat, mouse; rabbit; or a bird; reptile; or fish. Livestock and domestic animals are of interest.

[0061] “Providing a biological sample” means to obtain a biological sample for use in methods described in this invention. Most often, this will be done by removing a sample of cells from a mammal, such as a human or animal, but can also be accomplished by using previously isolated cells (e.g., isolated by another person, at another time, and/or for another purpose), or by performing the methods of the invention in vivo. Archival tissues, having treatment or outcome history, will be particularly useful.

[0062] The terms “identical” or “percent identity,” in the context of two or more nucleic acids or polypeptide sequences, refer to two or more sequences or subsequences that are the same or have a specified percentage of amino acid residues or nucleotides that are the same (e.g., about 70% identity, preferably 75%, 80%, 85%, 90%, 91%, 93%, 95%, 97%, 98%, 99%, or higher identity over a specified region, when compared and aligned for maximum correspondence over a comparison window or designated region) as measured using a BLAST or BLAST 2.0 sequence comparison algorithms with default parameters described below, or by manual alignment and visual inspection (see, e.g., NCBI web site or the like). Such sequences are then said to be “substantially identical.” This definition also refers to, or may be applied to, the compliment of a test sequence. The definition also includes sequences that have deletions and/or additions, as well as those that have substitutions. As described below, the algorithms can account for gaps and the like. Preferably, identity exists over a region that is at least about 25 amino acids or nucleotides in length, or more preferably over a region that is 50-100 amino acids or nucleotides in length.

[0063] For sequence comparison, typically one sequence acts as a reference sequence, to which test sequences are compared. When using a sequence comparison algorithm, test and reference sequences are entered into a computer, subsequence coordinates are designated, if necessary, and sequence algorithm program parameters are designated. Preferably, default program parameters can be used, or alternative parameters can be designated. The sequence comparison algorithm then calculates the percent sequence identities for the test sequences relative to the reference sequence, based on the program parameters.

[0064] A “comparison window”, as used herein, includes reference to a segment of one of the number of contiguous positions selected from the group consisting of from about 20-600, usually about 50-200, more usually about 100-150 in which a sequence may be compared to a reference sequence of the same number of contiguous positions after the two sequences are optimally aligned. Methods of alignment of sequences for comparison are well-known. Optimal alignment of sequences for comparison can be conducted, e.g., by the local homology algorithm of Smith and Waterman (1981) Adv. Appl. Math. 2:482-489, by the homology alignment algorithm of Needleman and Wunsch (1970) J. Mol. Biol. 48:443-453, by the search for similarity method of Pearson and Lipman (1988) Proc. Nat'l Acad. Sci. USA 85:2444-2448, by computerized implementations of these algorithms (GAP, BESTFIT, FASTA, and TFASTA in the Wisconsin Genetics Software Package, Genetics Computer Group, 575 Science Dr., Madison, Wis.), or by manual alignment and visual inspection (see, e.g., Ausubel, et al. (eds. 1995 and supplements) Current Protocols in Molecular Biology Wiley).

[0065] Examples of algorithms that are suitable for determining percent sequence identity and sequence similarity include the BLAST and BLAST 2.0 algorithms, which are described in Altschul, et al. (1977) Nuc. Acids Res. 25:3389-3402; and Altschul, et al. (1990) J. Mol. Biol. 215:403-410. BLAST and BLAST 2.0 are used, with the parameters described herein, to determine percent sequence identity for the nucleic acids and proteins of the invention. Software for performing BLAST analyses is publicly available through the National Center for Biotechnology Information. This algorithm involves first identifying high scoring sequence pairs (HSPs) by identifying short words of length W in the query sequence, which either match or satisfy some positive-valued threshold score T when aligned with a word of the same length in a database sequence. T is referred to as the neighborhood word score threshold (Altschul, et al., supra). These initial neighborhood word hits act as seeds for initiating searches to find longer HSPs containing them. The word hits are extended in both directions along each sequence for as far as the cumulative alignment score can be increased. Cumulative scores are calculated using, for nucleotide sequences, the parameters M (reward score for a pair of matching residues; always >0) and N (penalty score for mismatching residues; always <0). For amino acid sequences, a scoring matrix is used to calculate the cumulative score. Extension of the word hits in each direction are halted when: the cumulative alignment score falls off by the quantity X from its maximum achieved value; the cumulative score goes to zero or below, due to the accumulation of one or more negative-scoring residue alignments; or the end of either sequence is reached. The BLAST algorithm parameters W, T, and X determine the sensitivity and speed of the alignment. The BLASTN program (for nucleotide sequences) uses as defaults a wordlength (W) of 11, an expectation (E) of 10, M=5, N=−4 and a comparison of both strands. For amino acid sequences, the BLASTP program uses as defaults a wordlength of 3, and expectation (E) of 10, and the BLOSUM62 scoring matrix (see Henikoff and Henikoff (1989) Proc. Nat'l Acad. Sci. USA 89:10915-919) alignments (B) of 50, expectation (E) of 10, M=5, N=−4, and a comparison of both strands.

[0066] The BLAST algorithm also performs a statistical analysis of the similarity between two sequences. See, e.g., Karlin and Altschul (1993) Proc. Nat'l Acad. Sci. USA 90:5873-5787. One measure of similarity provided by the BLAST,algorithm is the smallest sum probability (P(N)), which provides an indication of the probability by which a match between two nucleotide or amino acid sequences would occur by chance. For example, a nucleic acid is considered similar to a reference sequence if the smallest sum probability in a comparison of the test nucleic acid to the reference nucleic acid is less than about 0.2, more preferably less than about 0.01, and most preferably less than about 0.001. Log values may be negative large numbers, e.g., 5, 10, 20, 30, 40, 40, 70, 90, 110, 150, 170, etc.

[0067] An indication that two nucleic acid sequences or polypeptides are substantially identical is that the polypeptide encoded by the first nucleic acid is immunologically cross reactive with the antibodies raised against the polypeptide encoded by the second nucleic acid, as described below. Thus, a polypeptide is typically substantially identical to a second polypeptide, e.g., where the two peptides differ only by conservative substitutions. Another indication that two nucleic acid sequences are substantially identical is that the two molecules or their complements hybridize to each other under stringent conditions, as described below. Yet another indication that two nucleic acid sequences are substantially identical is that the same primers can be used to amplify the sequences.

[0068] A “host cell” is a naturally occurring cell or a transformed cell that contains an expression vector and supports the replication or expression of the expression vector. Host cells may be cultured cells, explants, cells in vivo, and the like. Host cells may be prokaryotic cells such as E. coli, or eukaryotic cells such as yeast, insect, amphibian, or mammalian cells, e.g., CHO, HeLa, and the like (see, e.g., the American Type Culture Collection catalog).

[0069] The terms “isolated,” “purified,” or “biologically pure” refer to material that is substantially or essentially free from components that normally accompany it as found in its native state. Purity and homogeneity are typically determined using analytical chemistry techniques such as polyacrylamide gel electrophoresis or high performance liquid chromatography. A protein or nucleic acid that is the predominant species present in a preparation is substantially purified. In particular, an isolated nucleic acid is separated from some open reading frames that naturally flank the gene and encode proteins other than protein encoded by the gene. The term “purified” in some embodiments denotes that a nucleic acid or protein gives rise to essentially one band in an electrophoretic gel. Preferably, it means that the nucleic acid or protein is at least about 85% pure, more preferably at least 95% pure, and most preferably at least 99% pure. “Purify” or “purification” in other embodiments means removing at least one contaminant or component from the composition to be purified. In this sense, purification does not require that the purified compound be homogeneous, e.g., 100% pure.

[0070] The terms “polypeptide,” “peptide,” and “protein” are used interchangeably herein to refer to a polymer of amino acid residues. The terms apply to amino acid polymers in which one or more amino acid residue is an artificial chemical mimetic of a corresponding naturally occurring amino acid, as well as to naturally occurring amino acid polymers and non-naturally occurring amino acid polymers.

[0071] The term “amino acid” refers to naturally occurring and synthetic amino acids, as well as amino acid analogs and amino acid mimetics that function in a manner similar to the naturally occurring amino acids. Naturally occurring amino acids are those encoded by the genetic code, as well as those amino acids that are later modified, e.g., hydroxyproline, γ-carboxyglutamate, and O-phosphoserine. Amino acid analogs refers to compounds that have the same basic chemical structure as a naturally occurring amino acid, e.g., an α carbon that is bound to a hydrogen, a carboxyl group, an amino group, and an R group, e.g., homoserine, norleucine, methionine sulfoxide, methionine methyl sulfonium. Such analogs have modified R groups (e.g., norleucine) or modified peptide backbones, but retain the same basic chemical structure as a naturally occurring amino acid. Amino acid mimetics refers to chemical compounds that have a structure that is different from the general chemical structure of an amino acid, but that functions in a manner similar to a naturally occurring amino acid.

[0072] Amino acids may be referred to herein by either their commonly known three letter symbols or by the one-letter symbols recommended by the IUPAC-IUB Biochemical Nomenclature Commission. Nucleotides, likewise, may be referred to by their commonly accepted single-letter codes.

[0073] “Conservatively modified variants” applies to both amino acid and nucleic acid sequences. With respect to particular nucleic acid sequences, conservatively modified variants refers to those nucleic acids which encode identical or essentially identical amino acid sequences, or where the nucleic acid does not encode an amino acid sequence, to essentially identical sequences. Because of the degeneracy of the genetic code, a large number of functionally identical nucleic acids encode a given protein. For instance, the codons GCA, GCC, GCG, and GCU all encode the amino acid alanine. Thus, at a position where an alanine is specified by a codon, the codon can be altered to one of the corresponding codons described without altering the encoded polypeptide. Such nucleic acid variations are “silent variations,” which are one species of conservatively modified variations. Every nucleic acid sequence herein which encodes a polypeptide also describes every possible silent variation of the nucleic acid. In certain contexts each codon in a nucleic acid (except AUG, which is ordinarily the only codon for methionine, and TGG, which is ordinarily the only codon for tryptophan) can be modified to yield a functionally similar molecule. Accordingly, a silent variation of a nucleic acid which encodes a polypeptide is implicit in a described sequence with respect to the expression product, but not necessarily with respect to actual probe sequences.

[0074] As to amino acid sequences, it will be recognized that individual substitutions, deletions, or additions to a nucleic acid, peptide, polypeptide, or protein sequence which alters, adds, or deletes a single amino acid or a small percentage of amino acids in the encoded sequence is a “conservatively modified variant” particularly where the alteration results in the substitution of an amino acid with a chemically similar amino acid. Conservative substitution tables providing functionally similar amino acids are well known. Such conservatively modified variants are in addition to and do not exclude polymorphic variants, interspecies homologs, and alleles of the invention. Typically conservative substitutions include for one another: 1) Alanine (A), Glycine (G); 2) Aspartic acid (D), Glutamic acid (E); 3) Asparagine (N), Glutamine (Q); 4) Arginine (R), Lysine (K); 5) Isoleucine (I), Leucine (L), Methionine (M), Valine (V); 6) Phenylalanine (F), Tyrosine (Y), Tryptophan (W); 7) Serine (S), Threonine (T); and 8) Cysteine (C), Methionine (M). See, e.g., Creighton (1984) Proteins: Structure and Molecular Properties Freeman).

[0075] Macromolecular structures such as polypeptide structures can be described in terms of various levels of organization. For a general discussion of this organization, see, e.g., Alberts, et al. (eds. 2001) Molecular Biology of the Cell (4th ed.) Garland; and Cantor and Schimmel (1980) Biophysical Chemistry Part I: The Conformation of Biological Macromolecules Freeman. “Primary structure” refers to the amino acid sequence of a particular peptide. “Secondary structure” refers to locally ordered, three dimensional structures within a polypeptide. These structures are commonly known as domains. Domains are portions of a polypeptide that form a compact unit of the polypeptide and are typically 25 to approximately 500 amino acids long. Typical domains are made up of sections of lesser organization such as stretches of β-sheet and α-helices. “Tertiary structure” refers to the complete three dimensional structure of a polypeptide monomer. “Quaternary structure” refers to the three dimensional structure formed, usually by the noncovalent association of independent tertiary units. Anisotropic terms are also known as energy terms.

[0076] “Nucleic acid” or “oligonucleotide” or “polynucleotide” or grammatical equivalents used herein means at least two nucleotides covalently linked together. Oligonucleotides are typically from about 5, 6, 7, 8, 9, 10, 12, 15, 25, 30, 40, 50, or more nucleotides in length, up to about 100 nucleotides in length. Nucleic acids and polynucleotides are polymers, including longer lengths, e.g., 200, 300, 500, 1000, 2000, 3000, 5000, 7000, 10,000, etc. A nucleic acid of the present invention will generally contain phosphodiester bonds, although in some cases, nucleic acid analogs are included that may have at least one different linkage, e.g., phosphoramidate, phosphorothioate, phosphorodithioate, or O-methylphophoroamidite linkages (see Eckstein (1992) Oligonucleotides and Analogues: A Practical Approach Oxford Univ. Press); and peptide nucleic acid backbones and linkages. Other analog nucleic acids include those with positive backbones; non-ionic backbones, and non-ribose backbones, including those described in U.S. Pat. Nos. 5,235,033 and 5,034,506, and Chapters 6 and 7 of Sanghvi and Cook (eds. 1994) Carbohydrate Modifications in Antisense Research ACS Symposium Series 580. Nucleic acids containing one or more carbocyclic sugars are also included within one definition of nucleic acids. Modifications of the ribose-phosphate backbone may be done for a variety of reasons, e.g., to increase the stability and half-life of such molecules in physiological environments or as probes on a biochip. Mixtures of naturally occurring nucleic acids and analogs can be made; alternatively, mixtures of different nucleic acid analogs, and mixtures of naturally occurring nucleic acids and analogs may be made.

[0077] A variety of references disclose such nucleic acid analogs, including, e.g., phosphoramidate (Beaucage, et al. (1993) Tetrahedron 49:1925-1963 and references therein; Letsinger (1970) J. Org. Chem. 35:3800-3803; Sprinzl, et al. (1977) Eur. J. Biochem. 81:579-589; Letsinger, et al. (1986) Nuc. Acids Res. 14:3487-499; Sawai, et al. (1984) Chem. Lett. 805, Letsinger, et al. (1988) J. Am. Chem. Soc. 110:4470-4471; and Pauwels, et al. (1986) Chemica Scripta 26:141-149), phosphorothioate (Mag, et al. (1991) Nuc. Acids Res. 19:1437-441; and U.S. Pat. No. 5,644,048), phosphorodithioate (Brill, et al. (1989) J. Am. Chem. Soc. 111:2321-322), O-methylphophoroamidite linkages (see Eckstein (1992) Oligonucleotides and Analogues: A Practical Approach, Oxford Univ. Press), and peptide nucleic acid backbones and linkages (see Egholm (1992) J. Am. Chem. Soc. 114:1895-1897; Meier, et al. (1992) Chem. Int. Ed. Engl. 31:1008-1010; Nielsen (1993) Nature 365:566-568; and Carlsson, et al. (1996) Nature 380:207). Other analog nucleic acids include those with positive backbones (Denpcy, et al. (1995) Proc. Nat'l Acad. Sci. USA 92:6097-101); non-ionic backbones (U.S. Pat. Nos. 5,386,023, 5,637,684, 5,602,240, 5,216,141, and 4,469,863; Kiedrowski, et al. (1991) Angew. Chem. Intl. Ed. English 30:423-426; Letsinger, et al. (1988) J. Am. Chem. Soc. 110:4470-471; Jung, et al. (1994) Nucleoside and Nucleotide 13:1597-xxx; Chapters 2 and 3 in Sanghvi and Cook (eds. 1994) Carbohydrate Modifications in Antisense Research ACS Symposium Series 580; Mesmaeker, et al. (1994) Bioorganic and Medicinal Chem. Lett. 4:395-398; Jeffs, et al. (1994) J. Biomolecular NMR 34:17; and Horn, et al. (1996) Tetrahedron Lett. 37:743-xxx) and non-ribose backbones, including those described in U.S. Pat. Nos. 5,235,033 and 5,034,506, and Chapters 6 and 7 in Sanghvi and Cook (eds. 1994) Carbohydrate Modifications in Antisense Research ACS Symposium Series 580. Nucleic acids containing one or more carbocyclic sugars are also included within one definition of nucleic acids. See Jenkins, et al. (1995) Chem. Soc. Rev. pp 169-176. Several nucleic acid analogs are described in Rawls (page 35, Jun. 2, 1997) C&E News.

[0078] Particularly useful are peptide nucleic acids (PNA) which includes peptide nucleic acid analogs. These backbones are substantially non-ionic under neutral conditions, in contrast to the highly charged phosphodiester backbone of naturally occurring nucleic acids. This results in at least two advantages. The PNA backbone exhibits improved hybridization kinetics. PNAs have larger changes in the melting temperature (Tₘ) for mismatched versus perfectly matched basepairs. DNA and RNA typically exhibit a 2-4° C. drop in Tm for an internal mismatch. With the non-ionic PNA backbone, the drop is closer to about 7-9° C. Similarly, due to their non-ionic nature, hybridization of the bases attached to these backbones is relatively insensitive to salt concentration. In addition, PNAs are not degraded by cellular enzymes, and thus can be more stable.

[0079] The nucleic acids may be single stranded or double stranded, as specified, or contain portions of both double stranded or single stranded sequence. The depiction of a single strand also defines the sequence of the complementary strand; thus the sequences described herein also provide the complement of the sequence. The nucleic acid may be DNA, both genomic and cDNA, RNA, or a hybrid, where the nucleic acid may contain combinations of deoxyribo- and ribo-nucleotides, and combinations of bases, including uracil, adenine, thymine, cytosine, guanine, inosine, xanthine hypoxanthine, isocytosine, isoguanine, etc. “Transcript” typically refers to a naturally occurring RNA, e.g., a pre-mRNA, hnRNA, or mRNA. As used herein, the term “nucleoside” includes nucleotides and nucleoside and nucleotide analogs, and modified nucleosides such as amino modified nucleosides. In addition, “nucleoside” includes non-naturally occurring analog structures. Thus, e.g., the individual units of a peptide nucleic acid, each containing a base, are referred to herein as a nucleoside.

[0080] A “label” or a “detectable moiety” is a composition detectable by spectroscopic, photochemical, biochemical, immunochemical, physiological, chemical, or other physical means. Useful labels include ³²P, fluorescent dyes, electron-dense reagents, enzymes (e.g., as commonly used in an ELISA), biotin, digoxigenin, or haptens and proteins which can be made detectable, e.g., by incorporating a radiolabel into the peptide or used to detect antibodies specifically reactive with the peptide. The labels may be incorporated into the soft tissue sarcoma cancer nucleic acids, proteins, and antibodies. Many methods known for conjugating the antibody to the label may be employed. See, e.g., Hunter, et al. (1962) Nature 144:945; David, et al. (1974) Biochemistry 13:1014-1021; Pain, et al. (1981) J. Immunol. Meth. 40:219-230; and Nygren (1982) J. Histochem. and Cytochem. 30:407-412.

[0081] An “effector” or “effector moiety” or “effector component” is a molecule that is bound (or linked, or conjugated), either covalently, through a linker or a chemical bond, or noncovalently, through ionic, van der Waals, electrostatic, or hydrogen bonds, to an antibody. The “effector” can be a variety of molecules including, e.g., detection moieties including radioactive compounds, fluorescent compounds, enzymes or substrates, tags such as epitope tags, toxins; activatable moieties, chemotherapeutic agents; chemoattractant or immunomodulating entities; lipases; antibiotics; or radioisotopes, e.g., emitting “hard” beta radiation.

[0082] A “labeled nucleic acid probe or oligonucleotide” is one that is bound, e.g., covalently, through a linker or a chemical bond, or noncovalently, through ionic, van der Waals, electrostatic, or hydrogen bonds to a label such that the presence of the probe may be detected by detecting the presence of the label bound to the probe. Alternatively, method using high affinity interactions may achieve the same results where one of a pair of binding partners binds to the other, e.g., biotin, streptavidin.

[0083] As used herein a “nucleic acid probe or oligonucleotide” is a nucleic acid capable of binding to a target nucleic acid of complementary sequence through one or more types of chemical bonds, usually through complementary base pairing, usually through hydrogen bond formation. As used herein, a probe may include natural (e.g., A, C, G, or T) or modified bases (7-deazaguanosine, inosine, etc.). In addition, the bases in a probe may be joined by a linkage other than a phosphodiester bond, preferably one that does not functionally interfere with hybridization. Thus, e.g., probes may be peptide nucleic acids in which the constituent bases are joined by peptide bonds rather than phosphodiester linkages. Probes may bind target sequences lacking complete complementarity with the probe sequence depending upon the stringency of the hybridization conditions. The probes are preferably directly labeled, e.g., with isotopes, chromophores, lumiphores, chromogens, or indirectly labeled, e.g., with biotin to which a streptavidin complex may later bind. By assaying for the presence or absence of the probe, one can detect the presence or absence of the select sequence or subsequence. Diagnosis or prognosis may be based at the genomic level, or at the level of RNA or protein expression.

[0084] The term “recombinant” when used with reference, e.g., to a cell, or nucleic acid, protein, or vector, indicates that the cell, nucleic acid, protein, or vector, has been modified by the introduction of a heterologous nucleic acid or protein or the alteration of a native nucleic acid or protein, or that the cell is derived from a cell so modified. Thus, e.g., recombinant cells express genes that are not found within the native (non-recombinant) form of the cell or express native genes that are otherwise abnormally expressed, under expressed, or not expressed. By the term “recombinant nucleic acid” herein is meant nucleic acid, originally formed in vitro, in general, by the manipulation of nucleic acid, e.g., using polymerases and endonucleases, in a form not normally found in nature. In this manner, operable linkage of different sequences is achieved. Thus an isolated nucleic acid, in a linear form, or an expression vector formed in vitro by ligating DNA molecules that are not normally joined, are both considered recombinant for the purposes of this invention. It is understood that once a recombinant nucleic acid is made and reintroduced into a host cell or organism, it will replicate non-recombinantly, e.g., using the in vivo cellular machinery of the host cell rather than in vitro manipulations; however, such nucleic acids, once produced recombinantly, although subsequently replicated non-recombinantly, are still considered recombinant for the purposes of the invention. Similarly, a “recombinant protein” is a protein made using recombinant techniques, e.g., through the expression of a recombinant nucleic acid as depicted above.

[0085] The term “heterologous” when used with reference to portions of a nucleic acid indicates that the nucleic acid comprises two or more subsequences that are not found in the same relationship to each other in nature. For instance, the nucleic acid is typically recombinantly produced, having two or more sequences from unrelated genes arranged to make a new functional nucleic acid, e.g., a promoter from one source and a coding region from another source. Similarly, a heterologous protein indicates that the protein comprises two or more subsequences that are not found in the same relationship to each other in nature (e.g., a fusion protein).

[0086] A “promoter” is defined as an array of nucleic acid control sequences that direct transcription of a nucleic acid. As used herein, a promoter includes necessary nucleic acid sequences near the start site of transcription, such as, in the case of a polymerase II type promoter, a TATA element. A promoter also optionally includes distal enhancer or repressor elements, which can be located as much as several thousand base pairs from the start site of transcription. A “constitutive” promoter is a promoter that is active under most environmental and developmental conditions. An “inducible” promoter is a promoter that is active under environmental or developmental regulation. The term “operably linked” refers to a functional linkage between a nucleic acid expression control sequence (such as a promoter, or array of transcription factor binding sites) and a second nucleic acid sequence, wherein the expression control sequence directs transcription of the nucleic acid corresponding to the second sequence.

[0087] An “expression vector” is a nucleic acid construct, generated recombinantly or synthetically, with a series of specified nucleic acid elements that permit transcription of a particular nucleic acid in a host cell. The expression vector can be part of a plasmid, virus, or nucleic acid fragment. Typically, the expression vector includes a nucleic acid to be transcribed in operable linkage to a promoter.

[0088] The phrase “selectively (or specifically) hybridizes to” refers to the binding, duplexing, or hybridizing of a molecule only to a particular nucleotide sequence under stringent hybridization conditions when that sequence is present in a complex mixture (e.g., total cellular or library DNA or RNA).

[0089] The phrase “stringent hybridization conditions” refers to conditions under which a probe will hybridize to its target subsequence, typically in a complex mixture of nucleic acids, but to essentially no other sequences. Stringent conditions are sequence-dependent and will be different in different circumstances. Longer sequences hybridize specifically at higher temperatures. An extensive guide to the hybridization of nucleic acids is found in “Overview of principles of hybridization and the strategy of nucleic acid assays” in Tijssen (1993) Hybridization with Nucleic Probes (Laboratory Techniques in Biochemistry and Molecular Biology) (vol. 24) Elsevier. Generally, stringent conditions are selected to be about 5-10° C. lower than the thermal melting point (Tₘ) for the specific sequence at a defined ionic strength pH. The Tₘ is the temperature (under defined ionic strength, pH, and nucleic concentration) at which 50% of the probes complementary to the target hybridize to the target sequence at equilibrium (as the target sequences are present in excess, at Tₘ, 50% of the probes are occupied at equilibrium). Stringent conditions will be those in which the salt concentration is less than about 1.0 M sodium ion, typically about 0.01 to 1.0 M sodium ion concentration (or other salts) at pH 7.0 to 8.3 and the temperature is at least about 30° C. for short probes (e.g., 10-50 nucleotides) and at least about 60° C. for long probes (e.g., greater than about 50 nucleotides). Stringent conditions may also be achieved with the addition of destabilizing agents such as formamide. For selective or specific hybridization, a positive signal is at least two times background, preferably 10 times background hybridization. Exemplary stringent hybridization conditions can be as following: 50% formamide, 5×SSC, and 1% SDS, incubating at 42° C., or, 5×SSC, 1% SDS, incubating at 65° C., with wash in 0.2×SSC, and 0.1% SDS at 65° C. For PCR, a temperature of about 36° C. is typical for low stringency amplification, although annealing temperatures may vary between about 32-48° C. depending on primer length. For high stringency PCR amplification, a temperature of about 62° C. is typical, although high stringency annealing temperatures can range from about 50-65° C., depending on the primer length and specificity. Typical cycle conditions for both high and low stringency amplifications include a denaturation phase of 90-95° C. for 30-120 sec, an annealing phase lasting 30-120 sec, and an extension phase of about 72° C. for 1-2 min. Protocols and guidelines for low and high stringency amplification reactions are provided, e.g., in Innis, et al. (1990) PCR Protocols: A Guide to Methods and Applications, Academic Press, NY.

[0090] Nucleic acids that do not hybridize to each other under stringent conditions are still substantially identical if the polypeptides which they encode are substantially identical. This occurs, e.g., when a copy of a nucleic acid is created using the maximum codon degeneracy permitted by the genetic code. In such cases, the nucleic acids typically hybridize under moderately stringent hybridization conditions. Exemplary “moderately stringent hybridization conditions” include a hybridization in a buffer of 40% formamide, 1 M NaCl, 1% SDS at 37° C., and a wash in 1×SSC at 45° C. A positive hybridization is typically at least twice background. Alternative hybridization and wash conditions can be utilized to provide conditions of similar stringency. Additional guidelines for determining hybridization parameters are provided in numerous references, e.g., Ausubel, et al. (eds. 1991 and supplements) Current Protocols in Molecular Biology Wiley.

[0091] The phrase “functional effects” in the context of assays for testing compounds that modulate activity of a soft tissue sarcoma cancer protein includes the determination of a parameter that is indirectly or directly under the influence of the cancer protein, e.g., a physiological, functional, physical, or chemical effect, such as the ability to increase or decrease soft tissue sarcoma cancer. It includes ligand binding activity; cell viability; cell growth on soft agar; anchorage dependence; contact inhibition and density limitation of growth; cellular proliferation; cellular transformation; growth factor or serum dependence; tumor specific marker levels; invasiveness into Matrigel; tumor growth and metastasis in vivo; mRNA and protein expression in cells undergoing metastasis; and other characteristics of cancer cells. “Functional effects” include in vitro, in vivo, and ex vivo activities.

[0092] By “determining the functional effect” is meant assaying for a compound that increases or decreases a parameter that is indirectly or directly under the influence of a soft tissue sarcoma cancer protein sequence, e.g., physiological, functional, enzymatic, physical, or chemical effects. Such functional effects can be measured, e.g., changes in spectroscopic characteristics (e.g., fluorescence, absorbance, refractive index), hydrodynamic (e.g., shape), chromatographic, or solubility properties for the protein, measuring inducible markers or transcriptional activation of the cancer protein; measuring binding activity or binding assays, e.g., binding to antibodies or other ligands, and measuring growth, cellular proliferation, cell viability, cellular transformation, growth factor or serum dependence, tumor specific marker levels, invasiveness into Matrigel, tumor growth and metastasis in vivo, mRNA and protein expression, and other characteristics of cancer cells. The functional effects can be evaluated by many means, e.g., microscopy for quantitative or qualitative measures of alterations in morphological features, measurement of RNA stability, identification of downstream or reporter gene expression (CAT, luciferase, β-gal, GFP and the like), e.g., via chemiluminescence, fluorescence, calorimetric reactions, antibody binding, inducible markers, and ligand binding assays.

[0093] “Inhibitors”, “activators”, and “modulators” of soft tissue sarcoma cancer polynucleotide and polypeptide sequences are used to refer to activating, inhibitory, or modulating molecules identified using in vitro and in vivo assays of cancer polynucleotide and polypeptide sequences. Inhibitors are compounds that, e.g., bind to, partially or totally block activity, decrease, prevent, delay activation, inactivate, desensitize, or down regulate the activity or expression of soft tissue sarcoma cancer proteins, e.g., antagonists. “Activators” are compounds that increase, open, activate, facilitate, enhance activation, sensitize, agonize, or up regulate soft tissue sarcoma cancer protein activity. Inhibitors, activators, or modulators also include genetically modified versions of soft tissue sarcoma cancer proteins, e.g., versions with altered activity, as well as naturally occurring and synthetic ligands, antagonists, agonists, antibodies, small chemical molecules and the like. Such assays for inhibitors and activators include, e.g., expressing the cancer protein in vitro, in cells, or cell membranes, applying putative modulator compounds, and then determining the functional effects on activity, as described above. Activators and inhibitors of soft tissue sarcoma cancer can also be identified by incubating cancer cells with the test compound and determining increases or decreases in the expression of 1 or more soft tissue sarcoma cancer proteins, e.g., 1, 2, 3, 4, 5, 10, 15, 20, 25, 30, 40, 50 or more cancer proteins, such as soft tissue sarcoma cancer proteins comprising the sequences set out in the Tables.

[0094] Samples or assays comprising soft tissue sarcoma cancer proteins that are treated with a potential activator, inhibitor, or modulator are compared to control samples without the inhibitor, activator, or modulator to examine the extent of inhibition. Control samples (untreated with inhibitors) are assigned a relative protein activity value of 100%. Inhibition of a polypeptide is achieved when the activity value relative to the control is about 80%, preferably 50%, more preferably 25-0%. Activation of a soft tissue sarcoma cancer polypeptide is achieved when the activity value relative to the control (untreated with activators) is 110%, more preferably 150%, more preferably about 200-500% (e.g., two to five fold higher relative to the control), more preferably 1000-3000% higher.

[0095] The phrase “changes in cell growth” refers to a change in cell growth or proliferation characteristics in vitro or in vivo, such as cell viability, formation of foci, anchorage independence, semi-solid or soft agar growth, changes in contact inhibition and density limitation of growth, loss of growth factor or serum requirements, changes in cell morphology, gaining or losing immortalization, gaining or losing tumor specific markers, ability to form or suppress tumors when injected into suitable animal hosts, and/or immortalization of the cell. See, e.g., pp. 231-241 in Freshney (1994) Culture of Animal Cells a Manual of Basic Technique (2d ed.) Wiley-Liss.

[0096] “Tumor cell” refers to precancerous, cancerous, and normal cells in a tumor.

[0097] “Cancer cells,” “transformed” cells or “transformation” in tissue culture, refers to spontaneous or induced phenotypic changes that do not necessarily involve the uptake of new genetic material. Although transformation can arise from infection with a transforming virus and incorporation of new genomic DNA, or uptake of exogenous DNA, it can also arise spontaneously or following exposure to a carcinogen, thereby mutating an endogenous gene. Transformation is associated with phenotypic changes, such as immortalization of cells, aberrant growth control, nonmorphological changes, and/or malignancy. See, Freshney (2001) Culture of Animal Cells: A Manual of Basic Technique (4th ed.) Wiley-Liss.

[0098] “Antibody” refers to a polypeptide comprising a framework region from an immunoglobulin gene or fragments thereof that specifically binds and recognizes an antigen. The recognized immunoglobulin genes include the kappa, lambda, alpha, gamma, delta, epsilon, and mu constant region genes, as well as the myriad immunoglobulin variable region genes. Light chains are classified as either kappa or lambda. Heavy chains are classified as gamma, mu, alpha, delta, or epsilon, which in turn define the immunoglobulin classes, IgG, IgM, IgA, IgD and IgE, respectively. Typically, the antigen-binding region of an antibody will be most critical in specificity and affinity of binding. See Paul (ed. 1999) Fundamental Immunology (4th ed.) Raven.

[0099] An exemplary immunoglobulin (antibody) structural unit comprises a tetramer. Each tetramer is composed of two identical pairs of polypeptide chains, each pair having one “light” (about 25 kD) and one “heavy” chain (about 50-70 kD). The N-terminus of each chain defines a variable region of about 100-110 or more amino acids primarily responsible for antigen recognition. The terms variable light chain (V_{L}) and variable heavy chain (V_{H}) refer to these light and heavy chains respectively.

[0100] Antibodies exist, e.g., as intact immunoglobulins or as a number of well-characterized fragments produced by digestion with various peptidases. Thus, e.g., pepsin digests an antibody below the disulfide linkages in the hinge region to produce F(ab)′₂, a dimer of Fab which itself is a light chain joined to V_{H}-C_{H}1 by a disulfide bond. The F(ab)′₂ may be reduced under mild conditions to break the disulfide linkage in the hinge region, thereby converting the F(ab)′₂ dimer into an Fab′ monomer. The Fab′ monomer is essentially Fab with part of the hinge region. See Paul (ed. 1999) Fundamental Immunology (4th ed.) Raven. While various antibody fragments are defined in terms of the digestion of an intact antibody, it will be appreciated that such fragments may be synthesized de novo either chemically or by using recombinant DNA methodology. Thus, the term antibody, as used herein, also includes antibody fragments either produced by the modification of whole antibodies, or those synthesized de novo using recombinant DNA methodologies (e.g., single chain Fv) or those identified using phage display libraries (e.g., McCafferty, et al. (1990) Nature 348:552-554).

[0101] For preparation of antibodies, e.g., recombinant, monoclonal, or polyclonal antibodies, many techniques can be used. See, e.g., Kohler and Milstein (1975) Nature 256:495-497; Kozbor, et al. (1983) Immunology Today 4:72; Cole, et al. (1985) pp. 77-96 in Reisfeld and Sell (1985) Monoclonal Antibodies and Cancer Therapy Liss; Coligan (1991) Current Protocols in Immunology Lippincott; Harlow and Lane (1988) Antibodies: A Laboratory Manual CSH Press; and Goding (1986) Monoclonal Antibodies: Principles and Practice (2d ed.) Academic Press. Techniques for the production of single chain antibodies (U.S. Pat. No. 4,946,778) can be adapted to produce antibodies to polypeptides of this invention. Also, transgenic mice, or other organisms such as other mammals, may be used to express humanized antibodies. Alternatively, phage display technology can be used to identify antibodies and heteromeric Fab fragments that specifically bind to selected antigens. See, e.g., McCafferty, et al. (1990) Nature 348:552-554; Marks, et al. (1992) Biotechnology 10:779-783.

[0102] A “chimeric antibody” is an antibody molecule in which (a) the constant region, or a portion thereof, is altered, replaced or exchanged so that the antigen binding site (variable region) is linked to a constant region of a different or altered class, effector function and/or species, or an entirely different molecule which confers new properties to the chimeric antibody, e.g., an enzyme, toxin, hormone, growth factor, drug, etc.; or (b) the variable region, or a portion thereof, is altered, replaced or exchanged with a variable region having a different or altered antigen specificity.

[0103] Identification, Expression of Soft Tissue Sarcoma Cancer-associated Sequences

[0104] In one aspect, the expression levels of genes are determined in different patient samples for which diagnosis information is desired, to provide expression profiles. An expression profile of a particular sample is essentially a “fingerprint” of the state of the sample; while two states may have a particular gene similarly expressed, the evaluation of a number of genes simultaneously allows the generation of a gene expression profile that is unique to the state of the cell. That is, normal tissue may be distinguished from sarcoma disorder tissue. By comparing expression profiles of tissue in known different soft tissue sarcoma cancer states, e.g., stages or disease course outcomes, information regarding which genes are important (including both up- and down-regulation of genes) in each of these states is obtained. Molecular profiling may distinguish subtypes of a currently collective disease designation, e.g., different forms of cancer processes.

[0105] The identification of sequences that are differentially expressed in cancer versus non-cancer tissue allows the use of this information in a number of ways. For example, a particular treatment regime may be evaluated: does a chemotherapeutic drug act to down-regulate soft tissue sarcoma cancer, and thus tumor growth or recurrence, in a particular patient. Alternatively, a treatment step may induce other markers which may be used as targets to destroy tumor cells. Similarly, diagnosis and treatment outcomes may be done or confirmed by comparing patient samples with the known expression profiles. Cancer tissue can be compared to non-cancerous conditions, or be analyzed to determine the stage of soft tissue sarcoma cancer in the tissue, or origin of primary tumor, e.g., metastasis from a remote primary site. Furthermore, these gene expression profiles (or individual genes) allow screening of drug candidates with an eye to mimicking or altering a particular expression profile; e.g., screening can be done for drugs that suppress the cancer expression profile. This may be done by making biochips comprising sets of the important soft tissue sarcoma cancer genes, which can then be used in these screens. These methods can also be done on the protein basis; that is, protein expression levels of the cancer proteins can be evaluated for diagnostic purposes or to screen candidate agents. In addition, the cancer nucleic acid sequences can be administered for gene therapy purposes, including the administration of antisense nucleic acids, or the cancer proteins (including antibodies and other modulators thereof) administered as therapeutic drugs.

[0106] Thus the present invention provides nucleic acid and protein sequences that are differentially expressed in soft tissue sarcoma cancer relative to normal tissues and/or non-malignant disease, or in different types of related diseases, herein termed “soft tissue sarcoma cancer sequences”. As outlined below, soft tissue sarcoma cancer sequences include those that are up-regulated (e.g., expressed at a higher level) in disorders associated with soft tissue sarcoma cancer, as well as those that are down-regulated (e.g., expressed at a lower level). In one embodiment, the soft tissue sarcoma cancer sequences are from humans; however, as will be appreciated, soft tissue sarcoma cancer sequences from other organisms may be useful in animal models of disease and drug evaluation; thus, other soft tissue sarcoma cancer sequences are provided, from vertebrates, including mammals, including rodents (rats, mice, hamsters, guinea pigs, etc.), primates, farm animals (including sheep, goats, pigs, cows, horses, etc) and pets (e.g., dogs, cats, etc.). Soft tissue sarcoma cancer sequences from other organisms may be obtained using the techniques outlined below.

[0107] Soft tissue sarcoma cancer sequences can include both nucleic acid and amino acid sequences. In one embodiment, the soft tissue sarcoma cancer sequences are recombinant nucleic acids. These nucleic acid sequences are useful in a variety of applications, including diagnostic applications, which will detect naturally occurring nucleic acids, as well as screening applications; e.g., biochips comprising nucleic acid probes or PCR microtiter plates with selected probes to the soft tissue sarcoma cancer sequences.

[0108] A soft tissue sarcoma cancer sequence can be initially identified by substantial nucleic acid and/or amino acid sequence homology to the sequences outlined herein. Such homology can be based upon the overall nucleic acid or amino acid sequence, and is generally determined as outlined below, e.g., using homology programs or hybridization conditions.

[0109] For identifying soft tissue sarcoma cancer-associated sequences, the cancer screen typically includes comparing genes identified in different tissues, e.g., normal and cancer tissues, cancer and non-malignant conditions, non-malignant conditions and normal tissues, or tumor tissue samples from patients who have metastatic disease vs. non metastatic tissue. Other suitable tissue comparisons include comparing cancer samples with metastatic cancer samples from other cancers, such as lung, stomach, gastrointestinal cancers, etc. Samples of different stages of cancer, e.g., survivor tissue, drug resistant states, and tissue undergoing metastasis, are applied to biochips comprising nucleic acid probes. The samples are first microdissected, if applicable, and treated for the preparation of mRNA. Suitable biochips are commercially available, e.g., from Affymetrix, Santa Clara, Calif. Gene expression profiles as described herein are generated and the data analyzed.

[0110] In one embodiment, the genes showing changes in expression as between normal and disease states are compared to genes expressed in other normal tissues, including, and not limited to lung, heart, brain, liver, stomach, kidney, muscle, colon, small intestine, large intestine, spleen, bone, and/or placenta. In another embodiment, those genes identified during the cancer screen that are expressed in a significant amount in other tissues (e.g., essential organs) are removed from the profile, although in some embodiments, this is not necessary (e.g., where organs may be dispensable, e.g., female or male specific). That is, when screening for drugs, it is usually preferable that the target expression be disease specific, to minimize possible side effects on other organs were there expression.

[0111] In one embodiment, soft tissue sarcoma cancer sequences are those that are up-regulated in soft tissue sarcoma cancer; that is, the expression of these genes is higher in the cancer tissue as compared to non-cancer or non-malignant tissue. “Up-regulation” as used herein often means at least about a two-fold change, preferably at least about a three fold change, with at least about five-fold or higher being preferred. Another embodiment is directed to sequences up-regulated in non-malignant conditions relative to normal. Uniformity among relevant samples is desired.

[0112] Unigene cluster identification numbers and accession numbers herein are for the GenBank sequence database and the sequences of the accession numbers are hereby expressly incorporated by reference. GenBank is available, see, e.g., Benson, et al. (1998) Nuc. Acids Res. 26:1-7. Sequences are also available in other databases, e.g., European Molecular Biology Laboratory (EMBL) and DNA Database of Japan (DDBJ). In some situations, the sequences may be derived from assembly of available sequences or be predicted from genomic DNA using exon prediction algorithms, such as FGENESH. See Salamov and Solovyev (2000) Genome Res. 10:516-522. In other situations, sequences have been derived from cloning and sequencing of isolated nucleic acids.

[0113] In another embodiment, soft tissue sarcoma cancer sequences are those that are down-regulated in cancer; that is, the expression of these genes is lower compared to non-cancer tissue. “Down-regulation” as used herein often means at least about a two-fold change, preferably at least about a three fold change, with at least about five-fold or higher being useful.

[0114] By the term “recombinant nucleic acid” herein is meant nucleic acid, originally formed in vitro, in general, by the manipulation of nucleic acid e.g., using polymerases and endonucleases, in a form not normally found in nature. Thus an isolated nucleic acid, in a linear form, or an expression vector formed in vitro by ligating DNA molecules that are not normallyjoined, are both considered recombinant for the purposes of this invention. It is understood that once a recombinant nucleic acid is made and reintroduced into a host cell or organism, it will replicate non-recombinantly, e.g., using the in vivo cellular machinery of the host cell rather than in vitro manipulations; however, such nucleic acids, once produced recombinantly, although subsequently replicated non-recombinantly, are still considered recombinant for the purposes of the invention.

[0115] Similarly, a “recombinant protein” is a protein made using recombinant techniques, e.g., through the expression of a recombinant nucleic acid as depicted above. A recombinant protein is distinguished from naturally occurring protein by at least one or more characteristics. The protein may be isolated or purified away from some or most of the proteins and compounds with which it is normally associated in its wild type host, and thus may be substantially pure. An isolated protein is unaccompanied by at least some of the material with which it is normally associated in its natural state, preferably constituting at least about 0.5%, more preferably at least about 5% by weight of the total protein in a given sample. A substantially pure protein comprises at least about 75% by weight of the total protein, with at least about 80% being preferred, and at least about 90% being particularly preferred. The definition includes the production of a soft tissue sarcoma cancer protein from one organism in a different organism or host cell. Alternatively, the protein may be made at a significantly higher concentration than is normally seen, through the use of an inducible promoter or high expression promoter, such that the protein is made at increased concentration levels. Alternatively, the protein may be in a form not normally found in nature, as in the addition of an epitope tag or amino acid substitutions, insertions and deletions, as discussed below.

[0116] In one embodiment, the soft tissue sarcoma cancer sequences are nucleic acids. Soft tissue sarcoma cancer sequences are useful in a variety of applications, including diagnostic applications, which will detect naturally occurring nucleic acids, as well as screening applications; e.g., biochips comprising nucleic acid probes to the cancer sequences can be generated. In the broadest sense, then, by “nucleic acid” or “oligonucleotide” or grammatical equivalents herein means at least two nucleotides covalently linked together. A nucleic acid of the present invention will generally contain phosphodiester bonds, although in some cases, nucleic acid analogs are included that may have alternate backbones, comprising, e.g., phosphoramidate, phosphorothioate, phosphorodithioate, or O-methylphophoroamidite linkages (see Eckstein (1992) Oligonucleotides and Analogues: A Practical Approach, Oxford Univ. Press); and peptide nucleic acid backbones and linkages. Other analog nucleic acids include those with positive backbones; non-ionic backbones, and non-ribose backbones, including those described in U.S. Pat. Nos. 5,235,033 and 5,034,506, and Chapters 6 and 7 in Sanghvi and Cook (eds. 1994) Carbohydrate Modifications in Antisense Research ACS Symposium Series 580. Nucleic acids containing one or more carbocyclic sugars are also included within one definition of nucleic acids. Modifications of the ribose-phosphate backbone may be done for a variety of reasons, e.g., to increase the stability and half-life of such molecules in physiological environments or as probes on a biochip.

[0117] Nucleic acid analogs may find use in the present invention. In addition, mixtures of naturally occurring nucleic acids and analogs can be made; alternatively, mixtures of different nucleic acid analogs, and mixtures of naturally occurring nucleic acids and analogs may be made.

[0118] Particularly useful are peptide nucleic acids (PNA) which includes peptide nucleic acid analogs. These backbones are substantially non-ionic under neutral conditions, in contrast to the highly charged phosphodiester backbone of naturally occurring nucleic acids. This results in two advantages. First, the PNA backbone exhibits improved hybridization kinetics. PNAs have larger changes in the melting temperature (Tₘ) for mismatched versus perfectly matched basepairs. DNA and RNA typically exhibit a 2-4° C. drop in Tₘ for an internal mismatch. With the non-ionic PNA backbone, the drop is closer to 7-9° C. Similarly, due to their non-ionic nature, hybridization of the bases attached to these backbones is relatively insensitive to salt concentration. In addition, PNAs are not degraded by cellular enzymes, and thus can be more stable.

[0119] The nucleic acids may be single stranded or double stranded, as specified, or contain portions of both double stranded or single stranded sequence. The depiction of a single strand also defines the sequence of a complementary strand; thus the sequences described herein also provide the complement of the sequence. The nucleic acid may be DNA, both genomic and cDNA, RNA, or a hybrid, where the nucleic acid may contain combinations of deoxyribo- and ribo-nucleotides, and combinations of bases, including uracil, adenine, thymine, cytosine, guanine, inosine, xanthine hypoxanthine, isocytosine, isoguanine, etc. As used herein, the term “nucleoside” includes nucleotides and nucleoside and nucleotide analogs, and modified nucleosides such as amino modified nucleosides. In addition, “nucleoside” includes non-naturally occurring analog structures. Thus, e.g., the individual units of a peptide nucleic acid, each containing a base, are referred to herein as a nucleoside.

[0120] A soft tissue sarcoma cancer sequence can be initially identified by substantial nucleic acid and/or amino acid sequence homology to the soft tissue sarcoma cancer sequences outlined herein. Such homology can be based upon the overall nucleic acid or amino acid sequence, and is generally determined as outlined below, using either homology programs or hybridization conditions.

[0121] For identifying soft tissue sarcoma cancer-associated sequences, the cancer screen typically includes comparing genes identified in cancer cells with genes identified in controls. Samples of normal tissue and tissue associated with soft tissue sarcoma cancer are applied to biochips comprising nucleic acid probes. The samples are first microdissected, if applicable, and treated for the preparation of mRNA. Suitable biochips are commercially available, e.g., from Affymetrix. Gene expression profiles as described herein are generated and the data analyzed.

[0122] In one embodiment, the genes showing changes in expression as between normal and disease states are compared to genes expressed in other normal tissues, including, but not limited to lung, heart, brain, liver, breast, kidney, muscle, prostate, small intestine, large intestine, spleen, bone, and placenta. In another embodiment, those genes identified during the cancer screen that are expressed in significant amount in other tissues are removed from the profile, although in some embodiments, this is not necessary. That is, when screening for drugs, it is usually preferable that the target be disease specific, to minimize possible side effects.

[0123] In one embodiment, soft tissue sarcoma cancer sequences are those that are up-regulated in soft tissue sarcoma cancer disorders; that is, the expression of these genes is higher in the disease tissue as compared to normal tissue. “Up-regulation” as used herein means at least about a two-fold change, preferably at least about a three fold change, with at least about five-fold or higher being preferred. Accession numbers herein are for the GenBank sequence database and the sequences of the accession numbers are hereby expressly incorporated by reference. See, e.g., Benson, et al. (1998) Nuc. Acids Res. 26:1-7. Sequences are also available in other databases, e.g., European Molecular Biology Laboratory (EMBL) and DNA Database of Japan (DDBJ). In addition, most genes were found to be expressed in a limited amount or not at all in heart, brain, lung, liver, breast, kidney, prostate, small intestine, and spleen.

[0124] In another embodiment, soft tissue sarcoma cancer sequences are those that are down-regulated in the soft tissue sarcoma cancer disorder; that is, the expression of these genes is lower in cancer tissue as compared to normal tissue. “Down-regulation” as used herein means at least about a two-fold change, preferably at least about a three fold change, with at least about five-fold or higher being preferred.

[0125] Informatics

[0126] The ability to identify genes that undergo changes in expression with time during soft tissue sarcoma cancer can additionally provide high-resolution, high-sensitivity datasets which can be used in the areas of diagnostics, therapeutics, drug development, biosensor development, and other related areas. For example, the expression profiles can be used in diagnostic or prognostic evaluation of patients with soft tissue sarcoma cancer-associated disease. Or as another example, subcellular toxicological information can be generated to better direct drug structure and activity correlation. See Anderson (Jun. 11-12, 1998) Pharmaceutical Proteomics: Targets, Mechanism, and Function, paper presented at the IBC Proteomics conference, Coronado, Calif. Subcellular toxicological information can also be utilized in a biological sensor device to predict the likely toxicological effect of chemical exposures and likely tolerable exposure thresholds (see, U.S. Pat. No. 5,811,231). Similar advantages accrue from datasets relevant to other biomolecules and bioactive agents (e.g., nucleic acids, saccharides, lipids, drugs, and the like).

[0127] Thus, in another embodiment, the present invention provides a database that includes at least one set of data assay data. The data contained in the database is acquired, e.g., using array analysis either singly or in a library fornat. The database can be in a form in which data can be maintained and transmitted, but is preferably an electronic database. The electronic database of the invention can be maintained on an electronic device allowing for the storage of and access to the database, such as a personal computer, but is preferably distributed on a wide area network, such as the World Wide Web.

[0128] The focus of the present section on databases that include peptide sequence data is for clarity of illustration only. Similar databases can be assembled for assay data acquired using an assay of the invention.

[0129] The compositions and methods for identifying and/or quantitating the relative and/or absolute abundance of a variety of molecular and macromolecular species from a biological sample exhibiting soft tissue sarcoma cancer, e.g., the identification of soft tissue sarcoma cancer-associated sequences described herein, provide an abundance of information, which can be correlated with pathological conditions, predisposition to disease, drug testing, therapeutic monitoring, gene-disease causal linkages, identification of correlates of immunity and physiological status, among others. Although the data generated from the assays of the invention is suited for manual review and analysis, prior data processing using high-speed computers may be utilized.

[0130] An array of methods for indexing and retrieving biomolecular information is available. For example, U.S. Pat. Nos. 6,023,659 and 5,966,712 disclose a relational database system for storing biomolecular sequence information in a manner that allows sequences to be catalogued and searched according to one or more protein function hierarchies. U.S. Pat. No. 5,953,727 discloses a relational database having sequence records containing information in a format that allows a collection of partial-length DNA sequences to be catalogued and searched according to association with one or more sequencing projects for obtaining full-length sequences from the collection of partial length sequences. U.S. Pat. No. 5,706,498 discloses a gene database retrieval system for making a retrieval of a gene sequence similar to a sequence data item in a gene database based on the degree of similarity between a key sequence and a target sequence. U.S. Pat. No. 5,538,897 discloses a method using mass spectroscopy fragmentation patterns of peptides to identify amino acid sequences in computer databases by comparison of predicted mass spectra with experimentally-derived mass spectra using a closeness-of-fit measure. U.S. Pat. No. 5,926,818 discloses a multi-dimensional database comprising a functionality for multi-dimensional data analysis described as on-line analytical processing (OLAP), which entails the consolidation of projected and actual data according to more than one consolidation path or dimension. U.S. Pat. No. 5,295,261 reports a hybrid database structure in which the fields of each database record are divided into two classes, navigational and informational data, with navigational fields stored in a hierarchical topological map which can be viewed as a tree structure or as the merger of two or more such tree structures. See also Mount (2001) Bioinformatics: Sequence and Genome Analysis CSH Press, NY; Durbin, et al. (eds. 1999) Biological Sequence Analysis: Probabilistic Models of Proteins and Nucleic Acids Cambridge Univ. Press; Baxevanis and Oeullette (eds. 1998) Bioinformatics: A Practical Guide to the Analysis of Genes and Proteins (2d ed.) Wiley-Liss; Rashidi and Buehler (1999) Bioinformatics: Basic Applications in Biological Science and Medicine CRC Press; Setubal, et al. (eds. 1997) Introduction to Computational Molecular Biology Brooks/Cole; Misener and Krawetz (eds. 2000) Bioinformatics: Methods and Protocols Humana Press; Higgins and Taylor (eds. 2000) Bioinformatics: Sequence, Structure, and Databanks: A Practical Approach Oxford Univ. Press; Brown (2001) Bioinformatics: A Biologist's Guide to Biocomputing and the Internet Eaton Pub.; Han and Kamber (2000) Data Mining: Concepts and Techniques Kaufinann Pub.; and Waterman (1995) Introduction to Computational Biology: Maps, Sequences, and Genomes Chap and Hall.

[0131] The present invention provides a computer database comprising a computer and software for storing in computer-retrievable form assay data records cross-tabulated, e.g., with data specifying the source of the target-containing sample from which each sequence specificity record was obtained.

[0132] In an exemplary embodiment, at least one of the sources of target-containing sample is from a control tissue sample known to be free of pathological disorders. In a variation, at least one of the sources is a known pathological tissue specimen, e.g., a neoplastic lesion or another tissue specimen to be analyzed for soft tissue sarcoma cancer. In another variation, the assay records cross-tabulate one or more of the following parameters for each target species in a sample: (1) a unique identification code, which can include, e.g., a target molecular structure and/or characteristic separation coordinate (e.g., electrophoretic coordinates); (2) sample source; and (3) absolute and/or relative quantity of the target species present in the sample.

[0133] The invention also provides for the storage and retrieval of a collection of target data in a computer data storage apparatus, which can include magnetic disks, optical disks, magneto-optical disks, DRAM, SRAM, SGRAM, SDRAM, RDRAM, DDR RAM, magnetic bubble memory devices, and other data storage devices, including CPU registers and on-CPU data storage arrays. Typically, the target data records are stored as a bit pattern in an array of magnetic domains on a magnetizable medium or as an array of charge states or transistor gate states, such as an array of cells in a DRAM device (e.g., each cell comprised of a transistor and a charge storage area, which may be on the transistor). In one embodiment,. the invention provides such storage devices, and computer systems built therewith, comprising a bit pattern encoding a protein expression fingerprint record comprising unique identifiers for at least 10 target data records cross-tabulated with target source.

[0134] When the target is a peptide or nucleic acid, the invention preferably provides a method for identifying related peptide or nucleic acid sequences, comprising performing a computerized comparison between a peptide or nucleic acid sequence assay record stored in or retrieved from. a computer storage device or database and at least one other sequence. The comparison can include a sequence analysis or comparison algorithm or computer program embodiment thereof (e.g., FASTA, TFASTA, GAP, BESTFIT) and/or the comparison may be of the relative amount of a peptide or nucleic acid sequence in a pool of sequences determined from a polypeptide or nucleic acid sample of a specimen.

[0135] The invention also may provide a magnetic disk, such as an IBM-compatible (DOS, Windows, Windows95/98/2000, Windows NT, OS/2) or other format (e.g., Linux, SunOS, Solaris, AIX, SCO Unix, VMS, MV, Macintosh, etc.) floppy diskette or hard (fixed, Winchester) disk drive, comprising a bit pattern encoding data from an assay of the invention in a file format suitable for retrieval and processing in a computerized sequence analysis, comparison, or relative quantitation method.

[0136] The invention also provides a network, comprising a plurality of computing devices linked via a data link, such as an Ethernet cable (coax or 10BaseT), telephone line, ISDN line, wireless network, optical fiber, or other suitable signal transmission medium, whereby at least one network device (e.g., computer, disk array, etc.) comprises a pattern of magnetic domains (e.g., magnetic disk) and/or charge domains (e.g., an array of DRAM cells) composing a bit pattern encoding data acquired from an assay of the invention.

[0137] The invention also provides a method for transmitting assay data that includes generating an electronic signal on an electronic communications device, such as a modem, ISDN terminal adapter, DSL, cable modem, ATM switch, or the like, wherein the signal includes (in native or encrypted format) a bit pattern encoding data from an assay or a database comprising a plurality of assay results obtained by the method of the invention.

[0138] In one embodiment, the invention provides a computer system for comparing a query target to a database containing an array of data structures, such as an assay result obtained by the method of the invention, and ranking database targets based on the degree of identity and gap weight to the target data. A central processor is initialized to load and execute the computer program for alignment and/or comparison of the assay results. Data for a query target is entered into the central processor via an I/O device. Execution of the computer program results in the central processor retrieving the assay data from the data file, which comprises a binary description of an assay result.

[0139] The target data or record and the computer program can be transferred to secondary memory, which is typically random access memory (e.g., DRAM, SRAM, SGRAM, or SDRAM). Targets are ranked according to the degree of correspondence between a selected assay characteristic (e.g., binding to a selected affinity moiety) and the same characteristic of the query target and results are output via an I/O device. For example, a central processor can be a conventional computer (e.g., Intel Pentium, PowerPC, Alpha, PA-8000, SPARC, MIPS 4400, MIPS 10000, VAX, etc.); a program can be a commercial or public domain molecular biology software package (e.g., UWGCG Sequence Analysis Software, Darwin); a data file can be an optical or magnetic disk, a data server, a memory device (e.g., DRAM, SRAM, SGRAM, SDRAM, EPROM, bubble memory, flash memory, etc.); an I/O device can be a terminal comprising a video display and a keyboard, a modem, an ISDN terminal adapter, an Ethernet port, a punched card reader, a magnetic strip reader, or other suitable I/O device.

[0140] The invention also provides the use of a computer system, such as that described above, which comprises: (1) a computer; (2) a stored bit pattern encoding a collection of peptide sequence specificity records obtained by the methods of the invention, which may be stored in the computer; (3) a comparison target, such as a query target; and (4) a program for alignment and comparison, typically with rank-ordering of comparison results on the basis of computed similarity values.

[0141] Soft tissue Sarcoma Cancer-associated Sequences

[0142] Soft tissue sarcoma cancer proteins of the present invention may be classified as secreted proteins, transmembrane proteins, or intracellular proteins. In one embodiment, the soft tissue sarcoma cancer protein is an intracellular protein. Intracellular proteins may be found in the cytoplasm and/or in the nucleus or associated with the intracellular side of the plasma membrane. Intracellular proteins are involved in all aspects of cellular function and replication (including, e.g., signaling pathways); aberrant expression of such proteins often results in unregulated or disregulated cellular processes. See, e.g., Alberts, et al. (eds. 1994) Molecular Biology of the Cell (3d ed.) Garland. For example, many intracellular proteins have enzymatic activity such as protein kinase activity, protein phosphatase activity, protease activity, nucleotide cyclase activity, polymerase activity, and the like. Intracellular proteins also serve as docking proteins that are involved in organizing complexes of proteins, or targeting proteins to various subcellular localizations, and are involved in maintaining the structural integrity of organelles.

[0143] An increasingly appreciated concept in characterizing proteins is the presence in the proteins of one or more motifs for which defined functions have been attributed. In addition to the highly conserved sequences found in the enzymatic domain of proteins, highly conserved sequences have been identified in proteins that are involved in protein-protein interaction. For example, Src-homology-2 (SH2) domains bind tyrosine-phosphorylated targets in a sequence dependent manner. PTB domains, which are distinct from SH2 domains, also bind tyrosine phosphorylated targets. SH3 domains bind to proline-rich targets. In addition, PH domains, tetratricopeptide repeats and WD domains to name only a few, have been shown to mediate protein-protein interactions. Some of these may also be involved in binding to phospholipids or other second messengers. These motifs can be identified on the basis of amino acid sequence; thus, an analysis of the sequence of proteins may provide insight into both the enzymatic potential of the molecule and/or molecules with which the protein may associate. One useful database is Pfam (protein families), which is a large collection of multiple sequence alignments and hidden Markov models covering many common protein domains. Versions are available via the internet from Washington University in St. Louis, the Sanger Center in England, and the Karolinska Institute in Sweden. See, e.g., Bateman, et al. (2000) Nuc. Acids Res. 28:263-266; Sonnhammer, et al. (1997) Proteins 28:405-420; Bateman, et al. (1999) Nuc. Acids Res. 27:260-262; and Sonnhammer, et al. (1998) Nuc. Acids Res. 26:320-322.

[0144] In another embodiment, the cancer sequences are transmembrane proteins. Transmembrane proteins are molecules that span a phospholipid bilayer of a cell. They may have an intracellular domain, an extracellular domain, or both. The intracellular domains of such proteins may have a number of functions including those already described for intracellular proteins. For example, the intracellular domain may have enzymatic activity and/or may serve as a binding site for additional proteins. Frequently the intracellular domain of transmembrane proteins serves both roles. For example certain receptor tyrosine kinases have both protein kinase activity and SH2 domains. In addition, autophosphorylation of tyrosines on the receptor molecule itself, creates binding sites for additional SH2 domain containing proteins.

[0145] Transmembrane proteins may contain from one to many transmembrane domains. For example, receptor tyrosine kinases, certain cytokine receptors, receptor guanylyl cyclases and receptor serine/threonine protein kinases contain a single transmembrane domain. However, various other proteins including channels and adenylyl cyclases contain numerous transmembrane domains. Many important cell surface receptors such as G protein coupled receptors (GPCRs) are classified as “seven transmembrane domain” proteins, as they contain 7 membrane spanning regions. Characteristics of transmembrane domains include approximately 20 consecutive hydrophobic amino acids that may be followed or flanked by charged amino acids. Therefore, upon analysis of the amino acid sequence of a particular protein, the localization and number of transmembrane domains within the protein may be predicted. Important transmembrane protein receptors include, but are not limited to the insulin receptor, insulin-like growth factor receptor, human growth hormone receptor, glucose transporters, transferrin receptor, epidermal growth factor receptor, low density lipoprotein receptor, epidermal growth factor receptor, leptin receptor, and interleukin receptors, e.g., IL-1 receptor, IL-2 receptor, etc.

[0146] The extracellular domains of transmembrane proteins are diverse; however, conserved motifs are found repeatedly among various extracellular domains. Conserved structure and/or functions have been ascribed to different extracellular motifs. Many extracellular domains are involved in binding to other molecules. In one aspect, extracellular domains are found on receptors. Factors that bind the receptor domain include circulating ligands, which may be peptides, proteins, or small molecules such as adenosine and the like. For example, growth factors such as EGF, FGF, and PDGF are circulating growth factors that bind to their cognate receptors to initiate a variety of cellular responses. Other factors include cytokines, mitogenic factors, neurotrophic factors and the like. Extracellular domains also bind to cell-associated molecules. In this respect, they mediate cell-cell interactions. Cell-associated ligands can be tethered to the cell, e.g., via a glycosylphosphatidylinositol (GPI) anchor, or may themselves be transmembrane proteins. Extracellular domains also associate with the extracellular matrix and contribute to the maintenance of the cell structure.

[0147] Soft tissue sarcoma cancer proteins that are transmembrane are useful in the present invention as they are readily accessible targets for immunotherapeutics, as are described herein. In addition, as outlined below, transmembrane proteins can be also useful in imaging modalities. Antibodies may be used to label such readily accessible proteins in situ. Alternatively, antibodies can also label intracellular proteins, in which case samples are typically permeabilized to provide access to intracellular proteins. In addition, some membrane proteins can be processed to release a soluble protein, or to expose a residual fragment. Released soluble proteins may be useful diagnostic markers, processed residual protein fragments may be useful markers of neoplastic disease.

[0148] A transmembrane protein can be made soluble by removing transmembrane sequences, e.g., through recombinant methods. Furthermore, transmembrane proteins that have been made soluble can be made to be secreted through recombinant means by adding an appropriate signal sequence.

[0149] In another embodiment, the cancer proteins are secreted proteins; the secretion of which can be either constitutive or regulated. These proteins have a signal peptide or signal sequence that targets the molecule to the secretory pathway. Secreted proteins are involved in numerous physiological events; e.g., if circulating, they often serve to transmit signals to various other cell types. Secreted protein may function in an autocrine manner (acting on the cell that secreted the factor), a paracrine manner (acting on cells in close proximity to the cell that secreted the factor), an endocrine manner (acting on cells at a distance, e.g., secretion into the blood stream), or exocrine (secretion, e.g., through a duct or to adjacent epithelial surface as sweat glands, sebaceous glands, pancreatic ducts, lacrimal glands, mammary glands, wax producing glands of the ear, etc.). Thus secreted molecules often find use in modulating or altering numerous aspects of physiology. Soft tissue sarcoma cancer proteins that are secreted proteins are included in the present invention as they serve as good targets for diagnostic markers, e.g., for blood, plasma, serum, or stool tests. Those which are enzymes may be antibody or small molecule targets. Others may be useful as vaccine targets, e.g., via CTL mechanisms.

[0150] Soft Tissue Sarcoma Cancer-associated Riucleic Acids

[0151] A soft tissue sarcoma cancer sequence is typically initially identified by substantial nucleic acid and/or amino acid sequence homology or linkage to the cancer sequences outlined herein. Such homology can be based upon the overall nucleic acid or amino acid sequence, and is generally determined as outlined below, using either homology programs or hybridization conditions. Typically, linked sequences on a mRNA are found on the same molecule.

[0152] As detailed elsewhere, percent identity can be determined using an algorithm such as BLAST. One method utilizes the BLASTN module of WU-BLAST-2 set to the default parameters, with overlap span and overlap fraction set to 1 and 0.125, respectively. Alignment may include the introduction of gaps in the sequences to be aligned. In addition, for sequences which contain either more or fewer nucleotides than those of the nucleic acids described, the percentage of homology may be determined based on the number of homologous nucleosides in relation to the total number of nucleosides. Thus, e.g., homology of sequences shorter than those of the sequences identified will be determined using the number of nucleosides in the shorter sequence.

[0153] In one embodiment, the nucleic acid homology is determined through hybridization studies. Thus, e.g., nucleic acids which hybridize under high stringency to a nucleic acid of Tables 1A-11C, or its complement, or is also found on naturally occurring mRNAs is considered a soft tissue sarcoma cancer sequence. In another embodiment, less stringent hybridization conditions are used; e.g., moderate or low stringency conditions may be used; see Ausubel, supra, and Tijssen, supra.

[0154] The soft tissue sarcoma cancer nucleic acid sequences of the invention, e.g., the sequences in Tables 1A-11C, can be fragments of larger genes, e.g., they are nucleic acid segments. “Genes” in this context includes coding regions, non-coding regions, and mixtures of coding and non-coding regions. Accordingly, using the sequences provided herein, extended sequences, in either direction, of the cancer genes can be obtained, using techniques well known for cloning either longer sequences or the full length sequences; see Ausubel, et al., supra. Much can be done by informatics and many sequences can be clustered to include multiple sequences, e.g., systems such as UniGene.

[0155] Once the soft tissue sarcoma cancer nucleic acid is identified, it can be cloned and, if necessary, its constituent parts recombined to form the entire cancer nucleic acid coding regions or the entire mRNA sequence. Once isolated from its natural source, e.g., contained within a plasmid or other vector or excised therefrom as a linear nucleic acid segment, the recombinant cancer nucleic acid can be further-used as a probe to identify and isolate other soft tissue sarcoma cancer nucleic acids, e.g., extended coding regions. It can also be used as a “precursor” nucleic acid to make modified or variant cancer nucleic acids and proteins.

[0156] The soft tissue sarcoma cancer nucleic acids of the present invention are used in several ways. In one embodiment, nucleic acid probes to the cancer nucleic acids are made and attached to biochips to be used in screening and diagnostic methods, as outlined below, or for administration, e.g., for gene therapy, vaccine, and/or antisense applications. Alternatively, cancer nucleic acids that include coding regions of cancer proteins can be put into expression vectors for the expression of cancer proteins, again for screening purposes or for administration to a patient.

[0157] In another embodiment, nucleic acid probes to soft tissue sarcoma cancer nucleic acids (both the nucleic acid sequences outlined in the figures and/or the complements thereof) are made. The nucleic acid probes attached to the biochip are designed to be substantially complementary to cancer nucleic acids, e.g., the target sequence (either the target sequence of the sample or to other probe sequences, e.g., in sandwich assays), such that hybridization of the target sequence and the probes of the present invention occurs. As outlined below, this complementarity need not be perfect; there may be a number of base pair mismatches which will interfere with hybridization between the target sequence and the single stranded nucleic acids of the present invention. However, if the number of mutations is so great that no hybridization can occur under even the least stringent of hybridization conditions, the sequence is not a complementary target sequence. Thus, by “substantially complementary” herein is meant that the probes are sufficiently complementary to the target sequences to hybridize under normal reaction conditions, particularly high stringency conditions, as outlined herein.

[0158] A nucleic acid probe is generally single stranded but can be partially single and partially double stranded. The strandedness of the probe is dictated by the structure, composition, and properties of the target sequence. In general, the nucleic acid probes range from about 8-100 bases long, with from about 10-80 bases being preferred, and from about 30-50 bases being particularly preferred. That is, generally whole genes are not used. In some embodiments, much longer nucleic acids can be used, up to hundreds of bases.

[0159] In one embodiment, more than one probe per sequence is used, with either overlapping probes or probes to different sections of the target being used. That is, two, three, four, or more probes, with three being preferred, are used to build in a redundancy for a particular target. The probes can be overlapping (e.g., have some sequence in common), or separate. In some cases, PCR primers may be used to amplify signal for higher sensitivity.

[0160] Nucleic acids can be attached or immobilized to a solid support in a wide variety of ways. By “immobilized” and grammatical equivalents herein is meant the association or binding between the nucleic acid probe and the solid support is sufficient to be stable under the conditions of binding, washing, analysis, and removal as outlined. The binding can typically be covalent or non-covalent. By “non-covalent binding” and grammatical equivalents herein is meant one or more of electrostatic, hydrophilic, and hydrophobic interactions. Included in non-covalent binding is the covalent attachment of a molecule, such as, streptavidin to the support and the non-covalent binding of the biotinylated probe to the streptavidin. By “covalent binding” and grammatical equivalents herein is meant that the two moieties, the solid support and the probe, are attached by at least one bond, including sigma bonds, pi bonds and coordination bonds. Covalent bonds can be formed directly between the probe and the solid support or can be formed by a cross linker or by inclusion of a specific reactive group on either the solid support or the probe or both molecules. Immobilization may also involve a combination of covalent and non-covalent interactions.

[0161] In general, the probes are attached to the biochip in a wide variety of ways. As described herein, the nucleic acids can either be synthesized first, with subsequent attachment to the biochip, or can be directly synthesized on the biochip.

[0162] The biochip comprises a suitable solid substrate. By “substrate” or “solid support” or other grammatical equivalents herein is meant a material that can be modified to contain discrete individual sites appropriate for the attachment or association of the nucleic acid probes and is amenable to at least one detection method. Often, the substrate may contain discrete individual sites appropriate for individual partitioning and identification. The number of possible substrates is very large, and includes, but is not limited to, glass and modified or functionalized glass, plastics (including acrylics, polystyrene and copolymers of styrene and other materials, polypropylene, polyethylene, polybutylene, polyurethanes, TeflonJ, etc.), polysaccharides, nylon or nitrocellulose, resins, silica or silica-based materials including silicon and modified silicon, carbon, metals, inorganic glasses, plastics, etc. In general, the substrates allow optical detection and do not appreciably fluoresce. See WO 00/55627.

[0163] Generally the substrate is planar, although other configurations of substrates may be used as well. For example, the probes may be placed on the inside surface of a tube, for flow-through sample analysis to minimize sample volume. Similarly, the substrate may be flexible, such as a flexible foam, including closed cell foams made of particular plastics.

[0164] In one embodiment, the surface of the biochip and the probe may be derivatized with chemical functional groups for subsequent attachment of the two. Thus, e.g., the biochip is derivatized with a chemical functional group including, but not limited to, amino groups, carboxy groups, oxo groups and thiol groups, with amino groups being particularly preferred. Using these functional groups, the probes can be attached using functional groups on the probes. For example, nucleic acids containing amino groups can be attached to surfaces comprising amino groups, e.g., using available linkers; e.g., homo-or hetero-bifunctional linkers as are well known (see 1994 Pierce Chemical Company catalog, technical section on cross-linkers, pages 155-200). In addition, in some cases, additional linkers, such as alkyl groups (including substituted and heteroalkyl groups) may be used.

[0165] In this embodiment, oligonucleotides are synthesized, and then attached to the surface of the solid support. Either the 5′ or 3′ terminus may be attached to the solid support, or attachment may be via an internal nucleoside. In another embodiment, the immobilization to the solid support may be very strong, yet non-covalent. For example, biotinylated oligonucleotides can be made, which bind to surfaces covalently coated with streptavidin, resulting in attachment.

[0166] Alternatively, the oligonucleotides may be synthesized on the surface. For example, photoactivation techniques utilizing photopolymerization compounds and techniques are used. In one embodiment, the nucleic acids can be synthesized in situ, using well known photolithographic techniques, such as those described in WO 95/25116; WO 95/35505; U.S. Pat. Nos. 5,700,637 and 5,445,934; and references cited within, all of which are expressly incorporated by reference; these methods of attachment form the basis of the Affymetrix GENECHIP® (DNA microchip array) technology.

[0167] Often, amplification-based assays are performed to measure the expression level of soft tissue sarcoma cancer-associated sequences. These assays are typically performed in conjunction with reverse transcription. In such assays, a soft tissue sarcoma cancer-associated nucleic acid sequence acts as a template in an amplification reaction (e.g., Polymerase Chain Reaction, or PCR). In a quantitative amplification, the amount of amplification product will be proportional to the amount of template in the original sample. Comparison to appropriate controls provides a measure of the amount of soft tissue sarcoma cancer-associated RNA. Methods of quantitative amplification are well known. Detailed protocols for quantitative PCR are provided, e.g., in Innis, et al. (1990) PCR Protocols: A Guide to Methods and Applications Academic Press.

[0168] In some embodiments, a TAQMAN® (reagents for nucleic acid amplification) based assay is used to measure expression. TAQMAN® based assays use a fluorogenic oligonucleotide probe that contains a 5′ fluorescent dye and a 3′ quenching agent. The probe hybridizes to a PCR product, but cannot itself be extended due to a blocking agent at the 3′ end. When the PCR product is amplified in subsequent cycles, the 5′ nuclease activity of the polymerase, e.g., AMPLITAQ® (enzyme for diagnostic applications), results in the cleavage of the TAQMAN® probe. This cleavage separates the 5′ fluorescent dye and the 3′ quenching agent, thereby resulting in an increase in fluorescence as a function of amplification (see, e.g., literature provided by Perkin-Elmer).

[0169] Other suitable amplification methods include, but are not limited to, ligase chain reaction (LCR) (see Wu and Wallace (1989) Genomics 4:560-569, Landegren, et al. (1988) Science 241:1077-1080, and Barringer, et al. (1990) Gene 89:117-122), transcription amplification (Kwoh, et al. (1989) Proc. Nat'l Acad. Sci. USA 86:1173-1177), self-sustained sequence replication (Guatelli, et al. (1990) Proc. Nat'l Acad. Sci. USA 87:1874-1878), dot PCR, linker adapter PCR, etc.

[0170] Expression of Soft Tissue Sarcoma Cancer-associated Proteins from Nucleic Acids

[0171] In one embodiment, soft tissue sarcoma cancer nucleic acids, e.g., encoding soft tissue sarcoma cancer proteins are used to make a variety of expression vectors to express cancer proteins which can then be used in screening assays, as described below. Expression vectors and recombinant DNA technology are well known (see, e.g., Ausubel, supra, and Fernandez and Hoeffler (eds. 1999) Gene Expression Systems Academic Press) and are used to express proteins. The expression vectors may be either self-replicating extrachromosomal vectors or vectors which integrate into a host genome. Generally, these expression vectors include transcriptional and translational regulatory nucleic acid operably linked to the nucleic acid encoding the soft tissue sarcoma cancer protein. The term “control sequences” refers to DNA sequences used for the expression of an operably linked coding sequence in a particular host organism. Control sequences that are suitable for prokaryotes, e.g., include a promoter, optionally an operator sequence, and a ribosome binding site. Eukaryotic cells are known to utilize promoters, polyadenylation signals, and enhancers.

[0172] Nucleic acid is “operably linked” when it is placed into a functional relationship with another nucleic acid sequence. For example, DNA for a presequence or secretory leader is operably linked to DNA for a polypeptide if it is expressed as a preprotein that participates in the secretion of the polypeptide; a promoter or enhancer is operably linked to a coding sequence if it affects the transcription of the sequence; or a ribosome binding site is operably linked to a coding sequence if it is positioned so as to facilitate translation. Generally, “operably linked” means that the DNA sequences being linked are contiguous, and, in the case of a secretory leader, contiguous and in reading phase. However, enhancers do not have to be contiguous. Linking is typically accomplished by ligation at convenient restriction sites. If such sites do not exist, synthetic oligonucleotide adaptors or linkers are used in accordance with conventional practice. Transcriptional and translational regulatory nucleic acid will generally be appropriate to the host cell used to express the soft tissue sarcoma cancer protein; e.g., transcriptional and translational regulatory nucleic acid sequences from Bacillus are preferably used to express the soft tissue sarcoma cancer protein in Bacillus. Numerous types of appropriate expression vectors, and suitable regulatory sequences are known for a variety of host cells.

[0173] In general, transcriptional and translational regulatory sequences may include, but are not limited to, promoter sequences, ribosomal binding sites, transcriptional start and stop sequences, translational start and stop sequences, and enhancer or activator sequences. In another embodiment, the regulatory sequences include a promoter and transcriptional start and stop sequences.

[0174] Promoter sequences encode either constitutive or inducible promoters. The promoters may be either naturally occurring promoters or hybrid promoters. Hybrid promoters, which combine elements of more than one promoter, are also known, and are useful in the present invention.

[0175] An expression vector may comprise additional elements. For example, the expression vector may have two replication systems, thus allowing it to be maintained in two organisms, e.g., in mammalian or insect cells for expression and in a prokaryotic host for cloning and amplification. Furthermore, for integrating expression vectors, the expression vector contains at least one sequence homologous to the host cell genome, and preferably two homologous sequences which flank the expression construct. The integrating vector may be directed to a specific locus in the host cell by selecting the appropriate homologous sequence for inclusion in the vector. Constructs for integrating vectors are available. See, e.g., Fernandez and Hoeffler, supra; and Kitamura, et al. (1995) Proc. Nat'l Acad. Sci. USA 92:9146-9150.

[0176] In addition, in another embodiment, the expression vector contains a selectable marker gene to allow the selection of transformed host cells. Selection genes are available and will vary with the host cell used.

[0177] The soft tissue sarcoma cancer proteins of the present invention are produced by culturing a host cell transformed with an expression vector containing nucleic acid encoding a cancer protein, under the appropriate conditions to induce or cause expression of the cancer protein. Conditions appropriate for soft tissue sarcoma cancer protein expression will vary with the choice of the expression vector and the host cell, and will be easily ascertained through routine experimentation or optimization. For example, the use of constitutive promoters in the expression vector will require optimizing the growth and proliferation of the host cell, while the use of an inducible promoter requires the appropriate growth conditions for induction. In addition, in some embodiments, the timing of the harvest is important. For example, the baculoviral systems used in insect cell expression are lytic viruses, and thus harvest time selection can be crucial for product yield.

[0178] Appropriate host cells include yeast, bacteria, archaebacteria, fungi, and insect and animal cells, including mammalian cells. Of particular interest are Saccharomyces cerevisiae and other yeasts, E. coli, Bacillus subtilis, Sf9 cells, C129 cells, 293 cells, Neurospora, BHK, CHO, COS, HeLa cells, HUVEC (human umbilical vein endothelial cells), THP1 cells (a macrophage cell line), and various other human cells and cell lines.

[0179] In one embodiment, the soft tissue sarcoma cancer proteins are expressed in mammalian cells. Mammalian expression systems may be used, and include retroviral and adenoviral systems. One expression vector system is a retroviral vector system such as is generally described in PCT/US97/01019 and PCT/US97/01048. Of particular use as mammalian promoters are the promoters from mammalian viral genes, since the viral genes are often highly expressed and have a broad host range. Examples include the SV40 early promoter, mouse mammary tumor virus LTR promoter, adenovirus major late promoter, herpes simplex virus promoter, and the CMV promoter (see, e.g., Fernandez and Hoeffler, supra). Typically, transcription termination and polyadenylation sequences recognized by mammalian cells are regulatory regions located 3′ to the translation stop codon and thus, together with the promoter elements, flank the coding sequence. Examples of transcription terminator and polyadenylation signals include those derived form SV40.

[0180] Methods of introducing exogenous nucleic acid into mammalian hosts, as well as other hosts, are available, and will vary with the host cell used. Techniques include dextran-mediated transfection, calcium phosphate precipitation, polybrene mediated transfection, protoplast fusion, electroporation, viral infection, encapsulation of the polynucleotide(s) in liposomes, and direct microinjection of the DNA into nuclei.

[0181] In one embodiment, soft tissue sarcoma cancer proteins are expressed in bacterial systems. Promoters from bacteriophage may also be used. In addition, synthetic promoters and hybrid promoters are also useful; e.g., the tac promoter is a hybrid of the trp and lac promoter sequences. Furthermore, a bacterial promoter can include naturally occurring promoters of non-bacterial origin that have the ability to bind bacterial RNA polymerase and initiate transcription. In addition to a functioning promoter sequence, an efficient ribosome binding site is desirable. The expression vector may also include a signal peptide sequence that provides for secretion of the soft tissue sarcoma cancer protein in bacteria. The protein is either secreted into the growth media (gram-positive bacteria) or into the periplasmic space, located between the inner and outer membrane of the cell (gram-negative bacteria). The bacterial expression vector may also include a selectable marker gene to allow for the selection of bacterial strains that have been transformed. Suitable selection genes include genes which render the bacteria resistant to drugs such as ampicillin, chloramphenicol, erythromycin, kanamycin, neomycin, and tetracycline. Selectable markers also include biosynthetic genes, such as those in the histidine, tryptophan, and leucine biosynthetic pathways. These components are assembled into expression vectors. Expression vectors for bacteria include vectors for Bacillus subtilis, E. coli, Streptococcus cremoris, and Streptococcus lividans, among others (e.g., Fernandez and Hoeffler, supra). The bacterial expression vectors are transformed into bacterial host cells using techniques such as calcium chloride treatment, electroporation, and others.

[0182] In one embodiment, soft tissue sarcoma cancer proteins are produced in insect cells using, e.g., expression vectors for the transformation of insect cells, and in particular, baculovirus-based expression vectors.

[0183] In another embodiment, a soft tissue sarcoma cancer protein is produced in yeast cells. Yeast expression systems include expression vectors for Saccharomyces cerevisiae, Candida albicans and C. maltosa, Hansenula polymorpha, Kluyveromyces fragilis and K. lactis, Pichia guillerimondii and P. pastoris, Schizosaccharomyces pombe, and Yarrowia lipolytica.

[0184] The soft tissue sarcoma cancer protein may also be made as a fusion protein, e.g., for the creation of monoclonal antibodies, if the desired epitope is small, the soft tissue sarcoma cancer protein may be fused to a carrier protein to form an immunogen. Alternatively, the soft tissue sarcoma cancer protein may be made as a fusion protein to increase expression, or for other reasons. For example, when the soft tissue sarcoma cancer protein is a peptide, the nucleic acid encoding the peptide may be linked to another nucleic acid for expression purposes. Fusion with detection epitope tags can be made, e.g., with FLAG, His6, myc, HA, etc.

[0185] In one embodiment, the soft tissue sarcoma cancer protein is purified or isolated after expression. Soft tissue sarcoma cancer proteins may be isolated or purified in a variety of ways depending on what other components are present in the sample and the requirements for purified product. Standard purification methods include ammonium sulfate precipitations, electrophoretic, molecular, immunological, and chromatographic techniques, including ion exchange, hydrophobic, affinity, and reverse-phase HPLC chromatography, and chromatofocusing. For example, the cancer protein may be purified using a standard anti-cancer protein antibody column. Ultrafiltration and diafiltration techniques, in conjunction with protein concentration, are also useful. See, e.g., Walsh (2002) Proteins: Biochemistry and Biotechnology Wiley; Hardin, et al. (eds. 2001) Cloning, Gene Expression and Protein Purification Oxford Univ. Press; Wilson, et al. (eds. 2000) Encyclopedia of Separation Science Academic Press; and Scopes (1993) Protein Purification Springer-Verlag. The degree of purification necessary will vary depending on the use of the cancer protein. In some instances no purification will be necessary.

[0186] Once expressed and purified if necessary, the soft tissue sarcoma cancer proteins and nucleic acids are useful in a number of applications. They may be used as immunoselection reagents, as vaccine reagents, as screening agents, etc.

[0187] In one embodiment, the soft tissue sarcoma cancer nucleic acids, proteins, and antibodies of the invention are labeled. By “labeled” herein is meant that a compound has at least one element, isotope, or chemical compound attached to enable the detection of the compound. In general, labels fall into three classes: a) isotopic labels, which may be radioactive or heavy isotopes; b) immune labels, which may be antibodies, antigens, or epitope tags; and c) colored or fluorescent dyes. The labels may be incorporated into the cancer nucleic acids, proteins, and antibodies. For example, the label should be capable of producing, either directly or indirectly, a detectable signal. The detectable moiety may be a radioisotope, such as ³H, ¹⁴C, ³²P, 35S, or ¹²⁵I, a fluorescent or chemiluminescent compound, such as fluorescein isothiocyanate, rhodamine, or luciferin, or an enzyme, such as alkaline phosphatase, beta-galactosidase, or horseradish peroxidase. Methods are known for conjugating the antibody to the label. See, e.g., Hunter, et al. (1962) Nature 144:945; David, et al. (1974) Biochemistry 13:1014-1021; Pain, et al. (1981) J. Immunol. Meth. 40:219-230; and Nygren (1982) J. Histochem. and Cytochem. 30:407-412.

[0188] Accordingly, the present invention also provides soft tissue sarcoma cancer protein sequences. A cancer protein of the present invention may be identified in several ways. “Protein” in this sense includes proteins, polypeptides, and peptides. Nucleic acid sequences of the invention can be used to generate protein sequences, including cloning the entire gene and verifying its frame and amino acid sequence, or by comparing it to known sequences to search for homology to provide a frame, assuming the soft tissue sarcoma cancer protein has an identifiable motif or homology to some protein in the database being used. Generally, the nucleic acid sequences are input into a program that will search all three frames for homology. This is done in an embodiment using the following NCBI Advanced BLAST parameters. The program is blastx or blastn. The database is nr. The input data is as “Sequence in FASTA format”. The organism list is “none”. The “expect” is 10; the filter is default. The “descriptions” is 500, the “alignments” is 500, and the “alignment view” is pairwise. The “Query Genetic Codes” is standard (1). The matrix is BLOSUM62; gap existence cost is 11, per residue gap cost is 1; and the lambda ratio is .85 default. This results in the generation of a putative protein sequence.

[0189] Variants of of Soft Tissue Sarcoma Cancer-associated Proteins

[0190] Also included within one embodiment of soft tissue sarcoma cancer proteins are amino acid variants of the naturally occurring sequences, as determined herein. Preferably, the variants are preferably greater than about 75% homologous to the wild-type sequence, more preferably greater than about 80%, even more preferably greater than about 85%, and most preferably greater than 90%. In some embodiments the homology will be as high as about 93-95 or 98%. As for nucleic acids, homology in this context means sequence similarity or identity, with identity being preferred. This homology will be determined using standard techniques, as are outlined above for nucleic acid homologies.

[0191] Soft tissue sarcoma cancer proteins of the present invention may be shorter or longer than the wild type amino acid sequences. Thus, in one embodiment, included within the definition of soft tissue sarcoma cancer proteins are portions or fragments of the wild type sequences herein. In addition, as outlined above, the soft tissue sarcoma cancer nucleic acids of the invention may be used to obtain additional coding regions, and thus additional protein sequence.

[0192] In another embodiment, the soft tissue sarcoma cancer proteins are derivative or variant cancer proteins as compared to the wild-type sequence. That is, the derivative cancer peptide will often contain at least one amino acid substitution, deletion, or insertion, with amino acid substitutions being particularly useful at an appropriate position.

[0193] Also included within one embodiment of soft tissue sarcoma cancer proteins of the present invention are amino acid sequence variants. These variants typically fall into one or more of three classes: substitutional, insertional, or deletional variants. These variants ordinarily are prepared by site specific mutagenesis of nucleotides in the DNA encoding the cancer protein, using cassette or PCR mutagenesis or other appropriate techniques, to produce DNA encoding the variant, and thereafter expressing the DNA in recombinant cell culture as outlined above. However, variant cancer protein fragments having up to about 100-150 residues may be prepared by in vitro synthesis using established techniques. Amino acid sequence variants are characterized by the predetermined nature of the variation, a feature that sets them apart from naturally occurring allelic or interspecies variation of the cancer protein amino acid sequence. The variants typically exhibit the same qualitative biological activity as the naturally occurring analogue, although variants can also be selected which have modified characteristics.

[0194] While the site or region for introducing an amino acid sequence variation is predetermined, the mutation per se need not be predetermined. For example, in order to optimize the performance of a mutation at a given site, random mutagenesis may be conducted at the target codon or region and the expressed cancer variants screened for the optimal combination of desired activity. Techniques for making substitution mutations at predetermined sites in DNA having a known sequence are well known, e.g., M13 primer mutagenesis and PCR mutagenesis. Screening of the mutants is done using assays of cancer protein activities.

[0195] Amino acid substitutions are typically of single residues; insertions usually will be on the order of from about 1-20 amino acids, although considerably larger insertions may be tolerated. Deletions range from about 1-20 residues, although in some cases deletions may be much larger.

[0196] Substitutions, deletions, insertions or a combination thereof may be used to arrive at a final derivative. Generally these changes are done on a few amino acids to minimize the alteration of the molecule. However, larger changes may be tolerated in certain circumstances. When small alterations in the characteristics of the cancer protein are desired, substitutions are generally made in accordance with the amino acid substitution chart described.

[0197] The variants typically exhibit essentially the same qualitative biological activity and will elicit the same immune response as a naturally-occurring analog, although variants also are selected to modify the characteristics of cancer proteins as needed. Alternatively, the variant may be designed such that a biological activity of the cancer protein is altered. For example, glycosylation sites may be added, altered, or removed.

[0198] Substantial changes in function or immunological identity are made by selecting substitutions that are less conservative than those provided in the definition of “conservative substitution”. For example, substitutions may be made which more significantly affect: the structure of the polypeptide backbone in the area of the alteration, e.g., the alpha-helical or beta-sheet structure; the charge or hydrophobicity of the molecule at the target site; or the bulk of the side chain. The substitutions which in general are expected to produce the greatest changes in the polypeptide's properties are those in which (a) a hydrophilic sidechain, e.g., serine or threonine, is substituted for (or by) a hydrophobic sidechain, e.g., leucine, isoleucine, phenylalanine, valine, or alanine; (b) a cysteine or proline is substituted for (or by) another residue; (c) a residue having an electropositive side chain, e.g., lysine, arginine, or histidine, is substituted for (or by) an electronegative side chain, e.g., glutamic or aspartic acid; (d) a residue having a bulky side chain, e.g., phenylalanine, is substituted for (or by) one not having a side chain, e.g., glycine; or (e) a proline residue is incorporated or substituted, which changes the degree of rotational freedom of the peptidyl bond.

[0199] The variants typically exhibit a similar qualitative biological activity and will elicit the same immune response as the naturally-occurring analog, although variants also are selected to modify the characteristics of the soft tissue sarcoma cancer proteins as needed. Alternatively, the variant may be designed such that the biological activity of the cancer protein is altered. For example, glycosylation sites may be altered or removed.

[0200] Covalent modifications of these cancer polypeptides are included within the scope of this invention. One type of covalent modification includes reacting targeted amino acid residues of a cancer polypeptide with an organic derivatizing agent that is capable of reacting with selected side chains or the N-or C-terminal residues of a cancer polypeptide. Derivatization with bifunctional agents is useful, e.g., for crosslinking cancer polypeptides to a water-insoluble support matrix or surface for use in the method for purifying anti-cancer polypeptide antibodies or screening assays. Commonly used crosslinking agents include, e.g., 1,1-bis(diazoacetyl)-2-phenylethane, glutaraldehyde, N-hydroxysuccinimide esters, e.g., esters with 4-azidosalicylic acid, homobifunctional imidoesters, including disuccinimidyl esters such as 3,3′-dithiobis(succinimidylpropionate), bifunctional maleimides such as bis-N-maleimido-1,8-octane and agents such as methyl-3-[(p-azidophenyl)dithio]propioimidate.

[0201] Other modifications include deamidation of glutamine and asparagine residues to the corresponding glutamic and aspartic acid residues, respectively, hydroxylation of proline and lysine, phosphorylation of hydroxyl groups of serine, threonine, or tyrosine residues, methylation of the y-amino groups of lysine, arginine, and histidine side chains (e.g., pp. 79-86, Creighton (1992) Proteins: Structure and Molecular Properties Freeman), acetylation of the N-terminal amine, and amidation of a C-terminal carboxyl group.

[0202] Another type of covalent modification of a cancer polypeptide included within the scope of this invention comprises altering the native glycosylation pattern of the polypeptide. “Altering the native glycosylation pattern” is intended for purposes herein to mean deleting one or more carbohydrate moieties found in native sequence cancer polypeptide, and/or adding one or more glycosylation sites that are not present in the native sequence cancer polypeptide. Glycosylation patterns can be altered in many ways. Different cell types may be used to express cancer-associated sequences to exhibit different glycosylation patterns.

[0203] Addition of glycosylation sites to soft tissue sarcoma cancer polypeptides may also be accomplished by altering the amino acid sequence thereof. The alteration may be made, e.g., by the addition of, or substitution by, one or more serine or threonine residues to the native sequence cancer polypeptide (for O-linked glycosylation sites). The soft tissue sarcoma cancer amino acid sequence may optionally be altered through changes at the DNA level, particularly by mutating the DNA encoding the cancer polypeptide at preselected bases such that codons are generated that will translate into the desired amino acids.

[0204] Another means of increasing the number of carbohydrate moieties on the soft tissue sarcoma cancer polypeptide is by chemical or enzymatic coupling of glycosides to the polypeptide. See, e.g., WO 87/05330; and pp. 259-306 in Aplin and Wriston (1981) CRC Crit. Rev. Biochem.

[0205] Removal of carbohydrate moieties present on the soft tissue sarcoma cancer polypeptide may be accomplished chemically or enzymatically or by mutational substitution of codons encoding for amino acid residues that serve as targets for glycosylation. Chemical deglycosylation techniques are applicable. See, e.g., Sojar and Bahl (1987) Arch. Biochem. Biophys. 259:52-57; and Edge, et al. (1981) Anal. Biochem. 118:131-137. Enzymatic cleavage of carbohydrate moieties on polypeptides can be achieved by the use of a variety of endo- and exo-glycosidases. See, e.g., Thotakura, et al. (1987) Meth. Enzymol. 138:350-359.

[0206] Another type of covalent modification of soft tissue sarcoma cancer protein comprises linking the cancer polypeptide to one of a variety of nonproteinaceous polymers, e.g., polyethylene glycol, polypropylene glycol, or polyoxyalkylenes, in the manner set forth in U.S. Pat. Nos. 4,640,835; 4,496,689; 4,301,144; 4,670,417; 4,791,192;. or 4,179,337.

[0207] Soft tissue sarcoma cancer polypeptides of the present invention may also be modified in a way to form chimeric molecules comprising a cancer polypeptide fused to another, heterologous polypeptide or amino acid sequence. In one embodiment, such a chimeric molecule comprises a fusion of a cancer polypeptide with a tag polypeptide which provides an epitope to which an anti-tag antibody can selectively bind. The epitope tag is generally placed at the amino-or carboxyl-terminus of the soft tissue sarcoma cancer polypeptide. The presence of such epitope-tagged forms of a cancer polypeptide can be detected using an antibody against the tag polypeptide. Also, provision of the epitope tag enables the soft tissue sarcoma cancer polypeptide to be readily purified by affinity purification using an anti-tag antibody or another type of affinity matrix that binds to the epitope tag. In an alternative embodiment, the chimeric molecule may comprise a fusion of a cancer polypeptide with an immunoglobulin or a particular region of an immunoglobulin. For a bivalent form of the chimeric molecule, such a fusion could be to the Fc region of an IgG molecule.

[0208] Various tag polypeptides and their respective antibodies are available. Examples include poly-histidine (poly-his) or poly-histidine-glycine (poly-his-gly) tags; HIS6, and metal chelation tags, the flu HA tag polypeptide and its antibody 12CA5 (Field, et al. (1988) Mol. Cell. Biol. 8:2159-2165); the c-myc tag and the 8F9, 3C7, 6E10, G4, B7, and 9E10 antibodies thereto (Evan, et al. (1985) Mol. Cell. Biol. 5:3610-3616); and the Herpes Simplex virus glycoprotein D (gD) tag and its antibody (Paborsky, et al. (1990) Protein Engineering 3:547-553). Other tag polypeptides include the Flag-peptide (Hopp, et al. (1988) BioTechnology 6:1204-1210); the KT3 epitope peptide (Martin, et al. (1992) Science 255:192-194); tubulin epitope peptide (Skinner, et al. (1991) J. Biol. Chem. 266:15163-15166); and the T7 gene 10 protein peptide tag (Lutz-Freyermuth, et al. (1990) Proc. Nat'l Acad. Sci. USA 87:6393-6397).

[0209] Also included with an embodiment of soft tissue sarcoma cancer protein are other soft tissue sarcoma cancer proteins of the functional family, and counterpart cancer proteins from other organisms, which are cloned and expressed as outlined below. Thus, probe or degenerate polymerase chain reaction (PCR) primer sequences may be used to find other related cancer proteins from humans or other organisms. Particularly useful probe and/or PCR primer sequences include unique areas of the soft tissue sarcoma cancer nucleic acid sequence. PCR primers are from about 15-35 nucleotides in length, with from about 20-30 being preferred, and may contain inosine as needed. The conditions for the PCR reaction are well known. See, e.g., Innis, PCR Protocols, supra.

[0210] In addition, as is outlined herein, soft tissue sarcoma cancer proteins can be made that are longer than those encoded by the nucleic acids of the Tables, e.g., by the elucidation of extended sequences, the addition of epitope or purification tags, the addition of other fusion sequences, etc.

[0211] Soft tissue sarcoma cancer proteins may also be identified as being encoded by soft tissue sarcoma cancer nucleic acids. Thus, soft tissue sarcoma cancer proteins are encoded by nucleic acids that will hybridize to the sequences of the sequence listings, or their complements, as outlined herein.

[0212] Antibodies to Soft Tissue Sarcoma Cancer-associated Proteins

[0213] In one embodiment, when the soft tissue sarcoma cancer protein is to be used to generate antibodies, e.g., for immunotherapy or immunodiagnosis, the soft tissue sarcoma cancer protein should share at least one epitope or determinant with the full length protein. By “epitope” or “determinant” herein is typically meant a portion of a protein which will generate and/or bind an antibody or T-cell receptor in the context of MHC. Thus, in most instances, antibodies made to a smaller, e.g., fragment of, cancer protein will be able to bind to the full-length protein, particularly linear epitopes. In one embodiment, the epitope is unique; that is, antibodies generated to a unique epitope show little or no cross-reactivity. In another embodiment, the epitope is selected from a protein sequence set out in Tables 1A-11C.

[0214] Methods of preparing polyclonal antibodies exist (e.g., Coligan, supra; and Harlow and Lane, supra). Polyclonal antibodies can be raised in a mammal, e.g., by one or more injections of an immunizing agent and, if desired, an adjuvant. Typically, the immunizing agent and/or adjuvant will be injected in the mammal by multiple subcutaneous or intraperitoneal injections. The immunizing agent may include a protein encoded by a nucleic acid of the figures or fragment thereof or a fusion protein thereof. It may be useful to conjugate the immunizing agent to a protein known to be immunogenic in the mammal being immunized. Examples of such immunogenic proteins include but are not limited to keyhole limpet hemocyanin, serum albumin, bovine thyroglobulin, and soybean trypsin inhibitor. Examples of adjuvants which may be employed include Freund's complete adjuvant and MPL-TDM adjuvant (monophosphoryl Lipid A, synthetic trehalose dicorynomycolate). The immunization protocol may be selected without undue experimentation.

[0215] The antibodies may, alternatively, be monoclonal antibodies. Monoclonal antibodies may be prepared using hybridoma methods, such as those described by Kohler and Milstein (1975) Nature 256:495-497. In a hybridoma method, a mouse, hamster, or other appropriate host animal, is typically immunized with an immunizing agent to elicit lymphocytes that produce or are capable of producing antibodies that will specifically bind to the immunizing agent. Alternatively, the lymphocytes may be immunized in vitro. The immunizing agent will typically include a polypeptide encoded by a nucleic acid of Tables 1A-11C, or fragment thereof, or a fusion protein thereof. Generally, either peripheral blood lymphocytes (“PBLs”) are used if cells of human origin are desired, or spleen cells or lymph node cells are used if non-human mammalian sources are desired. The lymphocytes are then fused with an immortalized cell line using a suitable fusing agent, such as polyethylene glycol, to form a hybridoma cell (e.g., pp. 59-103 in Goding (1986) Monoclonal Antibodies: Principles and Practice Academic Press). Immortalized cell lines are usually transformed mammalian cells, particularly myeloma cells of rodent, bovine and human origin. Usually, rat or mouse myeloma cell lines are employed. The hybridoma cells may be cultured in a suitable culture medium that preferably contains one or more substances that inhibit the growth or survival of the unfused, immortalized cells. For example, if the parental cells lack the enzyme hypoxanthine guanine phosphoribosyl transferase (HGPRT or HPRT), the culture medium for the hybridomas typically will include hypoxanthine, aminopterin, and thymidine (“HAT medium”), which substances prevent the growth of HGPRT-deficient cells.

[0216] In one embodiment, the antibodies are bispecific antibodies. Bispecific antibodies are monoclonal, preferably human or humanized, antibodies that have binding specificities for at least two different antigens or that have binding specificities for two epitopes on the same antigen. In one embodiment, one of the binding specificities is for a protein encoded by a nucleic acid Tables 1A-11C or a fragment thereof, the other one is for another antigen, and preferably for a cell-surface protein or receptor or receptor subunit, preferably one that is tumor specific. Alternatively, tetramer-type technology may create multivalent reagents.

[0217] In one embodiment, the antibodies to soft tissue sarcoma cancer protein are capable of reducing or eliminating a biological function of a soft tissue sarcoma cancer protein, as is described below. That is, the addition of anti-soft tissue sarcoma cancer protein antibodies (either polyclonal or preferably monoclonal) to cancer tissue may reduce or eliminate the neoplastic or malignant cancer activity. Generally, at least about 25% decrease in activity, growth, size or the like may be used, with at least about 50% being particularly useful and about 95-100% decrease being especially useful.

[0218] In another embodiment the antibodies to the soft tissue sarcoma cancer proteins are humanized antibodies (e.g., Xenerex Biosciences; Medarex, Inc.; Abgenix, Inc.; Protein Design Labs, Inc.). Humanized forms of non-human (e.g., murine) antibodies are chimeric molecules of immunoglobulins, immunoglobulin chains or fragments thereof (such as Fv, Fab, Fab′, F(ab′)₂ or other antigen-binding subsequences of antibodies) which contain minimal sequence derived from non-human immunoglobulin. Humanized antibodies include human immunoglobulins (recipient antibody) in which residues form a complementary determining region (CDR) of the recipient are replaced by residues from a CDR of a non-human species (donor antibody) such as mouse, rat or rabbit having the desired specificity, affinity and capacity. In some instances, Fv framework residues of the human immunoglobulin are replaced by corresponding non-human residues. Humanized antibodies may also comprise residues which are found neither in the recipient antibody nor in the imported CDR or framework sequences. In general, a humanized antibody will comprise substantially all of at least one, and typically two, variable domains, in which all or substantially all of the CDR regions correspond to those of a non-human immunoglobulin and all or substantially all of the framework (FR) regions are those of a human immunoglobulin consensus sequence. The humanized antibody optimally also will typically comprise at least a portion of an immunoglobulin constant region (Fc), typically that of a human immunoglobulin (Jones, et al. (1986) Nature 321:522-525; Riechmann, et al. (1988) Nature 332:323-329; and Presta (1992) Curr. Op. Struct. Biol. 2:593-596). Humanization can be essentially performed following the method of Winter and co-workers (Jones, et al. (1986) Nature 321:522-525; Riechmann, et al. (1988) Nature 332:323-327; Verhoeyen, et al. (1988) Science 239:1534-1536), by substituting rodent CDRs or CDR sequences for corresponding sequences of a human antibody. Accordingly, such humanized antibodies are chimeric antibodies (U.S. Pat. No. 4,816,567), wherein substantially less than an intact human variable domain has been substituted by corresponding sequence from a non-human species.

[0219] Human-like antibodies can also be produced using phage display libraries (Hoogenboom and Winter (1992) J. Mol. Biol. 227:381-388; Marks, et al. (1991) J. Mol. Biol. 222:581-597) or human monoclonal antibodies (e.g., p. 77, Cole, et al. in Reisfeld and Sell (1985) Monoclonal Antibodies and Cancer Therapy Liss; and Boerner, et al. (1991) J. Immunol. 147:86-95). Similarly, human antibodies can be made by introducing human immunoglobulin loci into transgenic animals, e.g., mice in which the endogenous immunoglobulin genes have been partially or completely inactivated. Upon challenge, human antibody production is observed, which closely resembles that seen in humans in nearly all respects, including gene rearrangement, assembly, and antibody repertoire. This approach is described, e.g., in U.S. Pat. Nos. 5,545,807; 5,545,806; 5,569,825; 5,625,126; 5,633,425; 5,661,016, and in the following scientific publications: Marks, et al. (1992) Bio/Technology 10:779-783; Lonberg, et al. (1994) Nature 368:856-859; Morrison (1994) Nature 368:812-13; Fishwild, et al. (1996) Nature Biotechnology 14:845-851, commented on in Neuberger (1996) Nature Biotechnology 14:826; and Lonberg and Huszar (1995) Intern. Rev. Immunol. 13:65-93.

[0220] By immunotherapy is meant treatment of soft tissue sarcoma cancer or related disease with an antibody raised against, e.g., proteins. As used herein, immunotherapy can be passive or active. Passive immunotherapy as defined herein is the passive transfer of antibody to a recipient (patient). Active immunization is the induction of antibody and/or T-cell responses in a recipient (patient). Induction of an immune response is the result of providing the recipient with an antigen to which antibodies are raised. The antigen may be provided by injecting a polypeptide against which antibodies are desired to be raised into a recipient, or contacting the recipient with a nucleic acid capable of expressing the antigen and under conditions for expression of the antigen, leading to an immune response.

[0221] In one embodiment the soft tissue sarcoma cancer proteins against which antibodies are raised are secreted proteins as described above. Without being bound by theory, antibodies used for treatment may bind and prevent the secreted protein from binding to its receptor, thereby inactivating the secreted cancer protein, e.g., in autocrine signaling.

[0222] In another embodiment, the soft tissue sarcoma cancer protein to which antibodies are raised is a transmembrane protein. Without being bound by theory, antibodies used for treatment often bind the extracellular domain of the cancer protein and prevent it from binding to other proteins, such as circulating ligands or cell-associated molecules. The antibody may cause down-regulation of the transmembrane cancer protein. The antibody may be a competitive, non-competitive, or uncompetitive inhibitor of protein binding to the extracellular domain of the cancer protein. The antibody may be an antagonist of the cancer protein. Further, the antibody prevents activation of the transmembrane cancer protein. In one aspect, when the antibody prevents the binding of other molecules to the cancer protein, the antibody prevents growth of the cell. The antibody may also be used to target or sensitize the cell to cytotoxic agents, including, but not limited to TNF-α, TNF-β, IL-1, INF-γ, and IL-2, or chemotherapeutic agents including 5FU, vinblastine, actinomycin D, cisplatin, methotrexate, and the like. In some instances the antibody belongs to a sub-type that activates serum complement, or a similar effector function, when complexed with the transmembrane protein thereby mediating cytotoxicity or antigen-dependent cytotoxicity (ADCC). Thus, soft tissue sarcoma cancer is treated by administering to a patient antibodies directed against the transmembrane cancer protein. Antibody-labeling may activate a co-toxin, localize a toxin payload, or otherwise provide means to locally ablate cells.

[0223] In another embodiment, the antibody is conjugated or fused to an effector moiety. The effector moiety can be a labeling moiety, e.g., a radioactive or fluorescent label, or a therapeutic moiety. In one aspect the therapeutic moiety is a small molecule that modulates the activity of the soft tissue sarcoma cancer protein. In another aspect the therapeutic moiety modulates the activity of molecules associated with or in close proximity to the soft tissue sarcoma cancer protein. The therapeutic moiety may inhibit enzymatic activity such as protease or collagenase activity associated with the cancer, or be an attractant of other cells, such as NK cells. See, e.g., Groh, et al. (2002) Nature 419:734-738.

[0224] In one embodiment, the therapeutic moiety can also be a cytotoxic agent. In this method, targeting the cytotoxic agent to soft tissue sarcoma cancer tissue or cells, results in a reduction in the number of afflicted cells, thereby reducing symptoms associated with cancer. Cytotoxic agents are numerous and varied and include, but are not limited to, cytotoxic drugs or toxins or active fragments of such toxins. Suitable toxins and their corresponding fragments include diphtheria A chain, exotoxin A chain, ricin A chain, abrin A chain, curcin, crotin, phenomycin, enomycin, and the like. Cytotoxic agents also include radiochemicals made by conjugating radioisotopes to antibodies raised against soft tissue sarcoma cancer proteins, or binding of a radionuclide to a chelating agent that has been covalently attached to the antibody. Targeting the therapeutic moiety to transmembrane cancer proteins not only serves to increase the local concentration of therapeutic moiety in the cancer afflicted area, but also serves to reduce deleterious side effects that may be associated with the therapeutic moiety.

[0225] In another embodiment, the soft tissue sarcoma cancer protein against which the antibodies are raised is an intracellular protein. In this case, the antibody may be conjugated or fused to a protein which facilitates entry into the cell. In one case, the antibody enters the cell by endocytosis. In another embodiment, a nucleic acid encoding the antibody is administered to the individual or cell. Moreover, wherein the soft tissue sarcoma cancer protein can be targeted within a cell, e.g., the nucleus, an antibody thereto contains a signal for that target localization, e.g., a nuclear localization signal.

[0226] The soft tissue sarcoma cancer antibodies of the invention specifically bind to soft tissue sarcoma cancer proteins. By “specifically bind” herein is meant that the antibodies bind to the protein with a K_{d} of at least about 0.1 mM, more usually at least about 1 μM, preferably at least about 0.1 μM or better, and most preferably, 0.01 μM or better. Selectivity of binding to the specific target and not to related sequences is often also important

[0227] Detection of Soft Tissue Sarcoma Cancer-associated Sequence for Diagnostic and Therapeutic Applications

[0228] In one aspect, the RNA expression levels of genes are determined for different cellular states in the soft tissue sarcoma cancer phenotype. Expression levels of genes in normal tissue (e.g., not exhibiting soft tissue sarcoma cancer) and in soft tissue sarcoma cancer tissue (and in some cases, for varying severities of soft tissue sarcoma cancer that relate to prognosis, as outlined below) are evaluated to provide expression profiles. An expression profile of a particular cell state or point of development is essentially a “fingerprint” of the state. While two states may have a particular gene similarly expressed, the evaluation of a number of genes simultaneously allows the generation of a gene expression profile that is reflective of the state of the cell. By comparing expression profiles of cells in different states, information regarding which genes are important (including both up- and down-regulation of genes) in each of these states is obtained. Then, diagnosis may be performed or confirmed to determine whether a tissue sample has the gene expression profile of normal or cancer tissue. This will provide for molecular diagnosis of related conditions.

[0229] “Differential expression,” or grammatical equivalents as used herein, refers to qualitative or quantitative differences in the temporal and/or cellular gene expression patterns within and among cells and tissue. Thus, a differentially expressed gene can qualitatively have its expression altered, including an activation or inactivation, in, e.g., normal versus cancer tissue. Genes may be turned on or turned off in a particular state, relative to another state thus permitting comparison of two or more states. A qualitatively regulated gene will exhibit an expression pattern within a state or cell type which is detectable by standard techniques. Some genes will be expressed in one state or cell type, but not in both. Alternatively, the difference in expression may be quantitative, e.g., in that expression is increased or decreased; e.g., gene expression is either upregulated, resulting in an increased amount of transcript, or downregulated, resulting in a decreased amount of transcript. The degree to which expression differs need only be large enough to quantify via standard characterization techniques, e.g., as by use of Affymetrix GENECHIP® expression arrays. See, Lockhart (1996) Nature Biotechnology 14:1675-1680. Other techniques include, but are not limited to, quantitative reverse transcriptase PCR, Northern analysis and RNase protection. As outlined above, preferably the change in expression (e.g., upregulation or downregulation) is at least about 50%, more preferably at least about 100%, more preferably at least about 150%, more preferably at least about 200%, with from 300 to at least 1000% being especially useful.

[0230] Evaluation may be at the gene transcript, or the protein level. The amount of gene expression may be monitored using nucleic acid probes to the DNA or RNA equivalent of the gene transcript, and the quantification of gene expression levels, or, alternatively, the final gene product itself (protein) can be monitored, e.g., with antibodies to the soft tissue sarcoma cancer protein and standard immunoassays (ELISAs, etc.) or other techniques, including mass spectroscopy assays, 2D gel electrophoresis assays, etc. Proteins corresponding to soft tissue sarcoma cancer genes, e.g., those identified as being important in a soft tissue sarcoma cancer phenotype, can be evaluated in a soft tissue sarcoma cancer diagnostic test. In one embodiment, gene expression monitoring is performed simultaneously on a number of genes. Multiple protein expression monitoring can be performed as well. Similarly, these assays may be performed on an individual basis as well.

[0231] In this embodiment, the soft tissue sarcoma cancer nucleic acid probes are attached to biochips as outlined herein for the detection and quantification of soft tissue sarcoma cancer sequences in a particular cell. The assays are further described below in the example. PCR techniques can be used to provide greater sensitivity.

[0232] In one embodiment nucleic acids encoding the soft tissue sarcoma cancer protein are detected. Although DNA or RNA encoding the soft tissue sarcoma cancer protein may be detected, of particular interest are methods wherein an mRNA encoding a cancer protein is detected. Probes to detect mRNA can be a nucleotide/deoxynucleotide probe that is complementary to and hybridizes with the mRNA and includes, but is not limited to, oligonucleotides, cDNA or RNA. Probes also should contain a detectable label, as defined herein. In one method the mRNA is detected after immobilizing the nucleic acid to be examined on a solid support such as nylon membranes and hybridizing the probe with the sample. Following washing to remove the non-specifically bound probe, the label is detected. In another method detection of the mRNA is performed in situ. In this method permeabilized cells or tissue samples are contacted with a detectably labeled nucleic acid probe for sufficient time to allow the probe to hybridize with the target mRNA. Following washing to remove the non-specifically bound probe, the label is detected. For example, a digoxygenin labeled riboprobe (RNA probe) that is complementary to the mRNA encoding a cancer protein is detected by binding the digoxygenin with an anti-digoxygenin secondary antibody and developed with nitro blue tetrazolium and 5-bromo-4-chloro-3-indoyl phosphate.

[0233] In one embodiment, various proteins from the three classes-of proteins as described herein (secreted, transmembrane or intracellular proteins) are used in diagnostic assays. The soft tissue sarcoma cancer proteins, antibodies, nucleic acids, modified proteins and cells containing cancer sequences are used in diagnostic assays. This can be performed on an individual gene or corresponding polypeptide level. In another embodiment, the expression profiles are used, preferably in conjunction with high throughput screening techniques to allow monitoring for expression profile genes and/or corresponding polypeptides.

[0234] As described and defined herein, soft tissue sarcoma cancer proteins, including intracellular, transmembrane, or secreted proteins, find use as markers of soft tissue sarcoma cancer, e.g., for prognostic or diagnostic purposes. Detection of these proteins in putative soft tissue sarcoma cancer tissue allows for detection, prognosis, or diagnosis of cancer, and for selection of therapeutic strategy. In one embodiment, antibodies are used to detect soft tissue sarcoma cancer proteins. One method separates proteins from a sample by electrophoresis on a gel (typically a denaturing and reducing protein gel, but may be another type of gel, including isoelectric focusing gels and the like). Following separation of proteins, the cancer protein is detected, e.g., by immunoblotting with antibodies raised against the cancer protein.

[0235] In another method, antibodies to the soft tissue sarcoma cancer protein find use in in situ imaging techniques, e.g., in histology. See, e.g., Asai, et al. (eds. 1993) Methods in Cell Biology: Antibodies in Cell Biology (vol. 37) Academic Press. In this method cells are contacted with from one to many antibodies to the soft tissue sarcoma cancer protein(s). Following washing to remove non-specific antibody binding, the presence of the antibody or antibodies is detected. In one embodiment the antibody is detected by incubating with a secondary antibody that contains a detectable label. In another method the primary antibody to the soft tissue sarcoma cancer protein(s) contains a detectable label, e.g., an enzyme marker that can act on a substrate. In another embodiment each one of multiple primary antibodies contains a distinct and detectable label. This method finds particular use in simultaneous screening for a plurality of soft tissue sarcoma cancer proteins. Many other histological imaging techniques are also provided by the invention.

[0236] In one embodiment the label is detected in a fluorometer which has the ability to detect and distinguish emissions of different wavelengths. In addition, a fluorescence activated cell sorter (FACS) can be used in the method.

[0237] In another embodiment, antibodies find use in diagnosing soft tissue sarcoma cancer from biological samples, such as blood, urine, sputum, semen, or other bodily fluids. As previously described, certain cancer proteins are secreted/circulating molecules. Blood or semen samples, therefore, are useful as samples to be probed or tested for the presence of secreted cancer proteins. Antibodies can be used to detect a soft tissue sarcoma cancer protein by previously described immunoassay techniques including ELISA, immunoblotting (Western blotting), immunoprecipitation, BIACORE technology and the like. Conversely, the presence of antibodies may indicate an immune response against an endogenous soft tissue sarcoma cancer protein.

[0238] In one embodiment, in situ hybridization of labeled cancer nucleic acid probes to tissue arrays is done. For example, arrays of tissue samples, including cancer tissue and/or normal tissue, are made. In situ hybridization (see, e.g., Ausubel, supra) is then performed. When comparing the fingerprints between an individual and a standard, the skilled artisan can make a diagnosis, a prognosis, or a prediction based on the findings. It is further understood that the genes which indicate the diagnosis may differ from those which indicate the prognosis and molecular profiling of the condition of the cells may lead to distinctions between responsive or refractory conditions or may be predictive of outcomes.

[0239] Assays for Prognosis of Soft Tissue Sarcoma Disorders

[0240] In one embodiment, the cancer proteins, antibodies, nucleic acids, modified proteins and cells containing cancer sequences are used in prognosis assays. As above, gene expression profiles can be generated that correlate to soft tissue sarcoma cancer severity, in terms of long term prognosis. Again, this may be done on either a protein or gene level, with the use of genes included. For example, P-glycoprotein and Ki-67 antigen are promising markers for 5-year overall and disease-free survival for soft tissue sarcoma patients. Levine E. A. et al., Evaluation of new prognostic markers for adult soft tissue sarcomas, J. Clin. Oncol. 15:3249-57 (1997). Other markers may be similarly identified that correlate to soft tissue sarcoma cancer severity, or survival rates of soft tissue sarcoma patients.

[0241] As above, cancer probes may be attached to biochips for the detection and quantification of cancer sequences in a tissue or patient. The assays proceed as outlined above for diagnosis. PCR method may provide more sensitive and accurate quantification.

[0242] Genes useful in prognostic assays are genes that are differentially expressed according to the stage of illness of the patient. In one embodiment, the genes may be uniquely expressed according to the stage of the patient. In another embodiment, the genes may be expressed at differential levels according to the stage of the patient. INSERT EXAMPLE OF PROGNOSTIC ASSAY The correlation of genes expressed in the different stages, either uniquely expressed or have differential expression levels according to the stage, may be used to determine the viability of inducing remission in a patient. In addition, genes that are expressed indicating onset of long-term complications may also be useful as a prognostic tool.

[0243] Assays for Therapeutic Compounds

[0244] The soft tissue sarcoma cancer proteins, antibodies, nucleic acids, modified proteins and cells containing soft tissue sarcoma cancer sequences are used in drug screening assays or by evaluating the effect of drug candidates on a “gene expression profile” or expression profile of polypeptides. In one embodiment, the expression profiles are used, preferably in conjunction with high throughput screening techniques to allow monitoring for expression profile genes after treatment with a candidate agent. See, e.g., Zlokarnik, et al. (1998) Science 279:84-88; and Heid (1996) Genome Res. 6:986-994.

[0245] In one embodiment, the soft tissue sarcoma cancer proteins, antibodies, nucleic acids, modified proteins and cells containing the native or modified soft tissue sarcoma cancer proteins are used in screening assays. That is, the present invention provides novel methods for screening for compositions which modulate the soft tissue sarcoma cancer phenotype or an identified physiological function of a soft tissue sarcoma cancer protein. As above, this can be done on an individual gene level or by evaluating the effect of drug candidates on a “gene expression profile”. In one embodiment, the expression profiles are used, preferably in conjunction with high throughput screening techniques to allow monitoring for expression profile genes after treatment with a candidate agent, see Zlokarnik, supra.

[0246] Having identified the differentially expressed genes herein, a variety of assays may be executed. In one embodiment, assays may be run on an individual gene or protein level. That is, having identified a particular gene as up regulated in soft tissue sarcoma cancer, test compounds can be screened for the ability to modulate gene expression or for binding to the cancer protein. “Modulation” thus includes both an increase and a decrease in gene expression. The amount of modulation will depend on the original change of the gene expression in normal versus tissue exhibiting soft tissue sarcoma cancer, with changes of at least about 10%, preferably about 50%, more preferably about 100-300%, and in some embodiments 300-1000% or greater. Thus, if a gene exhibits a 4-fold increase in cancer tissue compared to normal tissue, a decrease of about four-fold is often desired; similarly, a 10-fold decrease in cancer tissue compared to normal tissue often provides a target value of a 10-fold increase in expression to be induced by the test compound.

[0247] The amount of gene expression may be monitored using nucleic acid probes and the quantification of gene expression levels, or, alternatively, the gene product itself can be monitored, e.g., through the use of antibodies to the cancer protein and standard immunoassays. Proteomics and separation techniques may also allow quantification of expression.

[0248] In one embodiment, gene expression or protein monitoring of a number of entities, e.g., an expression profile, is monitored simultaneously. Such profiles will typically involve a plurality of those entities described herein.

[0249] In this embodiment, the soft tissue sarcoma cancer nucleic acid probes are attached to biochips as outlined herein for the detection and quantification of cancer sequences in a particular cell. Alternatively, PCR may be used. Thus, a series, e.g., of microtiter plate, may be used with dispensed primers in desired wells. A PCR reaction can then be performed and analyzed for each well.

[0250] Modulators of Soft Tissue Sarcoma Cancer

[0251] Expression monitoring can be performed to identify compounds that modify the expression of one or more soft tissue sarcoma cancer-associated sequences, e.g., a polynucleotide sequence set out in the Tables. Generally, in one embodiment, a test modulator is added to the cells prior to analysis. Moreover, screens are also provided to identify agents that modulate soft tissue sarcoma cancer, modulate soft tissue sarcoma cancer proteins, bind to a soft tissue sarcoma cancer protein, or interfere with the binding of a soft tissue sarcoma cancer protein and an antibody or other binding partner.

[0252] The term “test compound” or “drug candidate” or “modulator” or grammatical equivalents as used herein describes a molecule, e.g., protein, oligopeptide, small organic molecule, polysaccharide, polynucleotide, etc., to be tested for the capacity to directly or indirectly alter the cancer phenotype or the expression of a cancer sequence, e.g., a nucleic acid or protein sequence. In several embodiments, modulators alter expression profiles, or expression profile nucleic acids or proteins provided herein. In one embodiment, the modulator suppresses a soft tissue sarcoma cancer phenotype, e.g., to a normal tissue fingerprint. In another embodiment, a modulator induced a cancer phenotype. Generally, a plurality of assay mixtures are run in parallel with different agent concentrations to obtain a differential response to the various concentrations. Typically, one of these concentrations serves as a negative control, e.g., at zero concentration or below the level of detection.

[0253] Drug candidates encompass numerous chemical classes, though typically they are organic molecules, preferably small organic compounds having a molecular weight of more than 100 and less than about 2,500 daltons. Small molecules may be less than 2000, or less than 1500, or less than 1000, or less than 500 D. Candidate agents comprise functional groups necessary for structural interaction with proteins, particularly hydrogen bonding, and typically include at least an amine, carbonyl, hydroxyl or carboxyl group, preferably at least two of the functional chemical groups. The candidate agents often comprise cyclical carbon or heterocyclic structures and/or aromatic or polyaromatic structures substituted with one or more of the above functional groups. Candidate agents are also found among biomolecules including peptides, saccharides, fatty acids, steroids, purines, pyrimidines, derivatives, structural analogs, or combinations thereof. Particularly useful are peptides.

[0254] In one aspect, a modulator will neutralize the effect of a soft tissue sarcoma cancer protein. By “neutralize” is meant that activity of a protein is inhibited or blocked and thereby has substantially no effect on a cell.

[0255] In certain embodiments, combinatorial libraries of potential modulators will be screened for an ability to bind to a soft tissue sarcoma cancer polypeptide or to modulate activity. Conventionally, new chemical entities with useful properties are generated by identifying a chemical compound (called a “lead compound”) with some desirable property or activity, e.g., inhibiting activity, creating variants of the lead compound, and evaluating the property and activity of those variant compounds. Often, high throughput screening (HTS) methods are employed for such an analysis. See, e.g., Janzen (2002) High Throughput Screening: Methods and Protocols Humana; Devlin (ed. 1997) High Throughput Screening: The Discovery of Bioactive Substances Dekker; and Mei and Czarnik (eds. 2002) Integrated Drug Discovery Techniques Dekker.

[0256] In one embodiment, high throughput screening methods involve providing a library containing a large number of potential therapeutic compounds (candidate compounds). Such “combinatorial chemical libraries” are then screened in one or more assays to identify those library members (particular chemical species or subclasses) that display a desired characteristic activity. The compounds thus identified can serve as conventional “lead compounds” or can themselves be used as potential or actual therapeutics.

[0257] A combinatorial chemical library is a collection of diverse chemical compounds generated by either chemical synthesis or biological synthesis by combining a number of chemical “building blocks” such as reagents. For example, a linear combinatorial chemical library, such as a polypeptide (e.g., mutein) library, is formed by combining a set of chemical building blocks called amino acids in every possible way for a given compound length (e.g., the number of amino acids in a polypeptide compound). Millions of chemical compounds can be synthesized through such combinatorial mixing of chemical building blocks. See Gallop, et al. (1994) J. Med. Chem. 37:1233-1251.

[0258] Preparation and screening of combinatorial chemical libraries is well known. Such combinatorial chemical libraries include, but are not limited to, peptide libraries (see, e.g., U.S. Pat. No. 5,010,175, Furka (1991) Pept. Prot. Res. 37:487-493, Houghton, et al. (1991) Nature 354:84-88), peptoids (PCT Publication No WO 91/19735), encoded peptides (PCT Publication WO 93/20242), random bio-oligomers (PCT Publication WO 92/00091), benzodiazepines (U.S. Pat. No. 5,288,514), diversomers such as hydantoins, benzodiazepines and dipeptides (Hobbs, et al. (1993) Proc. Nat'l Acad. Sci. USA 90:6909-6913), vinylogous polypeptides (Hagihara, et al. (1992) J. Amer. Chem. Soc. 114:6568), nonpeptidal peptidomimetics with a Beta-D-Glucose scaffolding (Hirschmann, et al. (1992) J. Amer. Chem. Soc. 114:9217-9218), analogous organic syntheses of small compound libraries (Chen, et al. (1994) J. Amer. Chem. Soc. 116:2661), oligocarbamates (Cho, et al. (1993) Science 261:1303-1305), and/or peptidyl phosphonates (Campbell, et al. (1994) J. Org. Chem. 59:658-xxx). See, generally, Gordon, et al. (1994) J. Med. Chem. 37:1385-1401, nucleic acid libraries (see, e.g., Stratagene, Corp.), peptide nucleic acid libraries (see, e.g., U.S. Pat. No. 5,539,083), antibody libraries (see, e.g., Vaughn, et al. (1996) Nature Biotechnology 14:309-314, and PCT/US96/10287), carbohydrate libraries (see, e.g., Liang, et al. (1996) Science 274:1520-1522, and U.S. Pat. No. 5,593,853), and small organic molecule libraries (see, e.g., benzodiazepines, page 33 Baum (Jan. 18, 1993) C&E News); isoprenoids (U.S. Pat. No. 5,569,588); thiazolidinones and metathiazanones (U.S. Pat. No. 5,549,974); pyrrolidines (U.S. Pat. Nos. 5,525,735 and 5,519,134); morpholino compounds (U.S. Pat. No. 5,506,337); benzodiazepines (U.S. Pat. No. 5,288,514); and the like.

[0259] Devices for the preparation of combinatorial libraries are commercially available. See, e.g., 357 MPS, 390 MPS, Advanced Chem Tech, Louisville Ky.; Symphony, Rainin, Woburn, Mass.; 433A Applied Biosystems, Foster City, Calif.; 9050 Plus, Millipore, Bedford, Mass.

[0260] A number of well known robotic systems have also been developed for solution phase chemistries. These systems include automated workstations like the automated synthesis apparatus developed by Takeda Chemical Industries, LTD. (Osaka, Japan) and many robotic systems utilizing robotic arms (Zymate II, Zymark Corporation, Hopkinton, Mass.; Orca, Hewlett-Packard, Palo Alto, Calif.), which mimic the manual synthetic operations performed by a chemist. The above devices are suitable for use with the present invention. The nature and implementation of modifications to these devices (if any) so that they can operate as discussed herein will be apparent. In addition, numerous combinatorial libraries are themselves commercially available. See, e.g., ComGenex, Princeton, N.J.; Asinex, Moscow, Ru; Tripos, Inc., St. Louis, Mo.; ChemStar, Ltd, Moscow, RU; 3D Pharmaceuticals, Exton, Pa.; Martek Biosciences, Columbia, Md.; etc.

[0261] The assays to identify modulators are amenable to high throughput screening. Assays thus detect enhancement or inhibition of cancer gene transcription, inhibition or enhancement of polypeptide expression, and inhibition or enhancement of polypeptide activity.

[0262] High throughput assays for the presence, absence, quantification, or other properties of particular nucleic acids or protein products are well known, as are binding assays and reporter gene assays. Thus, e.g., U.S. Pat. No. 5,559,410 discloses high throughput screening methods for proteins, U.S. Pat. No. 5,585,639 discloses high throughput screening methods for nucleic acid binding (e.g., in arrays), while U.S. Pat. Nos. 5,576,220 and 5,541,061 disclose high throughput methods of screening for ligand/antibody binding.

[0263] In addition, high throughput screening systems are commercially available. See, e.g., Zymark Corp., Hopkinton, Mass.; Air Technical Industries, Mentor, Ohio; Beckman Instruments, Inc., Fullerton, Calif.; Precision Systems, Inc., Natick, Mass., etc. These systems typically automate entire procedures, including sample and reagent pipetting, liquid dispensing, timed incubations, and final readings of the microplate in detector(s) appropriate for the assay. These configurable systems provide high throughput and rapid start up as well as a high degree of flexibility and customization. The manufacturers of such systems provide detailed protocols for various high throughput systems. Thus, e.g., Zymark Corp. provides technical bulletins describing screening systems for detecting the modulation of gene transcription, ligand binding, and the like.

[0264] In one embodiment, modulators are proteins, often naturally occurring proteins or fragments of naturally occurring proteins. Thus, e.g., cellular extracts containing proteins, or random or directed digests of proteinaceous cellular extracts, may be used. In this way libraries of proteins may be made for screening in the methods of the invention. Particularly useful in this embodiment are libraries of bacterial, fungal, viral, and mammalian proteins, including human proteins. Particularly useful test compound will be directed to the class of proteins to which the target belongs, e.g., substrates for enzymes or ligands and receptors.

[0265] In one embodiment, modulators are peptides of from about 5-30 amino acids, with from about 5-20 amino acids being preferred, and from about 7-15 being particularly preferred. The peptides may be digests of naturally occurring proteins as is outlined above, random peptides, or “biased” random peptides. By “randomized” or grammatical equivalents herein is meant that each nucleic acid and peptide consists of essentially random nucleotides and amino acids, respectively. Since generally these random peptides (or nucleic acids, discussed below) are chemically synthesized, they may incorporate nucleotide or amino acid variations. The synthetic process can be designed to generate randomized proteins or nucleic acids, to allow the formation of the possible combinations over the length of the sequence, thus forming a library of randomized candidate bioactive proteinaceous agents.

[0266] In one embodiment, the library is fully randomized, with no sequence preferences or constants. In one embodiment, the library is biased. That is, some positions within the sequence are either held constant, or are selected from a limited number of possibilities. For example, in one embodiment, the nucleotides or amino acid residues are randomized within a defined class, e.g., of hydrophobic amino acids, hydrophilic residues, sterically biased (either small or large) residues, towards the creation of nucleic acid binding domains, the creation of cysteines, for cross-linking, prolines for SH-3 domains, serines, threonines, tyrosines, or histidines for phosphorylation sites, etc., or to purines, etc.

[0267] Modulators of soft tissue sarcoma cancer can also be nucleic acids, as defined above.

[0268] As described above generally for proteins, nucleic acid modulating agents may be naturally occurring nucleic acids, random nucleic acids, or “biased” random nucleic acids. For example, digests of prokaryotic or eukaryotic genomes may be used as is outlined above for proteins.

[0269] In one embodiment, the candidate compounds are organic chemical moieties, a wide variety of which are available in the literature.

[0270] After the candidate agent has been added and the cells allowed to incubate for some period of time, the sample containing a target sequence to be analyzed is added to the biochip. If required, the target sequence is prepared using known techniques. For example, the sample may be treated to lyse the cells, using known lysis buffers, electroporation, etc., with purification and/or amplification such as PCR performed as appropriate. For example, an in vitro transcription with labels covalently attached to the nucleotides is performed. Generally, the nucleic acids are labeled with biotin-FITC or PE, or with cy3 or cy5.

[0271] In one embodiment, the target sequence is labeled with, e.g., a fluorescent, a chemiluminescent, a chemical, or a radioactive signal, to provide a means of detecting the target sequence's specific binding to a probe. The label also can be an enzyme, such as, alkaline phosphatase or horseradish peroxidase, which when provided with an appropriate substrate produces a product that can be detected. Alternatively, the label can be a labeled compound or small molecule, such as an enzyme inhibitor, that binds but is not catalyzed or altered by the enzyme. The label also can be a moiety or compound, such as, an epitope tag or biotin which specifically binds to streptavidin. For the example of biotin, the streptavidin is labeled as described above, thereby, providing a detectable signal for the bound target sequence. Unbound labeled streptavidin is typically removed prior to analysis.

[0272] These assays can be direct hybridization assays or can comprise “sandwich assays”, which include the use of multiple probes. See, e.g., U.S. Pat. Nos. 5,681,702; 5,597,909; 5,545,730; 5,594,117; 5,591,584; 5,571,670; 5,580,731; 5,571,670; 5,591,584; 5,624,802; 5,635,352; 5,594,118; 5,359,100; 5,124,246; and 5,681,697. The target nucleic acid may be prepared as outlined above, and then added to the biochip comprising a plurality of nucleic acid probes, under conditions that allow the formation of a hybridization complex.

[0273] A variety of hybridization conditions may be used in the present invention, including high, moderate, and low stringency conditions as outlined above. The assays are generally run under stringency conditions which allows formation of the label probe hybridization complex only in the presence of target. Stringency can be controlled by altering a step parameter that is a thermodynamic variable, including, but not limited to, temperature, formamide concentration, salt concentration, chaotropic salt concentration, pH, organic solvent concentration, etc.

[0274] These parameters may also be used to control non-specific binding. See U.S. Pat. No. 5,681,697. Thus it may be desirable to perform certain steps at higher stringency conditions to reduce non-specific binding.

[0275] The reactions outlined herein may be accomplished in a variety of ways. Components of the reaction may be added simultaneously, or sequentially, in different orders, with several embodiments outlined below. In addition, the reaction may include a variety of other reagents. These include salts, buffers, neutral proteins, e.g., albumin, detergents, etc., which may be used to facilitate optimal hybridization and detection, and/or reduce non-specific or background interactions. Reagents that otherwise improve the efficiency of the assay, such as protease inhibitors, nuclease inhibitors, anti-microbial agents, etc., may also be used as appropriate, depending on the sample preparation methods and purity of the target.

[0276] The assay data are analyzed to determine the expression levels, and changes in expression levels as between states, of individual genes, forming a gene expression profile.

[0277] Screens are performed to identify modulators of the soft tissue sarcoma cancer phenotype. In one embodiment, screening is performed to identify modulators that can induce or suppress a particular expression profile, thus preferably generating the associated phenotype. In another embodiment, e.g., for diagnostic applications, having identified differentially expressed genes important in a particular state, screens can be performed to identify modulators that alter expression of individual genes. In an another embodiment, screening is performed to identify modulators that alter a biological function of the expression product of a differentially expressed gene. Again, having identified the importance of a gene in a particular state, screens are performed to identify agents that bind and/or modulate the biological activity of the gene product.

[0278] In addition, screens can be done for genes that are induced in response to a candidate agent. After identifying a modulator based upon its ability to suppress a soft tissue sarcoma cancer expression pattern leading to a normal expression pattern, or to modulate a single cancer gene expression profile so as to mimic the expression of the gene from normal tissue, a screen as described above can be performed to identify genes that are specifically modulated in response to the agent. Comparing expression profiles between normal tissue and agent treated soft tissue sarcoma cancer tissue reveals genes that are not expressed in normal tissue or soft tissue sarcoma cancer tissue, but are expressed in agent treated tissue. These agent-specific sequences can be identified and used by methods described herein for cancer genes or proteins. In particular, these sequences and the proteins they encode find use in marking or identifying agent treated cells. In addition, antibodies can be raised against the agent induced proteins and used to target novel therapeutics to the treated soft tissue sarcoma cancer tissue sample.

[0279] Thus, in one embodiment, a test compound is administered to a population of cancer cells, that have an associated soft tissue sarcoma cancer expression profile. By “administration” or “contacting” herein is meant that the candidate agent is added to the cells in such a manner as to allow the agent to act upon the cell, whether by uptake and intracellular action, or by action at the cell surface. In some embodiments, nucleic acid encoding a proteinaceous candidate agent (e.g., a peptide) may be put into a viral construct such as an adenoviral or retroviral construct, and added to the cell, such that expression of the peptide agent is achieved. See PCT US97/01019. Regulatable gene therapy systems can also be used.

[0280] Once the test compound has been administered to the cells, the cells can be washed if desired and are allowed to incubate under preferably physiological conditions for some period of time. The cells are then harvested and a new gene expression profile is generated, as outlined herein.

[0281] Thus, e.g., soft tissue sarcoma cancer tissue may be screened for agents that modulate, e.g., induce or suppress the cancer phenotype. A change in at least one gene, preferably many, of the expression profile indicates that the agent has an effect on the cancer activity. By defining such a signature for the soft tissue sarcoma cancer phenotype, screens for new drugs that alter the phenotype can be devised. With this approach, the drug target need not be known and need not be represented in the original expression screening platform, nor does the level of transcript for the target protein need to change.

[0282] In one embodiment, as outlined above, screens may be done on individual genes and gene products (proteins). That is, having identified a particular differentially expressed gene as important in a particular state, screening of modulators of either the expression of the gene or the gene product itself can be done. The gene products of differentially expressed genes are sometimes referred to herein as “cancer proteins” or a “cancer modulatory protein”. The cancer modulatory protein may be a fragment, or alternatively, be the full length protein to the fragment encoded by the nucleic acids of the Tables. Preferably, the cancer modulatory protein is a fragment. In one embodiment, the cancer amino acid sequence which is used to determine sequence identity or similarity is encoded by a nucleic acid of the Tables. In another embodiment, the sequences are naturally occurring allelic variants of a protein encoded by a nucleic acid of the Tables. In another embodiment, the sequences are sequence variants as further described herein.

[0283] Preferably, the cancer modulatory protein is a fragment of approximately 14-24 amino acids long. More preferably the fragment is a soluble fragment. Preferably, the fragment includes a non-transmembrane region. In one embodiment, the fragment has an N-terminal Cys to aid in solubility. In one embodiment, the C-terminus of the fragment is kept as a free acid and the N-terminus is a free amine to aid in coupling, e.g., to cysteine.

[0284] In one embodiment the cancer proteins are conjugated to an immunogenic agent as discussed herein. In one embodiment the cancer protein is conjugated to BSA

[0285] Measurements of soft tissue sarcoma cancer polypeptide activity, or of soft tissue sarcoma cancer or cancer phenotype can be performed using a variety of assays. For example, the effects of the test compounds upon the function of the soft tissue sarcoma cancer polypeptides can be measured by examining parameters described above. A suitable physiological change that affects activity can be used to assess the influence of a test compound on the polypeptides of this invention. When the functional consequences are determined using intact cells or animals, one can also measure a variety of effects associated with tumors, tumor growth, neovascularization, hormone release, transcriptional changes to both known and uncharacterized genetic markers (e.g., northern blots), changes in cell metabolism such as cell growth or pH changes, and changes in intracellular second messengers such as cGMP. In the assays of the invention, mammalian soft tissue sarcoma cancer polypeptide is typically used, e.g., mouse, preferably human.

[0286] Assays to identify compounds with modulating activity can be performed in vitro. For example, a soft tissue sarcoma cancer polypeptide is first contacted with a potential modulator and incubated for a suitable amount of time, e.g., from about 0.5-48 hours. In one embodiment, the soft tissue sarcoma cancer polypeptide levels are determined in vitro by measuring the level of protein or mRNA. The level of protein is typically measured using immunoassays such as western blotting, ELISA, and the like with an antibody that selectively binds to the soft tissue sarcoma cancer polypeptide or a fragment thereof. For measurement of mRNA, amplification, e.g., using PCR, LCR, or hybridization assays, e.g., northern hybridization, RNAse protection, dot blotting, are included. The level of protein or mRNA is typically detected using directly or indirectly labeled detection agents, e.g., fluorescently or radioactively labeled nucleic acids, radioactively or enzymatically labeled antibodies, and the like, as described herein.

[0287] Alternatively, a reporter gene system can be devised using a soft tissue sarcoma cancer protein promoter operably linked to a reporter gene such as luciferase, green fluorescent protein, CAT, or β-gal. The reporter construct is typically transfected into a cell. After treatment with a potential modulator, the amount of reporter gene transcription, translation, or activity is measured according to standard techniques.

[0288] In one embodiment, as outlined above, screens may be done on individual genes and gene products (proteins). That is, having identified a particular differentially expressed gene as important in a particular state, screening of modulators of the expression of the gene or the gene product itself can be done. The gene products of differentially expressed genes are sometimes referred to herein as “soft tissue sarcoma cancer proteins.” The soft tissue sarcoma cancer protein may be a fragment, or alternatively, the full length protein to a fragment shown herein.

[0289] In one embodiment, screening for modulators of expression of specific genes is performed. Typically, the expression of only one or a few genes are evaluated. In another embodiment, screens are designed to first find compounds that bind to differentially expressed proteins. These compounds are then evaluated for the ability to modulate differentially expressed activity. Moreover, once initial candidate compounds are identified, variants can be further screened to better evaluate structure activity relationships.

[0290] In another embodiment, binding assays are done. In general, purified or isolated gene product is used; that is, the gene products of one or more differentially expressed nucleic acids are made. For example, antibodies are generated to the protein gene products, and standard immunoassays are run to determine the amount of protein present. Alternatively, cells comprising the soft tissue sarcoma cancer proteins can be used in the assays.

[0291] Thus, in one embodiment, the methods comprise combining a soft tissue sarcoma cancer protein and a candidate compound, and determining the binding of the compound to the soft tissue sarcoma cancer protein. Other embodiments utilize the human soft tissue sarcoma cancer protein, although other mammalian proteins may also be used, e.g., for the development of animal models of human disease. In some embodiments, as outlined herein, variant or derivative soft tissue sarcoma cancer. proteins may be used.

[0292] Generally, in one embodiment of the methods herein, the soft tissue sarcoma cancer protein or the candidate agent is non-diffusibly bound to an insoluble support, preferably having isolated sample receiving areas (e.g., a microtiter plate, an array, etc.). The insoluble supports may be made of a composition to which the compositions can be bound, is readily separated from soluble material, and is otherwise compatible with the overall method of screening. The surface of such supports may be solid or porous and of a convenient shape. Examples of suitable insoluble supports include microtiter plates, arrays, membranes and beads. These are typically made of glass, plastic (e.g., polystyrene), polysaccharides, nylon, or nitrocellulose, TEFLON® (synthetic resinous flurorine-containing polymers), etc. Microtiter plates and arrays are especially convenient because a large number of assays can be carried out simultaneously, using small amounts of reagents and samples. The particular manner of binding of the composition is typically compatible with the reagents and overall methods of the invention, maintains the activity of the composition, and is nondiffusable. Other methods of binding include the use of antibodies (which do not sterically block either the ligand binding site or activation sequence when the protein is bound to the support), direct binding to “sticky” or ionic supports, chemical crosslinking, the synthesis of the protein or agent on the surface, etc. Following binding of the protein or agent, excess unbound material is removed by washing. The sample receiving areas may then be blocked through incubation with bovine serum albumin (BSA), casein, or other innocuous protein or other moiety.

[0293] In one embodiment, the soft tissue sarcoma cancer protein is bound to the support, and a test compound is added to the assay. Alternatively, the candidate agent is bound to the support and the cancer protein is added. Novel binding agents include specific antibodies, non-natural binding agents identified in screens of chemical libraries, peptide analogs, etc. Of particular interest are screening assays for agents that have a low toxicity for human cells. A wide variety of assays may be used for this purpose, including labeled in vitro protein-protein binding assays, electrophoretic mobility shift assays, immunoassays for protein binding, functional assays (phosphorylation assays, etc.), and the like.

[0294] The determination of the binding of the test modulating compound to the cancer protein may be done in many ways. In one embodiment, the compound is labeled, and binding determined directly, e.g., by attaching all or a portion of the cancer protein to a solid support, adding a labeled candidate agent (e.g., a fluorescent label), washing off excess reagent, and determining whether the label is present on the solid support. Various blocking and washing steps may be utilized as appropriate.

[0295] In some embodiments, only one of the components is labeled, e.g., the proteins (or proteinaceous candidate compounds) can be labeled. Alternatively, more than one component can be labeled with different labels, e.g., ¹²⁵I for the proteins and a fluorophor for the compound. Proximity reagents, e.g., quenching or energy transfer reagents are also useful.

[0296] In one embodiment, the binding of the test compound is determined by competitive binding assay. The competitor may be a binding moiety known to bind to the target molecule (e.g., a soft tissue sarcoma cancer protein), such as an antibody, peptide, binding partner, ligand, etc. Under certain circumstances, there may be competitive binding between the compound and the binding moiety, with the binding moiety displacing the compound. In one embodiment, the test compound is labeled. Either the compound, or the competitor, or both, is added first to the protein for a time sufficient to allow binding, if present. Incubations may be performed at a temperature which facilitates optimal activity, typically between about 4-40° C. Incubation periods are typically optimized, e.g., to facilitate rapid high throughput screening. Typically between about 0.1-1 hour will be sufficient. Excess reagent is generally removed or washed away. The second component is then added, and the presence or absence of the labeled component is followed, to indicate binding.

[0297] In one embodiment, the competitor is added first, followed by a test compound. Displacement of the competitor is an indication that the test compound is binding to the cancer protein and thus is capable of binding to, and potentially modulating, the activity of the cancer protein. In this embodiment, either component can be labeled. Thus, e.g., if the competitor is labeled, the presence of label in the wash solution indicates displacement by the agent. Alternatively, if the test compound is labeled, the presence of the label on the support indicates displacement.

[0298] In an alternative embodiment, the test compound is added first, with incubation and washing, followed by the competitor. The absence of binding by the competitor may indicate that the test compound is bound to the cancer protein with a higher affinity. Thus, if the test compound is labeled, the presence of the label on the support, coupled with a lack of competitor binding, may indicate that the test compound is capable of binding to the cancer protein.

[0299] In one embodiment, the methods comprise differential screening to identity agents that are capable of modulating the activity of the cancer proteins. In one embodiment, the methods comprise combining a cancer protein and a competitor in a first sample. A second sample comprises a test compound, a cancer protein, and a competitor. The binding of the competitor is determined for both samples, and a change, or difference in binding between the two samples indicates the presence of an agent capable of binding to the cancer protein and potentially modulating its activity. That is, if the binding of the competitor is different in the second sample relative to the first sample, the agent is capable of binding to the cancer protein.

[0300] Alternatively, differential screening is used to identify drug candidates that bind to the native soft tissue sarcoma cancer protein, but cannot bind to modified soft tissue sarcoma cancer proteins. The structure of the cancer protein may be modeled, and used in rational drug design to synthesize agents that interact with that site. Drug candidates that affect the activity of the cancer protein are also identified by screening drugs for the ability to either enhance or reduce the activity of the protein.

[0301] Positive controls and negative controls may be used in the assays. Preferably control and test samples are performed in at least triplicate to obtain statistically significant results. Incubation of all samples is for a time sufficient for the binding of the agent to the protein. Following incubation, samples are washed free of non-specifically bound material and the amount of bound, generally labeled agent determined. For example, where a radiolabel is employed, the samples may be counted in a scintillation counter to determine the amount of bound compound.

[0302] A variety of other reagents may be included in the screening assays. These include reagents like salts, neutral proteins, e.g., albumin, detergents, etc., which may be used to facilitate optimal protein-protein binding and/or reduce non-specific or background interactions. Also reagents that otherwise improve the efficiency of the assay, such as protease inhibitors, nuclease inhibitors, anti-microbial agents, etc., may be used. The mixture of components may be added in an order that provides for the requisite binding.

[0303] In one embodiment, the invention provides methods for screening for a compound capable of modulating the activity of a cancer protein. The methods comprise adding a test compound, as defined above, to a cell comprising cancer proteins. Useful cell types include almost any cell. The cells contain a recombinant nucleic acid that encodes a cancer protein. In one embodiment, a library of candidate agents are tested on a plurality of cells.

[0304] In one aspect, the assays are evaluated in the presence or absence or previous or subsequent exposure of physiological signals, e.g., hormones, antibodies, peptides, antigens, cytokines, growth factors, action potentials, pharmacological agents including chemotherapeutics, radiation, carcinogenics, or other cells (e.g., cell-cell contacts). In another example, the determinations are determined at different stages of the cell cycle process.

[0305] In this way, compounds that modulate soft tissue sarcoma cancer agents are identified. Compounds with pharmacological activity are able to enhance or interfere with the activity of the cancer protein. Once identified, similar structures are evaluated to identify critical structural feature of the compound.

[0306] In one embodiment, a method of inhibiting soft tissue sarcoma cancer cell division is provided. The method comprises administration of a soft tissue sarcoma cancer inhibitor. In another embodiment, a method of inhibiting soft tissue sarcoma cancer is provided. The method may comprise administration of a soft tissue sarcoma cancer inhibitor. In a further embodiment, methods of treating cells or individuals with soft tissue sarcoma cancer are provided, e.g., comprising administration of a soft tissue sarcoma cancer inhibitor.

[0307] In one embodiment, a soft tissue sarcoma cancer inhibitor is an antibody as discussed above. In another embodiment, the soft tissue sarcoma cancer inhibitor is an antisense molecule.

[0308] A variety of cell growth, proliferation, viability, and metastasis assays are known, as described below.

[0309] Soft Agar Growth or Colony Formation in Suspension

[0310] Normal cells require a solid substrate to attach and grow. When the cells are transformed, they lose this phenotype and grow detached from the substrate. For example, transformed cells can grow in stirred suspension culture or suspended in semi-solid media, such as semi-solid or soft agar. The transformed cells, when transfected with tumor suppressor genes, regenerate normal phenotype and require a solid substrate to attach and grow. Soft agar growth or colony formation in suspension assays can be used to identify modulators of soft tissue sarcoma cancer sequences, which when expressed in host cells, inhibit abnormal cellular proliferation and transformation. A therapeutic compound would reduce or eliminate the host cells' ability to grow in stirred suspension culture or suspended in semi-solid media, such as semi-solid or soft.

[0311] Techniques for soft agar growth or colony formation in suspension assays are described, e.g., in Freshney (1998) Culture of Animal Cells: A Manual of Basic Technique (3d ed.) Wiley-Liss; Freshney (2000) Culture of Animal Cells: A Manual of Basic Technique (4th ed.) Wiley-Liss; and Garkavtsev, et al. (1996) Nature Genet. 14:415-20.

[0312] Contact Inhibition and Density Limitation of Growth

[0313] Normal cells typically grow in a flat and organized pattern in a petri dish until they touch other cells. When the cells touch one another, they are contact inhibited and stop growing. When cells are transformed, however, the cells are not contact inhibited and continue to grow to high densities in disorganized foci. Thus, the transformed cells grow to a higher saturation density than normal cells. This can be detected morphologically by the formation of a disoriented monolayer of cells or rounded cells in foci within the regular pattern of normal surrounding cells. Alternatively, labeling index with (³H)-thymidine at saturation density can be used to measure density limitation of growth. See Freshney (2000), supra. The transformed cells, when transfected with tumor suppressor genes, regenerate a normal phenotype and become contact inhibited and would grow to a lower density.

[0314] In this assay, labeling index with (³H)-thymidine at saturation density is a method of measuring density limitation of growth. Transformed host cells are transfected with a soft tissue sarcoma cancer-associated sequence and are grown for 24 hours at saturation density in non-limiting medium conditions. The percentage of cells labeling with (³H)-thymidine is determined autoradiographically. See, Freshney (1998), supra.

[0315] Growth Factor or Serum Dependence

[0316] Transformed cells typically have a lower serum dependence than their normal counterparts. See, e.g., Temin (1966) J. Nat'l Cancer Inst. 37:167-175; Eagle, et al. (1970) J. Exp. Med. 131:836-879; Freshney, supra. This is in part due to release of various growth factors by the transformed cells. Growth factor or serum dependence of transformed host cells can be compared with that of control.

[0317] Tumor Specific Markers Levels

[0318] Tumor cells release an increased amount of certain factors (hereinafter “tumor specific markers”) than their normal counterparts. For example, plasminogen activator (PA) is released from human glioma at a higher level than from normal brain cells. See, e.g., Gullino “Angiogenesis, tumor vascularization, and potential interference with tumor growth” pp. 178-184 in Mihich (ed. 1985) Biological Responses in Cancer Plenum. Similarly, tumor angiogenesis factor (TAF) is released at a higher level in tumor cells than their normal counterparts. See, e.g., Folkman (1992) “Angiogenesis and Cancer” Sem Cancer Biol. 3:89-96.

[0319] Various techniques which measure the release of these factors are described in Freshney (1994), supra. See also, Unkeless, et al. (1974) J. Biol. Chem. 249:4295-4305; Strickland and Beers (1976) J. Biol. Chem. 251:5694-5702; Whur, et al. (1980) Br. J. Cancer 42:305-312; Gullino, “Angiogenesis, tumor vascularization, and potential interference with tumor growth” pp. 178-184 in Mihich (ed. 1985) Biological Responses in Cancer Plenum; Freshney (1985) Anticancer Res. 5:111-130.

[0320] Invasiveness into Matrigel

[0321] The degree of invasiveness into Matrigel or some other extracellular matrix constituent can be used as an assay to identify compounds that modulate soft tissue sarcoma cancer-associated sequences. Tumor cells exhibit a good correlation between malignancy and invasiveness of cells into Matrigel or some other extracellular matrix constituent. In this assay, tumorigenic cells are typically used as host cells. Expression of a tumor suppressor gene in these host cells would decrease invasiveness of the host cells.

[0322] Techniques described in Freshney (1994), supra, can be used. Briefly, the level of invasion of host cells can be measured by using filters coated with Matrigel or some other extracellular matrix constituent. Penetration into the gel, or through to the distal side of the filter, is rated as invasiveness, and rated histologically by number of cells and distance moved, or by prelabeling the cells with ¹²⁵I and counting the radioactivity on the distal side of the filter or bottom of the dish. See, e.g., Freshney (1984), supra.

[0323] Tumor Growth in vivo

[0324] Effects of soft tissue sarcoma cancer-associated sequences on cell growth can be tested in transgenic or immune-suppressed mice. Knock-out transgenic mice can be made, in which the cancer gene is disrupted or in which a cancer gene is inserted. Knock-out transgenic mice can be made by insertion of a marker gene or other heterologous gene into the endogenous cancer gene site in the mouse genome via homologous recombination. Such mice can also be made by substituting the endogenous cancer gene with a mutated version of the cancer gene, or by mutating the endogenous cancer gene, e.g., by exposure to carcinogens.

[0325] A DNA construct is introduced into the nuclei of embryonic stem cells. Cells containing the newly engineered genetic lesion are injected into a host mouse embryo, which is re-implanted into a recipient female. Some of these embryos develop into chimeric mice that possess germ cells partially derived from the mutant cell line. Therefore, by breeding the chimeric mice it is possible to obtain a new line of mice containing the introduced genetic lesion. See, e.g., Capecchi, et al. (1989) Science 244:1288-1292. Chimeric targeted mice can be derived according to Hogan, et al. (1988) Manipulating the Mouse Embryo: A Laboratory Manual CSH Press; and Robertson (ed. 1987) Teratocarcinomas and Embryonic Stem Cells: A Practical Approach IRL Press, Washington, D.C.

[0326] Alternatively, various immune-suppressed or immune-deficient host animals can be used. For example, genetically athymic “nude” mouse (see, e.g., Giovanella, et al. (1974) J. Natl. Cancer Inst. 52:921-930), a SCID mouse, a thymectomized mouse, or an irradiated mouse (see, e.g., Bradley, et al. (1978) Br. J. Cancer 38:263-272; Selby, et al. (1980) Br. J. Cancer 41:52-61) can be used as a host. Transplantable tumor cells (typically about 10⁶ cells) injected into isogenic hosts will produce invasive tumors in a high proportions of cases, while normal cells of similar origin will not. In hosts which developed invasive tumors, cells expressing a soft tissue sarcoma cancer-associated sequences are injected subcutaneously. After a suitable length of time, preferably about 4-8 weeks, tumor growth is measured (e.g., by volume or by its two largest dimensions) and compared to the control. Tumors that have statistically significant reduction (using, e.g., Student's T test) are said to have inhibited growth.

[0327] Polynucleotide Modulators of Soft Tissue Sarcoma Cancer

[0328] Antisense and RNAi Polynucleotides

[0329] In certain embodiments, the activity of a soft tissue sarcoma cancer-associated protein is downregulated, or entirely inhibited, by the use of antisense polynucleotide, e.g., a nucleic acid complementary to, and which can preferably hybridize specifically to, a coding mRNA nucleic acid sequence, e.g., a soft tissue sarcoma cancer protein mRNA, or a subsequence thereof. Binding of the antisense polynucleotide to the mRNA reduces the translation and/or stability of the mRNA.

[0330] In the context of this invention, antisense polynucleotides can comprise naturally-occurring nucleotides, or synthetic species formed from naturally-occurring subunits or their close homologs. Antisense polynucleotides may also have altered sugar moieties or inter-sugar linkages. Exemplary among these are the phosphorothioate and other sulfur containing species. Analogs are comprehended by this invention so long as they function effectively to hybridize with the soft tissue sarcoma cancer protein mRNA. See, e.g., Isis Pharmaceuticals, Carlsbad, Calif.; Sequitor, Inc., Natick, Mass.

[0331] Such antisense polynucleotides can readily be synthesized using recombinant means, or can be synthesized in vitro. Equipment for such synthesis is sold by several vendors, including Applied Biosystems. The preparation of other oligonucleotides such as phosphorothioates and alkylated derivatives is also well known.

[0332] Antisense molecules as used herein include antisense or sense oligonucleotides. Sense oligonucleotides can, e.g., be employed to block transcription by binding to the anti-sense strand. The antisense and sense oligonucleotide comprise a single-stranded nucleic acid sequence (either RNA or DNA) capable of binding to target mRNA (sense) or DNA (antisense) sequences for soft tissue sarcoma cancer molecules. An antisense molecule is for a soft tissue sarcoma cancer sequence in Tables 1A-11C, or for a ligand or activator thereof. Antisense or sense oligonucleotides, according to the present invention, comprise a fragment generally at least about 14 nucleotides, preferably from about 14 to 30 nucleotides. The ability to derive an antisense or a sense oligonucleotide, based upon a cDNA sequence encoding a given protein is described in, e.g., Stein and Cohen (1988) Cancer Res. 48:2659-2668; and van der Krol, et al. (1988) BioTechniques 6:958-976.

[0333] RNA interference is a mechanism to suppress gene expression in a sequence specific manner. See, e.g., Brumelkamp, et al. (2002) Sciencexpress (Mar. 21, 2002); Sharp (1999) Genes Dev. 13:139-141; and Cathew (2001) Curr. Op. Cell Biol. 13:244-248. In mammalian cells, short, e.g., 21 nt, double stranded small interfering RNAs (siRNA) have been shown to be effective at inducing an RNAi response. See, e.g., Elbashir, et al. (2001) Nature 411:494-498. The mechanism may be used to downregulate expression levels of identified genes, e.g., treatment of or validation of relevance to disease.

[0334] Ribozymes

[0335] In addition to antisense polynucleotides, ribozymes can be used to target and inhibit transcription of soft tissue sarcoma cancer-associated nucleotide sequences. A ribozyme is an RNA molecule that catalytically cleaves other RNA molecules. Different kinds of ribozymes have been described, including group I ribozymes, hammerhead ribozymes, hairpin ribozymes, RNase P, and axhead ribozymes. See, e.g., Castanotto, et al. (1994) Adv. in Pharmacology 25:289-317.

[0336] General features of hairpin ribozymes are described, e.g., in Hampel, et al. (1990) Nuc. Acids Res. 18:299-304; European Patent Publication No. 0 360 257; U.S. Pat. No. 5,254,678. Methods of preparation are available. See, e.g., WO 94/26877; Yu, et al. (1993) Proc. Nat'l Acad. Sci. USA 90:6340-6344; Yamada, et al. (1994) Human Gene Therapy 1:39-45; Leavitt, et al. (1995) Proc. Nat'l Acad. Sci. USA 92:699-703; Leavitt, et al. (1994) Human Gene Therapy 5:1151-120; and Yamada, et al. (1994) Virology 205: 121-126.

[0337] Polynucleotide modulators of soft tissue sarcoma cancer may be introduced into a cell containing the target nucleotide sequence by formation of a conjugate with a ligand binding molecule, as described in WO 91/04753. Suitable ligand binding molecules include, but are not limited to, cell surface receptors, growth factors, other cytokines, or other ligands that bind to cell surface receptors. Preferably, conjugation of the ligand binding molecule does not substantially interfere with the ability of the ligand binding molecule to bind to its corresponding molecule or receptor, or block entry of the sense or antisense oligonucleotide or its conjugated version into the cell. Alternatively, a polynucleotide modulator of soft tissue sarcoma cancer may be introduced into a cell containing the target nucleic acid sequence, e.g., by formation of an polynucleotide-lipid complex, as described in WO 90/10448. It is understood that the use of antisense molecules or knock out and knock in models may also be used in screening assays as discussed above, in addition to methods of treatment.

[0338] Thus, in one embodiment, methods of modulating soft tissue sarcoma cancer in cells or organisms are provided. In one embodiment, the methods comprise administering to a cell an anti-soft tissue sarcoma cancer antibody that reduces or eliminates the biological activity of an endogenous soft tissue sarcoma cancer protein. Alternatively, the methods comprise administering to a cell or organism a recombinant nucleic acid encoding a soft tissue sarcoma cancer protein. This may be accomplished in many ways. In one embodiment, e.g., when the soft tissue sarcoma cancer sequence is down-regulated in soft tissue sarcoma cancer, such state may be reversed by increasing the amount of soft tissue sarcoma cancer gene product in the cell. This can be accomplished, e.g., by overexpressing the endogenous soft tissue sarcoma cancer gene or administering a gene encoding the soft tissue sarcoma cancer sequence, using known gene-therapy techniques. In one embodiment, the gene therapy techniques include the incorporation of the exogenous gene using enhanced homologous recombination (EHR), e.g., as described in PCT/US93/03868, hereby incorporated by reference in its entirety. Alternatively, e.g., when the soft tissue sarcoma cancer sequence is up-regulated in soft tissue sarcoma cancer, the activity of the endogenous soft tissue sarcoma cancer gene is decreased, e.g., by the administration of a soft tissue sarcoma cancer antisense nucleic acid or other inhibitor, such as RNAi.

[0339] In one embodiment, the soft tissue sarcoma cancer proteins of the present invention may be used to generate polyclonal and monoclonal antibodies to soft tissue sarcoma cancer proteins. Similarly, the soft tissue sarcoma cancer proteins can be coupled, using standard technology, to affinity chromatography columns. These columns may then be used to purify cancer antibodies useful for production, diagnostic, or therapeutic purposes. In one embodiment, the antibodies are generated to epitopes unique to a cancer protein; that is, the antibodies show little or no cross-reactivity to other proteins. The soft tissue sarcoma cancer antibodies may be coupled to standard affinity chromatography columns and used to purify cancer proteins. The antibodies may also be used as blocking polypeptides, as outlined above, since they will specifically bind to the cancer protein.

[0340] Methods of Identifying Variant Soft Tissue Sarcoma Cancer-associated Sequences

[0341] Without being bound by theory, expression of various soft tissue sarcoma cancer sequences is correlated with cancer. Accordingly, disorders based on mutant or variant soft tissue sarcoma cancer genes may be determined. In one embodiment, the invention provides methods for identifying cells containing variant soft tissue sarcoma cancer genes, e.g., determining all or part of the sequence of at least one endogenous soft tissue sarcoma cancer gene in a cell. This may be accomplished using known sequencing techniques. In one embodiment, the invention provides methods of identifying the cancer genotype of an individual, e.g., determining all or part of the sequence of at least one soft tissue sarcoma cancer gene of the individual. This is generally done in at least one tissue of the individual, and may include the evaluation of a number of tissues or different samples of the same tissue. The method may include comparing the sequence of the sequenced soft tissue sarcoma cancer gene to a known soft tissue sarcoma cancer gene, e.g., a wild-type gene.

[0342] The sequence of all or part of the soft tissue sarcoma cancer gene can then be compared to the sequence of a known soft tissue sarcoma cancer gene to determine if differences exist. This can be done using known homology programs, such as Bestfit, etc. In another embodiment, the presence of a difference in the sequence between the soft tissue sarcoma cancer gene of the patient and the known soft tissue sarcoma cancer gene correlates with a disease state or a propensity for a disease state, as outlined herein.

[0343] In one embodiment, the soft tissue sarcoma cancer genes are used as probes to determine the number of copies of the soft tissue sarcoma cancer gene in the genome.

[0344] In another embodiment, the soft tissue sarcoma cancer genes are used as probes to determine the chromosomal localization of the soft tissue sarcoma cancer genes. Information such as chromosomal localization finds use in providing a diagnosis or prognosis in particular when chromosomal abnormalities such as translocations, and the like are identified in the soft tissue sarcoma cancer gene locus.

[0345] Administration of Pharmaceutical and Vaccine Compositions

[0346] In one embodiment, a therapeutically effective dose of a soft tissue sarcoma cancer protein or modulator thereof, is administered to a patient. By “therapeutically effective dose” herein is meant a dose that produces effects for which it is administered. The exact dose will depend on the purpose of the treatment, and can be ascertained using known techniques. See, e.g., Ansel, et al. (1999) Pharmaceutical Dosage Forms and Drug Delivery Lippincott; Lieberman (1992) Pharmaceutical Dosage Forms (vols. 1-3) Dekker, ISBN 0824770846, 082476918X, 0824712692, 0824716981; Lloyd (1999) The Art, Science and Technology of Pharmaceutical Compounding Amer. Pharmaceut. Assn.; and Pickar (1998) Dosage Calculations Thomson. Adjustments for soft tissue sarcoma cancer degradation, systemic versus localized delivery, and rate of new protease synthesis, as well as the age, body weight, general health, sex, diet, time of administration, drug interaction, and the severity of the condition may be necessary. U.S. patent application Ser. No. 09/687,576, further discloses the use of compositions and methods of diagnosis and treatment in cancer.

[0347] A “patient” for the purposes of the present invention includes both humans and other animals, particularly mammals. Thus the methods are applicable to both human therapy and veterinary applications. In one embodiment the patient is a mammal, preferably a primate, including humans.

[0348] The administration of the soft tissue sarcoma cancer proteins and modulators thereof of the present invention can be done in a variety of ways as discussed above, including, but not limited to, orally, subcutaneously, intravenously, intranasally, transdermally topically, intraperitoneally, intramuscularly, intrapulmonary, vaginally, rectally, or intraocularly. In some instances, e.g., in the treatment of wounds and inflammation, the soft tissue sarcoma cancer proteins and modulators may be directly applied as a solution, spray, or ointment.

[0349] The pharmaceutical compositions of the present invention comprise a soft tissue sarcoma cancer protein in a form suitable for administration to a patient. In one embodiment, the pharmaceutical compositions are in a water soluble form, such as being present as pharmaceutically acceptable salts, which is meant to include both acid and base addition salts. “Pharmaceutically acceptable acid addition salt” refers to those salts that retain the biological effectiveness of the free bases and that are not biologically or otherwise undesirable, formed with inorganic acids such as hydrochloric acid, hydrobromic acid, sulfuric acid, nitric acid, phosphoric acid and the like, and organic acids such as acetic acid, propionic acid, glycolic acid, pyruvic acid, oxalic acid, maleic acid, malonic acid, succinic acid, fumaric acid, tartaric acid, citric acid, benzoic acid, cinnamic acid, mandelic acid, methanesulfonic acid, ethanesulfonic acid, p-toluenesulfonic acid, salicylic acid, and the like. “Pharmaceutically acceptable base addition salts” include those derived from inorganic bases such as sodium, potassium, lithium, ammonium, calcium, magnesium, iron, zinc, copper, manganese, aluminum salts, and the like. Particularly useful are the ammonium, potassium, sodium, calcium, and magnesium salts. Salts derived from pharmaceutically acceptable organic non-toxic bases include salts of primary, secondary, and tertiary amines, substituted amines including naturally occurring substituted amines, cyclic amines and basic ion exchange resins, such as isopropylamine, trimethylamine, diethylamine, triethylamine, tripropylamine, and ethanolamine.

[0350] The pharmaceutical compositions may also include one or more of the following: carrier proteins such as serum albumin; buffers; fillers such as microcrystalline cellulose, lactose, corn and other starches; binding agents; sweeteners and other flavoring agents; coloring agents; and polyethylene glycol.

[0351] The pharmaceutical compositions can be administered in a variety of unit dosage forms depending upon the method of administration. For example, unit dosage forms suitable for oral administration include, but are not limited to, powder, tablets, pills, capsules, and lozenges. It is recognized that soft tissue sarcoma cancer protein modulators (e.g., antibodies, antisense constructs, ribozymes, small organic molecules, etc.) when administered orally, should be protected from digestion. This is typically accomplished either by complexing the molecule(s) with a composition to render it resistant to acidic and enzymatic hydrolysis, or by packaging the molecule(s) in an appropriately resistant carrier, such as a liposome or a protection barrier. Means of protecting agents from digestion are available.

[0352] The compositions for administration will commonly comprise a soft tissue sarcoma cancer protein modulator dissolved in a pharmaceutically acceptable carrier, preferably an aqueous carrier. A variety of aqueous carriers can be used, e.g., buffered saline and the like. These solutions are sterile and generally free of undesirable matter. These compositions may be sterilized by conventional, well known sterilization techniques. The compositions may contain pharmaceutically acceptable auxiliary substances as required to approximate physiological conditions such as pH adjusting and buffering agents, toxicity adjusting agents and the like, e.g., sodium acetate, sodium chloride, potassium chloride, calcium chloride, sodium lactate, and the like. The concentration of active agent in these formulations can vary widely, and will be selected primarily based on fluid volumes, viscosities, body weight, and the like in accordance with the particular mode of administration selected and the patient's needs. See, e.g., (1980) Remington's Pharmaceutical Science (18th ed.) Mack; and Hardman and Limbird (eds. 2001) Goodman and Gilman: The Pharmacological Basis of Therapeutics (10th ed.) McGraw-Hill.

[0353] Thus, a typical pharmaceutical composition for intravenous administration would be about 0.1 to 10 mg per patient per day. Dosages from about 0.1 to 100 mg per patient per day may be used, particularly when the drug is administered to a secluded site and not into the blood stream, such as into a body cavity or into a lumen of an organ. Substantially higher dosages are possible in topical administration. Actual methods for preparing parenterally administrable compositions will be known or apparent.

[0354] The compositions containing modulators of soft tissue sarcoma cancer proteins can be administered for therapeutic or prophylactic treatments. In therapeutic applications, compositions are administered to a patient suffering from a disease (e.g., a cancer) in an amount sufficient to cure or at least partially arrest the disease and its complications. An amount adequate to accomplish this is defined as a “therapeutically effective dose.” Amounts effective for this use will depend upon the severity of the disease and the general state of the patient's health. Single or multiple administrations of the compositions may be administered depending on the dosage and frequency as required and tolerated by the patient. The composition should provide a sufficient quantity of the agents of this invention to effectively treat the patient. An amount of modulator that is capable of preventing or slowing the development of soft tissue sarcoma cancer in a mammal is referred to as a “prophylactically effective dose.” The particular dose required for a prophylactic treatment will depend upon the medical condition and history of the mammal, the particular stage or form of soft tissue sarcoma cancer disorder being prevented, as well as other factors such as age, weight, gender, administration route, efficiency, etc. Such prophylactic treatments may be used, e.g., in a mammal who has previously had cancer to prevent a recurrence of the cancer, or in a mammal who is suspected of having a significant likelihood of developing cancer, based, at least in part, upon gene expression profiles. Vaccine strategies may be used, in either a DNA vaccine form, or protein vaccine.

[0355] It will be appreciated that the present soft tissue sarcoma cancer protein-modulating compounds can be administered alone or in combination with additional soft tissue sarcoma cancer modulating compounds or with other therapeutic agent, e.g., other anti-cancer agents or treatments.

[0356] In numerous embodiments, one or more nucleic acids, e.g., polynucleotides comprising nucleic acid sequences set forth in Tables 1A-11C, such as RNAi, antisense polynucleotides, or ribozymes, will be introduced into cells, in vitro or in vivo. The present invention provides methods, reagents, vectors, and cells useful for expression of soft tissue sarcoma cancer-associated polypeptides and nucleic acids using in vitro (cell-free), ex vivo, or in vivo (cell or organism-based) recombinant expression systems.

[0357] The particular procedure used to introduce the nucleic acids into a host cell for expression of a protein or nucleic acid is application specific. Many procedures for introducing foreign nucleotide sequences into host cells may be used. These include the use of calcium phosphate transfection, spheroplasts, electroporation, liposomes, microinjection, plasma vectors, viral vectors, and other well known methods for introducing cloned genomic DNA, cDNA, synthetic DNA, or other foreign genetic material into a host cell. See, e.g., Berger and Kinunel (1987) Guide to Molecular Cloning Techniques from Methods in Enzymology (vol. 152) Academic Press; Ausubel, et al. (eds. 1999 and supplements) Current Protocols Lippincott; and Sambrook, et al. (2001) Molecular Cloning: A Laboratory Manual (3d ed., Vol. 1-3) CSH Press.

[0358] In one embodiment, soft tissue sarcoma cancer proteins and modulators are administered as therapeutic agents, and can be formulated as outlined above. Similarly, cancer genes (including both the full-length sequence, partial sequences, or regulatory sequences of the cancer coding regions) can be administered in a gene therapy application. These cancer genes can include inhibitory applications, e.g., inhibitory RNA, gene therapy (e.g., for incorporation into the genome), or antisense compositions.

[0359] Soft tissue sarcoma cancer polypeptides and polynucleotides can also be administered as vaccine compositions to stimulate HTL, CTL, and antibody responses. Such vaccine compositions can include, e.g., lipidated peptides (see, e.g., Vitiello, et al. (1995) J. Clin. Invest. 95:341-349), peptide compositions encapsulated in poly(DL-lactide-co-glycolide) (“PLG”) microspheres (see, e.g., Eldridge, et al. (1991) Molec. Immunol. 28:287-294; Alonso, et al. (1994) Vaccine 12:299-306; Jones, et al. (1995) Vaccine 13:675-681), peptide compositions contained in immune stimulating complexes (ISCOMS) (see, e.g., Takahashi, et al. (1990) Nature 344:873-875; Hu, et al. (1998) Clin. Exp. Immunol. 113:235-243), multiple antigen peptide systems (MAPs) (see, e.g., Tam (1988) Proc. Nat'l Acad. Sci. USA 85:5409-5413; Tam (1996) J. Immunol. Meth. 196:17-32), peptides formulated as multivalent peptides; peptides for use in ballistic delivery systems, typically crystallized peptides, viral delivery vectors (Perkus, et al., p. 379, in Kaufmann (ed. 1996) Concepts in Vaccine Development de Gruyter; Chakrabarti, et al. (1986) Nature 320:535-537; Hu, et al. (1986) Nature 320:537-540; Kieny, et al. (1986) Bio/Technology 4:790-795; Top, et al. (1971) J. Infect. Dis. 124:148-154; Chanda, et al. (1990) Virology 175:535-547), particles of viral or synthetic origin (see, e.g., Kofler, et al. (1996) J. Immunol. Meth. 192:25-35; Eldridge, et al. (1993) Sem. Hematol. 30:16-24; Falo, et al. (1995) Nature Med. 1:649-653), adjuvants (Warren, et al. (1986) Ann. Rev. Immunol. 4:369-388; Gupta, et al. (1993) Vaccine 11:293-306), liposomes (Reddy, et al. (1992) J. Immunol. 148:1585-1589; Rock (1996) Immunol. Today 17:131-137), or naked or particle absorbed cDNA (Ulmer, et al. (1993) Science 259:1745-1749; Robinson, et al. (1993) Vaccine 11:957-960; Shiver, et al., p 423, in Kaufmann (ed. 1996) Concepts in Vaccine Development de Gruyter; Cease and Berzofsky (1994) Ann. Rev. Immunol. 12:923-989; and Eldridge, et al. (1993) Sem. Hematol. 30:16-24). Toxin-targeted delivery technologies, also known as receptor mediated targeting, such as those of Avant Immunotherapeutics, Inc. (Needham, Mass.) may also be used.

[0360] Vaccine compositions often include adjuvants. Many adjuvants contain a substance designed to protect the antigen from rapid catabolism, such as aluminum hydroxide or mineral oil, and a stimulator of immune responses, such as lipid A, Bortadella pertussis or Mycobacterium tuberculosis derived proteins. Certain adjuvants are commercially available as, e.g., Freund's Incomplete Adjuvant and Complete Adjuvant (Difco Laboratories, Detroit, Mich.); Merck Adjuvant 65 (Merck and Company, Inc., Rahway, N.J.); AS-2 (SmithKline Beecham, Philadelphia, Pa.); aluminum salts such as aluminum hydroxide gel (alum) or aluminum phosphate; salts of calcium, iron or zinc; an insoluble suspension of acylated tyrosine; acylated sugars; cationically or anionically derivatized polysaccharides; polyphosphazenes; biodegradable microspheres; monophosphoryl lipid A; and quil A. Cytokines, such as GM-CSF, interleukin-2, -7, -12, and other like growth factors, may also be used as adjuvants.

[0361] Vaccines can be administered as nucleic acid compositions wherein DNA or RNA encoding one or more of the polypeptides, or a fragment thereof, is administered to a patient. See, e.g., Wolff, et al. (1990) Science 247:1465-1468 as well as U.S. Pat. Nos. 5,580,859; 5,589,466; 5,804,566; 5,739,118; 5,736,524; 5,679,647; WO 98/04720; and in more detail below. Examples of DNA-based delivery technologies include “naked DNA”, facilitated (bupivicaine, polymers, peptide-mediated) delivery, cationic lipid complexes, and particle-mediated (“gene gun”) or pressure-mediated delivery (see, e.g., U.S. Pat. No. 5,922,687).

[0362] For therapeutic or prophylactic immunization purposes, the peptides of the invention can be expressed by viral or bacterial vectors. Examples of expression vectors include attenuated viral hosts, such as vaccinia or fowlpox. This approach involves the use of vaccinia virus, e.g., as a vector to express nucleotide sequences that encode cancer polypeptides or polypeptide fragments. Upon introduction into a host, the recombinant vaccinia virus expresses the immunogenic peptide, and thereby elicits an immune response. Vaccinia vectors and methods useful in immunization protocols are described, e.g., in U.S. Pat. No. 4,722,848. Another vector is BCG (Bacille Calmette Guerin). See Stover, et al. (1991) Nature 351:456-460. A wide variety of other vectors are available for therapeutic administration or immunization, e.g., adeno and adeno-associated virus vectors, retroviral vectors, Salmonella typhi vectors, detoxified anthrax toxin vectors, and the like. See, e.g., Shata, et al. (2000) Mol. Med. Today 6:66-71; Shedlock, et al. (2000) J. Leukoc. Biol. 68:793-806; and Hipp, et al. (2000) In Vivo 14:571-85.

[0363] Methods for the use of genes as DNA vaccines are well known, and include placing a cancer gene or portion of a cancer gene under the control of a regulatable promoter or a tissue-specific promoter for expression in a soft tissue sarcoma cancer patient. The soft tissue sarcoma cancer gene used for DNA vaccines can encode full-length soft tissue sarcoma cancer proteins, but more preferably encodes portions of the cancer proteins including peptides derived from the cancer protein. In one embodiment, a patient is immunized with a DNA vaccine comprising a plurality of nucleotide sequences derived from a soft tissue sarcoma cancer gene. For example, soft tissue sarcoma cancer-associated genes or sequence encoding subfragments of a soft tissue sarcoma cancer protein are introduced into expression vectors and tested for their immunogenicity in the context of Class I MHC and an ability to generate cytotoxic T cell responses. This procedure provides for production of cytotoxic T cell responses against cells which present antigen, including intracellular epitopes.

[0364] In one embodiment, the DNA vaccines include a gene encoding an adjuvant molecule with the DNA vaccine. Such adjuvant molecules include cytokines that increase the immunogenic response to the soft tissue sarcoma cancer polypeptide encoded by the DNA vaccine. Additional or alternative adjuvants are available.

[0365] In another embodiment soft tissue sarcoma cancer genes find use in generating animal models of soft tissue sarcoma cancer. When the soft tissue sarcoma cancer gene identified is repressed or diminished in cancer tissue, gene therapy technology, e.g., wherein antisense RNA directed to the soft tissue sarcoma cancer gene will also diminish or repress expression of the gene. Animal models of soft tissue sarcoma cancer find use in screening for modulators of a soft tissue sarcoma cancer-associated sequence or modulators of soft tissue sarcoma cancer. Similarly, transgenic animal technology including gene knockout technology, e.g., as a result of homologous recombination with an appropriate gene targeting vector, will result in the absence or increased expression of the soft tissue sarcoma cancer protein. When desired, tissue-specific expression or knockout of the soft tissue sarcoma cancer protein may be necessary.

[0366] It is also possible that the soft tissue sarcoma cancer protein is overexpressed in soft tissue sarcoma cancer. As such, transgenic animals can be generated that overexpress the soft tissue sarcoma cancer protein. Depending on the desired expression level, promoters of various strengths can be employed to express the transgene. Also, the number of copies of the integrated transgene can be determined and compared for a determination of the expression level of the transgene. Animals generated by such methods find use as animal models of soft tissue sarcoma cancer and are additionally useful in screening for modulators to treat soft tissue sarcoma cancer or to evaluate a therapeutic entity.

[0367] Kits for Use in Diagnostic and/or Prognostic Applications

[0368] For use in diagnostic, research, and therapeutic applications suggested above, kits are also provided by the invention. In the diagnostic and research applications such kits may include at least one of the following: assay reagents, buffers, soft tissue sarcoma cancer-specific nucleic acids or antibodies, hybridization probes and/or primers, antisense polynucleotides, ribozymes, dominant negative soft tissue sarcoma cancer polypeptides or polynucleotides, small molecules inhibitors of cancer-associated sequences, etc. A therapeutic product may include sterile saline or another pharmaceutically acceptable emulsion and suspension base.

[0369] In addition, the kits may include instructional materials containing directions (e.g., protocols) for the practice of the methods of this invention. While the instructional materials typically comprise written or printed materials they are not limited to such. A medium capable of storing such instructions and communicating them to an end user is contemplated by this invention. Such media include, but are not limited to electronic storage media (e.g., magnetic discs, tapes, cartridges, chips), optical media (e.g., CD ROM), and the like. Such media may include addresses to internet sites that provide such instructional materials.

[0370] The present invention also provides for kits for screening for modulators of soft tissue sarcoma cancer-associated sequences. Such kits can be prepared from readily available materials and reagents. For example, such kits can comprise one or more of the following materials: a soft tissue sarcoma cancer-associated polypeptide or polynucleotide, reaction tubes, and instructions for testing cancer-associated activity. Optionally, the kit contains biologically active soft tissue sarcoma cancer protein. A wide variety of kits and components can be prepared according to the present invention, depending upon the intended user of the kit and the particular needs of the user. Diagnosis would typically involve evaluation of a plurality of genes or products. The genes will be selected based on correlations with important parameters in disease which may be identified in historical or outcome data.

### EXAMPLES

### Example 1

### Tissue Preparation, Labeling Chips, and Fingerprints

[0371] Purify Total RNA from Tissue Using TRIZOL® Reagent

[0372] Estimate tissue weight. Homogenize tissue samples in 1 ml of TRIZOL® (chemical reagents for use in isolating biological material from organic tissue) per 50 mg of tissue using a Polytron 3100 homogenizer. The generator/probe used depends upon the tissue size. A generator that is too large for the amount of tissue to be homogenized will cause a loss of sample and lower RNA yield. Use the 20 mm generator for tissue weighing more than 0.6 g. If the working volume is greater than 2 ml, then homogenize tissue in a 15 ml polypropylene tube (Falcon 2059). Fill tube no greater than 10 ml.

[0373] Homogenization

[0374] Before using generator, it should have been cleaned after last usage by running it through soapy H20 and rinsing thoroughly. Run through with EtOH to sterilize. Keep tissue frozen until ready. Add TRIZOL® directly to frozen tissue then homogenize.

[0375] Following homogenization, remove insoluble material from the homogenate by centrifugation at 7500×g for 15 min. in a Sorvall superspeed or 12,000×g for 10 min. in an Eppendorf centrifuge at 4° C. Transfer the cleared homogenate to a new tube(s). The samples may be frozen now at −60 to −70° C. (and kept for at least one month) or you may continue with the purification.

[0376] Phase Separation

[0377] Incubate the homogenized samples for 5 minutes at room temperature. Add 0.2 ml of chloroform per 1 ml of TRIZOL® reagent used in the original homogenization.

[0378] Cap tubes securely and shake tubes vigorously by hand (do not vortex) for 15 seconds.

[0379] Incubate samples at room temp. for 2-3 minutes. Centrifuge samples at 6500 rpm in a Sorvall superspeed for 30 min. at 4° C. (You may spin at up to 12,000×g for 10 min. but you risk breaking your tubes in the centrifuge.)

[0380] RNA Precipitation

[0381] Transfer the aqueous phase to a fresh tube. Save the organic phase if isolation of DNA or protein is desired. Add 0.5 ml of isopropyl alcohol per 1 ml of TRIZOL® reagent used in the original homogenization. Cap tubes securely and invert to mix.

[0382] Incubate samples at room temp. for 10 minutes. Centrifuge samples at 6500 rpm in Sorvall for 20 min. at 4° C.

[0383] RNA Wash

[0384] Pour off the supernate. Wash pellet with cold 75% ethanol. Use 1 ml of 75% ethanol per 1 ml of TRIzol reagent used in the initial homogenization. Cap tubes securely and invert several times to loosen pellet. (Do not vortex). Centrifuge at <8000 rpm (<7500×g) for 5 minutes at 4° C.

[0385] Pour off the wash. Carefully transfer pellet to an eppendorf tube (let it slide down the tube into the new tube and use a pipet tip to help guide it in if necessary). Depending on the volumes you are working with, you can decide what size tube(s) you want to precipitate the RNA in. When I tried leaving the RNA in the large 15 ml tube, it took so long to dry (i.e. it did not dry) that I eventually had to transfer it to a smaller tube. Let pellet dry in hood. Resuspend RNA in an appropriate volume of DEPC H₂O. Try for 2-5 μg/ul. Take absorbance readings.

[0386] Purify poly A+ mRNA from Total RNA or Clean up Total RNA with Qiagen's RNeasy Kit

[0387] Purification of poly A⁺ mRNA from total RNA. Heat oligotex suspension to 37° C. and mix immediately before adding to RNA. Incubate Elution Buffer at 70° C. Warm up 2×Binding Buffer at 65° C. if there is precipitate in the buffer. Mix total RNA with DEPC-treated water, 2×Binding Buffer, and Oligotex according to Table 2 on page 16 of the Oligotex Handbook. Incubate for 3 minutes at 65° C. Incubate for 10 minutes at room temperature.

[0388] Centrifuge for 2 minutes at 14,000 to 18,000 g. If centrifuge has a “soft setting,” then use it. Remove supernatant without disturbing Oligotex pellet. A little bit of solution can be left behind to reduce the loss of Oligotex. Save sup until certain that satisfactory binding and elution of poly A+mRNA has occurred. Gently resuspend in Wash Buffer OW2 and pipet onto spin column. Centrifuge the spin column at full speed (soft setting if possible) for 1 minute.

[0389] Transfer spin column to a new collection tube and gently resuspend in Wash Buffer OW2 and centrifuge as describe herein.

[0390] Transfer spin column to a new tube and elute with 20 to 100 ul of preheated (70° C.) Elution Buffer. Gently resuspend Oligotex resin by pipetting up and down. Centrifuge as above. Repeat elution with fresh elution buffer or use first eluate to keep the elution volume low.

[0391] Read absorbance, using diluted Elution Buffer as the blank.

[0392] Before proceeding with cDNA synthesis, the mRNA must be precipitated. Some component leftover or in the Elution Buffer from the Oligotex purification procedure will inhibit downstream enzymatic reactions of the mRNA.

[0393] Ethanol Precipitation

[0394] Add 0.4 vol. of 7.5 M NH₄OAc+2.5 vol. of cold 100% ethanol. Precipitate at −20° C. 1 hour to overnight (or 20-30 min. at -70° C.). Centrifuge at 14,000-16,000×g for 30 minutes at 4° C. Wash pellet with 0.5 ml of 80%ethanol (−20° C.) then centrifuge at 14,000-16,000×g for 5 minutes at room temperature. Repeat 80% ethanol wash. Dry the last bit of ethanol from the pellet in the hood. (Do not speed vacuum dry). Suspend pellet in DEPC H₂O at lug/ul concentration.

[0395] Clean up Total RNA Using Qiagen's RNeasy Kit

[0396] Add no more than 100 ug to an RNeasy column. Adjust sample to a volume of 100 ul with RNase-free water. Add 350 ul Buffer RLT then 250 ul ethanol (100%) to the sample. Mix by pipetting (do not centrifuge) then apply sample to an RNeasy mini spin column. Centrifuge for 15 sec at >10,000 rpm. If concerned about yield, re-apply flowthrough to column and centrifuge again.

[0397] Transfer column to a new 2-ml collection tube. Add 500ul Buffer RPE and centrifuge for 15 sec at >10,000 rpm. Discard flowthrough. Add 500 ul Buffer RPE and centrifuge for 15 sec at >10,000 rpm. Discard flowthrough then centrifuge for 2 min at maximum speed to dry column membrane. Transfer column to a new 1.5-ml collection tube and apply 30-50 ul of RNase-free water directly onto column membrane. Centrifuge 1 min at >10,000 rpm. Repeat elution.

[0398] Take absorbance reading. If necessary, ethanol precipitate with ammonium acetate and 2.5×volume 100% ethanol.

[0399] Make cDNA Using Gibco's “SuperScript Choice System for cDNA Synthesis ” Kit First Strand cDNA Synthesis

[0400] Use 5ug of total RNA or 1 ug of polyA+ mRNA as starting material. For total RNA, use 2 ul of SuperScript RT. For polyA+ mRNA, use 1 ul of SuperScript RT. Final volume of first strand synthesis mix is 20 ul. RNA must be in a volume no greater than 10 ul. Incubate RNA with 1 ul of 100 pmol T7-T24 oligo for 10 min at 70C. On ice, add 7 ul of: 4 ul 5×1^{st} Strand Buffer, 2 ul of 0.1M DTT, and 1 ul of 10 mM dNTP mix. Incubate at 37C for 2 min then add SuperScript RT Incubate at 37C for 1 hour.

[0401] Second Strand Synthesis

[0402] Place 1^{st} strand reactions on ice.

| | | |
|---|---|---|
| Add: | 91 ul | DEPC H20 |
| | 30 ul | 5X 2^{nd} Strand Buffer |
| | 3 ul | 10 mM dNTP mix |
| | 1 ul | 10 U/ul E. coli DNA Ligase |
| | 4 ul | 10 U/ul E. coli DNA Polymerase |
| | 1 ul | 2 U/ul RNase H |

[0403] Make the above into a mix if there are more than 2 samples. Mix and incubate 2 hours at 16C.

[0404] Add 2 ul T4 DNA Polymerase. Incubate 5 min at 16C. Add 10 ul of 0.5M EDTA

[0405] Clean up cDNA

[0406] Phenol:Chloroform:Isoamyl Alcohol (25:24:1) purification using Phase-Lock gel (PLG) tubes.

[0407] Centrifuge PLG tubes for 30 sec at maximum speed. Transfer cDNA mix to PLG tube. Add equal volume of phenol:chloroform:isoamyl alcohol and shake vigorously (do not vortex). Centrifuge 5 minutes at maximum speed. Transfer top aqueous solution to a new tube. Ethanol precipitate: add 7.5×5M NH40ac and 2.5×volume of 100% ethanol. Centrifuge immediately at room temp. for 20 min, maximum speed. Remove sup then wash pellet 2× with cold 80% ethanol. Remove as much ethanol wash as possible then let pellet air dry. Resuspend pellet in 3 ul RNase-free water.

[0408] In vitro Transcription (IVT) and Labeling With Biotin

[0409] Pipet 1.5 ul of cDNA into a thin-wall PCR tube.

[0410] Make NTP Labeling Mix:

| | | |
|---|---|---|
| Combine | 2 ul | T7 10xATP (75 mM) (Ambion) |
| at | 2 ul | T7 10xGTP (75 mM) (Ambion) |
| room | 1.5 ul | T7 10xCTP (75 mM) (Ambion) |
| temperature: | 1.5 ul | T7 10xUTP (75 mM) (Ambion) |
| | 3.75 ul | 10 mM Bio-11-UTP (Boehringer- |
| | | Mannheim/Roche or Enzo) |
| | 3.75 ul | 10 mM Bio-16-CTP (Enzo) |
| | 2 ul | 10x T7 transcription buffer (Ambion) |
| | 2 ul | 10x T7 enzyme mix (Ambion) |

[0411] Final volume of total reaction is 20 ul. Incubate 6 hours at 37C in a PCR machine.

[0412] RNeasy Clean-up of IVT Product

[0413] Follow previous instructions for RNeasy columns or refer to Qiagen's RNeasy protocol handbook.

[0414] cRNA will most likely need to be ethanol precipitated. Resuspend in a volume compatible with the fragmentation step.

[0415] Fragmentation

[0416] 15 ug of labeled RNA is usually fragmented. Try to minimize the fragmentation reaction volume; a 10 ul volume is recommended but 20 ul is all right. Do not go higher than 20 ul because the magnesium in the fragmentation buffer contributes to precipitation in the hybridization buffer.

[0417] Fragment RNA by incubation at 94 C for 35 minutes in 1×Fragmentation buffer.

[0418] 5×Fragmentation Buffer:

[0419] 200 mM Tris-acetate, pH 8.1

[0420] 500 mM KOAc

[0421] 150 mM MgOAc

[0422] The labeled RNA transcript can be analyzed before and after fragmentation. Samples can be heated to 65C for 15 minutes and electrophoresed on 1% agarose/TBE gels to get an approximate idea of the transcript size range

[0423] Hybridization

[0424] 200 ul (10 ug cRNA) of a hybridization mix is put on the chip. If multiple hybridizations are to be done (such as cycling through a 5 chip set), then it is recommended that an initial hybridization mix of 300 ul or more be made.

[0425] Hybrization Mix: Fragment Labeled RNA (50 ng/ul final conc.)

[0426] 50 pM 948-b control oligo

[0427] 1.5 pM BioB

[0428] 5 pM BioC

[0429] 25 pM BioD

[0430] 100 pM CRE

[0431] 0.1 mg/ml herring sperm DNA

[0432] 0.5 mg/ml acetylated BSA

[0433] to 300 ul with 1×MES hyb. buffer

[0434] The instruction manuals for the products used herein are incorporated herein in their entirety.

[0435] Labeling Protocol

[0436] Hybridization reaction:

Start with non-biotinylated IVT (purified by
RNeasy columns) (see example 1 for
steps from tissue to IVT)

| | |
|---|---|
| IVT antisense RNA; 4 μg: | μl |
| Random Hexamers (1 μg/μl): | 4 μl |
| H₂O: | μl |
| | 14 μl |

[0437] Incubate 70° C., 10 min. Put on ice.

[0438] Reverse Transcription:

| | |
|---|---|
| 5X First Strand (BRL) buffer. | 6 μl |
| 0.1 M DTT: | 3 μl |
| 50X dNTP mix: | 0.6 μl |
| H2O: | 2.4 μl |
| Cy3 or Cy5 dUTP (1 mM): | 3 μl |
| SS RT II (BRL): | 1 μl |
| | 16 μl |

[0439] Add to hybridization reaction.

[0440] Incubate 30 min., 42° C.

[0441] Add 1 μl SSII and let go for another hour.

[0442] Put on ice.

[0443] 50×dNTP mix (25 mM of cold dATP, dCTP, and dGTP, 10 mM of dTTP: 25 μl each of 100 mM dATP, dCTP, and dGTP; 10 μl of 100 mM dTTP to 15 μl H2O. dNTPs from Pharmacia)

[0444] RNA Degradation:

| | |
|---|---|
| Add 1.5 μl 1M NaOH/2 mM EDTA, | 86 μl H₂O |
| incubate at 65° C., 10 min. | |
| NaOH | 10 μl 10 N |
| EDTA | 4 μl 50 mM |
| U-Con 30 | |

500 μl TE/sample spin at 7000 g for 10 min, save flow through for purification

[0445] Qiagen Purification:

[0446] suspend u-con recovered material in 500 μl buffer PB

[0447] proceed w/normal Qiagen protocol

[0448] DNAse Digest:

[0449] Add 1 μl of 1/100 dil of DNAse/30 μl Rx and incubate at 37° C. for 15 min.

[0450] 5 min 95° C. to denature enzyme

[0451] Sample Preparation:

| Add: | | |
|---|---|---|
| Cot-1 DNA: | 10 | μl |
| 50X dNTPs: | 1 | μl |
| 20X SSC: | 2.3 | μl |
| Na pyro phosphate: | 7.5 | μl |
| 10 mg/ml Herring sperm DNA | 1 | μl of 1/10 dilution |
| | 21.8 | final vol. |

[0452] Dry down in speed vac.

[0453] Resuspend in 15 μl H₂0.

[0454] Add 0.38 μl 10% SDS.

[0455] Heat 95° C., 2 min.

[0456] Slow cool at room temp. for 20 min.

[0457] Put on slide and hybridize overnight at 64° C.

[0458] Washing After the Hybridization:

| | |
|---|---|
| 3X SSC/0.03% SDS: | 37.5 mls 20X SSC + 0.75 mls |
| 2 min. | 10% SDS in 250 mls H₂O |
| 1X SSC: 5 min. | 12.5 mls 20X SSC in 250 mls H₂O |
| 0.2X SSC: 5 min. | 2.5 mls 20X SSC in 250 mls H₂O |

Dry slides in centrifuge, 1000 RPM, 1 min.
Scan at appropiate PMT's and channels.

### Example 2

### Gene Chip Analysis

[0459] Molecular profiles of various normal and soft tissue sarcoma cancer tissues were determined and analyzed using gene chips. RNA was isolated and gene chip analysis was performed as described above (Glynne, et al. (2000) Nature 403:672-676; Zhao, et al. (2000) Genes Dev. 14:981-993). The results are shown in the tables and figures that follow. These soft tissue sarcoma (STSD) associated sequences are identified in the tables by Genbank Accession numbers and gene titles. As indicated, some of the Accession numbers include expression sequence tags (ESTs). Thus, in one embodiment herein, genes within an expression profile, also termed expression profile genes, include ESTs and are not necessarily full length.

[0460] It is understood that the examples described above in no way serve to limit the true scope of this invention to specific embodiments, but rather are presented for illustrative purposes. All publications, sequences of accession numbers, and patent applications cited in this specification are herein incorporated by reference as if each individual publication or patent application were specifically and individually indicated to be incorporated by reference.

What is claimed is:

1. A method of detecting soft tissue sarcoma comprising:
a. obtaining a first soft tissue sample from an individual and a normal soft tissue sample from the same individual or from a different individual;
b. determining the expression of a gene of Tables 1A-11C in the first soft tissue sample and the normal soft tissue sample; and
c. comparing the expression of said gene in the first soft tissue sample to expression of said gene in the normal soft tissue sample;
wherein a higher level of protein expression in the first soft tissue sample indicates the presence of soft tissue sarcoma.

2. The method of claim 1, wherein said expression is measured using a labeled nucleic acid probe.

3. The method of claim 1, wherein said first soft tissue sample and said normal soft tissue sample comprises isolated nucleic acids.

4. The method of claim 3, wherein the isolated nucleic acids are amplified.

5. The method of claim 3, wherein said isolated nucleic acids are mRNA.

6. The method of claim 1, wherein said first soft tissue sample and said normal soft tissue sample comprises isolated polypeptides or proteins.

7. The method of claim 6, wherein said protein expression is evaluated using antibodies.

8. The method of claim 1, wherein said expression is measured utilizing a biochip.

9. The method of claim 8, wherein said biochip comprises nucleic acids complementary to the gene of Tables 1A-11C.

10. The method of claim 8, wherein said biochip comprises antibodies capable of binding a polypeptide or protein encoded by the gene of Tables 1A-11C.

11. An antibody that specifically binds a polypeptide or protein encoded by a gene of Tables 1A-11C.

12. The antibody of claim 11, wherein the antibody is a humanized antibody.

13. The antibody of claim 11, wherein the antibody is conjugated to an effector moiety.

14. The antibody of claim 13, wherein the effector moiety is a labeling moiety or a therapeutic moiety.

15. A method for treating an individual with soft tissue sarcoma comprising administering an antibody of claim 13.

16. A method for determining the prognosis of a human individual with soft tissue sarcoma cancer comprising determining the expression of a gene of Tables 1A-11C in a soft tissue sample of said human individual at different disease stages, wherein the expression of the gene at different disease stages is used to determine the prognosis of the human individual.

17. A method for generating an immune response in an individual to inhibit soft tissue sarcoma cancer comprising:
a. purifying a polypeptide encoded by a gene of Tables 1A-11C; and
b. administering said polypeptide of (a) to an individual.

18. A method for generating an immune response in an individual to inhibit soft tissue sarcoma cancer comprising:
a. purifying a nucleic acid of Tables 1A-11C; and
b. administering said nucleic acid of (a) to an individual.

19. A method for generating a marker for detecting soft tissue sarcoma in a pathological assay, comprising:
a. purifying a polypeptide encoded by a gene of Tables 1A-11C;
b. generating a binding partner to the polypeptide of (a); and
c. labeling the binding partner.

20. The method of claim 19, wherein the binding partner is an antibody.

21. A method for screening for an agent capable of binding to a polypeptide encoded by a gene of Tables 1A-11C comprising:
a. purifying a polypeptide encoded by a gene of Tables 1A-11C;
b. combining said polypeptide with a plurality of labeled agents;
c. capturing said labeled agent(s) bound to the polypeptide of (a)
d. identifying the captured agent(s) of (d).

22. The method of claim 21, wherein said capturing utilizes an antibody to the polypeptide of (a).

23. A method for screening for an agent capable of binding to a nucleic acid of Tables 1A-11C comprising:
a. purifying a nucleic acid of Tables 1A-11C;
b. combining said nucleic acid with a plurality of labeled agents;
c. capturing said labeled agent(s) bound to the labeled nucleic acid of (a);
d. identifying the captured agent(s) of (c).

24. A method of screening for a compound that modulates the expression of a gene associated with soft tissue sarcoma comprising:
a. monitoring the expression level of a gene of Tables 1A-11C in a biological system expressing the gene of Tables 1A-11C;
b. administering a compound to said biological system;
c. comparing the expression of the gene of (a) prior to and after administering the compound;
wherein a change in expression level prior to and after administering the compound indicates that the compound is capable of modulating the expression of the gene.

25. A method for detecting the presence of antibodies specific to soft tissue sarcoma, the method comprising:
a. obtaining a first soft tissue sample from an individual;
b. contacting said soft tissue sample with a polypeptide encoded by a nucleotide sequence of Tables 1A-11C:
detecting the binding of antibodies from the soft tissue sample to the polypeptide of (b).

The application's sequence listing, which the Patent Office published only in electronic form, follows.

SEQUENCE LISTING (8393 sequences)

SEQ ID NO: 1 - DNA, 4204 bp, Homo sapiens
caggacagggaagagcgggcgctatggggagccggacgccagagtcccctctccacgccgtgcagctgcgctggggcccccggcgccgacccccgctcgtgccgctgctgttgctgctcgtgccgccgccacccagggtcgggggcttcaacttagacgcggaggccccagcagtactctcggggcccccgggctccttcttcggattctcagtggagttttaccggccgggaacagacggggtcagtgtgctggtgggagcacccaaggctaataccagccagccaggagtgctgcagggtggtgctgtctacctctgtccttggggtgccagccccacacagtgcacccccattgaatttgacagcaaaggctctcggctcctggagtcctcactgtccagctcagagggagaggagcctgtggagtacaagtccttgcagtggttcggggcaacagttcgagcccatggctcctccatcttggcatgcgctccactgtacagctggcgcacagagaaggagccactgagcgaccccgtgggcacctgctacctctccacagataacttcacccgaattctggagtatgcaccctgccgctcagatttcagctgggcagcaggacagggttactgccaaggaggcttcagtgccgagttcaccaagactggccgtgtggttttaggtggaccaggaagctatttctggcaaggccagatcctgtctgccactcaggagcagattgcagaatcttattaccccgagtacctgatcaacctggttcaggggcagctgcagactcgccaggccagttccatctatgatgacagctacctaggatactctgtggctgttggtgaattcagtggtgatgacacagaagactttgttgctggtgtgcccaaagggaacctcacttacggctatgtcaccatccttaatggctcagacattcgatccctctacaacttctcaggggaacagatggcctcctactttggctatgcagtggccgccacagacgtcaatggggacgggctggatgacttgctggtgggggcacccctgctcatggatcggacccctgacgggcggcctcaggaggtgggcagggtctacgtctacctgcagcacccagccggcatagagcccacgcccacccttaccctcactggccatgatgagtttggccgatttggcagctccttgacccccctgggggacctggaccaggatggctacaatgatgtggccatcggggctccctttggtggggagacccagcagggagtagtgtttgtatttcctgggggcccaggagggctgggctctaagccttcccaggttctgcagcccctgtgggcagccagccacaccccagacttctttggctctgcccttcgaggaggccgagacctggatggcaatggatatcctgatctgattgtggggtcctttggtgtggacaaggctgtggtatacaggggccgccccatcgtgtccgctagtgcctccctcaccatcttccccgccatgttcaacccagaggagcggagctgcagcttagaggggaaccctgtggcctgcatcaaccttagcttctgcctcaatgcttctggaaaacacgttgctgactccattggtttcacagtggaacttcagctggactggcagaagcagaagggaggggtacggcgggcactgttcctggcctccaggcaggcaaccctgacccagaccctgctcatccagaatggggctcgagaggattgcagagagatgaagatctacctcaggaacgagtcagaatttcgagacaaactctcgccgattcacatcgctctcaacttctccttggacccccaagccccagtggacagccacggcctcaggccagccctacattatcagagcaagagccggatagaggacaaggctcagatcttgctggactgtggagaagacaacatctgtgtgcctgacctgcagctggaagtgtttggggagcagaaccatgtgtacctgggtgacaagaatgccctgaacctcactttccatgcccagaatgtgggtgagggtggcgcctatgaggctgagcttcgggtcaccgcccctccagaggctgagtactcaggactcgtcagacacccagggaacttctccagcctgagctgtgactactttgccgtgaaccagagccgcctgctggtgtgtgacctgggcaaccccatgaaggcaggagccagtctgtggggtggccttcggtttacagtccctcatctccgggacactaagaaaaccatccagtttgacttccagatcctcagcaagaatctcaacaactcgcaaagcgacgtggtttcctttcggctctccgtggaggctcaggcccaggtcaccctgaacggtgtctccaagcctgaggcagtgctattcccagtaagcgactggcatccccgagaccagcctcagaaggaggaggacctgggacctgctgtccaccatgtctatgagctcatcaaccaaggccccagctccattagccagggtgtgctggaactcagctgtccccaggctctggaaggtcagcagctcctatatgtgaccagagttacgggactcaactgcaccaccaatcaccccattaacccaaagggcctggagttggatcccgagggttccctgcaccaccagcaaaaacgggaagctccaagccgcagctctgcttcctcgggacctcagatcctgaaatgcccggaggctgagtgtttcaggctgcgctgtgagctcgggcccctgcaccaacaagagagccaaagtctgcagttgcatttccgagtctgggccaagactttcttgcagcgggagcaccagccatttagcctgcagtgtgaggctgtgtacaaagccctgaagatgccctaccgaatcctgcctcggcagctgccccaaaaagagcgtcaggtggccacagctgtgcaatggaccaaggcagaaggcagctatggcgtcccactgtggatcatcatcctagccatcctgtttggcctcctgctcctaggtctactcatctacatcctctacaagcttggattcttcaaacgctccctcccatatggcaccgccatggaaaaagctcagctcaagcctccagccacctctgatgcctgagtcctcccaatttcagactcccattcctgaagaaccagtccccccaccctcattctactgaaaaggaggggtctgggtacttcttgaaggtgctgacggccagggagaagctcctctccccagcccagagacatacttgaagggccagagccaggggggtgaggagctggggatccctcccccccatgcactgtgaaggacccttgtttacacataccctcttcatggatgggggaactcagatccagggacagaggcccagcctccctgaagcctttgcattttggagagtttcctgaaacaactggaaagataactaggaaatccattcacagttctttgggccagacatgccacaaggacttcctgtccagctccaacctgcaaagatctgtcctcagccttgccagagatccaaaagaagcccccagtaagaacctggaacttggggagttaagacctggcagctctggacagccccaccctggtgggccaacaaagaacactaactatgcatggtgccccaggaccagctcaggacagatgccacaaggatagatgctggcccagggccagagcccagctccaaggggaatcagaactcaaatggggccagatccagcctggggtctggagttgatctggaacccagactcagacattggcaccaatccaggcagatccaggactatatttgggcctgctccagacctgatcctggaggcccagttcaccctgatttaggagaagccaggaatttcccaggacctgaaggggccatgatggcaacagatctggaacctcagcctggccagacacaggccctccctgttccccagagaaaggggagcccactgtcctgggcctgcagaatttgggttctgcctgccagctgcactgatgctgcccctcatctctctgcccaacccttccctcaccttggcaccagacacccaggacttatttaaactctgttgcaagtgcaataaatctgacccagtgcccccactgaccagaactagaaaaaaaaa

SEQ ID NO: 2 - protein, 1049 aa, Homo sapiens
MGSRTPESPLHAVQLRWGPRRRPPLVPLLLLLVPPPPRVGGFNLDAEAPAVLSGPPGSFFGFSVEFYRPGTDGVSVLVGAPKANTSQPGVLQGGAVYLCPWGASPTQCTPIEFDSKGSRLLESSLSSSEGEEPVEYKSLQWFGATVRAHGSSILACAPLYSWRTEKEPLSDPVGTCYLSTDNFTRILEYAPCRSDFSWAAGQGYCQGGFSAEFTKTGRVVLGGPGSYFWQGQILSATQEQIAESYYPEYLINLVQGQLQTRQASSIYDDSYLGYSVAVGEFSGDDTEDFVAGVPKGNLTYGYVTILNGSDIRSLYNFSGEQMASYFGYAVAATDVNGDGLDDLLVGAPLLMDRTPDGRPQEVGRVYVYLQHPAGIEPTPTLTLTGHDEFGRFGSSLTPLGDLDQDGYNDVAIGAPFGGETQQGVVFVFPGGPGGLGSKPSQVLQPLWAASHTPDFFGSALRGGRDLDGNGYPDLIVGSFGVDKAVVYRGRPIVSASASLTIFPAMFNPEERSCSLEGNPVACINLSFCLNASGKHVADSIGFTVELQLDWQKQKGGVRRALFLASRQATLTQTLLIQNGAREDCREMKIYLRNESEFRDKLSPIHIALNFSLDPQAPVDSHGLRPALHYQSKSRIEDKAQILLDCGEDNICVPDLQLEVFGEQNHVYLGDKNALNLTFHAQNVGEGGAYEAELRVTAPPEAEYSGLVRHPGNFSSLSCDYFAVNQSRLLVCDLGNPMKAGASLWGGLRFTVPHLRDTKKTIQFDFQILSKNLNNSQSDVVSFRLSVEAQAQVTLNGVSKPEAVLFPVSDWHPRDQPQKEEDLGPAVHHVYELINQGPSSISQGVLELSCPQALEGQQLLYVTRVTGLNCTTNHPINPKGLELDPEGSLHHQQKREAPSRSSASSGPQILKCPEAECFRLRCELGPLHQQESQSLQLHFRVWAKTFLQREHQPFSLQCEAVYKALKMPYRILPRQLPQKERQVATAVQWTKAEGSYGVPLWIIILAILFGLLLLGLLIYILYKLGFFKRSLPYGTAMEKAQLKPPATSDA

SEQ ID NO: 3 - DNA, 1743 bp, Homo sapiens
aaagaaggtaagggcagtgagaatgatgcatcttgcattccttgtgctgttgtgtctgccagtctgctctgcctatcctctgagtggggcagcaaaagaggaggactccaacaaggatcttgcccagcaatacctagaaaagtactacaacctcgaaaaggatgtgaaacagtttagaagaaaggacagtaatctcattgttaaaaaaatccaaggaatgcagaagttccttgggttggaggtgacagggaagctagacactgacactctggaggtgatgcgcaagcccaggtgtggagttcctgacgttggtcacttcagctcctttcctggcatgccgaagtggaggaaaacccaccttacatacaggattgtgaattatacaccagatttgccaagagatgctgttgattctgccattgagaaagctctgaaagtctgggaagaggtgactccactcacattctccaggctgtatgaaggagaggctgatataatgatctctttcgcagttaaagaacatggagacttttactcttttgatggcccaggacacagtttggctcatgcctacccacctggacctgggctttatggagatattcactttgatgatgatgaaaaatggacagaagatgcatcaggcaccaatttattcctcgttgctgctcatgaacttggccactccctggggctctttcactcagccaacactgaagctttgatgtacccactctacaactcattcacagagctcgcccagttccgcctttcgcaagatgatgtgaatggcattcagtctctctacggacctccccctgcctctactgaggaacccctggtgcccacaaaatctgttccttcgggatctgagatgccagccaagtgtgatcctgctttgtccttcgatgccatcagcactctgaggggagaatatctgttctttaaagacagatatttttggcgaagatcccactggaaccctgaacctgaatttcatttgatttctgcattttggccctctcttccatcatatttggatgctgcatatgaagttaacagcagggacaccgtttttatttttaaaggaaatgagttctgggccatcagaggaaatgaggtacaagcaggttatccaagaggcatccataccctgggttttcctccaaccataaggaaaattgatgcagctgtttctgacaaggaaaagaagaaaacatacttctttgcagcggacaaatactggagatttgatgaaaatagccagtccatggagcaaggcttccctagactaatagctgatgactttccaggagttgagcctaaggttgatgctgtattacaggcatttggatttttctacttcttcagtggatcatcacagtttgagtttgaccccaatgccaggatggtgacacacatattaaagagtaacagctggttacattgctaggcgagatagggggaagacagatatgggtgtttttaataaatctaataattattcatctaatgtattatgagccaaaatggttaatttttcctgcatgttctgtgactgaagaagatgagccttgcagatatctgcatgtgtcatgaagaatgtttctggaattcttcacttgcttttgaattgcactgaacagaattaagaaatactcatgtgcaataggtgagagaatgtattttcatagatgtgttattacttcctcaataaaaagttttattttgggcctgttcctt

SEQ ID NO: 4 - protein, 476 aa, Homo sapiens
MMHLAFLVLLCLPVCSAYPLSGAAKEEDSNKDLAQQYLEKYYNLEKDVKQFRRKDSNLIVKKIQGMQKFLGLEVTGKLDTDTLEVMRKPRCGVPDVGHFSSFPGMPKWRKTHLTYRIVNYTPDLPRDAVDSAIEKALKVWEEVTPLTFSRLYEGEADIMISFAVKEHGDFYSFDGPGHSLAHAYPPGPGLYGDIHFDDDEKWTEDASGTNLFLVAAHELGHSLGLFHSANTEALMYPLYNSFTELAQFRLSQDDVNGIQSLYGPPPASTEEPLVPTKSVPSGSEMPAKCDPALSFDAISTLRGEYLFFKDRYFWRRSHWNPEPEFHLISAFWPSLPSYLDAAYEVNSRDTVFIFKGNEFWAIRGNEVQAGYPRGIHTLGFPPTIRKIDAAVSDKEKKKTYFFAADKYWRFDENSQSMEQGFPRLIADDFPGVEPKVDAVLQAFGFFYFFSGSSQFEFDPNARMVTHILKSNSWLHC

SEQ ID NO: 5 - DNA, 458 bp, Homo sapiens
ttttttttttttttttttccaaggggagaatgaagccattttatttaggggaatgttaaaacaaagccatatacaatctgtaacaaatacaatacaattgtttgttccctagtcctgaataattacagtatatacaaaatctgtaaggcactggttcccccaaaagaacaaatgagtcttcttgtgaaacagacaacgaaacccctatattgccaacttttctccaaaaaatatggcattgtttttttgttttgttttacaagaggaatcacaattgctaaattaagtcacttctgatgccatttctttcatttccactgctatgtgtctgggttttctaaggcaatgtaactactgaacatgttcaagtttaaaaaactatacttctctcagtgccgttccacccacaaacaaagaagaatcagatcagaccaacaacataaaacttctaatgaatt

SEQ ID NO: 6 - DNA, 432 bp, Homo sapiens
gttgctcatagttattttttatttgaaagaaaataaactgattagagataaaggggatatcgtaggcaaggtaagtagttggatgaaatcacaggaagcatgaatagttgtgaccaattgcagaagactcaagctgattccatctcagggacacactctaccattcgggagatccccaacccatttgggtaaaactggaatgtctttacgagcagtggtagaagcagcggtggttgcagtggtaggagcagcagtggtcgcagtggttgcagcagcagtggtttcagcatcaggggcttcatcatcagcaggaccagtaagctggatacgtgtcagctggagcagctgttgtcggattctgggcagagaccagaaagatggaaactcccaagagtaccaggactgctaagaacttcatggtggtgacatgaa

SEQ ID NO: 7 - DNA, 446 bp, Homo sapiens
ttccccatagtttactgctgtgcttaggttctgattgatgacacactcacgtaaggcacttatttacaaggtatggacttaaaacagaatcacagcatttctgcgaaagccctcaaactctccatctatgtttgctgctccaggacttctaaatagtcaggttcagcatgtaaattagctttaagttcaaaatactcattttttgtctgttccactaataccttccttggacgtgagtacattaatgtttccattaacttcagctcttcgtgggctccaggataatgtgcctccatatcaggctggagctgagcaatgtttttccttaggtattctgtgattcccagttgctgaagttccctttctttttctaaaatgtttctgtacaatgagctggcatcttggaaggataaaaattctgttgattggttcgtggttttgtattt

SEQ ID NO: 8 - DNA, 4473 bp, Homo sapiens
aaggggaggtaaccctggcccctttggtcggggccccgggcagccgcgcgccccttcccacggggccctttactgcgccgcgcgcccggcccccacccctcgcagcaccccgcgccccgcgccctcccagccgggtccagccggagccatggggccggagccgcagtgagcaccatggagctggcggccttgtgccgctgggggctcctcctcgccctcttgccccccggagccgcgagcacccaagtgtgcaccggcacagacatgaagctgcggctccctgccagtcccgagacccacctggacatgctccgccacctctaccagggctgccaggtggtgcagggaaacctggaactcacctacctgcccaccaatgccagcctgtccttcctgcaggatatccaggaggtgcagggctacgtgctcatcgctcacaaccaagtgaggcaggtcccactgcagaggctgcggattgtgcgaggcacccagctctttgaggacaactatgccctggccgtgctagacaatggagacccgctgaacaataccacccctgtcacaggggcctccccaggaggcctgcgggagctgcagcttcgaagcctcacagagatcttgaaaggaggggtcttgatccagcggaacccccagctctgctaccaggacacgattttgtggaaggacatcttccacaagaacaaccagctggctctcacactgatagacaccaaccgctctcgggcctgccacccctgttctccgatgtgtaagggctcccgctgctggggagagagttctgaggattgtcagagcctgacgcgcactgtctgtgccggtggctgtgcccgctgcaaggggccactgcccactgactgctgccatgagcagtgtgctgccggctgcacgggccccaagcactctgactgcctggcctgcctccacttcaaccacagtggcatctgtgagctgcactgcccagccctggtcacctacaacacagacacgtttgagtccatgcccaatcccgagggccggtatacattcggcgccagctgtgtgactgcctgtccctacaactacctttctacggacgtgggatcctgcaccctcgtctgccccctgcacaaccaagaggtgacagcagaggatggaacacagcggtgtgagaagtgcagcaagccctgtgcccgagtgtgctatggtctgggcatggagcacttgcgagaggtgagggcagttaccagtgccaatatccaggagtttgctggctgcaagaagatctttgggagcctggcatttctgccggagagctttgatggggacccagcctccaacactgccccgctccagccagagcagctccaagtgtttgagactctggaagagatcacaggttacctatacatctcagcatggccggacagcctgcctgacctcagcgtcttccagaacctgcaagtaatccggggacgaattctgcacaatggcgcctactcgctgaccctgcaagggctgggcatcagctggctggggctgcgctcactgagggaactgggcagtggactggccctcatccaccataacacccacctctgcttcgtgcacacggtgccctgggaccagctctttcggaacccgcaccaagctctgctccacactgccaaccggccagaggacgagtgtgtgggcgagggcctggcctgccaccagctgtgcgcccgagggcactgctggggtccagggcccacccagtgtgtcaactgcagccagttccttcggggccaggagtgcgtggaggaatgccgagtactgcaggggctccccagggagtatgtgaatgccaggcactgtttgccgtgccaccctgagtgtcagccccagaatggctcagtgacctgttttggaccggaggctgaccagtgtgtggcctgtgcccactataaggaccctcccttctgcgtggcccgctgccccagcggtgtgaaacctgacctctcctacatgcccatctggaagtttccagatgaggagggcgcatgccagccttgccccatcaactgcacccactcctgtgtggacctggatgacaagggctgccccgccgagcagagagccagccctctgacgtccatcatctctgcggtggttggcattctgctggtcgtggtcttgggggtggtctttgggatcctcatcaagcgacggcagcagaagatccggaagtacacgatgcggagactgctgcaggaaacggagctggtggagccgctgacacctagcggagcgatgcccaaccaggcgcagatgcggatcctgaaagagacggagctgaggaaggtgaaggtgcttggatctggcgcttttggcacagtctacaagggcatctggatccctgatggggagaatgtgaaaattccagtggccatcaaagtgttgagggaaaacacatcccccaaagccaacaaagaaatcttagacgaagcatacgtgatggctggtgtgggctccccatatgtctcccgccttctgggcatctgcctgacatccacggtgcagctggtgacacagcttatgccctatggctgcctcttagaccatgtccgggaaaaccgcggacgcctgggctcccaggacctgctgaactggtgtatgcagattgccaaggggatgagctacctggaggatgtgcggctcgtacacagggacttggccgctcggaacgtgctggtcaagagtcccaaccatgtcaaaattacagacttcgggctggctcggctgctggacattgacgagacagagtaccatgcagatgggggcaaggtgcccatcaagtggatggcgctggagtccattctccgccggcggttcacccaccagagtgatgtgtggagttatggtgtgactgtgtgggagctgatgacttttggggccaaaccttacgatgggatcccagcccgggagatccctgacctgctggaaaagggggagcggctgccccagccccccatctgcaccattgatgtctacatgatcatggtcaaatgttggatgattgactctgaatgtcggccaagattccgggagttggtgtctgaattctcccgcatggccagggacccccagcgctttgtggtcatccagaatgaggacttgggcccagccagtcccttggacagcaccttctaccgctcactgctggaggacgatgacatgggggacctggtggatgctgaggagtatctggtaccccagcagggcttcttctgtccagaccctgccccgggcgctgggggcatggtccaccacaggcaccgcagctcatctaccaggagtggcggtggggacctgacactagggctggagccctctgaagaggaggcccccaggtctccactggcaccctccgaaggggctggctccgatgtatttgatggtgacctgggaatgggggcagccaaggggctgcaaagcctccccacacatgaccccagccctctacagcggtacagtgaggaccccacagtacccctgccctctgagactgatggctacgttgcccccctgacctgcagcccccagcctgaatatgtgaaccagccagatgttcggccccagcccccttcgccccgagagggccctctgcctgctgcccgacctgctggtgccactctggaaaggcccaagactctctccccagggaagaatggggtcgtcaaagacgtttttgcctttgggggtgccgtggagaaccccgagtacttgacaccccagggaggagctgcccctcagccccaccctcctcctgccttcagcccagccttcgacaacctctattactgggaccaggacccaccagagcggggggctccacccagcaccttcaaagggacacctacggcagagaacccagagtacctgggtctggacgtgccagtgtgaaccagaaggccaagtccgcagaagccctgatgtgtcctcagggagcagggaaggcctgacttctgctggcatcaagaggtgggagggccctccgaccacttccaggggaacctgccatgccaggaacctgtcctaaggaaccttccttcctgcttgagttcccagatggctggaaggggtccagcctcgttggaagaggaacagcactggggagtctttgtggattctgaggccctgcccaatgagactctagggtccagtggatgccacagcccagcttggccctttccttccagatcctgggtactgaaagccttagggaagctggcctgagaggggaagcggccctaagggagtgtctaagaacaaaagcgacccattcagagactgtccctgaaacctagtactgccccccatgaggaaggaacagcaatggtgtcagtatccaggctttgtacagagtgcttttctgtttagtttttactttttttgttttgtttttttaaagatgaaataaagacccagggggag

SEQ ID NO: 9 - protein, 1255 aa, Homo sapiens [sequence omitted]

SEQ ID NO: 10 - DNA, 123 bp, Homo sapiens
atcacagctgagatggcttgtttcatgttccctcaggaggatatcatagcagctgtcaggtcacatagtgctgatggggctgagcaaagtgacagttgtctctttcctacgtcctaggagaag

SEQ ID NO: 11 - protein, 38 aa, Homo sapiens
ITAEMACFMFPQEDIIAAVRSHSADGAEQSDSCLFPTS

SEQ ID NO: 12 - DNA, 681 bp, Homo sapiens
atggaggcgcccgccagcgcgcagaccccgcacccgcacgagcccatcagcttcggcatcgaccagatccttaacagcccggaccaggacagcgcacccgccccgcggggccccgacggcgccagctacctgggagggccccccgggggccgtccgggcgccacatacccgtctctgcccgcctcctttgcgggccccggcgcgcccttcgaggacgcgggatcttacagtgtcaacctgagcctagcgcccgcaggcgtgatccgggtgccggcgcacaggccgctgcccggggccgtgccgccgcctctgcctagcgcgctgcccgctatgccctcggtgcccacggtctccagcctagggcgtctcaatttcccctggatggagagcagtcgccgctttgtgaaagaccgcttcacaggtagccagagctggctccaggcctccacggcccttctcggggccagaggcggcgccctgtgcgcccactcccggaaaccatttcagaggcccaagcgcggtcggaggcctcggccccagggccccgggcagccgtggtggggagggtaatcggagagttgcaggaaaataagcgtgcccggggaagggcagggggcgaggggtctcccgaccggcttggtgtcgctggaaacgcgcgcgaccagcgaaatagcggcgctc

SEQ ID NO: 13 - protein, 291 aa, Homo sapiens
MEAPASAQTPHPHEPISFGIDQILNSPDQDSAPAPRGPDGASYLGGPPGGRPGATYPSLPASFAGPGAPFEDAGSYSVNLSLAPAGVIRVPAHRPLPGAVPPPLPSALPAMPSVPTVSSLGRLNFPWMESSRRFVKDRFTAAAALTPFTVTRRIGHPYQNRTPPKRKKPRTSFSRVQICELEKRFHRQKYLASAERAALAKSLKMTDAQVKTWFQNRRTKWRRQTAEEREADGQQASRLMLQLQHDAFQKSLNDSIQPDPLCLHNSSLFALQNLQPWEEDSSKVPAVTSLV

SEQ ID NO: 14 - DNA, 957 bp, Homo sapiens
atggcagataaagtgcagactactttattgttcttagcagttggagagttttcagtggggatcttagggaatgcattcattggattggtaaactgcatggactgggtcaagaagaggaaaattgcctccattgatttaatcctcacaagtctggccatatccagaatttgtctattgtgcgtaatactattagattgttttatattggtgctatatccagatgtctatgccactggtaaagaaatgagaatcattgacttcttctggacactaaccaatcatttaagtatctggtttgcaacctgcctcagcatttactatttcttcaagataggtaatttctttcacccacttttcctctggatgaagtggagaattgacagggtgatttcctggattctactggggtgcgtggttctctctgtgtttattagccttccagccactgagaatttgaacgctgatttcaggttttgtgtgaaggcaaagaggaaaacaaacttaacttggagttgcagagtaaataaaactcaacatgcttctaccaagttatttctcaacctggcaacgctgctccccttttgtgtgtgcctaatgtcctttttcctcttgatcctctccctgcggagacatatcaggcgaatgcagctcagtgccacagggtgcagagaccccagcacagaagcccatgtgagagccctgaaagctgtcatttccttccttctcctctttattgcctactatttgtcctttctcattgccacctccagctactttatgccagagacggaattagctgtgatttttggtgagtccatagctctaatctacccctcaagtcattcatttatcctaatactggggaacaataaattaagacatgcatctctaaaggtgatttggaaagtaatgtctattctaaaaggaagaaaattccaacaacataaacaaatctga

SEQ ID NO: 15 - protein, 318 aa, Homo sapiens
MADKVQTTLLFLAVGEFSVGILGNAFIGLVNCMDWVKKRKIASIDLILTSLAISRICLLCVILLDCFILVLYPDVYATGKEMRIIDFFWTLTNHLSIWFATCLSIYYFFKIGNFFHPLFLWMKWRIDRVISWILLGCVVLSVFISLPATENLNADFRFCVKAKRKTNLTWSCRVNKTQHASTKLFLNLATLLPFCVCLMSFFLLILSLRRHIRRMQLSATGCRDPSTEAHVRALKAVISFLLLFIAYYLSFLIATSSYFMPETELAVIFGESIALIYPSSHSFILILGNNKLRHASLKVIWKVMSILKGRKFQQHKQI

SEQ ID NO: 16 - DNA, 124 bp, Homo sapiens
gggaccatcttcagtgtaactcagggaaatgacctcactctgttgctcctcgtccttggaaacggagctggttgtatctaccgtgcagggatgtagagggcttaaattaagatgctccaagctg

SEQ ID NO: 17 - protein, 31 aa, Homo sapiens [sequence omitted]

SEQ ID NO: 18 - DNA, 495 bp, Homo sapiens
gcacattgagcggatccttgggaacgagagaaaaaagaaacccaaactcacgcgtgcagaagatctccccccccttcccctcccctcctccctcttttcccctccccaggagaaaaagacccccaagcagaaaaaagttcaccttggactcgtctttttcttgcaatattttttgggggggcaaaactttgagggggtgattttttttggcttttcttcctcctttttttttcttccaaaattgctgctggtgggtgaaaaaaaaatgccgcagctgaacggcggtggaggggatgacctaggcgccaacgacgaactgatttccttcaaagacgagggcgaacaggaggagaagagctccgaaaactcctcggcagagagggatttagctgatgtcaaatcgtctctagtcaatgaatcagaaacgaatcaaaacagctcctccgattccgaggtaggaaaagcccctcgggctggtggggttttttatctgtt

SEQ ID NO: 19 - protein, 602 aa, Homo sapiens [sequence omitted]

SEQ ID NO: 20 - DNA, 529 bp, Homo sapiens
atgtccaacaacatggccaagattgccgaggcccgcaagacggtggaacagctgaagctggaggtgaacatcgaccgcatgaaggtgctgggtcggggtggggaatagggcgggggttctgggcctgcggtctgtccggggctgtgtcggcccggctcggagccatagtgcgaggatgcccctgggaacagggctgggcaaggggcggggcagggcaggaggaggggccaggacgagggggcggagtaagacaaggggaaaggcctgtatggggcggggcaaggtgggaggaggggacagggcaagaggcggggcctaagtgggcggctccaaggagccgggcagggcggtgacatctccacccgggtgctcgcaggtgtcgcaggcagcagcggaactcctggctttctgcgagacgcatgccaaagatgacccgctggtgacgccagtacccgccgcggagaaccccttccgcgacaagcgcctcttttgtgttctgctctgagccctccggacagcttaccctccc

SEQ ID NO: 21 - protein, 70 aa, Homo sapiens
MSNNMAKIAEARKTVEQLKLEVNIDRMKVSQAAAELLAFCETHAKDDPLVTPVPAAENPFRDKRLFCVLL

SEQ ID NO: 22 - DNA, 232 bp, Homo sapiens
gtcaccttccaactatccggtgcttaggaaatggaagatgggctatacctaaaattacctgcatgaaccgtaagtggtcctttagaaagaatggactaccgtgctataacaactactagacaccttcattttacggctgtggtatcggcagtttagggtatggagcaagtaatattgtgtgttttctttttttctttctttccttccatgtagcatctgcataccaaaggac

SEQ ID NO: 23 - protein, 38 aa, Homo sapiens
HLPTIRCLGNGRWAIPKITCMNRKWSFRKNGLPCYNNY

SEQ ID NO: 24 - DNA, 20881 bp, Homo sapiens
ccccaccttttgagcaagttcagcctggttaagtccaagctggtgataaaactacaaagcagaatacgaagaagacagaggcaaaggcttcttccctcagaccataactcaagaatatgggggtctcgcagtaatttatgctctttgcttttgtcttttcatagttttccttgtatagtttgtcacttagggcatctcctgctgccttcagctgcctaagctgtgggttctctgaagcaggaagcacattataatctgcttttcctttattcttttcatagtcttctttgtattttgctgctgaggaaatttatttggtagattgaaggtttgaacgagagctacagaaacgaaagaaaaagtctgtataagccaatggtgttcgggaagaaaataaccccattgccttgagtttgtaggtgccactactactctgaaaaatggcagatgacgaagactatgaggaggtggtggagtactacacagaagaagtggtttacgaagaggtgccgggagagacaataacaaaaatttatgagactacgacaacaaggacatctgactatgagcaatcagaaacttccaaaccagctctggcacagccagcactggcacagccagcatcagcaaagccggtggagaggaggaaggtcatccggaagaaagtggatccttcaaagttcatgaccccctacattgcacacagtcagaaaatgcaggatctttttagcccaaataaatacaaggagaagtttgagaaaacaaaaggacagccatacgccagcacaacagatactccagaacttcgcagaatcaaaaaagtacaagatcaactcagtgaggttaagtatcgaatggatggtgatgttgctaagactatatgtcacgtagatgaaaaagcaaaggatattgaacatgcaaagaaagtgtcgcagcaagtcagtaaggttttatacaagcagaactgggaagacaccaaggataagtacctgcttcctcctgatgcccctgaacttgtccaggccgttaagaacaccgccatgttcagcaagaaactgtacactgaagactgggaagcagacaaaagtttgttttacccctataatgatagcccggaactgaggagagttgcccaggcccagaaagctctcagtgatgttgcctacaaaaaaggtctcgctgaacagcaagctcaattcacgcctctggccgatcctccagatatagaatttgccaagaaagtaaccaatcaagtgagcaagcaaaaatacaaagaagactatgaaaataaaatcaaaggcaaatggagtgagacaccttgctttgaagttgcaaatgccagaatgaatgctgataacattagcacaaggaaataccaggaagattttgaaaacatgaaagaccagatctacttcatgcagaccgaaacaccagagtataaaatgaataaaaaagctggtgtggcagctagcaaggtaaaatacaaagaagactatgaaaagaataaaggaaaagcagattataatgtgcttcctgcttcagagaacccacagcttaggcagctgaaggcagcaggagatgccctaagtgacaaactatacaaggaaaactatgaaaagacaaaagcaaagagcataaattactgcgagacccccaaattcaagctcgatactgttctgcagaacttcagtagtgataaaaaatataaagattcctacttaaaagatattttgggacattatgtaggcagcttcgaggatccataccattcacactgcatgaaagtcacagctcaaaacagtgataaaaactacaaagcagaatacgaagaagacagaggcaaaggcttcttccctcagaccataactcaagaatatgaagcaattaagaaactagatcagtgtaaagaccacacctacaaagtccatccagataagacaaaattcacccaagttacagactctcctgttctgctacaagcccaagtcaattccaaacaactgagtgacttaaattacaaagcaaaacatgaaagtgaaaagttcaagtgccatatcccccctgatactcctgcttttatccagcacaaagtcaatgcctataacttgagtgataatctttataagcaagactgggagaagagcaaagccaaaaagtttgacattaaagtggatgccattcccctgctggcagccaaagccaacaccaagaacaccagcgatgtgatgtacaagaaagactatgaaaaaaacaaagggaaaatgattggagtcctcagcattaatgacgatcccaagatgctgcactccttgaaggtggccaaaaaccagagtgatagattatacaaggaaaactatgagaagacaaaggcaaagagtatgaattactgtgagaccccaaaatatcaacttgatactcagctgaagaacttcagtgaggctagatataaagacttatatgtaaaggatgttttgggacattatgtaggcagcatggaggacccatatcacacacactgcatgaaagttgcagctcaaaacagtgataaaagttacaaagcagaatatgaagaagataaaggaaaatgctatttccctcagacaataacacaagaatatgacgcaatcaagaagctggaccagtgtaaagatcatacctacaaagttcatccagataagaccaaattcacggcagtcactgattctcctgtactgttgcaagcccagctcaacacgaaacagcttagtgatctgaattacaaagcaaaacatgaaggtgagaggttcaagtgccatataccagcagatgctccacagtttatccaacacagagtcaatgcctataatctgagtgataatgtttataagcaagactgggagaagagcaaagccaagaagtttgacattaaagtggacgccattcccctgttggcagccaaagccaacaccaagaacaccagcgatgtgatgtacaagaaagactatgaaaagagcaaagggaaaatgattggagccctcagcattaatgacgatccaaagatgctgcactccttgaagacagccaaaaaccagagtgatcgcgaatatcgaaaagattatgaaaagtcaaaaactatctacacggcacctcttgatatgctccaagtcactcaagctaagaaatctcaggcaattgccagcgacgttgattataagcacatcttacacagttacagctacccccctgatagcatcaatgtggaccttgccaagaaggcatatgcgctgcagagcgatgttgaatacaaagctgactacaatagctggatgaaaggttgtggctgggtgccttttgggtccttagaaatggaaaaggcaaagcgagcttcagacatcctcaatgagaaaaaatatcgccaacatccagacaccctcaagtttacctcgattgaagatgctccaattacagtacagtctaaaattaaccaggcccagaggagtgatatcgcttacaaagccaaaggagaggaaattattcacaattacaacctgccaccagacctgccccagttcatccaggctaaagttaatgcctacaatatcagtgagaatatgtacaaagcagacttgaaagacttgagcaagaagggatatgacctgagaactgatgcgattcccatcagagctgccaaagctgccaggcaggcggcgagtgacgttcagtacaaaaaagactatgaaaaggctaaagggaaaatggttggcttccaaagtcttcaagatgaccctaaactggttcattatatgaacgtggccaagatacaatcagatcgggagtataaaaaagactatgagaagacaaagtccaaatacaacacgccccatgatatgttcaatgtcgtggcggctaagaaagcccaggatgtggtcagcaatgtcaactataagcattctctccatcattacacctacttgcctgacgccatggacctggagctgtctaagaacatgatgcagatacagagtgataacgtctacaaggaagactacaacaactggatgaaaggcattggctggattcctattggcagtctcgacgtcgaaaaagttaaaaaggccggtgatgctctgaatgaaaagaagtacaggcaacatccagacaccctcaaatttaccagcattgtggactccccagttatggtccaggcaaaacagaacacgaagcaagtcagtgatatcttatacaaggctaaaggagaagatgtgaaacataaatacaccatgagtcctgatcttcctcagtttctccaggccaagtgcaatgcttacagtataagtgacgtctgttataaacgggattggcatgacttaatacgcaagggcaacaatgtgctgggcgatgctattcccatcactgcagccaaggcatcgagaaacattgccagtgattataaatacaaggaagcttatgagaagtcaaagggaaagcatgtgggtttcagaagcctccaggatgatcccaagctggtccactatatgaatgtggcaaagctgcagtctgatcgtgaatacaagaagaactatgagaacaccaaaaccagctaccatacccctggggacatggttacgatcacagctgcaaagatggcccaggatgtcgctaccaatgtcaactacaaacagccattgcatcattacacatacctacctgacgccatgagtcttgagcatacgaggaatgtcaatcaaattcagagtgataatgtgtataaagacgagtataacagcttcttgaagggcatcggatggatccctattggttccctggaggtggagaaggtcaagaaagcaggcgatgcattaaatgagaggaagtatcgacagcacccagataccgtcaagttcacaagtgtgcctgattccatgggcatgatgttggctcagcataacacaaagcagctaagtgatttgaactacaaggtagagggagagaaactgaagcacaagtatactattgaccctgaattgcctcagtttattcaagccaaagtcaacgccctcaacatgagtgatgctcattataaagcagattggaagaaaaccattcgcaagggctatgatttgagaccagatgccatcccaattgttgctgcaaaaagttcaaggaatattgctagtgattgcaaatataaggaggcctacgagaaagccaaaggcaagcaagttggatttctcagtcttcaggatgatcctaaactggttcactacatgaatgtggccaaaatccagtctgatcgtgagtacaaaaagggctatgaagccagcaagaccaagtaccacacacctctggatatggtcagtgtgacagctgcaaagaaatctcaggaggttgccaccaacgccaactacagacagtcataccaccactacactctcctgcccgatgccttgaatgtggagcactccaggaatgccatgcagattcagagtgataatctgtacaaatctgacttcaccaattggatgaaagggatcggctgggtgcccatagagtccctggaggtggagaaggcaaagaaagcaggagagattcttagtgagaagaagtatcgccagcaccccgagaagctgaagttcacttacgccatggacacaatggaacaggcacttaacaagagtaacaaactgaacatggacaagaggctctacactgaaaaatggaacaaggacaagaccaccattcatgtcatgcctgacacaccggatattttactctccagagtaaaccaaatcaccatgagtgataaactgtacaaagctggctgggaagaggaaaagaagaaaggatatgacctgaggcctgatgccattgcaataaaggctgcaagagcctctagagacattgccagtgattacaaatacaagaaagcctatgaacaagccaaagggaaacacattggcttccggagcctggaagatgaccccaagctggtgcacttcatgcaagtggccaagatgcagtcagaccgggaatacaagaagggatatgagaaatccaagacctccttccacaccccggtggacatgctcagtgtggtggcagccaagaagtctcaggaagtggccaccaatgccaactacaggaacgtgatccatacctacaacatgcttcctgatgccatgagctttgaattggccaaaaatatgatgcagattcaaagtgataatcagtacaaggctgactatgctgacttcatgaagggcattggatggctccctctgggctccctggaagcagagaaaaacaagaaagccatggagattattagtgaaaagaagtaccgccagcacccagacactttgaagtattccacactcatggactcgatgaacatggttttggcccagaataatgcaaaaattatgaacgaacatctctacaaacaagcatgggaggctgacaaaaccaaagtccacatcatgcctgatatcccccagattattttggcaaaggcaaatgcaattaatataagtgataaactctacaaactttccttggaagagtctaaaaagaaaggctatgatctcagacctgatgcaattcctatcaaagctgccaaggcttccagagatattgcaagtgattataaatacaagtacaattatgaaaaagggaaggggaaaatggttggtttccgcagtctcgaggatgatcccaaattagtccattccatgcaagtggctaagatgcaatctgatcgggagtacaagaaaaactatgagaacacaaagaccagctaccacacccctgccgacatgctcagtgtcacggctgcaaaggatgcccaagccaacatcaccaacactaactacaagcacctgattcacaagtacatcctccttccagatgcaatgaacattgagctgaccaggaatatgaatcgcatacagagtgataatgaatataagcaagattacaatgaatggtacaaagggcttggctggagtccagcaggttctctggaagtggagaaggccaagaaagcaactgaatatgccagtgatcagaaataccgccagcacccgagcaacttccagtttaagaagctgactgattccatggacatggtgcttgccaagcagaatgcacataccatgaacaagcatttatacaccattgattggaataaagataagaccaagattcatgtgatgcctgatacaccagatattttacaagccaagcagaatcaaacactgtatagtcagaaactctataaacttggatgggaagaagctttgaagaaaggctatgatctcccagttgatgcaatttctgtacagctagctaaagcttcaagagacattgctagtgattataaatacaaacaaggctaccgaaagcaacttggccaccatgttggattccggagtctgcaagatgacccaaaacttgtgttgtccatgaatgtagccaaaatgcagagtgaaagagaatacaagaaggactttgagaagtggaaaactaagttctccagcccagtggacatgttgggagtggtactggccaagaagtgtcaggagttggttagtgacgtggactacaagaactacctgcatcagtggacatgtctgcctgatcagaacgatgttgtgcaagctaagaaagtttatgaactgcaaagtgagaatctatataaatctgaccttgagtggctgagaggcataggatggagtcccttgggttctttagaggcagaaaagaacaagcgggcttcggaaatcatcagtgagaagaaatatcgtcagcctccagacagaaacaagttcaccagcattcctgatgccatggatatagttctggcaaagacaaatgccaaaaataggagtgatagactttatagagaagcttgggacaaagacaagactcagatccacatcatgcctgatacacctgacattgttctggctaaagcaaacttaatcaacacaagtgataaactctaccgaatgggttatgaggagctgaagagaaaaggttacgatcttcctgttgatgccataccaatcaaagcagcaaaagcctcccgggaaattgccagtgaatacaagtacaaggaaggctttcgcaagcagctcggccaccacattggtgcccggaacattgaagatgaccccaagatgatgtggtccatgcatgtggccaagatccagagtgacagggagtacaagaaggactttgagaagtggaagaccaagttcagcagcccagtggacatgctgggggtggtgttggcctataagtgccagaccttagtcagcgacgtggactacaagaactacctgcaccagtggacatgcctgcccgaccagagcgatgtcatccatgctcggcaggcctatgacctccagagcgataatttgtacaagtcagaccttcagtggctaaaaggcattggctggatgactagtggttctctcgaggatgagaaaaataaacgagccacccagattttgagtgaccatgtttaccgtcagcacccagatcaatttaagttttccagccttatggattccataccaatggttttggcaaaaaacaatgctattaccatgaatcatcgcctctatacagaagcttgggataaagataaaaccactgtccacattatgccagatacccctgaagttttattagctaaacaaaacaaagtaaattacagtgagaaattgtataagcttggcctagaagaagccaagaggaaaggttatgacatgcgggtagatgccattcctatcaaggcagccaaggcctccagagatattgcaagtgaattcaagtacaaagaaggctatcgtaagcagctcggccaccacattggtgcccgagctatacgtgatgaccccaagatgatgtggtccatgcacgtggccaagatccagagtgacagggagtacaagaaggactttgagaagtggaagaccaagttcagcagcccagtggacatgctgggggtggtgctggccaagaagtgccagaccttagtcagcgatgtggactacaagaactacctgcaccagtggacatgcctgcccgaccagagcgacgtcatccatgctcggcaggcctatgacctccagagcgataatatgtacaagtctgatctccagtggatgagaggcattggctgggtgtccattggctctttggatgtggaaaaatgcaaaagggcaactgaaattttgagtgataaaatctatcgccagcctccagacagattcaaatttaccagtgtgactgactctctggaacaagtgctggccaagaacaatgctctcaacatgaataagcgtttatacacagaggcctgggacaaagacaagactcaaattcacataatgcctgatacaccagagattatgttggcaaggcagaacaaaatcaactacagtgagactctatacaaacttgccaatgaagaagcaaaaaagaaaggctacgacttgcgaagtgacgccatccccatcgtggctgccaaggcctccagggacgttatcagtgattacaaatacaaagatggttaccgcaagcagctcggccaccacattggagcccggaacattgaagatgaccccaagatgatgtggtccatgcatgtggccaagatccagagtgacagggagtataagaaggactttgagaagtggaagaccaagttcagcagcccagtggacatgctgggagtggtgttagccaagaagtgccagaccttagtcagcgatgtggactacaagaactacctgcacgagtggacgtgcctgcccgaccagaatgatgtcatccatgctcggcaggcctatgacctccagagcgataacatttacaaatctgatctccagtggctgagaggcattggctgggtccccattgggtctatggatgtggtcaagtgcaagagagctgctgaaatactgagtgataacatctaccgccagcctccggacaagctgaaatttaccagtgtgactgactctctagagcaggtgctggccaagaacaatgctctcaatatgaacaagcgcttatacacagaagcctgggacaaagacaagacccaagtccatattatgcctgatacacctgaaatcatgttggcaagacaaaataaaataaattatagtgagagcctctatcgtcaggccatggaagaagccaagaaagaaggctatgacttgagaagtgatgccattcccattgtggctgccaaggcctctcgggatattgccagtgattacaaatacaaagaagcatatcgtaagcagttgggtcaccacattggcgcccgagcagtacacgatgaccccaagataatgtggtccctccacattgccaaagtgcagagtgaccgtgagtacaagaaagattttgagaaatacaagacaaggtacagcagcccagtggacatgcttggtatcgttttggccaagaagtgtcagaccttggtcagcgatgtggactataaacatcctctgcatgaatgcatctgcctgcccgaccagaatgacatcattcatgcacggaaagcctatgacctccagagtgacaatttgtataagtcagaccttgaatggatgaaaggcattggctgggttccgattgattccttggaagttgttagggccaagagagctggagaattacttagtgatactatctaccgtcagcgtccagaaacgctgaaatttaccagtataacggacactccggagcaggtgctggcaaaaaacaatgctttaaacatgaataagcgcttatatactgaagcctgggacaatgacaagaaaactattcatgtcatgcctgatacaccagaaatcatgttagccaaactcaaccgaataaactacagtgataaactctataaacttgctttggaagagtccaagaaggaaggctatgacttgcgtctggatgccattccaatccaagcagccaaggcttcaagagatattgctagtgattacaagtacaaggaaggctaccgcaaacagcttggccaccatattggggcccggaacattaaggatgacccgaagatgatgtggtccatccatgtggccaagatccagagtgacagggagtacaagaaggagtttgagaagtggaagaccaagttcagcagcccagtggacatgctgggggtggtgctggccaagaagtgtcagatccttgtaagcgacatagactacaagcatcccctgcatgaatggacctgcctgcctgatcagaatgacgtcattcaggctcggaaggcctatgacctgcagagtgatgctatttacaaatctgatcttgagtggctgagaggcataggatgggttcccattggctctgtagaggtcgagaaagtgaagagagctggagaaatcctgagtgacaggaagtatcgccagcctgcagaccagctcaaattcacatgcattaccgacactccggaaattgtcctagcaaagaataatgccctgacaatgagcaagcatttatacacagaagcttgggatgctgacaaaacctccatccacgtgatgccagacaccccagatatcctgctggccaagagtaattctgccaatatcagccaaaaactttacaccaagggatgggatgaatcaaagatgaaggactatgatctgagagcagatgctatttccatcaaaagtgccaaggcctccagggacatcgccagtgactacaaatacaaggaagcctatgagaaacagaaaggccaccacattggagcccagagcattgaagatgatcccaagattatgtgtgccatacatgcagaaaaaattcaaagtgaaagggagtacaagaaggaattccaaaagtggaaaaccaagttctctagcccagtggacatgttaagcatcttgctggccaagaaatgtcagactttggtcactgacatttattatcgcaattacctgcatgaatggacatgcatgccggatcaaaacgacattatccaagcaaaaaaggcctatgacctgcagagtgatgccctctacaaggctgacttggagtggttgcgtggcattggctggatgccccaagggtctcctgaagtgttgagagtcaaaaacgcccagaatatcttttgtgacagtgtctatcggacgcctgtggtgaaccttaagtacacaagcattgttgacacacctgaagtggtccttgctaaatcaaatgctgaaaatattagtattccaaagtacagagaggtttgggacaaggataaaacttcaatacacataatgccagatactccagaaattaatctcgctagagcaaatgctcttaatgtgagcaataaactttaccgtgagggctgggatgaaatgaaggcgggctgtgatgtccggctggatgccatccccatccaggctgccaaggcctccagggagattgccagtgactataaatataagcttgaccatgagaagcagaagggacactacgtgggcaccctcacagccagggatgacaacaagatccgctgggccctcatagctgacaagctccagaatgaacgagagtaccggctggactgggccaaatggaaggccaagatccagagccctgtggacatgctttccatcctgcactctaaaaattcccaggctctggtcagtgacatggattaccgcaattacctgcaccagtggacctgcatgcccgaccagaacgatgtgattcaggccaagaaggcctacgaactgcagagcgataatgtttacaaggctgacttggaatggttgcgtggaattgggtggatgccaaatgactccgtgtccgtcaatcatgccaaacatgccgcggacatcttcagtgagaaaaaatatcgcacaaaaatagaaactctcaactttacgcctgtggatgacagagttgattatgtgacagcgaaacaaagtggcgagatcctcgatgatattaaataccggaaagactggaatgccaccaaatcaaagtacaccctcacagaaacccccctgctgcacactgcccaggaggctgctaggatactggaccagtatctctacaaggaaggctgggagagacaaaaagccacaggttacattttgcctccagatgctgtgccatttgttcatgcccatcactgcaatgacgttcagagtgagctgaaatacaaagctgaacatgtgaagcaaaaaggtcattatgttggtgtcccgacgatgagagatgatcctaagctggtttggtttgagcatgcaggccagattcagaatgagagactatacaaagaggactatcacaaaacaaaggccaaaatcaatatacctgctgatatggtgtcagtcttggccgccaagcaggggcagacccttgtcagtgatattgattatcgtaattacttgcaccaatggatgtgtcatcctgaccagaacgatgttattcaggcaagaaaggcctatgacctacagagtgataatgtctacagagctgacctggagtggctccgaggcattggctggatcccactggattctgtggaccatgtaagggttactaagaaccaggaaatgatgagtcagatcaaatataagaaaaatgcccttgaaaactatcctaactttacaagtgtggtggatcctccagagattgttttagccaagattaattctgtcaatcaaagtgatgtaaaatataaagaaacatttaataaagcaaagggcaaatatacgttttcaccagatacaccacatatctcccactccaaagacatgggaaaactctacagtactatactgtataaaggggcgtgggagggcaccaaggcctatggctacaccctggatgagcgctacattcccattgttggagccaagcatgctgatctggtgaacagtgagcttaaatacaaagagacatatgagaagcagaaaggtcactacctggctggaaaagtgatcggtgaattccctggtgtggttcactgtctggatttccaaaagatgaggagtgcgttgaactacagaaaacattatgaggataccaaagcaaatgttcatatccccaatgacatgatgaatcacgtgctggctaaaaggtgccagtacatcctcagtgacctggagtatcgacactatttccaccagtggacgtctcttctggaagaacccaatgttatacgcgtccgaaacgcccaggagatcttgagtgataatgtgtataaagatgacctgaattggttgaaaggcattggttgctacgtttgggatacaccccaaatcctccatgccaagaaatcatacgaccttcagagtcagctacaatatacagcagcaggtaaagaaaatctacaaaactataatctggtcacagacacgcccctctatgtgactgctgttcagagtggcattaatgccagtgaggtaaaatataaagaaaattatcatcagattaaggacaaatacacaacagttctagaaacagtggattatgacagaaccagaaacctgaagaatctttacagcagtaacctgtacaaggaggcctgggatagagtgaaagccaccagctacatcctgccttccagcaccttgtccctgacacacgccaagaaccagaagcatctggccagccatatcaaatatcgggaagaatatgaaaagttcaaagctctttatacgttaccaagaagtgttgacgatgatccgaacacagcacggtgcctccgagttggcaagcttaacatcgatcgcctgtacagatcagtttatgaaaagaacaagatgaaaatccacatcgtgcccgacatggtagagatggttactgccaaggattcccagaagaaagtcagtgagattgattaccgcctgcgcctccacgaatggatttgccaccccgacttgcaagtcaatgatcacgtcaggaaagtcacagatcagatcagcgatattgtatacaaggatgacctcaactggctgaaaggcattggttgctacgtctgggacactcctgaaatcctccatgccaagcatgcttatgatctacgtgatgatatcaagtataaagctcacatgttgaaaacaaggaatgactacaagcttgtcacagatacaccagtctacgtgcaggctgtcaaaagtgggaaacagctaagtgacgctgtctaccactatgactatgtgcacagtgtcagaggcaaagtggctccaactaccaaaaccgtggatctggaccgggcccttcatgcatacaagctccagagttcgaatctatacaaaaccagcctgcgcaccctgcccactggatatagacttccaggtgacactcctcacttcaaacacatcaaggacacccgttacatgagcagttatttcaagtacaaagaagcctatgaacacaccaaggcatatgggtatacacttggccccaaagatgttccatttgtccacgtccggagagtcaacaatgttaccagcgagagactgtatcgggaattgtaccacaaactgaaagacaagatccatacaactcccgatccccctgagatccgccaagtcaagaagacacaagaggctgtcagtgagttgatctacaaatcagacttcttcaagatgcagggccacatgatctctctgccatacacaccccaagtgatccattgccgctatgtgggagacatcaccagtgatattaaatacaaagaggacttgcaggtcctgaagggatttggctgcttcctgtatgacactcctgacatggtccgctcccggcacctgcggaagctctggtctaattacctatacactgataaggcaagggagatgcgagacaaatacaaagtggtgcttgacactccagaatacagaaaagtgcaagaactgaagacacatctgagtgagctggtctacagagctgcaggcaagaagcagaagtcaatctttacttcagttcctgatactcctgatcttttaagagccaagcgagggcagaagcttcagagtcagtatctgtatgttgaacttgccaccaaagagagaccccatcatcacgctggaaaccagaccacagccttgaagcatgctaaagacgtgaaggacatggtcagtgagaaaaagtacaagattcaatatgaaaagatgaaagacaagtacactccggttccagatacgccaatcctcatcagagccaagagggcttactggaatgccagtgatctacgctacaaagaaacatttcaaaagaccaaagggaaataccacacggtgaaagatgccctagacattgtctatcatcgcaaagtcacagatgacatcagtaaaataaaatacaaggagaactacatgagccagttgggtatctggaggtccattcctgatcgtccagagcatttccaccaccgagcagtcactgacacagtcagtgatgtaaaatataaagaagacttgacttggcttaaaggcattggttgctatgcctatgatacccctgatttcactctggctgaaaagaacaagactctctacagcaagtataagtataaagaagtatttgaaaggacaaagtcagatttcaagtatgttgccgactctccgatcaataggcatttcaagtatgcaactcaattgatgaatgagaaaaaatacagagctgattatgagcagcggaaagataaataccacctggtagtcgatgagcctagacatctgctggctaagacccgcagcgaccagatcagtcagatcaaatacaggaaaaactatgaaaaatcaaaggacaaatttacctcaattgtggatactccagaacacctgcgtactacaaaagtcaacaaacaaatcagcgatatcctttataaattggaatacaacaaggccaaacccagaggctacaccacaatccacgacacgcccatgttgctgcatgtccgcaaggttaaagatgaagtcagtgatctgaaatacaaagaagtataccaaagaaataaatccaactgcaccattgagccagatgctgttcatatcaaagcagccaaggacgcctacaaagtcaacaccaatctggactataagaaacagtacgaagccaacaaagcccactggaagtggactcctgaccgaccggacttcctccaggctgccaagtcatccctgcagcaaagcgattttgaatataagctggaccgggagttcctcaagggttgcaagctttctgtcactgatgacaaaaacacggtgctcgccctcaggaatactttaatagaaagtgatctgaaatacaaagagaaacatgtcaaggaaagaggaacctgccatgccgtacctgacacgcctcagatcctgctggcgaagactgtcagcaacctggtgtctgagaacaagtacaaggaccatgtcaagaagcacttggcacagggctcatacacaacactaccagagacccgggacactgttcacgtcaaggaagtgaccaagcatgtcagtgatacaaattacaaaaagaagtttgtcaaggagaaaggaaaatccaactactccatcatgctggagccaccagaggtgaaacatgctatggaagtggccaagaagcaaagtgatgtcgcttacagaaaagatgccaaagagaacctgcattacaccacagtggctgatcgaccagacatcaagaaggccacacaggcagccaaacaggccagtgaggtggagtacagagccaagcaccgcaaggaaggcagccatggcttaagcatgctcggtcgcccagacatagaaatggccaagaaggcagccaagctgagcagccaggttaaataccgagaaaatttcgataaagaaaagggcaagacaccaaaatacaatccaaaagacagccagctctacaaagtcatgaaagatgctaataatcttgcaagtgaggttaaatacaaggctgacctgaagaaacttcacaaacccgtgactgacatgaaggagtctctgatcatgaatcatgtcctgaatacaagccaacttgccagttcttaccagtacaagaagaagtatgagaagagtaaaggccactaccacaccatacccgataatctggagcagcttcacctaaaagaggccacagaattacagagtatagtgaaatacaaagaaaagtatgaaaaggaacgaggaaaacccatgctggactttgaaacaccaacgtacatcactgccaaagagtctcagcagatgcagagtgggaaagaatataggaaagattatgaagagtccattaaaggcagaaacctgactggcctggaggtcacgccagctttgttacatgtcaaatatgcaactaaaatagcaagcgagaaagagtacaggaaagatctagaggaaagcatccgtgggaagggcctcactgaaatggaagatacacctgacatgctaagagcaaagaatgccactcaaatcctcaatgagaaagaatataagcgagacctggaactggaagtcaaaggaagaggcctgaatgccatggccaatgaaactccggattttatgagggccaggaatgctactgatattgccagtcagattaagtataagcaatcagcagaaatggagaaagccaatttcacttctgtggttgatactccagagatcattcatgcccaacaagtcaagaatctttcaagccagaaaaagtacaaggaagatgctgagaagtccatgtcgtattatgagactgttttggacaccccagagatacagagagtccgggagaaccaaaagaacttcagccttctccaataccagtgtgaccttaaaaacagtaaaggaaaaattacagttgttcaagacacgccagaaatactgcgtgtaaaagaaaatcagaagaatttcagctcggttttatataaagaggatgtctcaccaggaacggctatcggaaagacacctgagatgatgagagtgaaacaaacacaggaccacattagctcggtgaagtataaggaagcaataggacaaggaactccaatccctgacctgcctgaagtgaaacgtgtgaaggagacgcagaagcacattagctcggttatgtacaaagaaaacttgggaacaggcattccaaccactgtgactccagagattgagagagtcaaacgcaatcaagagaactttagctcggttttgtacaaagaaaatttggggaaaggaatcccaacacctatcactccagagatggagagagtcaaacgcaatcaagagaactttagctcggtgttatacaaagaaaacatgggcaagggaactcctttacctgtcactcccgagatggagcgagtcaaacacaatcaagaaaatattagctcggttttgtacaaagaaaatgtggggaaagccaccgcaacccctgtcactcctgagatgcagagagtcaaacgcaatcaagaaaacattagctcggtgttatacaaagagaacctggggaaagcaacccccacaccctttactcctgagatggaaagagtgaaacgcaatcaagaaaactttagctcggtattgtacaaagagaacatgagaaaagcaactccgacacctgttactccagagatggagagagctaagcgcaaccaagaaaacattagctcggttctttattctgatagtttccggaaacaaatacaaggcaaagctgcctatgtattggatacccccgagatgagacgggtgagggagacccaacggcacatctcaacggtgaaatatcatgaagactttgagaaacacaagggttgcttcacaccagtggtgacagatcctatcactgaacgagtaaagaagaacatgcaggacttcagtgacattaactaccgaggtattcagaggaaagtggtagaaatggaacaaaaacggaatgaccaagatcaggagactattacaggtttacgtgtctggcgtactaatcctggttcggtttttgactatgatccagcagaagacaacatccagtcccgaagcttacacatgattaatgtccaagctcagcgccggagccgggagcagtcacgatctgccagtgcactaagcgtcagtgggggtgaggagaagtctgagcattcagaagcaccagaccaccacctttcgacttacagcgacgggggtgtctttgcagtctcaacagcttacaaacatgcaaaaaccacagagctcccacaacaacgatcatcttcagttgctacccaacagacaacggtatcttccatcccatctcatccatctactgctggaaaaatcttccgtgccatgtatgactatatggctgctgatgcagatgaggtgtccttcaaggatggagatgccatcataaatgttcaagcaattgatgaaggctggatgtatggcactgtgcagaggactggcaggaccggaatgctcccagccaactacgttgaagctatttaggcatttcaaagcatcacacttgtctgcaggacttacagatcctgcagtcaatgtttcggtttagactctccactgttacctaagttctcaagctgcctatggtttttctgtgtcaatgtgatttatggtagtaccatcctttctcctttgggttttaaaataagttgcagaacagacactttaaaagcttctgcaatattatttctgtgcctagagtctttctccattataaacatgttttaacattatttcttttctaaaacagggattttgaatatgccaaacacattaaaggaaaaatagcagagatgttcaccttttccttgctgattgctaatgcttattatttctaattcagttctgaagttataaacttataatcaatacaaaccagcaactaataaaacctctaattctgcaaaaaaaaaaaa

SEQ ID NO: 25 - protein, 6669 aa, Homo sapiens
MADDEDYEEVVEYYTEEVVYEEVPGETITKIYETTTTRTSDYEQSETSKPALAQPALAQPASAKPVERRKVIRKKVDPSKFMTPYIAHSQKMQDLFSPNKYKEKFEKTKGQPYASTTDTPELRRIKKVQDQLSEVKYRMDGDVAKTICHVDEKAKDIEHAKKVSQQVSKVLYKQNWEDTKDKYLLPPDAPELVQAVKNTAMFSKKLYTEDWEADKSLFYPYNDSPELRRVAQAQKALSDVAYKKGLAEQQAQFTPLADPPDIEFAKKVTNQVSKQKYKEDYENKIKGKWSETPCFEVANARMNADNISTRKYQEDFENMKDQIYFMQTETPEYKMNKKAGVAASKVKYKEDYEKNKGKADYNVLPASENPQLRQLKAAGDALSDKLYKENYEKTKAKSINYCETPKFKLDTVLQNFSSDKKYKDSYLKDILGHYVGSFEDPYHSHCMKVTAQNSDKNYKAEYEEDRGKGFFPQTITQEYEAIKKLDQCKDHTYKVHPDKTKFTQVTDSPVLLQAQVNSKQLSDLNYKAKHESEKFKCHIPPDTPAFIQHKVNAYNLSDNLYKQDWEKSKAKKFDIKVDAIPLLAAKANTKNTSDVMYKKDYEKNKGKMIGVLSINDDPKMLHSLKVAKNQSDRLYKENYEKTKAKSMNYCETPKYQLDTQLKNFSEARYKDLYVKDVLGHYVGSMEDPYHTHCMKVAAQNSDKSYKAEYEEDKGKCYFPQTITQEYDAIKKLDQCKDHTYKVHPDKTKFTAVTDSPVLLQAQLNTKQLSDLNYKAKHEGERFKCHIPADAPQFIQHRVNAYNLSDNVYKQDWEKSKAKKFDIKVDAIPLLAAKANTKNTSDVMYKKDYEKSKGKMIGALSINDDPKMLHSLKTAKNQSDREYRKDYEKSKTIYTAPLDMLQVTQAKKSQAIASDVDYKHILHSYSYPPDSINVDLAKKAYALQSDVEYKADYNSWMKGCGWVPFGSLEMEKAKRASDILNEKKYRQHPDTLKFTSIEDAPITVQSKINQAQRSDIAYKAKGEEIIHNYNLPPDLPQFIQAKVNAYNISENMYKADLKDLSKKGYDLRTDAIPIRAAKAARQAASDVQYKKDYEKAKGKMVGFQSLQDDPKLVHYMNVAKIQSDREYKKDYEKTKSKYNTPHDMFNVVAAKKAQDVVSNVNYKHSLHHYTYLPDAMDLELSKNMMQIQSDNVYKEDYNNWMKGIGWIPIGSLDVEKVKKAGDALNEKKYRQHPDTLKFTSIVDSPVMVQAKQNTKQVSDILYKAKGEDVKHKYTMSPDLPQFLQAKCNAYSISDVCYKRDWHDLIRKGNNVLGDAIPITAAKASRNIASDYKYKEAYEKSKGKHVGFRSLQDDPKLVHYMNVAKLQSDREYKKNYENTKTSYHTPGDMVTITAAKMAQDVATNVNYKQPLHHYTYLPDAMSLEHTRNVNQIQSDNVYKDEYNSFLKGIGWIPIGSLEVEKVKKAGDALNERKYRQHPDTVKFTSVPDSMGMMLAQHNTKQLSDLNYKVEGEKLKHKYTIDPELPQFIQAKVNALNMSDAHYKADWKKTIRKGYDLRPDAIPIVAAKSSRNIASDCKYKEAYEKAKGKQVGFLSLQDDPKLVHYMNVAKIQSDREYKKGYEASKTKYHTPLDMVSVTAAKKSQEVATNANYRQSYHHYTLLPDALNVEHSRNAMQIQSDNLYKSDFTNWMKGIGWVPIESLEVEKAKKAGEILSEKKYRQHPEKLKFTYAMDTMEQALNKSNKLNMDKRLYTEKWNKDKTTIHVMPDTPDILLSRVNQITMSDKLYKAGWEEEKKKGYDLRPDAIAIKAARASRDIASDYKYKKAYEQAKGKHIGFRSLEDDPKLVHFMQVAKMQSDREYKKGYEKSKTSFHTPVDMLSVVAAKKSQEVATNANYRNVIHTYNMLPDAMSFELAKNMMQIQSDNQYKADYADFMKGIGWLPLGSLEAEKNKKAMEIISEKKYRQHPDTLKYSTLMDSMNMVLAQNNAKIMNEHLYKQAWEADKTKVHIMPDIPQIILAKANAINISDKLYKLSLEESKKKGYDLRPDAIPIKAAKASRDIASDYKYKYNYEKGKGKMVGFRSLEDDPKLVHSMQVAKMQSDREYKKNYENTKTSYHTPADMLSVTAAKDAQANITNTNYKHLIHKYILLPDAMNIELTRNMNRIQSDNEYKQDYNEWYKGLGWSPAGSLEVEKAKKATEYASDQKYRQHPSNFQFKKLTDSMDMVLAKQNAHTMNKHLYTIDWNKDKTKIHVMPDTPDILQAKQNQTLYSQKLYKLGWEEALKKGYDLPVDAISVQLAKASRDIASDYKYKQGYRKQLGHHVGFRSLQDDPKLVLSMNVAKMQSEREYKKDFEKWKTKFSSPVDMLGVVLAKKCQELVSDVDYKNYLHQWTCLPDQNDVVQAKKVYELQSENLYKSDLEWLRGIGWSPLGSLEAEKNKRASEIISEKKYRQPPDRNKFTSIPDAMDIVLAKTNAKNRSDRLYREAWDKDKTQIHIMPDTPDIVLAKANLINTSDKLYRMGYEELKRKGYDLPVDAIPIKAAKASREIASEYKYKEGFRKQLGHHIGARNIEDDPKMMWSMHVAKIQSDREYKKDFEKWKTKFSSPVDMLGVVLAYKCQTLVSDVDYKNYLHQWTCLPDQSDVIHARQAYDLQSDNLYKSDLQWLKGIGWMTSGSLEDEKNKRATQILSDHVYRQHPDQFKFSSLMDSIPMVLAKNNAITMNHRLYTEAWDKDKTTVHIMPDTPEVLLAKQNKVNYSEKLYKLGLEEAKRKGYDMRVDAIPIKAAKASRDIASEFKYKEGYRKQLGHHIGARAIRDDPKMMWSMHVAKIQSDREYKKDFEKWKTKFSSPVDMLGVVLAKKCQTLVSDVDYKNYLHQWTCLPDQSDVIHARQAYDLQSDNMYKSDLQWMRGIGWVSIGSLDVEKCKRATEILSDKIYRQPPDRFKFTSVTDSLEQVLAKNNALNMNKRLYTEAWDKDKTQIHIMPDTPEIMLARQNKINYSETLYKLANEEAKKKGYDLRSDAIPIVAAKASRDVISDYKYKDGYRKQLGHHIGARNIEDDPKMMWSMHVAKIQSDREYKKDFEKWKTKFSSPVDMLGVVLAKKCQTLVSDVDYKNYLHEWTCLPDQNDVIHARQAYDLQSDNIYKSDLQWLRGIGWVPIGSMDVVKCKRAAEILSDNIYRQPPDKLKFTSVTDSLEQVLAKNNALNMNKRLYTEAWDKDKTQVHIMPDTPEIMLARQNKINYSESLYRQAMEEAKKEGYDLRSDAIPIVAAKASRDIASDYKYKEAYRKQLGHHIGARAVHDDPKIMWSLHIAKVQSDREYKKDFEKYKTRYSSPVDMLGIVLAKKCQTLVSDVDYKHPLHECICLPDQNDIIHARKAYDLQSDNLYKSDLEWMKGIGWVPIDSLEVVRAKRAGELLSDTIYRQRPETLKFTSITDTPEQVLAKNNALNMNKRLYTEAWDNDKKTIHVMPDTPEIMLAKLNRINYSDKLYKLALEESKKEGYDLRLDAIPIQAAKASRDIASDYKYKEGYRKQLGHHIGARNIKDDPKMMWSIHVAKIQSDREYKKEFEKWKTKFSSPVDMLGVVLAKKCQILVSDIDYKHPLHEWTCLPDQNDVIQARKAYDLQSDAIYKSDLEWLRGIGWVPIGSVEVEKVKRAGEILSDRKYRQPADQLKFTCITDTPEIVLAKNNALTMSKHLYTEAWDADKTSIHVMPDTPDILLAKSNSANISQKLYTKGWDESKMKDYDLRADAISIKSAKASRDIASDYKYKEAYEKQKGHHIGAQSIEDDPKIMCAIHAEKIQSEREYKKEFQKWKTKFSSPVDMLSILLAKKCQTLVTDIYYRNYLHEWTCMPDQNDIIQAKKAYDLQSDALYKADLEWLRGIGWMPQGSPEVLRVKNAQNIFCDSVYRTPVVNLKYTSIVDTPEVVLAKSNAENISIPKYREVWDKDKTSIHIMPDTPEINLARANALNVSNKLYREGWDEMKAGCDVRLDAIPIQAAKASREIASDYKYKLDHEKQKGHYVGTLTARDDNKIRWALIADKLQNEREYRLDWAKWKAKIQSPVDMLSILHSKNSQALVSDMDYRNYLHQWTCMPDQNDVIQAKKAYELQSDNVYKADLEWLRGIGWMPNDSVSVNHAKHAADIFSEKKYRTKIETLNFTPVDDRVDYVTAKQSGEILDDIKYRKDWNATKSKYTLTETPLLHTAQEAARILDQYLYKEGWERQKATGYILPPDAVPFVHAHHCNDVQSELKYKAEHVKQKGHYVGVPTMRDDPKLVWFEHAGQIQNERLYKEDYHKTKAKINIPADMVSVLAAKQGQTLVSDIDYRNYLHQWMCHPDQNDVIQARKAYDLQSDNVYRADLEWLRGIGWIPLDSVDHVRVTKNQEMMSQIKYKKNALENYPNFTSVVDPPEIVLAKINSVNQSDVKYKETFNKAKGKYTFSPDTPHISHSKDMGKLYSTILYKGAWEGTKAYGYTLDERYIPIVGAKHADLVNSELKYKETYEKQKGHYLAGKVIGEFPGVVHCLDFQKMRSALNYRKHYEDTKANVHIPNDMMNHVLAKRCQYILSDLEYRHYFHQWTSLLEEPNVIRVRNAQEILSDNVYKDDLNWLKGIGCYVWDTPQILHAKKSYDLQSQLQYTAAGKENLQNYNLVTDTPLYVTAVQSGINASEVKYKENYHQIKDKYTTVLETVDYDRTRNLKNLYSSNLYKEAWDRVKATSYILPSSTLSLTHAKNQKHLASHIKYREEYEKFKALYTLPRSVDDDPNTARCLRVGKLNIDRLYRSVYEKNKMKIHIVPDMVEMVTAKDSQKKVSEIDYRLRLHEWICHPDLQVNDHVRKVTDQISDIVYKDDLNWLKGIGCYVWDTPEILHAKHAYDLRDDIKYKAHMLKTRNDYKLVTDTPVYVQAVKSGKQLSDAVYHYDYVHSVRGKVAPTTKTVDLDRALHAYKLQSSNLYKTSLRTLPTGYRLPGDTPHFKHIKDTRYMSSYFKYKEAYEHTKAYGYTLGPKDVPFVHVRRVNNVTSERLYRELYHKLKDKIHTTPDPPEIRQVKKTQEAVSELIYKSDFFKMQGHMISLPYTPQVIHCRYVGDITSDIKYKEDLQVLKGFGCFLYDTPDMVRSRHLRKLWSNYLYTDKAREMRDKYKVVLDTPEYRKVQELKTHLSELVYRAAGKKQKSIFTSVPDTPDLLRAKRGQKLQSQYLYVELATKERPHHHAGNQTTALKHAKDVKDMVSEKKYKIQYEKMKDKYTPVPDTPILIRAKRAYWNASDLRYKETFQKTKGKYHTVKDALDIVYHRKVTDDISKIKYKENYMSQLGIWRSIPDRPEHFHHRAVTDTVSDVKYKEDLTWLKGIGCYAYDTPDFTLAEKNKTLYSKYKYKEVFERTKSDFKYVADSPINRHFKYATQLMNEKKYRADYEQRKDKYHLVVDEPRHLLAKTRSDQISQIKYRKNYEKSKDKFTSIVDTPEHLRTTKVNKQISDILYKLEYNKAKPRGYTTIHDTPMLLHVRKVKDEVSDLKYKEVYQRNKSNCTIEPDAVHIKAAKDAYKVNTNLDYKKQYEANKAHWKWTPDRPDFLQAAKSSLQQSDFEYKLDREFLKGCKLSVTDDKNTVLALRNTLIESDLKYKEKHVKERGTCHAVPDTPQILLAKTVSNLVSENKYKDHVKKHLAQGSYTTLPETRDTVHVKEVTKHVSDTNYKKKFVKEKGKSNYSIMLEPPEVKHAMEVAKKQSDVAYRKDAKENLHYTTVADRPDIKKATQAAKQASEVEYRAKHRKEGSHGLSMLGRPDIEMAKKAAKLSSQVKYRENFDKEKGKTPKYNPKDSQLYKVMKDANNLASEVKYKADLKKLHKPVTDMKESLIMNHVLNTSQLASSYQYKKKYEKSKGHYHTIPDNLEQLHLKEATELQSIVKYKEKYEKERGKPMLDFETPTYITAKESQQMQSGKEYRKDYEESIKGRNLTGLEVTPALLHVKYATKIASEKEYRKDLEESIRGKGLTEMEDTPDMLRAKNATQILNEKEYKRDLELEVKGRGLNAMANETPDFMRARNATDIASQIKYKQSAEMEKANFTSVVDTPEIIHAQQVKNLSSQKKYKEDAEKSMSYYETVLDTPEIQRVRENQKNFSLLQYQCDLKNSKGKITVVQDTPEILRVKENQKNFSSVLYKEDVSPGTAIGKTPEMMRVKQTQDHISSVKYKEAIGQGTPIPDLPEVKRVKETQKHISSVMYKENLGTGIPTTVTPEIERVKRNQENFSSVLYKENLGKGIPTPITPEMERVKRNQENFSSVLYKENMGKGTPLPVTPEMERVKHNQENISSVLYKENVGKATATPVTPEMQRVKRNQENISSVLYKENLGKATPTPFTPEMERVKRNQENFSSVLYKENMRKATPTPVTPEMERAKRNQENISSVLYSDSFRKQIQGKAAYVLDTPEMRRVRETQRHISTVKYHEDFEKHKGCFTPVVTDPITERVKKNMQDFSDINYRGIQRKVVEMEQKRNDQDQETITGLRVWRTNPGSVFDYDPAEDNIQSRSLHMINVQAQRRSREQSRSASALSVSGGEEKSEHSEAPDHHLSTYSDGGVFAVSTAYKHAKTTELPQQRSSSVATQQTTVSSIPSHPSTAGKIFRAMYDYMAADADEVSFKDGDAIINVQAIDEGWMYGTVQRTGRTGMLPANYVEAI

SEQ ID NO: 26 - DNA, 915 bp, Homo sapiens
ctgatttgcatggatggactctccccctctcagagtatgaagagagggagagatctgggggaagctcagcttcagctgtgggtagagaagacaggactcaggacaatctccagcatggccagcttccctctcctcctcaccctcctcactcactgtgcagggtcctgggcccagtctgtgctgactcagccaccctcagcgtctgggacccccgggcagagggtcaccatctcttgttctggaagccgctccaacgtcggaagtaataatgttaactggtaccagcagctcccaggaacggcccccaaactcctcatctatagtaataatcagcggccctcaggggtccctgaccgattctctggctccaagtctggcacctcagcctccctggccatcagtgggctccagtctgaggatgaggctgattattactgtgcaacatgggatgacagtactgtggtcttcggcggagggaccaagctgaccgtccctggtcagcccaaggctgccccctcggtcactctgttcccgccctcctctgaggagcttcaagccaacaaggccacactggtgtgtctcataagtgacttctacccgggagccgtgacagtggcctggaaggcagatagcagccccgtcaaggcgggagtggagaccaccacaccctccaaacaaagcaacaacaagtacgcggccagcagctatctgagcctgacgcctgagcagtggaagtcccacagaagctacagctgccaggtcacgcatgaagggagcaccgtggagaagacagtggcccctacagaatgttcataggttctcaaccctcaccccccaccacgggagactagagctgcaggatcccaggggaggggtctctcctcccaccccaaggcatcaagcccttctccctgc

SEQ ID NO: 27 - protein, 233 aa, Homo sapiens [sequence omitted]

SEQ ID NO: 28 - DNA, 1470 bp, Homo sapiens
gacggtcacccgttgccagctctagcctttaaattcccggctcggggacctccacgcaccgcggctagcgccgacaaccagctagcgtgcaaggcgccgcggctcagcgcgtaccggcgggtttcgaaaccgcagtcctccggcgaccccgaactccgctccggagcctcagccccctggaaagtgatcccggcatcggagagccaagatgccggcccacttgctgcaggacgatatctctagctcctataccaccaccaccaccattacagcgcctcctccaggggtcctgcagaatggaggagataagttggagacgatgcccctctacttggaagacgacattcgccctgatataaaagatgatatatatgaccccacctacaaggataaggaaggcccaagccccaaggttgaatatgtctggagaaacatcatccttatgtctctgctacacttgggagccctgtatgggatcactttgattcctacctgcaagttctacacctggctttggggggtattctactattttgtcagtgccctgggcataacagcaggagctcatcgtctgtggagccaccgctcttacaaagctcggctgcccctacggctctttctgatcattgccaacacaatggcattccagaatgatgtctatgaatgggctcgtgaccaccgtgcccaccacaagttttcagaaacacatgctgatcctcataattcccgacgtggctttttcttctctcacgtgggttggctgcttgtgcgcaaacacccagctgtcaaagagaaggggagtacgctagacttgtctgacctagaagctgagaaactggtgatgttccagaggaggtactacaaacctggcttgctgatgatgtgcttcatcctgcccacgcttgtgccctggtatttctggggtgaaacttttcaaaacagtgtgttcgttgccactttcttgcgatatgctgtggtgcttaatgccacctggctggtgaacagtgctgcccacctcttcggatatcgtccttatgacaagaacattagcccccgggagaatatcctggtttcacttggagctgtgggtgagggcttccacaactaccaccactcctttccctatgactactctgccagtgagtaccgctggcacatcaacttcaacacattcttcattgattggatggccgccctcggtctgacctatgaccggaagaaagtctccaaggccgccatcttggccaggattaaaagaaccggagatggaaactacaagagtggctgagtttggggtccctcaggttcctttttcaaaaaccagccaggcagaggttttaatgtctgtttattaactactgaataatgctaccaggatgctaaagatgatgatgttaacccattccagtacagtattcttttaaaattcaaaagtattgaaagccaaaaaaaaaaaaaaaaaaaaaaaaa

SEQ ID NO: 29 - protein, 359 aa, Homo sapiens
MPAHLLQDDISSSYTTTTTITAPPPGVLQNGGDKLETMPLYLEDDIRPDIKDDIYDPTYKDKEGPSPKVEYVWRNIILMSLLHLGALYGITLIPTCKFYTWLWGVFYYFVSALGITAGAHRLWSHRSYKARLPLRLFLIIANTMAFQNDVYEWARDHRAHHKFSETHADPHNSRRGFFFSHVGWLLVRKHPAVKEKGSTLDLSDLEAEKLVMFQRRYYKPGLLMMCFILPTLVPWYFWGETFQNSVFVATFLRYAVVLNATWLVNSAAHLFGYRPYDKNISPRENILVSLGAVGEGFHNYHHSFPYDYSASEYRWHINFNTFFIDWMAALGLTYDRKKVSKAAILARIKRTGDGNYKSG

SEQ ID NO: 30 - DNA, 447 bp, Homo sapiens
  misc_feature (20)..(20): n is a, c, g, or t
  misc_feature (81)..(81): n is a, c, g, or t
  misc_feature (86)..(86): n is a, c, g, or t
  misc_feature (104)..(104): n is a, c, g, or t
  misc_feature (136)..(136): n is a, c, g, or t
  misc_feature (150)..(150): n is a, c, g, or t
  misc_feature (154)..(154): n is a, c, g, or t
  misc_feature (167)..(167): n is a, c, g, or t
  misc_feature (248)..(248): n is a, c, g, or t
  misc_feature (306)..(306): n is a, c, g, or t
  misc_feature (323)..(323): n is a, c, g, or t
  misc_feature (325)..(325): n is a, c, g, or t
  misc_feature (327)..(327): n is a, c, g, or t
  misc_feature (368)..(368): n is a, c, g, or t
  misc_feature (378)..(378): n is a, c, g, or t
  misc_feature (423)..(423): n is a, c, g, or t
tttttccccgaagtcaagtnttaaagcatgttggatttcagaaacatgagtttattcatatcttctggactgagcaaccanctccntttgattagaagcgcttnttcacacatatttacacacccgcttctggcgnccacggcggaaccnccangagccagaaggangcttggcagttttgtgtgcttttgggtaacgcacgaccagtactggaagagatcaggggtagcctggaagaggggctcctncaggtaatcgtacacttcatttttgcctagccgatcatcttcctgagctgcggggttntcgacggcagcagaggngngnttcttggcagcgggctcgaagtcggcctcctcggccaggantccttcaccncgttgatgagctcacagaccttgccgatgatctcctcgtgctggnagggtggcacaggcgcagcttctg

SEQ ID NO: 31 - DNA, 373 bp, Homo sapiens
  misc_feature (173)..(173): n is a, c, g, or t
  misc_feature (236)..(236): n is a, c, g, or t
  misc_feature (244)..(244): n is a, c, g, or t
  misc_feature (278)..(278): n is a, c, g, or t
  misc_feature (287)..(287): n is a, c, g, or t
  misc_feature (300)..(300): n is a, c, g, or t
  misc_feature (320)..(320): n is a, c, g, or t
  misc_feature (341)..(341): n is a, c, g, or t
cggcggcggcggtggcggcggcgactgctgcggtgaaggaggaggaggagccgagcgggcgctggcaccgaggcctgaccatggacgaggaatacgatgtgatcgtgctggggaccggtctcaccgaatgcatcctgtcgggcatcatgtctgtgaacgggaagaaggtgctncacatggaccggaacccctactacgggggcgagagctcctccatcacacccctggaggagctntataagcnttttcagttgctggaggggccccctgagtcgatnggccgaggncgagactggaatnttgacctgattcccaaattnctcatggctaacgggcagctngtaaagatgctactgtatacagaggtgactcg

SEQ ID NO: 32 - DNA, 289 bp, Homo sapiens
gagctcgtgatgacccagtctccatcctccctgtctgcatctcttggggacagaattaccatcacttgccgggcaagtcagagcgttggtcgctatttaaattggtatcagcagatgccagggaaagccccgaaactcctgatctctgctacatccagtttgctaagtggggtcccatctaggttcagtggcactggatctgagacagatttcagtctcaccatctccagtctgcaacctgaagattttgcaacttactactgtcaacagagtttcactaccccgtaca

SEQ ID NO: 33 - protein, 96 aa, Homo sapiens
ELVMTQSPSSLSASLGDRITITCRASQSVGRYLNWYQQMPGKAPKLLISATSSLLSGVPSRFSGTGSETDFSLTISSLQPEDFATYYCQQSFTTPY

SEQ ID NO: 34 - DNA, 363 bp, Homo sapiens
cagctgcagctgcaggagtccggctcaggactggtgaggccttcacagaccctgtcgctcacctgcgctgtcgctggtggctccatcagcagtggtggtttctcctggagctggatccggaagcctccagggcagggcctggagtggattggttacatctatcatgatgggagcgcctactataacccgtccctcaagagtcgagtcaccatgtcagtagacacgtccaagaaccagttcgccctgaacttgagatctgtgactgccgcggacacggccgtgtattattgtgccagagggggtggaagtggatactggtcgtacgccaactggggccagggaatcctggtcaccgtctcctca

SEQ ID NO: 35 - protein, 121 aa, Homo sapiens
QLQLQESGSGLVRPSQTLSLTCAVAGGSISSGGFSWSWIRKPPGQGLEWIGYIYHDGSAYYNPSLKSRVTMSVDTSKNQFALNLRSVTAADTAVYYCARGGGSGYWSYANWGQGILVTVSS

SEQ ID NO: 36 - DNA, 1191 bp, Homo sapiens
gcccaagtatcaagagggagagtgagacttgcctgcttctctggcccctggtcctgtcctgttctccagcatggtgtgtctgaagctccctggaggctcctgcatgacagcgctgacagtgacactgatggtgctgagctccccactggctttggctggggacacccgaccacgtttcttgtggcagcttaagtttgaatgtcatttcttcaatgggacggagcgggtgcggttgctggaaagatgcatctataaccaagaggagtccgtgcgcttcgacagcgacgtgggggagtaccgggcggtgacggagctggggcggcctgatgccgagtactggaacagccagaaggacatcctggaagacgagcgggccgcggtggacacctactgcagacacaactacggggttggtgagagcttcacagtgcagcggcgagttgagcctaaggtgactgtgtatccttcaaagacccagcccctgcagcaccacaacctcctggtctgctctgtgagtggtttctatccaggcagcattgaagtcaggtggttccggaacggccaggaagagaaggctggggtggtgtccacaggcctgatccagaatggagattggaccttccagaccctggtgatgctggaaacagttcctcggagtggagaggtttacacctgccaagtggagcacccaagtgtgacgagccctctcacagtggaatggagagcacggtctgaatctgcacagagcaagatgctgagtggagtcgggggcttcgtgctgggcctgctcttccttggggccgggctgttcatctacttcaggaatcagaaaggacactctggacttcagccaacaggattcctgagctgaaatgcagatgaccacattcaaggaagaaccttctgtcccagctttgcagaatgaaaagctttcctgcttggcagttattcttccacaagagagggctttctcaggacctggttgctactggttcggcaactgcagaaaatgtcctcccttgtggcttcctcagctcctgcccttggcctgaagtcccagcattgatgacagcgcctcatcttcaacttttgtgctcccctttgcctaaaccgtatggcctcccgtgcatctgtacctcaccctgtacgacaaacacattacattattaaatgtttctcaaagatggagtt

SEQ ID NO: 37 - protein, 266 aa, Homo sapiens [sequence omitted]

SEQ ID NO: 38 - DNA, 566 bp, Homo sapiens
  misc_feature (347)..(347): n is a, c, g, or t
  misc_feature (481)..(481): n is a, c, g, or t
tttttttttttttttttgctctctcaacttctaggaattgacttatttaattaatccatcaacgcttcatagcaaatatttgagaacacaaatttatattcaggttcttaacttcattagggaagtaagaagttgcagctcagtgcaccatgaatttgagacagagatggagacatccagccccacctctctggaacaggaaagatgatcggggagggacacaggtcagtgtggggacaggggtcacggtggacacgggggtgggctgtctctccacctcctcacattatgctaacaggaacgcagacacattcaggtgcctttgcagaaagagatgccagacgtcnttgaagtcacaaaggagaggtgtgaagaaatcctgcatctcagtctcacacaggcagctgtctcaggctttaaaagtgatgagagactcatcagagcactgggcacatgttgctgcacacagccctgagagcangtccctcattttccaacatgaggtcttcatcctacacatcatacaggtgacacagctccaaggacagctatgacatctatgacag

SEQ ID NO: 39 - DNA, 515 bp, Homo sapiens
atgaaacacctgtggttcttcctcctgctggtggcagctcccagatgtgagtgcctcagggatccagacctgaagatatgagatgctgcctctcatcccagggctcaccgtggttctctctgttcacaggggtcctgtcccaggtgcagctgcaggagtcgggcccaggactggtgaagccttcggagaccctgtccctcatctgcgctgtctctggtgactccatcagcagtggtaactggtgaatctgggtccgccagcccccagggaaggggctggagtggattggggaaatccatcatagtgggagcacctactacaacccgtccctcaagagtcgaatcaccatgtccgtagacacgtccaagaaccagttctacctgaagctgagctctgtgaccgccgcggacacggccgtgtattactgtgcgagatataggggtttgtagtagtaccagctgctccttgatgcttttgatatctggggccaagggacaatggtcaccgtctcctca

SEQ ID NO: 40 - protein, 53 aa, Homo sapiens
MKHLWFFLLLVAAPRWVLSQVQLQESGPGLVKPSETLSLICAVSGDSISSGNW

SEQ ID NO: 41 - DNA, 1413 bp, Homo sapiens
cgggccggctcaggcagagacgcggcaccatggctagcaagaaagtctgcattgtaggctccgggaactggggctcagccatcgccaagatcgtgggtggcaatgcagcccagctcgcacagtttgacccacgggtgaccatgtgggtatttgaggaagacattggaggcaaaaagctgactgagatcatcaacacgcagcatgagaatgtcaaatacctgccagggcacaagttgcccccaaatgtggtggctgtcccagatgtggtccaggctgcagaggatgctgacatcctgatctttgtggtgccccatcagttcatcggcaagatctgtgaccagctcaagggccatctgaaggcaaaccccactggcatatctcttattaagggggtagacgagggccccaatgggctgaagctcatctcggaagtgattggggagcgcctcggcatccccatgagtgtgctgatgggggccaacattgccagcgaggtggctgatgagaagttctgtgagacaaccattggctgcaaggacccggcccagggacaactcctgaaagagctgatgcagacaccaaacttccgtatcacagtggtgcaagaggtggacacagtagagatctgtggagccttaaagaatgtagtggccgtgggggctggcttctgtgatggcctgggctttggcgacaacaccaaggcggcagtgatccggctgggactcatggagatgatagccttcgccaagctcttctgcagtggccctgtgtcctctgccaccttcttggagagctgtggtgttgctgacctgatcactacctgctatggagggcggaaccggaaagtggctgaggcctttgcgcgtacaggaaagtccattgagcagctggagaaagagttgctgaatgggcagaaactgcaggggcccgagacagcccgggagctatacagcatcctccagcacaagggcctggtagacaagtttcccttgttcatggctgtgtacaaggtgtgctacgagggccagccagtgggtgaattcatccactgcctgcagaatcatccagaacatatgtgagtggggccaggcccaggccaggcgtttttaccccagtggagaccagcagaagcctggggtacctagtcaccaggatctccaggactcccagggagcagagtcttctcatcgtttcactggaggacaggtggctatggggcccagctacgcacctggagatcctgaactgtcaagccactggcagcctcatgccaccacattcgccagaaatgcagttgccctgtccctctccagatgtggggctttctccatatcctctgggaggggtggaatcaagccccagtgctgcctgcttggtggcgggggtgatgtatgtggagaagggtcggggccg

SEQ ID NO: 42 - protein, 349 aa, Homo sapiens
MASKKVCIVGSGNWGSAIAKIVGGNAAQLAQFDPRVTMWVFEEDIGGKKLTEIINTQHENVKYLPGHKLPPNVVAVPDVVQAAEDADILIFVVPHQFIGKICDQLKGHLKANPTGISLIKGVDEGPNGLKLISEVIGERLGIPMSVLMGANIASEVADEKFCETTIGCKDPAQGQLLKELMQTPNFRITVVQEVDTVEICGALKNVVAVGAGFCDGLGFGDNTKAAVIRLGLMEMIAFAKLFCSGPVSSATFLESCGVADLITTCYGGRNRKVAEAFARTGKSIEQLEKELLNGQKLQGPETARELYSILQHKGLVDKFPLFMAVYKVCYEGQPVGEFIHCLQNHPEHM

SEQ ID NO: 43 - DNA, 1465 bp, Homo sapiens
cacagctcagagcagcaactgctgaggctgccttgggaagaggatgatcctaaacaaagctctgctgctgggggcccttgccctgaccaccgtgatgagcccctgtggaggtgaagacattgtggctgaccatgttgcctcttatggtgtaaacttgtaccagtcttacggtccctctggccagtacacccatgaatttgatggagacgagcagttctacgtggacctggggaggaaggagactgtctggtgtttgcctgttctcagacaatttagatttgacccgcaatttgcactgacaaacatcgctgtgacaaaacacaacttgaacatcctgattaaacgctccaactctactgctgctaccaatgaggttcctgaggtcacagtgttttccaagtctcccgtgacgctgggtcagcccaacaccctcatctgtcttgtggacaacatctttcctcctgtggtcaacatcacatggctgagcaatgggcactcagtcacagaaggtgtttctgagaccagcttcctctccaagagtgatcattccttcttcaagatcagttacctcaccttcctcccttctgctgatgagatttatgactgcaaggtggagcactggggcctggacgagcctcttctgaaacactgggagcctgagattccagcccctatgtcagagctcacagagactgtggtctgcgccctgggattgtctgtgggcctcgtgggcattgtggtgggcactgtcttcatcatccgaggcctgcgttcagttggtgcttccagacaccaagggcccttgtgaatcccatcctggaagggaaggtgcatcgccatctacaggagcagaagagtggacttgctacatgacctagcattattttctggccccatttatcatatcccttttctcctccaaatgtttctcctctcacctcttctgtgggacttaaattgctatatctgctcagagctcacaaatgcctttgaattatttccctgacttcctgatttttttcttttctcaagtgttacctactaagagatgcctggagtaagccacccagctacctaattcctcagtaacctccatctataatctccatggaagcaacaaattccctttatgagatatatgtcaaatttttccatctttcatccagggctgactgaaaccgtggctaagaattgggagactctcttgtttcaagccaatttaacatcatttaccagatcatttgtcatgtccagtaacacagaagcaaccaactacagtatagcctgataacatgttgatttcttagctgacgttaatatttctttcttccttgtgttcccacccttggcattgccacccacccctcaattaaggcaacaatgaagttaatggataccctctgcctttggctcagaaatgttatagcaaaaattttaaaataaaaaagtaagtctgtattaattg

SEQ ID NO: 44 - protein, 254 aa, Homo sapiens
MILNKALLLGALALTTVMSPCGGEDIVADHVASYGVNLYQSYGPSGQYTHEFDGDEQFYVDLGRKETVWCLPVLRQFRFDPQFALTNIAVTKHNLNILIKRSNSTAATNEVPEVTVFSKSPVTLGQPNTLICLVDNIFPPVVNITWLSNGHSVTEGVSETSFLSKSDHSFFKISYLTFLPSADEIYDCKVEHWGLDEPLLKHWEPEIPAPMSELTETVVCALGLSVGLVGIVVGTVFIIRGLRSVGASRHQGPL

SEQ ID NO: 45 - DNA, 1060 bp, Homo sapiens
gccctgaccaccgtgatgagcccctgtggaggtgaagacattgtggctgaccacgttgcctcttgtggtgtaaacttgtaccagttttacggtccctctggccagtacacccatgaatttgatggagatgaggagttctacgtggacctggagaggaaggagactgcctggcggtggcctgagttcagcaaatttggaggttttgacccgcagggtgcactgagaaacatggctgtggcaaaacacaacttgaacatcatgattaaacgctacaactctaccgctgctaccaatgaggttcctgaggtcacagtgttttccaagtctcccgtgacactgggtcagcccaacaccctcatttgtcttgtggacaacatctttcctcctgtggtcaacatcacatggctgagcaatgggcagtcagtcacagaaggtgtttctgagaccagcttcctctccaagagtgatcattccttcttcaagatcagttacctcaccttcctcccttctgctgatgagatttatgactgcaaggtggagcactggggcctggaccagcctcttctgaaacactgggagcctgagattccagcccctatgtcagagctcacagagactgtggtctgcgccctggggttgtctgtgggcctcgtggcctttgtggtgggcactgtcttcatcatccaaggcctgcgttcagttggtgcttccagacaccaagggccattgtgaatcccatcctggaagggaaggtgcatcgccatctacaggagcagaagagtggacttgctacatgacctagcactattctctggccccgatttatcatatcccttttctcctccaaatatttctcctctcaccttttctctgggacttaagctgctatatcccctcagagctcacaaatgtctttacattctttccctgacctcctgattttttttttcttttctcaaatgttacctacaaagacatgcctggggtaacccagccggctacctaattcctcagtaacctccatctataatctccaaggaagcaacaaattccttttatg

SEQ ID NO: 46 - protein, 243 aa, Homo sapiens
ALTTVMSPCGGEDIVADHVASCGVNLYQFYGPSGQYTHEFDGDEEFYVDLERKETAWRWPEFSKFGGFDPQGALRNMAVAKHNLNIMIKRYNSTAATNEVPEVTVFSKSPVTLGQPNTLICLVDNIFPPVVNITWLSNGQSVTEGVSETSFLSKSDHSFFKISYLTFLPSADEIYDCKVEHWGLDQPLLKHWEPEIPAPMSELTETVVCALGLSVGLVAFVVGTVFIIQGLRSVGASRHQGPL

SEQ ID NO: 47 - DNA, 3464 bp, Homo sapiens
cagccgtgctcgaagcgttcctggagcccaagctctcctccacaggtgaagacagggccagcaggagacaccatggggcacctctcagccccacttcacagagtgcgtgtaccctggcaggggcttctgctcacagcctcacttctaaccttctggaacccgcccaccactgcccagctcactactgaatccatgccattcaatgttgcagaggggaaggaggttcttctccttgtccacaatctgccccagcaactttttggctacagctggtacaaaggggaaagagtggatggcaaccgtcaaattgtaggatatgcaataggaactcaacaagctaccccagggcccgcaaacagcggtcgagagacaatataccccaatgcatccctgctgatccagaacgtcacccagaatgacacaggattctacaccctacaagtcataaagtcagatcttgtgaatgaagaagcaactggacagttccatgtatacccggagctgcccaagccctccatctccagcaacaactccaaccctgtggaggacaaggatgctgtggccttcacctgtgaacctgagactcaggacacaacctacctgtggtggataaacaatcagagcctcccggtcagtcccaggctgcagctgtccaatggcaacaggaccctcactctactcagtgtcacaaggaatgacacaggaccctatgagtgtgaaatacagaacccagtgagtgcgaaccgcagtgacccagtcaccttgaatgtcacctatggcccggacacccccaccatttccccttcagacacctattaccgtccaggggcaaacctcagcctctcctgctatgcagcctctaacccacctgcacagtactcctggcttatcaatggaacattccagcaaagcacacaagagctctttatccctaacatcactgtgaataatagtggatcctatacctgccacgccaataactcagtcactggctgcaacaggaccacagtcaagacgatcatagtcactgagctaagtccagtagtagcaaagccccaaatcaaagccagcaagaccacagtcacaggagataaggactctgtgaacctgacctgctccacaaatgacactggaatctccatccgttggttcttcaaaaaccagagtctcccgtcctcggagaggatgaagctgtcccagggcaacaccaccctcagcataaaccctgtcaagagggaggatgctgggacgtattggtgtgaggtcttcaacccaatcagtaagaaccaaagcgaccccatcatgctgaacgtaaactataatgctctaccacaagaaaatggcctctcacctggggccattgctggcattgtgattggagtagtggccctggttgctctgatagcagtagccctggcatgttttctgcatttcgggaagaccggcagggcaagcgaccagcgtgatctcacagagcacaaaccctcagtctccaaccacactcaggaccactccaatgacccacctaacaagatgaatgaagttacttattctaccctgaactttgaagcccagcaacccacacaaccaacttcagcctccccatccctaacagccacagaaataatttattcagaagtaaaaaagcagtaatgaaacctgtcctgctcactgcagtgctgatgtatttcaagtctctcaccctcatcactaggagattcctttcccctctagggtagaggggtggggacagaaacaactttctcctactcttccttcctaataggcatctccaggctgcctggtcactgcccctctctcagtgtcaatagatgaaagtacattgggagtctgtaggaaacccaaccttcttgtcattgaaatttggcaaagctgactttgggaaagagggaccagaacttcccctcccttccccttttcccaacctggacttgttttaaacttgcctgttcagagcactcattccttcccacccccagtcctgtcctatcactctaattcggatttgccatagccttgaggttatgtccttttccattaagtacatgtgccaggaaacagcgagagagagaaagtaaacggcagtaatgcttctcctatttctccaaagccttgtgtgaactagcaaagagaagaaaaccaaatatataaccaatagtgaaatgccacaggtttgtccactgtcagggttgtctacctgtaggatcagggtctaagcaccttggtgcttagctagaataccacctaatccttctggcaagcctgtcttcagagaacccactagaagcaactaggaaaaatcacttgccaaaatccaaggcaattcctgatggaaaatgcaaaagcacatatatgttttaatatctttatgggctctgttcaaggcagtgctgagagggaggggttatagcttcaggagggaaccagcttctgataaacacaatctgctaggaacttgggaaaggaatcagagagctgcccttcagcgattatttaaattattgttaaagaatacacaatttggggtattgggatttttctccttttctctgagacattccaccattttaatttttgtaactgcttatttatgtgaaaagggttatttttacttagcttagctatgtcagccaatccgattgccttaggtgaaagaaaccaccgaaatccctcaggtcccttggtcaggagcctctcaagattttttttgtcagaggctccaaatagaaaataagaaaaggttttcttcattcatggctagagctagatttaactcagtttctaggcacctcagaccaatcatcaactaccattctattccatgtttgcacctgtgcattttctgtttgcccccattcactttgtcaggaaaccttggcctctgctaaggtgtatttggtccttgagaagtgggagcaccctacagggacactatcactcatgctggtggcattgtttacagctagaaagctgcactggtgctaatgccccttgggaaatggggctgtgaggaggaggattataacttaggcctagcctcttttaacagcctctgaaatttatcttttcttctatggggcttataaatgtatcttataataaaaaggaaggacaggaggaagacaggcaaatgtacttctcacccagtcttctacacagatggaatctctttggggctaagagaaaggttttattctatattgcttacctgatctcatgttaggcctaagaggctttctccaggaggattagcttggagttctctatactcaggtacctctttcagggttttctaaccctgacacggactgtgcatactttccctcatccatgctgtgctgtgttatttaatttttcctggctaagatcatgtctgaattatgtatgaaaattattctatgtttttataataaaaataatatatcagacatcgaaaaaaaaaa

SEQ ID NO: 48 - protein, 526 aa, Homo sapiens
MGHLSAPLHRVRVPWQGLLLTASLLTFWNPPTTAQLTTESMPFNVAEGKEVLLLVHNLPQQLFGYSWYKGERVDGNRQIVGYAIGTQQATPGPANSGRETIYPNASLLIQNVTQNDTGFYTLQVIKSDLVNEEATGQFHVYPELPKPSISSNNSNPVEDKDAVAFTCEPETQDTTYLWWINNQSLPVSPRLQLSNGNRTLTLLSVTRNDTGPYECEIQNPVSANRSDPVTLNVTYGPDTPTISPSDTYYRPGANLSLSCYAASNPPAQYSWLINGTFQQSTQELFIPNITVNNSGSYTCHANNSVTGCNRTTVKTIIVTELSPVVAKPQIKASKTTVTGDKDSVNLTCSTNDTGISIRWFFKNQSLPSSERMKLSQGNTTLSINPVKREDAGTYWCEVFNPISKNQSDPIMLNVNYNALPQENGLSPGAIAGIVIGVVALVALIAVALACFLHFGKTGRASDQRDLTEHKPSVSNHTQDHSNDPPNKMNEVTYSTLNFEAQQPTQPTSASPSLTATEIIYSEVKKQ

SEQ ID NO: 49 - DNA, 1715 bp, Homo sapiens
cttctacttgtccacaatttgccccagaatcttcctggctacttctggtacaaaggggaaatgacggacctctaccattacattatatcgtatatagttgatggaaaaataattatatatgggcctgcatacagtggaagagaaacagtatattccaacgcatccctgctgatccagaatgtcacccggaaggatgcaggaacctacaccttacacatcataaagcgaggtgatgagactagagaagaaattcgacatttcaccttcaccttatacttggagactcccaagccctacatctccagcagcaacttaaaccccagggaggccatggaggctgtgcgcttaatctgtgatcctgagactctggacgcaagctacctatggtggatgaatggtcagagcctccctgtgactcacaggttgcagctgtccaaaaccaacaggaccctctatctatttggtgtcacaaagtatattgcaggaccctatgaatgtgaaatacggaacccagtgagtgccattcgcagtgacccagtcaccctgaatctcctccatggtccagacctccccagaatttacccttcattcacctattaccgttcaggagaaaacctcgacttgtcctgcttcacggaatctaacccaccggcagagtatttttggacaattaatgggaagtttcagcaatcaggacaaaagctctttatcccccaaattactagaaatcatagcgggctctatgcttgctctgttcataactcagccactggcaaggaaatctccaaatccatgacagtcaaagtctctggtaagtggatcccagcatccttggcagtagggttttatgtggagtctatctggctttcagagaagagtcaggaaaacatttttattcccagcctgtgtcccatgggcacaagcaaatcccaaattctcctcctgaaccctcccaatttgtctctacagactctcttctccttgtttttctgttttcttatggctgaccttgtgtctggcctgaaaaaggtagggagggggctttatcagccctgagccctatgtggtagaagaggcttcagagagggacaagaagggaattccaaggcagcgtccgcaggtcgtggtcacctgccagcgactgtctcagactgggcagggaggctttggcatgacttaagaggaagggcagtcttgggcccgctatgcaggtcctggcaaacctggctgccctgtctccatccctgtccctcagggtagcaccatggcaggactgggggaactggagtgtccttgctgtatccctgttgtgaggttccttccaggggctggcactgaagcaagggtgctgggaccccatggccttcagccctggctgagcaactgggctgtagggcagggcacttctgaggtcaggtcttggtaggtgcctgcatctgtctgccttctggctgacaatcctggaaatctgttctccagaatcaggccaaaaagttcacagtcaaatggggaggggtattcttcatgcaggagacccctaggccctggaggctgcaacatacctcaatcctgtcccaggccggatcctcctgaagcccttttcgcagcactgctatcctccaaagccattgtaaatgtgtgtacagtgtgtataaaccttcttcttctttttttttttttaaactgaggattgtcattaaacacagttgttttct

SEQ ID NO: 50 - protein, 351 aa, Homo sapiens
LLLVHNLPQNLPGYFWYKGEMTDLYHYIISYIVDGKIIIYGPAYSGRETVYSNASLLIQNVTRKDAGTYTLHIIKRGDETREEIRHFTFTLYLETPKPYISSSNLNPREAMEAVRLICDPETLDASYLWWMNGQSLPVTHRLQLSKTNRTLYLFGVTKYIAGPYECEIRNPVSAIRSDPVTLNLLHGPDLPRIYPSFTYYRSGENLDLSCFTESNPPAEYFWTINGKFQQSGQKLFIPQITRNHSGLYACSVHNSATGKEISKSMTVKVSGKWIPASLAVGFYVESIWLSEKSQENIFIPSLCPMGTSKSQILLLNPPNLSLQTLFSLFFCFLMADLVSGLKKVGRGLYQP

SEQ ID NO: 51 - DNA, 1216 bp, Homo sapiens
ttttattctttctgccaggtacatcagatccatcaggtctgagctgtgttgactaccactacttttcccttcgtctcaattatgtcttggaagaagtctttgcggatccccggagaccttcgggtagcaactgtcaccttgatgctggcgatcctgagctcctcactggctgagggcagagactctcccgaggatttcgtgtaccagtttaagggcctgtgctacttcaccaacgggacggagcgcgtgcggggtgtgaccagacacatctataaccgagaggagtacgtgcgcttcgacagcgacgtgggggtgtaccgggcagtgacgccgcaggggcggcctgttgccgagtactggaacagccagaaggaagtcctggagggggcccgggcgtcggtggacagggtgtgcagacacaactacgaggtggcgtaccgcgggatcctgcagaggagagtggagcccacagtgaccatctccccatccaggacagaggccctcaaccaccacaacctgctgatctgctcggtgacagatttctatccaagccagatcaaagtccggtggtttcggaatgatcaggaggagacagccggcgttgtgtccacccccctcattaggaacggtgactggaccttccagatcctggtgatgctggaaatgactccccagcgtggagatgtctacacctgccacgtggagcaccccagcctccagagccccatcaccgtggagtggcgggctcagtctgaatctgcccagagcaagatgctgagtggcgttggaggcttcgtgctggggctgatcttccttgggcttggccttatcatccgtcaaaggagtcggaaagggcttctgcactgactcctgagactgttttaactaagactggttatcactcttctgtgatgcctgcttgtccctgcccagaattcccagctgcctgtgtcagcttgtccccctgagatcaaagtcctacagtggctgtcacgcaaccaccaggtcatctcctttcatccccaccccaaggcgctggctgtgactctgcttcctgcactgacccagagccactgcctgtacatggccagctgcgtctactcaggccccaaggggattctgtttctgttctctcctcagactgctcaagagaagcacatgaaaaacattacctgacttcagagcttttttacataattaaacatgatcctgagtt

SEQ ID NO: 52 - protein, 261 aa, Homo sapiens [sequence omitted]

SEQ ID NO: 53 - DNA, 3623 bp, Homo sapiens
ctggaagagatgcgggatgaccgcctggccaaactaatcacccggacacaagctgtgtgcagagggttcctcatgcgtgtggaattccagaagatggtgcagaggagggagtccatcttctgcatccagtacaacattcgctcattcatgaacgtcaagcactggccctggatgaaactcttcttcaagatcaagcccctcctcaagagtgcggagactgagaaagagatggccaccatgaaggaagaattccagaaaaccaaagatgaactcgccaagtcggaggcaaagaggaaggagctagaggaaaaactggtgactctggtccaagagaagaatgacctgcagctccaagtacaagctgaaagcgaaaatttgttggatgctgaggaaagatgcgatcagctgatcaaagccaaattccagctcgaggccaagatcaaggaggtgacagagagagctgaagatgaggaggagatcaatgctgagctgacggccaagaagaggaaactggaggatgaatgctcagagctcaagaaagacattgatgaccttgagttgaccctggccaaggttgagaaggagaagcatgccacggagaacaaggttaaaaaccttactgaggaactctccgggttagatgaaacaattgcaaagttaaccagagagaagaaggccctccaagaggcgcaccagcaggccttggatgacctccaagctgaagaagacaaagtcaattctttgaacaaaaccaagagcaaactggaacagcaagtggaagacctggaaagctccctagaacaagaaaagaagctccgcgtagacctggaaaggaacaaaaggaaattggaaggagacttgaagcttgctcaagagtccatattagatctggagaatgacaagcaacagctggacgaaaggctcaagaagaaagattttgaatattgtcaacttcaaagcaaagtggaagatgagcagacactgggcctccagtttcagaagaaaatcaaagagttgcaggctcgaattgaggagctggaagaggagatagaggcggagagggccacccgcgcgaagacagagaaacagcgcagcgactatgcccgggagctggaggagctgagcgagcggctggaggaggcgggaggcgtcacctccacgcagatagagctcaacaagaagcgggaggctgagttcctgaagctgcgcagggacctggaggaggccacactgcagcacgaagccatggtggccacgctgaggaagaagcatgcggatagtgtggccgagcttggggagcagattgacaacctgcagcgggtcaagcagaagctggagaaggagaagagcgagttcaagctggagatcgatgacctctccagcagcatggagagtgtgtcgaaatctaaggcaaatctggaaaaaatctgccgaaccctggaggatcagttaagtgaggccaggggcaagaatgaggaaattcagaggagcctgagcgagctgaccacacagaagtctcgtttgcagaccgaggctggtgagctgagtcgtcagctggaagaaaaagaaagcatagtatcccaactttccaggagcaagcaagcctttacccagcaaacagaagagctcaagaggcagctggaggaagagaacaaggccaagaacgccctggcgcacgccctgcagtcctcccgccacgactgtgacctgctgcgggaacagtatgaggaggagcaggaaggcaaagctgagctgcagagggcgctgtccaaggccaatagtgaggttgcccagtggagaaccaaatacgagacggacgccatccagcgcacagaagagctggaggaggcccaagaaaaacttgctcagcgccttcaagattccgaggaacaggttgaggcagtgaatgctaaatgtgcttcactggagaagaccaagcagaggctgcaaggagaggtggaggatctgatggttgatgttgaaagagccaattccttggccgccgctctggacaagaagcagaggaactttgacaaggtgttggcagagtggaagacaaagtgtgaggagagccaagcagagctggaggcatccctgaaggagtcccgctccttgagcactgagctcttcaaactgaaaaatgcctacgaggaagccttagatcaacttgaaactgtgaaacgggaaaataagaacttagagcaggagatagcagatctcacagaacaaattgctgaaaatggcaaaaccatccatgaactggagaaatcaagaaagcagattgagctggaaaaggctgatatccagctggctctcgaggaagcagaggctgctcttgagcatgaagaagccaagatcctccgaatccagcttgaattgacacaagtgaaatcagaaattgatagaaagattgccgagaaggatgaagagatcgagcagctgaagaggaactaccagagaacagtggaaaccatgcagagcgccctggacgccgaggtgcggagcaggaatgaagccatccggctcaagaagaagatggagggggacctgaatgaaatcgagatccagctgagccacgccaaccgccaggcggcggagaccctcaaacacctcaggagtgtccagggacagctgaaggatacgcagctccacctggatgatgccctccaaacccaggaggacctgaaggagcagctggcgattgtggagcgcagagccaacctgctgcaggccgaggtggaggagctgcgggctactctggagcagacggagagggcccggaaactggcggaacaggagctcctggactccaacgagagggtgcagctgctgcatacccagaacaccagcctcatccacaccaagaagaagctggagacagacctcatgcagctccagagtgaggtagaagatgccagcagggatgcaaggaacgctgaggagaaggccaagaaggccatcacggacgctgccatgatggcggaggagctgaagaaggagcaggacaccagcgcccaccttgagcggatgaagaagaacctggaacagacggtgaaggacctgcagcatcgtctagatgaggccgagcagctggcgctgaagggcgggaagaagcagatccagaaactggagaccaggatccgagagctggagtttgaacttgagggagagcagaagaagaacacagagtctgttaagggcctgaggaagtatgagcggagggtcaaggagctgacgtaccagagtgaagaggacaggaagaatgtgctgagattgcaggatctggtggataaactgcaagtgaaagtcaagtcctacaagaggcaggcggaggaggctgatgaacaagccaatgctcatctcaccaaattccggaaagctcagcatgagctggaggaggccgaggaacgtgcggatatcgcagaatctcaagtcaacaagctccgcgctaagactcgagacttcacctccagcaggatggtggtccacgagagtgaagagtgagccagcccttctggagcaggacagaagatatgcaaaatgtatattttcttgattcctgaccattgatacttaatgtccatgtgactctttttcacatgcaataaactttgctttgtttc

SEQ ID NO: 54 - protein, 1167 aa, Homo sapiens
LEEMRDDRLAKLITRTQAVCRGFLMRVEFQKMVQRRESIFCIQYNIRSFMNVKHWPWMKLFFKIKPLLKSAETEKEMATMKEEFQKTKDELAKSEAKRKELEEKLVTLVQEKNDLQLQVQAESENLLDAEERCDQLIKAKFQLEAKIKEVTERAEDEEEINAELTAKKRKLEDECSELKKDIDDLELTLAKVEKEKHATENKVKNLTEELSGLDETIAKLTREKKALQEAHQQALDDLQAEEDKVNSLNKTKSKLEQQVEDLESSLEQEKKLRVDLERNKRKLEGDLKLAQESILDLENDKQQLDERLKKKDFEYCQLQSKVEDEQTLGLQFQKKIKELQARIEELEEEIEAERATRAKTEKQRSDYARELEELSERLEEAGGVTSTQIELNKKREAEFLKLRRDLEEATLQHEAMVATLRKKHADSVAELGEQIDNLQRVKQKLEKEKSEFKLEIDDLSSSMESVSKSKANLEKICRTLEDQLSEARGKNEEIQRSLSELTTQKSRLQTEAGELSRQLEEKESIVSQLSRSKQAFTQQTEELKRQLEEENKAKNALAHALQSSRHDCDLLREQYEEEQEGKAELQRALSKANSEVAQWRTKYETDAIQRTEELEEAQEKLAQRLQDSEEQVEAVNAKCASLEKTKQRLQGEVEDLMVDVERANSLAAALDKKQRNFDKVLAEWKTKCEESQAELEASLKESRSLSTELFKLKNAYEEALDQLETVKRENKNLEQEIADLTEQIAENGKTIHELEKSRKQIELEKADIQLALEEAEAALEHEEAKILRIQLELTQVKSEIDRKIAEKDEEIEQLKRNYQRTVETMQSALDAEVRSRNEAIRLKKKMEGDLNEIEIQLSHANRQAAETLKHLRSVQGQLKDTQLHLDDALQTQEDLKEQLAIVERRANLLQAEVEELRATLEQTERARKLAEQELLDSNERVQLLHTQNTSLIHTKKKLETDLMQLQSEVEDASRDARNAEEKAKKAITDAAMMAEELKKEQDTSAHLERMKKNLEQTVKDLQHRLDEAEQLALKGGKKQIQKLETRIRELEFELEGEQKKNTESVKGLRKYERRVKELTYQSEEDRKNVLRLQDLVDKLQVKVKSYKRQAEEADEQANAHLTKFRKAQHELEEAEERADIAESQVNKLRAKTRDFTSSRMVVHESEE

SEQ ID NO: 55 - DNA, 1688 bp, Homo sapiens
tcctcgctggagaagaccaagcaccggctacagaatgagatcgaggacttgatggtggacgtagagcgctccaatgctgctgctgctgctctggacaagaagcagaggaacttcgacaagatcctggccgagtggaagcagaagtatgaggagtcgcagtcggagctggagtcctcgcagaaggaggctcgctccctcagcacagagctcttcaaactcaagaacgcctatgaggagtccctggaacatctggagaccttcaagcgggagaacaaaaacctgcaggaggagatctccgacttgactgagcagttgggttccagcggaaagactatccatgagctggagaaggtccgaaagcagctggaggccgagaagatggagctgcagtcagccctggaggaggccgaggcctccctggagcacgaggagggcaagatcctccgggcccagctggagttcaaccagatcaaggcagagatcgagcggaacgtggcagagaaggacgaggagatggaacaggccaagcgcaaccacctgcgggtggtggactcgctgcagacctccctggacgcagagacacgcagccgcaacgaggccctgagggtgaagaagaagatggaaggagacctcaatgagatggagatccagctcagccacgccaaccgcatggccgccgaggcccagaagcaagtcaagagcctccagagcttgttgaaggacacccagattcagctggacgatgcagtccgtgccaacgacgacctgaaggagaacatcgccatcgtggagcggcgcaacaacctgctgcaggctgagctggaggagttgcgcgccgtggtggagcagacagagcggtcccggaagctggcggagcaggagctgattgagactagtgagcgggtgcagctgctgcattcccagaacaccagcctcatcaaccagaagaagaagatggacgctgacctgtcccagctccagactgaagtggaggaggcagtgcaggagtgcaggaatgctgaggagaaggccaagaaggccatcacggatgccgccatgatggcagaggagctgaagaaggagcaggacaccagcgcccacctggagcgcatgaagaagaacatggaacagaccattaaggacctgcagcaccggctggacgaagccgagcagatcgccctcaagggcggcaagaagcagctgcagaagctggaagcgcgggtgcgggagctggagaatgagctggaggccgagcagaagcgcaacgcagagtcggtgaagggcatgaggaagagcgagcggcgcatcaaggagctcacctaccagacggaggaggacaggaaaaacctgctgcggctgcaggacctggtagacaagctgcagctaaaggtcaaggcctacaagcgccaggccgaggaggcggaggagcaagccaacaccaacctgtccaagttccgcaaggtgcagcacgagctggatgaggcagaggagcgggcggacatcgccgagtcccaggtcaacaagctgcgggccaagagccgtgacattggcacgaagggcttgaatgaggagtagctttgccacatcttgatctgctcagcgcctgaggtgccagcaaagccccatgctggagcctgtgtaacagctcgcttgggaggaagcagaataaagcaatttccttgaagccg

SEQ ID NO: 56 - protein, 524 aa, Homo sapiens
SSLEKTKHRLQNEIEDLMVDVERSNAAAAALDKKQRNFDKILAEWKQKYEESQSELESSQKEARSLSTELFKLKNAYEESLEHLETFKRENKNLQEEISDLTEQLGSSGKTIHELEKVRKQLEAEKMELQSALEEAEASLEHEEGKILRAQLEFNQIKAEIERNVAEKDEEMEQAKRNHLRVVDSLQTSLDAETRSRNEALRVKKKMEGDLNEMEIQLSHANRMAAEAQKQVKSLQSLLKDTQIQLDDAVRANDDLKENIAIVERRNNLLQAELEELRAVVEQTERSRKLAEQELIETSERVQLLHSQNTSLINQKKKMDADLSQLQTEVEEAVQECRNAEEKAKKAITDAAMMAEELKKEQDTSAHLERMKKNMEQTIKDLQHRLDEAEQIALKGGKKQLQKLEARVRELENELEAEQKRNAESVKGMRKSERRIKELTYQTEEDRKNLLRLQDLVDKLQLKVKAYKRQAEEAEEQANTNLSKFRKVQHELDEAEERADIAESQVNKLRAKSRDIGTKGLNEE

SEQ ID NO: 57 - DNA, 6010 bp, Homo sapiens
gtggaacacttctgaacctgcatttttatctggaactccagaagcagaatcctttgctaaataaatcgcagccatgagtgcgagctcagacgctgagatggctgtttttggcgaacgtgctccctaccttcgaaaatcagaaaaggagcggattgaggcccaaaacaagccgtttgatgctaaaacatctgtctttgtggcggagcccaaggaatcctatgtgaagagcactatacaaagcaaagaaggagggaaagtaaccgtaaagactgaaggtggagcaactctaactgtcagggaagaccaagtcttccctatgaaccctccgaaatatgacaaaattgaggacatggccatgatgactcatctacacgagcctggagtgctgtacaacctcaaagagcgctatgcagcctggatgatctacacctactcaggcctcttctgtgtcaccgtcaacccctacaagtggctgccggtgtacaagcccgaggtggtggctgcctacagaggcaaaaagcgccaggaggccccgccccacatcttctccatctctgacaatgcctatcagttcatgttgactgatcgagagaatcagtccatcctgatcaccggagaatctggtgccggaaagactgtgaacaccaagcgtgtcatccaatactttgcaacaattgcagttactggagagaagaagaaggatgaatctggcaaaatgcaggggactctggaagatcaaatcatcagcgccaatcccctactggaggcctttggcaatgccaaaaccgtgaggaatgacaactcctctcgctttggtaaattcattagaatccactttggtactacagggaagctggcatctgctgatatagaaacatatcttttagaaaagtccagagttactttccagctaaaggcggaaagaagctaccatattttttatcagatcacttccaataagaagccagatctaattgaaatgctcctgatcaccaccaacccatatgactatgccttcgtcagtcagggggagatcacagttcccagtattgatgaccaagaagagttgatggccactgatagtgccattgacatcctgggcttcactcctgaagagaaagtgtccatctataaactcacaggggctgtgatgcattatgggaacatgaaattcaagcaaaagcagcgtgaggagcaagctgagccagatggcacagaagtcgctgacaaggcagcctatctccagagtctgaactctgcagacctactcaaagccctctgctaccctagggtcaaggttggcaatgagtatgtcaccaaaggccagactgtgcagcaggtgtacaatgcggtgggtgctctggccaaagccgtctacgagaagatgttcctgtggatggtcacccgcatcaaccagcagctggacaccaagcagcccaggcagtacttcatcggggtcttggacattgctggctttgaaatctttgattttaacagcctggagcagctgtgcatcaacttcaccaacgagaaactgcaacagtttttcaaccaccacatgtttgtgctagagcaggaggagtacaagaaggaaggcatcgagtggacgttcattgactttgggatggacctggctgcctgcattgagctcattgagaagccactgggcatcttctccatcctggaagaggagtgcatgttccctaaggcaacggacacctccttcaagaacaagctgtatgaccagcacctgggcaagtctgccaacttccagaagcccaaggtggtcaaaggcaaggctgaggcccacttctctctgattcactatgctggcactgtggactacaacattactggctggctggacaaaaataaggaccccctgaatgatactgtggttgggctgtaccagaagtctgcaatgaagactctagccagtctcttttccacgtatgctagtgctgaagcagatagcagcgcgaagaaaggtgctaagaaaaagggctcttctttccagactgtgtctgcccttttcagggaaaatttaaataaattgatgacgaatctgaggagcacacaccctcacttcgtacggtgtatcattcccaatgaaaccaaaactcctggggcaatggaacatgaacttgtgttgcaccagctgaggtgtaatggtgtgctggaaggcatccgcatctgtaggaaaggattcccaagcagaatcttatatggtgatttcaaacaaagatacaaggttttaaatgcaagtgctattccagagggacagttcattgacagcaagaaggcttctgagaaacttcttgcatctattgatattgatcatactcaatataaatttggacataccaaggttttcttcaaagctggacttctgggtcttctggaagaaatgagagatgaaaaattagcccaaattataacaagaacacaagctgtctgtaggggattcctaatgagggtagaatatcagaagatgttgcaaaggagagaagcacttttctgcatccagtataatgtccgtgccttcatgaacgtcaagcactggccctggatgaaactctttttcaagattaagcccctcctcaagagtgcagagaccgagaaagagatggccaccatgaaggaagaattccagaaaaccaaagatgaactcgccaagtcagaggcaaaacggaaggagctagaggaaaaaatggtcactctcttaaaagagaaaaatgacctgcaactccaggttcaatctgaagcagatagcttggctgatgcagaggaaaggtgtgagcaactgattaaaaacaaaatccaacttgaggccaaaatcaaagaggtgactgaaagagctgaggaggaggaagagatcaatgctgagctgacagccaagaagagaaaactggaggatgaatgttcagaactcaagaaagacattgatgaccttgagctgacactggccaaggttgagaaggagaaacatgccacggagaacaaggtgaaaaatcttacagaagagatggcaggcctggatgaaaccattgcaaaactgtccaaggagaagaaggctctccaagagacccaccagcagaccctggatgacctgcaggcagaggaggacaaagtcaacatcctgaccaaagctaaaaccaagctagaacagcaagtggatgatcttgaagggtctctggaacaagaaaagaagcttcgaatggatctagaaagagcaaagcggaaactggagggtgacctcaaattggcccaagaatccacaatggatatggaaaatgacaaacagcaacttgatgaaaagcttgaaaagaaagaatttgaaatcagcaatttgataagcaaaattgaagatgagcaagctgtagaaattcaactacagaagaagatcaaagagttgcaggcccgcattgaggagctgggggaagaaatcgaggcagagagggcgtcccgagccaaagcggagaagcagcgctctgacctctcccgggaactggaggagatcagcgagaggctggaagaagccggtggggcaacttctgctcaggtggaattgaacaagaagcgggaggctgagtttcagaaactgcgcagggacctggaggaggccaccctgcagcatgaagctatggtggctgctcttcggaagaagcacgcagacagtatggctgagcttggggagcagattgacaacttgcagcgggtcaaacagaagctggagaaggagaagagtgagctgaagatggagactgatgacctcagcagtaacgcagaggccatttccaaagccaagggaaaccttgaaaagatgtgccgctctctagaagatcaagtgagtgagcttaagaccaaggaagaggagcagcagcggctgatcaatgacctcacagcacagagagcgcgcctgcagacagaagcgggtgaatattctcgacaattagatgagaaagatgctttagtctctcagctttcaaggagcaagcaagcatctactcagcagattgaagagctgaaacatcaactagaggaagaaactaaagccaagaacgccctggcacacgccctgcagtcctcccgccatgactgcgacctgctgcgggaacagtatgaggaagagcaggaaggcaaagctgagctgcagagggcgctgtccaaggccaacagtgaggttgcccagtggagaaccaaatacgagacggatgccatccagcgcacagaggagctggaggaggccaagaaaaagttggcccagcgcctgcaagaagctgaggaacatgtagaagctgtgaacgccaaatgtgcttcccttgagaagacgaagcagcggctccagaatgaagttgaagacctcatgcttgatgtggaaaggtctaatgcagcctgtgcagcccttgataagaagcaaaggaactttgacaaggtcctatcagaatggaagcagaagtatgaggaaactcaggctgaacttgaggcctcccagaaggagtcacgttctcttagcactgagctgttcaaggtgaagaatgtctatgaggaatccctggatcaactcgaaacgctaagaagagaaaataagaacttgcaacaggagatttctgacctcactgagcagattgcagagggaggaaagcaaattcatgaattggagaaaataaagaagcaagtagaacaagagaaatgtgaaattcaggctgctttagaggaagcagaggcatctcttgaacatgaagaaggaaagattctgcgtatccagcttgagttaaaccaagtcaagtctgaagttgatagaaaaatcgcagaaaaggatgaggaaattgaccagctgaagagaaaccacactagagtcgtggagacaatgcagagcacgctggatgcagagattagaagcagaaatgatgctctgagagtcaagaagaaaatggaaggagatctgaatgaaatggaaatccagctgaaccatgccaatcgcttagctgcagagagtttaaggaactacaggaacacccaaggaatcctgaaggaaacccagctccacctggatgatgctctccggggccaggaggacctcaaggaacagctggcaattgtggagcgcagagccaacctgctgcaggctgagatcgaggagctgtgggccactctggaacagacagagagaagcaggaaaatcgccgaacaggagctcctggatgccagtgagcgtgtccagctcctccacacccagaataccagtctcattaacaccaagaagaaattagaaaatgacgtttcccaactccaaagtgaagtggaagaagtaatccaagaatcacgcaatgcagaagagaaagccaagaaggccatcactgatgctgccatgatggctgaggagctgaagaaggaacaggacaccagcgcccacctggagcggatgaagaagaacctggagcagacggtgaaggacctgcagcatcgtctagatgaggccgagcagctggcgctgaagggtgggaagaagcagatccagaaactggaggccagggtacgtgagcttgaaggagaggttgaaaatgaacagaaacgtaatgcagaggctgttaaaggtttacggaaacatgagcgacgagtaaaagaactcacctaccagactgaagaagatcgcaagaatgttctcaggctgcaggacttggtagataaattacaggcgaaggtgaaatcatacaagagacaagctgaggaggctgaggaacaatccaatgctaatctatctaaattccgcaaactccagcatgagctggaggaggccgaggaacgggctcacattgctgagtcccaggtcaacaaattgcgagtgaagagccgagaggttcacacaaaaatcagtgcagagtaaacacacctgcctgatgctatcaagaggctgaagaaagcgccaaatgtgctattttttggtcacttgctttatgacgtttattttcctgttaaagctgaataaataaaaactacagtaaatgta

SEQ ID NO: 58 - protein, 1937 aa, Homo sapiens [sequence omitted]

SEQ ID NO: 59 - DNA, 2736 bp, Homo sapiens
aaattggctcaagaatccgcaatggatatagaaaatgacaaacaacaacttgatgaaaagcttaaaaagaaagagtttgaaatgagcggtctgcaaagcaagattgaagatgaacaagcccttggtatgcagctgcagaagaaaatcaaggagttacaagcccgcattgaggagctggaggaggaaatcgaggcagagcggacctcccgggccaaagcagagaagctgcgctctgatctctcccgggagctggaggagatcagtgagaggctggaagaagccgtgggggccacctcgacccagattgagatgaacaagaagcgggaagctgagttccagaaaatgcgcagggacctggaggaggccaccctacagcatgaggccacggcggccaccctgaggaagaagcatgcagatagtgtggccgagcttggggagcagattgacaacctgcagcgagtgaagcagaagctggagaaggagaagagtgagatgaagatggagatcgatgaccttgctagtaacatggagactgtctccaaagccaagggaaaccttgaaaagatgtgccgcgctctagaagatcaactgagtgaaattaagaccaaggaagaggagcagcagcggctgatcaatgacctcacagcacagagagcgcgcctgcaacagaatcaggtggaatattcacgccagctagatgaaaaggacacactagaaacacagctctcgaggggcaaacaagcctttactcaacagattgaggaactgaaaaggcaacttgaagaggagataaaggccaagagtgccctggcacatgccctgcagtcctcccgccatgactgtgacctgctgcgggaacagtatgaggaggagcaggaagccaaggccgagctacagagagcaatgtccaaggccaacagtgaggttgcccagtggaggaccaaatatgagacagatgccatccagcgcacagaggagctggaggaggccaagaagaagctggctcagcgtctgcaggatgctgaggaacatgtagaagctgtgaatgccaaatgtgcttcccttgagaagacgaagcagaggctccagaatgaagttgaggacctcatgattgatgttgagaggacaaatgctgcctgtgccgccctggacaaaaagcaaaccaactttgataagatcctggcagaatggaaacagaagtgtgaagaaactcatgctgttcttgaaagctttcaaaaggaatcccgctcactcagcacagaactatttaagattaagaatgcttatgaggaatctttagaccaacttgaaaccttgaaacgggaaaataagaatctgcagcaggagatttctgatctcactgaacagattgcagaaggaggaaagcgcatccatgaactggaaaaaataaagaagcaagttgagcaagaaaagtctgaacttcaggctgccttagaggaggcagaggcatctcttgaacatgaagagggaaagatcctgcgcatccagcttgaggttaaccaagtcaagtctgaggttgataggaaaattgctgaaaaagatgaggaaattgaccagatgaagagaaaccacattagaatcgaggagtccatgcagagcacactgaatgctgagatcaggagcaggaatgatgccattaggctcaagaagaagatggagggagacctcaatgaaatggaaatccagctgaaccatgccaaccgcatggctgctgaggacctgaggaactatcagaacacccaagccatcctcaaggatacccagctccacctagatgatgctctccggagccaagaggacctgaaggaacagctggctatggtggagcgcagagccaacctgctgcaggctgagatcgaggaactacgagccactctggaacagacggagaggagcaggaaaatcgcagaacaggagctcctggatgccagtgaacgtgttcagctcctgcacacccagaacaccagcctgatcaacaccaagaagaagctggagacagacatttcccaaatccagggagagatggaagacatcatcaaggaagcccgcaatgcagaagagaaggccaagaaggccatcactgatgctgccatgatggctgaggagctgaagaaggaacaggacaccagcgcccatctggagcggatgaagaagaacttggaacagacggtgaaggacctgcagcatcgtctggatgaggctgagcagctggccctgaagggtgggaagaagcagatccagaaactggaggccaaggttcgtgaacttgaaggtgaagttgaaagtgaacagaagcgcaatgttgaagctgtcaagggtctacacaaacatgagagaaaagtgaaggaactcacttaccaaactgaggaagaccgcaagaatattctcaggctgcaggacctggtggacaagctgcaagcaaaggtgaaatcctacaagagacaagctgaagaagcggaggaacaatccaacgtcaacctctccaaattccggaggatccagcacgagctggaggaggccgaggaaagggctgacattgctgagtcccaggtcaacaagctgagggtgaagagcagggaggttcacacaaaaatcataagtgaagagtaatttatctaactgctgaaaggtgaccaaagaaatgcacaaaatgtgaaaatctttgtcactccattttgtacttatgacttttggagataaaaaatttatctgcca

SEQ ID NO: 60 - protein, 876 aa, Homo sapiens
KLAQESAMDIENDKQQLDEKLKKKEFEMSGLQSKIEDEQALGMQLQKKIKELQARIEELEEEIEAERTSRAKAEKLRSDLSRELEEISERLEEAVGATSTQIEMNKKREAEFQKMRRDLEEATLQHEATAATLRKKHADSVAELGEQIDNLQRVKQKLEKEKSEMKMEIDDLASNMETVSKAKGNLEKMCRALEDQLSEIKTKEEEQQRLINDLTAQRARLQQNQVEYSRQLDEKDTLETQLSRGKQAFTQQIEELKRQLEEEIKAKSALAHALQSSRHDCDLLREQYEEEQEAKAELQRAMSKANSEVAQWRTKYETDAIQRTEELEEAKKKLAQRLQDAEEHVEAVNAKCASLEKTKQRLQNEVEDLMIDVERTNAACAALDKKQTNFDKILAEWKQKCEETHAVLESFQKESRSLSTELFKIKNAYEESLDQLETLKRENKNLQQEISDLTEQIAEGGKRIHELEKIKKQVEQEKSELQAALEEAEASLEHEEGKILRIQLEVNQVKSEVDRKIAEKDEEIDQMKRNHIRIEESMQSTLNAEIRSRNDAIRLKKKMEGDLNEMEIQLNHANRMAAEDLRNYQNTQAILKDTQLHLDDALRSQEDLKEQLAMVERRANLLQAEIEELRATLEQTERSRKIAEQELLDASERVQLLHTQNTSLINTKKKLETDISQIQGEMEDIIKEARNAEEKAKKAITDAAMMAEELKKEQDTSAHLERMKKNLEQTVKDLQHRLDEAEQLALKGGKKQIQKLEAKVRELEGEVESEQKRNVEAVKGLHKHERKVKELTYQTEEDRKNILRLQDLVDKLQAKVKSYKRQAEEAEEQSNVNLSKFRRIQHELEEAEERADIAESQVNKLRVKSREVHTKIISEE

SEQ ID NO: 61 - DNA, 827 bp, Homo sapiens
ggagctcctggatgccagtgagcgtgttcagctactgcacacccagaacaccagcctgatcaacaccaagaagaagctggagacagatatttcccaaatgcaaggagagatggaggacattctccaggaagcccgcaatgcagaagaaaaggccaagaaggccatcactgatgccgccatgatggctgaggagctgaagaaggagcaggacaccagcgcccacctggagcggatgaagaagaacatggagcagaccgtgaaggatctgcagctccgtctggatgaggctgagcagctggccctgaagggtgggaagaagcagatccagaaactggaggccagggtacgggagctggaaggagaggttgagagtgagcaaaagcgtaatgctgaggctgtcaagggtctgcgcaaacatgagaggcgagtgaaggaactcacttaccagacggaagaagatagaaagaatattctcaggcttcaagatttggtagataaacttcaggcaaaagtgaaatcttataagagacaagctgaggaggctgaggaacaatccaacaccaatctagctaaattccgcaagctccagcatgagctggaggaggccgaggaacgggctgacattgctgagtcccaggtgaacaaactgcgggtgaagagccgggaggttcacacaaaagtcataagtgaagagtgatcatgtcctgatgccatggaatgactgaagacaggcacaaaatgtgacatctttggtcatttccctctgtaattattgtgtattctaccctgttgcaaaggaaataaagcatagggtagtttgcaaacaa

SEQ ID NO: 62 - protein, 231 aa, Homo sapiens
ELLDASERVQLLHTQNTSLINTKKKLETDISQMQGEMEDILQEARNAEEKAKKAITDAAMMAEELKKEQDTSAHLERMKKNMEQTVKDLQLRLDEAEQLALKGGKKQIQKLEARVRELEGEVESEQKRNAEAVKGLRKHERRVKELTYQTEEDRKNILRLQDLVDKLQAKVKSYKRQAEEAEEQSNTNLAKFRKLQHELEEAEERADIAESQVNKLRVKSREVHTKVISEE

SEQ ID NO: 63 - DNA, 397 bp, Homo sapiens
  misc_feature (344)..(344): n is a, c, g, or t
ttttttttttgtgatcgctcagcagaatagatttattatttgtattgcttgcagaataaagcctatccttgaaagctctgaatcatgggcaagaggctcagtggtatctggaggacagggcactggccactgcagtcaccatcttctgccaggaagcctgcacctcaggggtgaattctttgccgaaatggattgccaaaacggtcaccagcacatttcccaggagcttgaagttctcaggatccacatgcagcttgtcacagtgcagttcactcagctgggaaaggtgccttggagatatccaggtgctttatggtatcttcaagggaagtcagaccttttgncatgtgcctgattttgggggtgcccatgatggcgaggcgagacaaggtgccaa

SEQ ID NO: 64 - DNA, 281 bp, Homo sapiens
  misc_feature (10)..(10): n is a, c, g, or t
  misc_feature (126)..(126): n is a, c, g, or t
  misc_feature (146)..(146): n is a, c, g, or t
  misc_feature (161)..(161): n is a, c, g, or t
  misc_feature (178)..(178): n is a, c, g, or t
  misc_feature (187)..(187): n is a, c, g, or t
  misc_feature (201)..(201): n is a, c, g, or t
  misc_feature (218)..(218): n is a, c, g, or t
  misc_feature (254)..(254): n is a, c, g, or t
gggggagtanggattttattcaggggtggggacaggcgggcggctcagtagcaggtgccgtccacctccgccatgacaacagacacattgacatgggtgggtttacccgccaagcgtcgaatggtnttctgtgtgaaggccagcgnagggcctcgtggcanccatgcaggagaaggtntcccccttnttccagtcctcggntgccacgcgcagtatgntggtcacaggaaggtgggtgggtgccctggctgggnttcctgccgggatgcccaagttcaggt

SEQ ID NO: 65 - DNA, 475 bp, Homo sapiens
aaagattcactttatttattcattcccccccaacattagcaaaattaaagccaagggggaggaggggggttaggtgaaaaatgacctggaggaccccaataggggtaggccccctttggaaaaagggtcagaggccaaaggatgggagggggtcaggttggaactgaggaccaggtgggggcacttccccccctaaaactcccccctgttgaagccctttgtaacgggcaagcccaggccccgatgggtgacttcccaggcgtaaactttggttttcccgaaatctgctttgcccaacgtcagggtccttctaaggctgtaggtgctttccttgcagtccggccctttaacactcccctgggaattaccccattggagggggttaacccacttcccatgaaactttggcctccctgggataaaatttttttcgcggtgcaaaaaaagaggaatttccaaattaaaatgctcatca

SEQ ID NO: 66 - DNA, 509 bp, Homo sapiens
ttgtagtcagctatttaattaggttcttaagacatttagaacaccaatttgtgaggataaattccattcgtcagagcaaacacagatcgcaggtagccctggagctgaggaatagctttgatttttggtaaaatttgtgagtccacagctttctgatcaatcttgcgctgcttcgtaatctcatatttctctttttctgtgtcgaagatctcaccttcctggtgtctgggcttccgcagcttcttcttcttgaagtaagcatcagtaagatgttttgggatttttacattgctgatatcgattttggttgaagtggcaatgacaaatttctggtgtgttcttcttagaggaactctatggaggaccataggtgcaatctcaagtgataagctactagcctactgctgcaggaaaaccaccctcttacacctgtggcgtccagtgatgacgattagtaagatcccggggctatgtctgagccgctgtgtctcgctgctgattgacgggtt

SEQ ID NO: 67 - DNA, 487 bp, Homo sapiens
ttttttttttcaaacgaggacaattgttatttagtttttatttcataatcataaacttaactctgcaatccacctaggcatgggagggaacaaggaaaacatggaacccaaagggaactgcagcgagagcacaaaaattctaggatactgcgaccaaatggggtggaggggtgctctcctgacctacaaaaggaatgatctggtggttaaaataaaacacaagtcaaacttattcgagttgtccacagtcagcaatggtgatcttcttgctggtcttgccattcctggacccaaagcgctccatggcctccacaatattcatgccttctttcactttgccaaacaccacatgcttgccatccaaccactcagtcttggcagggcagatgaaaaactgggaaccattggtgttgggtccagccattgccctggacaagattccaagaccgtatgctttaggataaattctacatttcaaattctcccc

SEQ ID NO: 68 - DNA, 452 bp, Homo sapiens
ttttttttttttttttttttttttttttcacaggtgcaaagattcactttatttattcattctcctccaacattagcataattaaagccaaggaggaggaggggggtgaggtgaaagatgacctggaggaccgcaataggggtaggtcccctgtggaaaaagggtcagaggccaaaggatgggagggggtcaggctggaactgaggaccaggtgggggcacttctccctctaacactctcccctgttgaagctctttgtgacgggcgagctcaggccctgatgggtgacttcgcacgcgtagactttgtgtttttcgtagtctgctttgctcaccgtcagggtgctgctgaggctttagggtgctgtctttgctgtcccgttttgtgacactcttctgggaattacccgtattggaaggcgttatccaccttcccctgtactttggccctct

SEQ ID NO: 69 - DNA, 387 bp, Homo sapiens
ctacaaacaggggtcccatcaaggttcagtggaagtggatctgggacagatttcactttcaccattagcggcctgcagcctgaagattttgcaacatactactgtcaacaatatgataatctccctgaggtcactttcggcggagggaccaaggtggagatcaagcgaactgtggctgcaccatctgtcttcatcttcccgccatctgatgagcagttgaaatctggaactgcctctgttgtgtgcctgctgaataacttctatcccagagaggccaaagtacagtggaaggtggataacgccctccaatcgggtaactcccagggagagtgttcacagagcaggacagcaaggacagcacctacagccttcagcagcaccctgtac

SEQ ID NO: 70 - DNA, 801 bp, Homo sapiens
  misc_feature (254)..(256): n is a, c, g, or t
  misc_feature (259)..(260): n is a, c, g, or t
  misc_feature (266)..(266): n is a, c, g, or t
  misc_feature (271)..(271): n is a, c, g, or t
  misc_feature (274)..(274): n is a, c, g, or t
  misc_feature (276)..(276): n is a, c, g, or t
  misc_feature (280)..(280): n is a, c, g, or t
  misc_feature (283)..(284): n is a, c, g, or t
  misc_feature (287)..(287): n is a, c, g, or t
  misc_feature (378)..(378): n is a, c, g, or t
  misc_feature (786)..(786): n is a, c, g, or t
ttttaaaaagttatttatttattcttttttttttttttttttttttggtaaggttgaatgcacttttggtttttggtcatgttcggttggtcaaagataaaaactaagtttgagagatgaatgcaaaggaaaaaaatattttccaaagtccatgtgaaattgtctcccattttttggcttttgagggggttcagtttgggttgcttgtctgtttccgggttggggggaaagttggttgggtgggagggagccannntgnnatgganggagnttncngggngcnnacngggcccacgtcgaagccgaattcctggtctggggcaccaacgtccaagggggccacatcgatgatgggcaggcgggaggtcttggtggttntgtattcaatcactgtcttgccccaggctcccgtgtgacttgtgcagccatcgacagggacgctgtaggtgaagccggtggtgccctcggcgccgatctcgatcttcgttgagccctggagggagagggcctcctttgaggtgcagtctgctggtccatgtaggcccacgctgtcttgcagggggtaggtgatgtctggaggggcttggtggaatcaggcgccagaggtcagttgatgggcacatggcagggtcgagccctggccgcatactcgactggaatcatcgtcatgctctcgccaccagactggctttggcctttggtttctgctgatgaccagttttcgggccacctggctgagtggtacccccggttaacagcttcatgtgcaaaaactttaggcatcantcccccttgttggcc

SEQ ID NO: 71 - DNA, 324 bp, Homo sapiens
tttccctttttcttttctttttattttttgtctttggagccaggtggacagatgatttttaactctgggcttcagaaaaatttaataacgtagtgcatttgtggcacacagggggagtacagatgcatgggaggccgtagggttaggtaaaggggagcactaaagttgaagatgaggcactgccatcaatgctgggacttcaggccaagggcaggagctgaggaagccacaaggatggacattttctgcagagttgctgaaccggtagcaaccagggcctgagaaagtcctctcttgtggaagaataagagccaagcaggaaag

SEQ ID NO: 72 - DNA, 568 bp, Homo sapiens
tttttttttgttttttgcaggggcccagggcagcgctgggtgctttatttccatgctgggcgcccgggaagtatgtacacggggtacgtgccaagcatcctcgcgcgaccccgagagcctggggagcgggggcttgcggccgtcgcactcatttacccggagacagggagaggctcttctgcgtgtagtggttgtgcagagcctcatgcatcacggagcatgagaagacgttcccctgctgccacctgctcttgtccacggtgagcttgctgtagaggaagaaggagccgtcggagtccagcacgggaggcgtggtcttgtaattgttctccggctgcccattgctctcccagtccacggcgatgtcgctgggatagaagcctttgaccaggcaggtcaggctgacctggttcttggtcagctcatcccgggatgggggcagggtatacacctgtggttctcgggggtggcctttggctttgggagattggtttccccatagggggctgggagggcttttttgggaagctttcacttgtactccttggccattaggcagttcctggtg

SEQ ID NO: 73 - DNA, 124 bp, Homo sapiens
attttcgtggacgccgggtgagtgagagagttggttggtgttgggccggaggaaagcgggaagactcatcggagcgtgtggatttgagccgccgcattttttaaccctagatctcgaaatgcat

SEQ ID NO: 74 - protein, 2 aa, Homo sapiens
MH

SEQ ID NO: 75 - DNA, 120 bp, Homo sapiens
cctttctccgtttgtggggaatacttccctcgggtgaaactgaagttaattttttttttttccaaacacaagcagagtctccttggaggtgacatggatatgggcaacccaggaaccctt

SEQ ID NO: 76 - protein, 40 aa, Homo sapiens
PFSVCGEYFPRVKLKLIFFFSKHKQSLLGGDMDMGNPGTL

SEQ ID NO: 77 - DNA, 141 bp, Homo sapiens
aagatcgcggactttggttttaacaggatttctctggctcctgtgttgattgagggggcggggggcagtatacagcagggagaactttgggaaactcttgaaattattgaagtaagagacatggacgtctgggcgttcgga

SEQ ID NO: 78 - protein, 47 aa, Homo sapiens
KIADFGFNRISLAPVLIEGAGGSIQQGELWETLEIIEVRDMDVWAFG

SEQ ID NO: 79 - DNA, 712 bp, Homo sapiens
ggcccacatgctccaagaggatatctcaagctcctataccaccaccaccaccattacagcgcctcctccaggggtcctgcagaatggaggagataagttggagacgatgcccctctacttggaagacgacattcgccctgatataaaagatgatatatacgaccccacctacaaggataaggaaggcccaagccccaaggttgaatatgtctggagaaacatcatccttatgtctctgctacacttgggagccctgtatgggatcactttgattcctacctgcaagttctacacctggctttggggggtattctactattttgtcagtgccctgggcataacagcaggagctcatcgtctgtggagccaccgctcttacaaagctcggctgcccctacggctctttctgatcattgccaacacaatggcattccagaatgatgtctatgaatgggctcgtgaccaccgtgcccaccacaagttttcagaaacacatgctgatcctcataattcccgacgtggctttttcttctctcacgtgggttggctgcttgtgcgcaaacacccagctgtcaaagagaaggggagtacgctagacttgtctgacctagaagctgagaaactggtgatgttccagaggaggtactacaaacccggcttgctgatgatgtgcttcatcctgcccacgcttgtgccctggtactgctggggc

SEQ ID NO: 80 - protein, 237 aa, Homo sapiens
AHMLQEDISSSYTTTTTITAPPPGVLQNGGDKLETMPLYLEDDIRPDIKDDIYDPTYKDKEGPSPKVEYVWRNIILMSLLHLGALYGITLIPTCKFYTWLWGVFYYFVSALGITAGAHRLWSHRSYKARLPLRLFLIIANTMAFQNDVYEWARDHRAHHKFSETHADPHNSRRGFFFSHVGWLLVRKHPAVKEKGSTLDLSDLEAEKLVMFQRRYYKPGLLMMCFILPTLVPWYCWG

SEQ ID NO: 81 - DNA, 424 bp, Homo sapiens
ggatcgatcccgctagagggaaaccgttgtggtctccctatagtgagtcgtattaatttcgcgggatcgatcctctacgccggacgcatcgtggcccgatcacccggccacaggtgcggttgctgcgccgtatatcgccgacatcaccgatggggaagatcgggctcgcacttcgggctcatgagcgcttgtttcggcgtgggtatggtggcaggccccgtggcggggactgttgggcgccatctccttgcatgcaccattccttgcggcggcggtgctcaacggcctcaacctactactgggctgcttcctaatgcaggagtcgcataagggagagcgtcgaatggtgcactctcagtacaatctgctctgatgccgcatagttaagccagccccgacacccgccaacacccgctgacgccct

SEQ ID NO: 82 - protein, 109 aa, Homo sapiens [sequence omitted]

SEQ ID NO: 83 - DNA, 1413 bp, Homo sapiens; identical to SEQ ID NO: 41

SEQ ID NO: 84 - protein, 349 aa, Homo sapiens; identical to SEQ ID NO: 42

SEQ ID NO: 85 - DNA, 1363 bp, Homo sapiens
gaattcagtaagctaaaatccaaagtaagcctctgatgataattggctcttattttatccatacggtcccaaagaacatctgctgtctttggcgcagggccatatatttgtggtttcaggtgcccctaaagtgtctataggagcctataaacaaagcctataaactgtgttgtaggaaagacagcacatattgttacaggctcatacaaagaaaatatatgtagtgtttcagtctagttcttaccttcctaagtagagtccttacacatgtgtaagggagataggtattgagaaagggagagtgggaatgtgaagtgatgcataacatgcaacttagtaggaattttgacctgtgttgggcacagcttgacaagcttgtgtgtgtgtatcaccacataccctcacttcccccttccctacctctttctccttactgacttcaagggagagcatataaatgacatcaaggggtatgaaaagccacttaactgcagacttgtaggcagcaactcaccctcaagaggaagtcttcaggctctagaaacatctttaacttcggcttctgcaccataagcctcagactcaatgccaccctgcagctgtgccagatcactttgtgccctgcaggtgctgctgttgactgttctgggttcctccaccaatggacaaactaagagaaacatagggaaaaggaaatgtagagatctgttccttgcacctgttgctgcttctgctatacctgtatctgggagaaagactggcttggtgctcctggggctggagagtgccattataacaacaaatccaagtggaggggtcacagagagggggcacttcacatttgctgggcattctgctgggcactttactaaagctttacagatcatattcacaatggctttatgagagaggtacaattaccttcaatttacaattgagagaactgagaaaaatattcacgaccactaatagatcactttttaccccagctgtaagtgtagacagtgacttgtacactgaactgcgctgcgtgtatgtgaagtcaacctttgtacttcatcccagaaacatccacaatttggagttggtctcagcaggaccccattgcagcaaagacgaagtaatgtaagccactgcttctgtcgtatcgcctcatcagggaagccctctacctccatccccatctgcattcatttcctccagtctcacagatcctttctgatattcaggccaggacacccacagataattctattctctcttgcagagccactctgtaagatgggagaaaaaatctgcctggacccagatgctcccagaatcaataaaattgtacagaaaatgttgaaagttgatgaattcc

SEQ ID NO: 86 - protein, 106 aa, Homo sapiens
MPPCSCARSLCALQVLLLTVLGSSTNGQTKRNIGKRKCRDLFLAPVAASAIPVSGRKTGLVLLGLESAIITTNPSGGVTERGHFTFAGHSAGHFTKALQIIFTMAL

SEQ ID NO: 87 - DNA, 1741 bp, Homo sapiens
gaattcaatagaatggaatggtatcagctcgagtggaatggaatggaatggaatggaatggcatggaatcgtataaagtggaatggaatcaactcgagtggaatggaatggaatggaatggaatggaatgcagtacaatgcaatagaatggaatggaatgaactcgagttgactggaatggaatggaatggaatgcatttgaattgaatggacctgaagagaatggaatggaatggaatggaatgaagtggcctcgaatgcaatagattagattgcaacggaatcatcttgagtggaatggagtgaaatggaacggaatggaatggaatggaatggaatagaatggaatggaatggaatggaatagaatggaatggaatggaatggaatgaaatgcaatagaatggaatggtatcaactccagtggaatggaatggaatgcaatggaatggaatggaatggaatggaatggaatcaattcacctggaacggaatggaatgcaatggaatggaatggaatggaatgcagtggaatggaatggaatagaatggaatggaatggaatggaatggaatccacttgagtggaatggaatggaatggaatggattcgaacggaatggaatggaatgcaatggaatggaatgcatgtgattgaatggacacgaaaagaattgaatggaaatgaatggaatcgaatgaagtggcctcgaatgcaatataatggaatggaatcaagtcgagtggaatggaatggaatgggttggaatggaatggaatggaatggaatgcattagaatggaatggaatcaactcgagtggaatggaatggaatggaatggaatggaatggaatgcaatggaatggaatggaatggaatggaatggaatggaatggaatgcaatggaatggaatggaatgcaatagaatggaatggaatcacctcgactggaatggaatggaatggaatgcatttgaattgaatggacccgaagagaatggaatggaatggaatggaaggagtggcctcaaatgcaatagaatgcaatggaatcatctcgagtggaatggagtgaaatggaatggaatggaatggaatggaatgctatagaatgaaatggaatgaagtcaagtggaatggaatggaatggaatgggttggaagggaatgaaatggaatgcaatagaatggaaaggaatggaatggaatgaactggccaatgcaatagaattgaatggaatcaactggagtggaatggaatggaatggaatggattggaatggaatgcaatagaatggaatggaatcaactcgagtaaaatggaatggaatggaatggaatggaatggaatggaatggaattgaatggaatggaatggaatgcatttgaattgaatggacacgaaaagaatggattggaatggaatggaatgaagtagcctcgagtgcaatgatatggaatggcatcaactcgagtggaatggagtgaaaaaggtgaaaaaggaaataccttcacacaaaaactagacagaagcattctcagaatcttccttttgatgtgtgcattcaactcacagagttgaacctttcttttgatagagcagttttgaaacactctctttgtaggatctgcaactggacatttggagctctttgatacctacagtgaaaaaggaaatatcttcacataaaaacttcacagaagcattctcaaaaacatttttcagatgtgtgcattgaattc

SEQ ID NO: 88 - protein, 54 aa, Homo sapiens
MEWNGMAWNRIKWNGINSSGMEWNGMEWNAVQCNRMEWNELELTGMEWNGMHLN

SEQ ID NO: 89 - DNA, 3489 bp, Homo sapiens
  misc_feature (2599)..(2599): n is a, c, g, or t
  misc_feature (2815)..(2815): n is a, c, g, or t
ctgcagggccccaacaaccctcaccaaaggccaaggtggtgaccgacggacccacagcggggtggctgggggagtcgaaactcgccagtctccactccactcccaaccgtggtgccccacgcgggcctgggagagtctgtgaggccgcccaccgcttgtcagtagagtgcgcccgcgagccgtaagcacagcccggcaacatgcggtcttcagacaggaaagtggccgcgaatgggaccggggtgcccagcggctgtggggactctgtcctgcggaaaccgcggtgacgagcacaagctcggtcaactggatgggaatcggcctggggggctggcaccgcgcccaccagggggtttgcggcacttccctctgcccctcagcaccccacccctactctccaggaacgtgaggtctgagccgtgatggtggcaggaaggggccctctgtgccatccgagtccccagggacccgcagctggcccccagccatgtgcaaagtatgtgcagggcgctggcaggcagggagcagcaggcatggtgtcccctgaggggagacagtggtctgggagggagaggtcctggaccctgagggaggtgatggggcaatgctcagccctgtctccggatgccaaaggaggggtgcggggaggccgtctttggagaattccaggatgggtgctgggtgagagagacgtgtgctggaactgtccagggcggaggtgggccctgcgggggccctcgggagggccctgctctgattggccggcagggcaggggcgggaattctggcgggccaccccagttagaaaaagcccgggctaggaccgaggagcagggtgagggagggggtgggatgggtggggggtaacgggggaaactggggaagtggggaaccgaggggcaaccaggggaagatggggtgctggaggagagcttgtgggagccaaggagcaccttggacatctggagtctggcaggagtgatgacgggtggaggggctagctcgaggcagggctggtggggcctgaggccagtgaggagtgtggagtaggtgcccaggcatcgtgcagacagggcgacatcagctggggacgatgggcctgagctagggctggaaagaagggggagccaggcattcatcccggtcacttttggttacaggacgtggcagctggttggacgaggggagctggtgggcagggtttgatcccagggcctgggcaacggaggtgtagctggcagcagcgggcaggtgaggaccccatctgccgggcaggtgagtcccttccctccccaggcctcgcttccccagccttctgaaagaaggaggtttaggggatcgagggctggcggggagaagcagacaccctcccagcagaggggcaggatgggggcaggagagttagcaaaggtgacatcttctcggggggagccgagactgcgcaaggctggggggttatgggcccgttccaggcagaaagagcaagagggcagggagggagcacaggggtggccagcgtagggtccagcacgtggggtggtaccccaggcctgggtcagacagggacatggcaggggacacaggacagaggggtccccagctgccacctcacccaccgcaattcatttagtagcaggcacaggggcagctccggcacggctttctcaggcctatgccggagcctcgagggctggagagcgggaagacaggcagtgctcggggagttgcagcaggacgtcaccaggagggcgaagcggccacgggaggggggccccgggacattgcgcagcaaggaggctgcaggggctcggcctgcgggcgccggtcccacgaggcactgcggcccagggtctggtgcggagagggcccacagtggacttggtgacgctgtatgccctcaccgctcagcccctggggctggcttggcagacagtacagcatccaggggagtcaagggcatggggcgagaccagactaggcgaggcgggcggggcggagtgaatgagctctcaggagggaggatggtgcaggcaggggtgaggagcgcagcgggcggcgagcgggaggcactggcctccagagcccgtggccaaggcgggcctcgcgggcggcgacggagccgggatcggtgcctcagcgttcgggctggagacgagggtgagtttttccccctctgccaccctcagcccccacccgcccctccccacacaaccaacacgttctccccacacgactctctcgttctccccacagccaggtctccagctggggtggacgtgcccaccagctgccgaaggccaagacgccaggtccggtggacgtgacaagcaggacatgacatggtccggtgtgacggcgaggacagaggaggcgcgtccggccttcctggtgagcgtgtctgccctccctgcgtcaggacggccctgcccagaccgccccgcgccaccatctcactgccccgacctctgtcttctacagaacaccttaggctggtggggctgcggcaagaagcgggtctgtttctttacttcctccacggagtcggcacactatggctgccctctgggctcccagaacccacaacatgaaaggtgagggncttcctgccacacttggggtggggggcacgcgagaggagctgagtgggacctcaactccttccccatccacagaaatggtgctacccagctcaagcctgggcctttgaatccggacacaaaaccctctagcttggaaatgaatatgctgcactttacaaccactgcactacctgactcaggaatcggctctggaaggtgagcaccagcgctccttnggaagcctccaggcccccgagcaccctgcccccatcccacccacgtgtcgctatctctaggtgaagctagaggaaccagacctcatcagcccaacatcaaagacaccatcggaacagcagcgcccgcagcacccaccccgcaccggcgactccatcttcatggccaccccctgcggtggacggttgaccaccagccaccacatcatcccagagctgagctcctccagcgggatgacgccgtccccaccacctccctcttcttctttttcatccttctgtctctttgtttctgagctttcctgtctttccttttttctgagagattcaaagcctccacgactctgtttcccccgtcccttctgaatttaatttgcactaagtcatttgcactggttggagttgtggagacggccttgagtctcagtacgagtgtgcgtgagtgtgagccaccttggcaagtgcctgtgcagggcccggccgccctccatctgggccgggtgactgggcgccggctgtgtgcccgaggcctcaccctgccctcgcctagtctggaagctccgaccgacatcacggagcagccttcaagcattccattacgccccatctcgctctgtgcccctccccaccagggcttcagcaggagccctggactcatcatcaataaacactgttac

SEQ ID NO: 90 - DNA, 1060 bp, Homo sapiens; identical to SEQ ID NO: 45

SEQ ID NO: 91 - protein, 243 aa, Homo sapiens; identical to SEQ ID NO: 46

SEQ ID NO: 92 - DNA, 6723 bp, Homo sapiens
cattcccaacttcggcctgtgctccagaggaagccttcaacgcagagctggatgggggaggggtggagggcagtcgctgtgaacgtccaggtgggagtctggggaccaggtactgcagggaagggctaaaagataggtcggggtaacccttcagatctggctcagctagcctgtctccaagatttaggactctgaatctctgtgggctcctccctgtccccactcccaaacgcctgacgcggtgccccctcgccctccgctgctccttctaccgctttccctcctccctcccatgtcttttccgtccttggtctagggctctcggcctgcgcctctgcaaacaccccctcccctccaactccggcagaactccgaggggaggggccggcacgcccttcccgcctgtggtcagagggggcagccgcagccccgggtttggggggcaggggccatctctgcgccccgcccgatcaggccactcggcgcactaggggtggagggcgggaagcgtgactcccagagaggggggtccggcttgggcaggtgcgggcactggcagggcccaggcgggctccgggggcgggcggttcaggttacagcccagctgggggcagggggcggcccgcggtttgggcgagttcgccagcctcgaaaggggccgggcgcatataacgggcgccgcggcggggagaagacgcagagcgctgctgggctgccgggtctcccgcttcctcctcctgctccaagggcctcctgcatgagggcgcggtagagacccggacccgcgccgtgctcctgccgtttcgctgcgctccgcccgggcccggctcagccaggccccgcggtgagccatgattcgcctcggggctccccagtcgctggtgctgctgacgctgctcgtcgccgctgtccttcggtgtcagggccaggatgtccgtaagtcttcccccgccgctgcctgcctgcctgctttccatgcgtccctcagcatccttctccccggcccgctccagctctggagcccgcggctccgggctaaaacggctcccggggtcgtagcgcgccgacttaggcacaggacacgcagaagttcaccaagaagagttctgccaatcaagactctgtcccagggtcctcggtgccctacgcagttgcaagtatttgcaggtccctacgttgcgctagaatactgaacttgcaaagtgttggctcggagaagtttgcgcacagatataaatgggctcttttccaccagctttgataattaggcgcacatgcacacagctcgcctcttcgaagcacttcgagttcagcaaaaacagatctcaactcatcgaacttaggtgaagtaggaaagagagagcgcgagcgagggagcaagcaaacgccaaagggttgacttcacagcctgtccaaggcttggtggctggtgggctcaaagcagagttagacaaaggggactaacactctgacactggtgggctgaaatcccaggccacaaagaacggcttccgataggccctctgagacctcagcgcctctttaggtaccctccccctcccagctggccctggagcaaggtgcagccctagcgctcatctcgacttccctccgtccgcctgcgcctctcttctgataaagggtacagaaacttccagtaggagaggccatctgaaagacgataacattccaaccagaccgtgcttttcaaatgcccccgaaaatagcgcccccttccccgcggtcttaccccattccccgccgccccgaggtactacaatgagttacttttctaaattctggaactcaccgagccaggctgcgtggtgtgtgtgtgtgtgcgtgtgtgtgtgtgtatgtgtgtgtagggaaggggagcaggctggtcgattggctacggttgctacaactatttcaaccggtatagttagagatggctcttgtagtcggtcaatgctgttcggactgcacctttctaccctcttgaaggtcactgtctgggattatattcaggacaaacgaagcctggaaagtgtattaggtagagaggattttttttccacgtgtttgggcacgtttccgacggctgggattccagcctgtctttgtatgttacagattgtaaatcaatcgcagagggaaactcttcggcgggggaaataaaagttctctgccttcgaggctctgtgggccctctcctgccaccaggctgtttccagggatagcgtggaaggcggcgggctcaggcgggctttccggtcattagcgcgacggggcagggctggagctgcgcgcagctgcgaggagccgggagcaggagactctggccggtcacccggtagtgcgctaagctggaggccgctcctgggcatttgaggaatacagcgtgactatacgtggcctggactcagactgactatatttttgtactaaatttacaagcacacgcccacaaagctgtcttcttgactgacccctgccttagtgagcaatggaattagctgggtggctttaaaataattctcaaattctccatccggtattagggtcgcttgcttaattaggcggtagaggtctctcatcgccgcatctttcctgggagggagtgattccacagcttctccggcccaaaccttccagtcgctcctcctcccaagagggagtgtgattctgcatccgagaggctgattttgcgccctggagcatcccaccttttataacttcccccgcctgggtcagcggacccaaaggtgtgacgtggggaaatgcgcagtctgcgtggacgtcaggaatgtcagacacctagagctcggccacacccctcctctccatctttccacgagtttgagaaacttactggcggcggggtctttgaccctcatctgcattcagagccctcgcctccgaaagtgccctggctcagggagagatctcaatcctcctttgtgaggcttgtttgcattgggagattggcagcgatggcttccagatggggctgaaacgctgcccgtatttatttaaactggttcctcgcagagacctgtgaatcgggctctgtgtgcgctcgagaaaagccccattcatgagagacgaggtccagtgggttctctcgtactcccagaccccctctcccacaatgcccccctgtgcccagcgccgccgcctctctcgctccagccctggccagagcggcggtgaagcaaaacagttccccgaaagaggtagctttttaattggcttgccacaaagaatcacttatacggcctgcggtaatgaggggaaccggatcaggcgggccgggatgctatcggcagccgttttggagcagcaattatggtggtgctgggctcctccgtccacacctaggggatcctaggccggttacgccctggctcctttctggggcagtcatttaatcccacttttcactctcccggtgtctgtgagcgagccgtgtccagagccgcagccaacagagtcactcagcggctcttacacccagcgcccagtggccccgccctgcgccggccgttcccgggccgcccttccccgggaaatctgatccgcacggggagtggcccctctcctagcatttccccctctcctccctgggtcctcatgggcgagggtgggctctcctgtagtctgggctggagcgcattaaccgatgccccctctcccacaccttcctcaccgcctgcattccactgctccagctattttaacaggcgggtgtgtccccgcaacttctgtattttccctggaatccctcaccctcctgtgattatcttgcccaaaggctaggcggatttcttctagtgggaaagtaaaaaggaacgtttatcttttggattttcactctctttaaagagcagtgggcaggctcgtttctttctccgcctctgggtttgtggctctttcctattattcatcccctgctgctgctattgccttggggattttgatgagaaaaaccaggctgggcgctccctacgacgtggtggcctctaacgccttggctgctaaggagcgctcttgtcagcacaggtttcatttgcagcatgaattccagacggcagggcgctggtggaggagactagtccctgctattcttcctctgcagtcttggaggaggccaggcctggactggcaatcttagccctagccaggtattcaacgacccctgctccccaaactggggtggcctgttttcagatggaggcagggcctctccaggcagggctacaggtggaggtgagcactggggggactttggctccactggcctcctaagcagtttattagcctgcccaagcccaagtgtattgtttgaatgggtctatcccctcccaattggtcctaatctaatatggtcaaagaatgagacaagatcctaattcttataggctccgtcttttcaccccctttcatttatatacctattttgggaggcctcagcgtgcttcataggattcccaattttgtaggtagaattttctacattccctcttgaatgttagttgtcaggtgtagtttggctaatccccataattccccagaggaaagggcagaagaaggaagacttctctgctcctgggcggtggaggaggtctcgcctctccgaattcaaatgctgaacaatgtaggctggggccacctggacatatagaacttaaaaattattttcctaaaacatcattgatttttccatgtattcaacaaatatttattatgcaccttgcaccatgttgtctattcaccagtgaaaatcttgacccagcaatgaaggtggggggttactatactatattctctttacccacctaatacgggggagaccaggtgatggagtgggtggagggagttggagggtgagccggaagggaggagaccaggatatctgaataggaattctgtcaagttgactgcaacctctctctttttctctctggctccccaccccctccttcccttggctctctgcttctccctccccacccttggtgcagaggaggctggcagctgtgtgcaggatgggcagaggtataatgataaggatgtgtggaagccggagccctgccggatctgtgtctgtgacactgggactgtcctctgcgacgacataatctgtgaagacgtgaaagactgcctcagccctgagatccccttcggagagtgctgccccatctgcccaactgacctcgccactgccagtggttgtaatttatttatttcctgttcaacataaataaattacttgcaagcactgcaaacacgctcccatagatgctggtcgtctctgcaaagcagaggggctagttatccatgggacctggtagctggggtagaaaaggaaaaggccacttctcacttgcaggttgaaactgagtgaatgagcctgagacactagaggggtccttctttgcccaacatctccaaaaacatttgcttccaagacacatgaaggacagatgtaattctacaaaaaaaaaaaaaaaaaatcctctctgaaatcatctctgcaaattactagagccactatggagatcaaatgctctgtcttggccaatccacgaattaattcctcctctgccaccgataccttgtcttctccttagaagacttctatgtatgtggtcttcagtgtggagaaagctctgccagctagtggggagactgcaggggcagaggctccctctttgagttatggaacattggtggtagtttcctctctgctattacctctcttggagttgaccattaattcagaagcaaaataataagagagggaagggctaggctttgggagttctagtggggacgggtggagacagagccccatgtatctgcactgtagtgggtggttataaactcccagttagatccagtgctggtggatgatatatgtgcaggtgaccccttccccagcattcaatacaagatgtcctatctcccctgcagagtgagtggggacgcttgtgtaggttttttgggtagctcttgctgtccccttcctgctgaagtagagaaggccgtggcaagggaagtgagaagctgcctttccttaacacttcaccaacactggctccctaatgtgcacattcccagatcctttctgaggggcccgtgtgagtgaagtgttgattgcctttactattttgctgctactgtgaaggagaggttattgactggggtggcacaggctatgatgctccgatgctcttcataactcatatgccttgctgtttttgtgtttttatttgtgcttgcttcaaggagacccagctctaatgtaagacctttctaagtacctaactcttcctctgggagggcttggggttcgggaacggctccctacctgtggggggaagagagactgaatctgtgctttccttcttgtggctgattagatcttgagctcttcattgcctttttgtgctgcccttgctcctttcttttgcatgctgcctgctttttgaataacaaagcctgggtcacctccatatcctcatgggacctcagcaaccccaggccacagtggccctaacaccccaacagaggggttcagtggagtcacaggaacgtgccgccttccttgattgtgtccttttacttgtttgatctaatgagtgtttgagtgacaagaataggtatttttccatctcaagattcttaccttcttcttctctatattttttccttgcagggcaaccaggaccaaag

SEQ ID NO: 93 - protein, 103 aa, Homo sapiens
MIRLGAPQSLVLLTLLVAAVLRCQGQDVQEAGSCVQDGQRYNDKDVWKPEPCRICVCDTGTVLCDDIICEDVKDCLSPEIPFGECCPICPTDLATASGQPGPK

SEQ ID NO: 94 - DNA, 9443 bp, Homo sapiens
ggaattcacaacacaccgttggacatgatgtcaattgttcaagccaagaaatgccaggtcctggttagcgacattgattatcgcaattatctgcaccagtggacgtgtctgccagatcagaacgatgtgatccaggccaagaaagcctacgacctgcagagcgataacttgtacaagtcagacctggaatggctgaagggtattggatggttgccagagggttctgtggaagtgatgagagtgaagaatgcccagaatctcttgaatgaaaggctgtatcgtataaagcctgaggccctcaaattcaccagcattgttgacaccccggaagtaatccaggcaaagatcaatgctgtacagatcagtgagccattgtatcgcgatgcctgggagaaagagaaggctaatgtgaacgtgccagctgacactcccctgatgctgcaatccaaaatcaatgccctgcagatcagcaataaacgctatcagcaagcttgggaagatgtcaagatgactggttatgacctgcgagcagatgccattgggatccagcatgccaaggcttccagggatattgccagtgactatctgtacaaaactgcttatgagaaacagaaaggccattacattggctgtcgcagcgccaaggaagaccctaaactggtttgggcagcaaatgtgttgaagatgcagaatgacaggctgtacaaaaaggcctacaacgaccacaaagccaagatctccatccctgtggacatggtgtccatcagcgctgccaaagaaggtcaggcactggcaagtgatgtggactatcgccattacctgcaccgctggtcttgctttcccgaccagaatgatgtgatccaagccaggaaagcctacgacctacagagcgacgccctctacaaggctgacttggagtggttgcgtggcattggctggatgccccaagggtctcctgaagtgttgagagtcaaaaacgcccagaatatcttttgtgacagtgtctatcggacgcctgtggtgaaccttaagtacacaagcattgttgacacacctgaagtggtccttgctaaatcaaatgctgaaaatattagtattccaaagtacagagaggtttgggacaaggataaaacttcaatacacataatgccagatactccagaaattaatctcgctagagcaaatgctcttaatgtgagcaataaactttaccgtgagggctgggatgaaatgaaggcgggctgtgatgtccggctggatgccatccccatccaggctgccaaggcctccagggagattgccagtgactataaatataagcttgaccatgagaagcagaagggacactacgtgggcaccctcacagccagggatgacaacaagatccgctgggccctcatagctgacaagctccagaatgaacgagagtaccggctggactgggccaaatggaaggccaagatccagagccctgtggacatgctttccatcctgcactctaaaaattcccaggctctggtcagtgacatggattaccgcaattacctgcaccagtggacctgcatgcccgaccagaacgatgtgattcaggccaagaaggcttacgaactgcagagcgataatgtttacaaggctgacttggaatggttgcgtggaattgggtggatgccaaatgactccgtgtccgtcaatcatgccaaacatgccgcggacatcttcagtgagaaaaaatatcgcacaaaaatagaaactctcaactttacgcctgtggatgacagagttgattatgtgacagcgaaacaaagtggcgagatcctcgatgatattaaataccggaaagactggaatgccaccaaatcaaagtacaccctcacagaaacccccctgctgcacactgcccaggaggctgataggatactggaccagtatctctacaaggaaggctgggagagacaaaaagccacaggttacattttgcctccagatgctgtgccatttgttcatgcccatcactgcaatgacgttcagagtgagctgaaatacaaagctgaacatgtgaagcaaaaaggtcattatgttggtgtcccgacgatgagagatgatcctaagctggtttggtttgagcatgcaggccagattcagaatgagagactatacaaagaggactatcacaaaacaaaggccaaaatcaatatacctgctgatatggtgtcagtcttggccgccaagcaggggcagacccttgtcagtgatattgattatcgtaattacttgcaccaatggatgtgtcatcctgaccagaacgatgttattcaggcaagaaaggcctatgacctacagagtgataatgtctacagagctgacctggagtggctccgaggcattggctggatcccactggattctgtggaccatgtaagggttactaagaaccaggaaatgatgagtcagatcaaatataagaaaaatgcccttgaaaactatcctaactttacaagtgtggtggatcctccagagattgttttagccaagattaattctgtcaatcaaagtgatgtaaaatataaagaaacatttaataaagcaaagggcaaatatacgttttcaccagatacaccacatatctcccactccaaagacatgggaaaactctacagtactatactgtataaaggggcgtgggagggcaccaaggcctatgcgtacaccctggatgagcgctacattcccattgttggagccaagcatgctgatctggtgaacagtgagcttaaatacaaagagacatatgagaagcagaaaggtcactacctggctggaaaagtgatcggtgaattccctggtgtggttcactgtctggatttccaaaagatgaggagtgcgttgaactacagaaaacattatgaggataccaaagcaaatgttcatatccccaatgacatgatgaatcacgtgctggctaaaaggtgccagtacatcctcagtgacctggagtatcgacactatttccaccagtggacgtctcttctggaagaacccaatgttatacgcgtccgaaacgcccaggagatcttgagtgataatgtgtataaagatgacctgaattggttgaaaggcattggttgctacgtttgggatacaccccaaatcctccatgccaagaaatcatacgaccttcagagtcagctacaatatacagcagcaggtaaagaaaatctacaaaactataatctggtcacagacacgcccctctatgtgactgctgttcagagtggcattaatgccagtgaggtaaaatataaagaaaattatcatcagattaaggacaaatacacaacagttctagaaacagtggattatgacagaaccagaaacctgaagaatctttacagcagtaacctgtacaaggaggcctgggatagagtgaaagccaccagctacatcctgccttccagcaccttgtccctgacacacgccaagaaccagaagcatctggccagccatatcaaatatcgggaagaatatgaaaagttcaaagctctttatacgttaccaagaagtgttgacgatgatccgaacacagcacggtgcctccgagttggcaagcttaacatcgatcgcctgtacagatcagtttatgaaaagaacaagatgaaaatccacatcgtgcccgacatggtagagatggttactgccaaggattcccagaagaaagtcagtgagattgattaccgcctgcgcctccacgaatggatttgccaccccgacttgcaagtcaatgatcacgtcaggaaagtcacagatcagatcagcgatattgtatacaaggatgacctcaactggctgaaaggcattggttgctacgtctgggacactcctgaaatcctccatgccaagcatgcttatgatctacgtgatgatatcaagtataaagctcacatgttgaaaacaaggaatgactacaagcttgtcacagatacaccagtctacgtgcaggctgtcaaaagtgggaaacagctaagtgacgctgtctaccactatgactatgtgcacagtgtcagaggcaaagtggctccaactaccaaaaccgtggatctggaccgggcccttcatgcatacaagctccagagttcgaatctatacaaaaccagcctgcgcaccctgcccactggatatagacttccaggtgacactcctcacttcaaacacatcaaggacacccgttacatgagcagttatttcaagtacaaagaagcctatgaacacaccaaggcatatgggtatacacttggccccaaagatgttccatttgtccacgtccggagagtcaacaatgttaccagcgagagactgtatcgggaattgtaccacaaactgaaagacaagatccatacaactcccgatacccctgagatccgccaagtcaagaagacacaagaggctgtcagtgagttgatctacaaatcagacttcttcaagatgcagggccacatgatctctctgccatacacaccccaagtgatccattgccgctatgtgggagacatcaccagtgatattaaatacaaagaggacttgcaggtcctgaagggatttggctgcttcctgtatgacactcctgacatggtccgctcccggcacctgcggaagctctggtctaattacctatacactgataaggcaaggaagatgcgagacaaatacaaagtggtgcttgacactccagaatacagaaaagtgcaagaactgaagacacatctgagtgagctggtctacagagctgcaggcaagaagcagaagtcaatctttacttcagttcctgatactcctgatcttttaagagccaagcgagggcagaagcttcagagtcagtatctgtatgttgaacttgccaccaaagagagaccccatcatcacgctggaaaccagaccacagccttgaagcatgctaaagacgtgaaggacatggtcagtgagaaaaagtacaagattcaatatgaaaagatgaaagacaagtacactccggttccagatacgccaatcctcatcagagccaagagggcttactggaatgccagtgatctacgctacaaagaaacatttcaaaagaccaaagggaaataccacacggtgaaagatgccctagacattgtctatcatcgcaaagtcacagatgacatcagtaaaataaaatacaaggagaactacatgagccagttgggtatctggaggtccattcctgatcgtccagagcatttccaccaccgagcagtcactgacacagtcagtgatgtaaaatataaagaagacttgacttggcttaaaggcattggttgctatgcctatgatacccctgatttcactctggctgaaaagaacaagactctctacagcaagtataagtataaagaagtatttgaaaggacaaagtcagatttcaagtatgttgccgactctccgatcaataggcatttcaagtatgcaactcaattgatgaatgagaaaaaatacagagctgattatgagcagcggaaagataaataccacctggtagtcgatgagcctagacatctgctggctaagaccgcaggcgaccagatcagtcagatcaaatacaggaaaaactatgaaaaatcaaaggacaaatttacctcaattgtggatactccagaacacctgcgtactacaaaagtcaacaaacaaatcagcgatatcctttataaattggaatacaacaaggccaaacccagaggctacaccacaatccacgacacacccatgttgctgcatgtccgcaaggttaaagatgaagtcagtgatctgaaatacaaagaagtataccaaagaaataaatccaactgcaccattgagccagatgctgttcatatcaaagcagccaaggacgcctacaaagtcaacaccaatctggactataagaaacagtacgaagccaacaaagcccactggaagtggactcctgaccgaccggacttcctccaggctgccaagtcatccctgcagcaaagcgattttgaatataagctggaccgggagttcctcaagggttgcaagctttctgtcactgatgacaaaaacacggtgctcgccctcaggaatactttaatagaaagtgatctgaaatacaaagagaaacatgtcaaggaaagaggaacctgccatgccgtacctgacacgcctcagatcctgctggcgaagactgtcagcaacctggtgtctgagaacaagtacaaggaccatgtcaagaagcacttggcacagggctcatacacaacactaccagagacccgggacactgttcacgtcaaggaagtgaccaagcatgtcagtgatacaaattacaaaaagaagtttgtcaaggagaaaggaaaatccaactactccatcatgctggagccaccagaggtgaaacatgctatggaagtggccaagaagcaaagtgatgtcgcttacagaaaagatgccaaagagaacctgcattacaccacagtggctgatcgaccagacatcaagaaggccacacaggcagccaaacaggccagtgaggtggagtacagagccaagcaccgcaaggaaggcagccatggcttaagcatgctcggtcgcccagacatagaaatggccaagaaggcagccaagctgagcagccaggttaaataccgagaaaatttcgataaagaaaagggcaagacaccaaaatacaatccaaaagacagccagctctacaaagtcatgaaagatgctaataatcttgcaagtgaggttaaatacaaggctgacctgaagaaacttcacaaacccgtgactgacatgaaggagtctctgatcatgaatcatgtcctgaatacaagccaacttgccagttcttaccagtacaagaagaagtatgagaagagtaaaggccactaccacaccatacccgataatctggagcagcttcacctaaaagaggccacagaattacagagtatagtgaaatacaaagaaaagtatgaaaaggaacgaggaaaacccatgctggactttgaaacaccaacgtacatcactgccaaagagtctcagcagatgcagagtgggaaagaatataggaaagattatgaagagtccattaaaggcagaaacctgactggcctggaggtcacgccagctttgttacatgtcaaatatgcaactaaaatagcaagcgagaaagagtacaggaaagatctagaggaaagcatccgtgggaagggcctcactgaaatggaagatacacctgacatgctaagagcaaagaatgccactcaaatcctcaatgagaaagaatataagcgagacctggaactggaagtcaaaggaagaggcctgaatgccatggccaatgaaactccggattttatgagggccaggaatgctactgatattgccagtcagattaagtataagcaatcagcagaaatggagaaagccaatttcacttctgtggttgatactccagagatcattcatgcccaacaagtcaagaatctttcaagccagaaaaagtacaaggaagatgctgagaagtccatgtcgtattatgagactgttttggacaccccagagatacagagagtccgggagaaccaaaagaacttcagccttctccaataccagtgtgaccttaaaaacagtaaaggaaaaattacagttgttcaagacacgccagaaatactgcgtgtaaaagaaaatcagaagaatttcagctcggttttatataaagaggatgtctcaccaggaacggctatcggaaagacacctgagatgatgagagtgaaacaaacacaggaccacattagctcggtgaagtataaggaagcaataggacaaggaactccaatccctgacctgcctgaagtgaaacgtgtgaaggagacgcagaagcacattagctcggttatgtacaaagaaaacttgggaacaggcattccaaccactgtgactccagagattgagagagtcaaacgcaatcaagagaactttagctcggtgttatacaaagaaaacatgggcaagggaactcctttacctgtcactcccgagatggagcgagtcaaacacaatcaagaaaatattagctcggttttgtacaaagaaaatgtggggaaagccaccgcaacccctgtcactcctgagatgcagagagtcaaacgcaatcaagaaaacattagctcggttctttattctgatagtttccggaaacaaatacaaggcaaagctgcctatgtattggatacccccgagatgagacgggtgagggagacccaacggcacatctcaacggtgaaatatcatgaagactttgagaaacacaagggttgcttcacaccagtggtgacagatcctatcactgaacgagtaaagaagaacatgcaggacttcagtgacattaactaccgaggtattcagaggaaagtggtagaaatggaacaaaaacggaatgaccaagatcaggagactattacaggtttacgtgtctggcgtactaatcctggttcggtttttgactatgatccagcagaagacaacatccagtcccgaagcttacacatgattaatgtccaagctcagcgccggagccgggagcagtcacgatctgccagtgcactaagcgtcagtgggggtgaggagaagtctgagcattcagaagcaccagaccaccacctttcgacttacagcgacgggggtgtctttgcagtctcaacagcttacaaacatgcaaaaaccacagagctcccacaacaacgatcatcttcagttgctacccaacagacaacggtatcttccatcccatctcatccatctactgctggaaaaatcttccgtgccatgtatgactatatggctgctgatgcagatgaggtgtccttcaaggatggagatgccatcataaatgttcaagcaattgatgaaggctggatgtatggcactgtgcagaggactggcaggaccggaatgctcccagccaactacgttgaagctatttaggcatttcaaagcatcacacttgtctgcaggacttacagatcctgcagtcaatgtttcggtttagactctccactgttacctaagttctcaagctgcctatggtttttctgtgtcaatgtgatttatggtagtaccatcctttctcctttgggttttaaaataagttgcagaacagacactttaaaagcttctgcaatattatttctgtgcctagagtctttctccattataaacatgttttaacattatttcttttctaaaacagggattttgaatatgccaaacacattaaaggaaaaatagcagagatgttcaccttttccttgctgattgctaatgcttattatttctaattcagttctgaagttataaacttataatcaatacaaaccagcaactaataaaacctctaattctgc

SEQ ID NO: 95 - protein, 3007 aa, Homo sapiens
GIHNTPLDMMSIVQAKKCQVLVSDIDYRNYLHQWTCLPDQNDVIQAKKAYDLQSDNLYKSDLEWLKGIGWLPEGSVEVMRVKNAQNLLNERLYRIKPEALKFTSIVDTPEVIQAKINAVQISEPLYRDAWEKEKANVNVPADTPLMLQSKINALQISNKRYQQAWEDVKMTGYDLRADAIGIQHAKASRDIASDYLYKTAYEKQKGHYIGCRSAKEDPKLVWAANVLKMQNDRLYKKAYNDHKAKISIPVDMVSISAAKEGQALASDVDYRHYLHRWSCFPDQNDVIQARKAYDLQSDALYKADLEWLRGIGWMPQGSPEVLRVKNAQNIFCDSVYRTPVVNLKYTSIVDTPEVVLAKSNAENISIPKYREVWDKDKTSIHIMPDTPEINLARANALNVSNKLYREGWDEMKAGCDVRLDAIPIQAAKASREIASDYKYKLDHEKQKGHYVGTLTARDDNKIRWALIADKLQNEREYRLDWAKWKAKIQSPVDMLSILHSKNSQALVSDMDYRNYLHQWTCMPDQNDVIQAKKAYELQSDNVYKADLEWLRGIGWMPNDSVSVNHAKHAADIFSEKKYRTKIETLNFTPVDDRVDYVTAKQSGEILDDIKYRKDWNATKSKYTLTETPLLHTAQEADRILDQYLYKEGWERQKATGYILPPDAVPFVHAHHCNDVQSELKYKAEHVKQKGHYVGVPTMRDDPKLVWFEHAGQIQNERLYKEDYHKTKAKINIPADMVSVLAAKQGQTLVSDIDYRNYLHQWMCHPDQNDVIQARKAYDLQSDNVYRADLEWLRGIGWIPLDSVDHVRVTKNQEMMSQIKYKKNALENYPNFTSVVDPPEIVLAKINSVNQSDVKYKETFNKAKGKYTFSPDTPHISHSKDMGKLYSTILYKGAWEGTKAYAYTLDERYIPIVGAKHADLVNSELKYKETYEKQKGHYLAGKVIGEFPGVVHCLDFQKMRSALNYRKHYEDTKANVHIPNDMMNHVLAKRCQYILSDLEYRHYFHQWTSLLEEPNVIRVRNAQEILSDNVYKDDLNWLKGIGCYVWDTPQILHAKKSYDLQSQLQYTAAGKENLQNYNLVTDTPLYVTAVQSGINASEVKYKENYHQIKDKYTTVLETVDYDRTRNLKNLYSSNLYKEAWDRVKATSYILPSSTLSLTHAKNQKHLASHIKYREEYEKFKALYTLPRSVDDDPNTARCLRVGKLNIDRLYRSVYEKNKMKIHIVPDMVEMVTAKDSQKKVSEIDYRLRLHEWICHPDLQVNDHVRKVTDQISDIVYKDDLNWLKGIGCYVWDTPEILHAKHAYDLRDDIKYKAHMLKTRNDYKLVTDTPVYVQAVKSGKQLSDAVYHYDYVHSVRGKVAPTTKTVDLDRALHAYKLQSSNLYKTSLRTLPTGYRLPGDTPHFKHIKDTRYMSSYFKYKEAYEHTKAYGYTLGPKDVPFVHVRRVNNVTSERLYRELYHKLKDKIHTTPDTPEIRQVKKTQEAVSELIYKSDFFKMQGHMISLPYTPQVIHCRYVGDITSDIKYKEDLQVLKGFGCFLYDTPDMVRSRHLRKLWSNYLYTDKARKMRDKYKVVLDTPEYRKVQELKTHLSELVYRAAGKKQKSIFTSVPDTPDLLRAKRGQKLQSQYLYVELATKERPHHHAGNQTTALKHAKDVKDMVSEKKYKIQYEKMKDKYTPVPDTPILIRAKRAYWNASDLRYKETFQKTKGKYHTVKDALDIVYHRKVTDDISKIKYKENYMSQLGIWRSIPDRPEHFHHRAVTDTVSDVKYKEDLTWLKGIGCYAYDTPDFTLAEKNKTLYSKYKYKEVFERTKSDFKYVADSPINRHFKYATQLMNEKKYRADYEQRKDKYHLVVDEPRHLLAKTAGDQISQIKYRKNYEKSKDKFTSIVDTPEHLRTTKVNKQISDILYKLEYNKAKPRGYTTIHDTPMLLHVRKVKDEVSDLKYKEVYQRNKSNCTIEPDAVHIKAAKDAYKVNTNLDYKKQYEANKAHWKWTPDRPDFLQAAKSSLQQSDFEYKLDREFLKGCKLSVTDDKNTVLALRNTLIESDLKYKEKHVKERGTCHAVPDTPQILLAKTVSNLVSENKYKDHVKKHLAQGSYTTLPETRDTVHVKEVTKHVSDTNYKKKFVKEKGKSNYSIMLEPPEVKHAMEVAKKQSDVAYRKDAKENLHYTTVADRPDIKKATQAAKQASEVEYRAKHRKEGSHGLSMLGRPDIEMAKKAAKLSSQVKYRENFDKEKGKTPKYNPKDSQLYKVMKDANNLASEVKYKADLKKLHKPVTDMKESLIMNHVLNTSQLASSYQYKKKYEKSKGHYHTIPDNLEQLHLKEATELQSIVKYKEKYEKERGKPMLDFETPTYITAKESQQMQSGKEYRKDYEESIKGRNLTGLEVTPALLHVKYATKIASEKEYRKDLEESIRGKGLTEMEDTPDMLRAKNATQILNEKEYKRDLELEVKGRGLNAMANETPDFMRARNATDIASQIKYKQSAEMEKANFTSVVDTPEIIHAQQVKNLSSQKKYKEDAEKSMSYYETVLDTPEIQRVRENQKNFSLLQYQCDLKNSKGKITVVQDTPEILRVKENQKNFSSVLYKEDVSPGTAIGKTPEMMRVKQTQDHISSVKYKEAIGQGTPIPDLPEVKRVKETQKHISSVMYKENLGTGIPTTVTPEIERVKRNQENFSSVLYKENMGKGTPLPVTPEMERVKHNQENISSVLYKENVGKATATPVTPEMQRVKRNQENISSVLYSDSFRKQIQGKAAYVLDTPEMRRVRETQRHISTVKYHEDFEKHKGCFTPVVTDPITERVKKNMQDFSDINYRGIQRKVVEMEQKRNDQDQETITGLRVWRTNPGSVFDYDPAEDNIQSRSLHMINVQAQRRSREQSRSASALSVSGGEEKSEHSEAPDHHLSTYSDGGVFAVSTAYKHAKTTELPQQRSSSVATQQTTVSSIPSHPSTAGKIFRAMYDYMAADADEVSFKDGDAIINVQAIDEGWMYGTVQRTGRTGMLPANYVEAI

SEQ ID NO: 96 - DNA, 1125 bp, Homo sapiens
gcagaaggcaagcccggaggcactttcaagaatgagcatatctcatcttcccggaggaaaaaaaaaaaagaatgggtacgtctgagaatcaaattttgaaagagtgcaatgatgggtcgtttgataatttgtcggaaaaacaatctacctgttatctagctttgggctaggccattccagttccagacgcaggctgaacgtcgtgaagcggaaggggcgggcccgcaggcgtccgtgtggtcctccgtgcagccctcggcccgagccggttcttcctggtaggaggcggaactcgaattcatttctcccgctgccccatctcttagctcgcggttgtttcattccgcagtttcttcccatgcacctgccgcgtaccggccactttgtgccgtacttacgtcatctttttcctaaatcgaggtggcatttacacacagcgccagtgcacacagcaagtgcacaggaagatgagttttggcccctaaccgctccgtgatgcctaccaagtcacagacccttttcatcgtcccagaaacgtttcatcacgtctcttcccagtcgattcccgaccccacctttattttgatctccataaccattttgcctgttggagaacttcatatagaatggaatcaggctgggcgctgtggctcacgcctgcactttgggaggccgaggcgggcggattacttgaggataggagttccagaccagcgtggccaacgtggtgaatccccgtctctactaaaaaatacaaaaattagctgggcgtggtgggtgcctgtaatcccagctattcgggagggtgaggcaggagaatcgcttgaacccgggaggcagaggttgcagtgagccaagatcgtgccactacactccagcctgggcgacaagaacgaaactccgtctcaaaaaaaaggggggaatcatacattatgtgctcatttttgtcgggcttctgtccttcaatgtactgtctgacattcgttcatgttgtatatatcagtattttgctccttttcatttagtatagtccatcgattgtatatccgtccttttgatggccttttgagttgtttcccatttgcggttatgaaataaagctgctataaacaaaaaaaaaaaaaa

SEQ ID NO: 97 - protein, 118 aa, Homo sapiens
MPTKSQTLFIVPETFHHVSSQSIPDPTFILISITILPVGELHIEWNQAGRCGSRLHFGRPRRADYLRIGVPDQRGQRGESPSLLKNTKISWAWWVPVIPAIREGEAGESLEPGRQRLQ

SEQ ID NO: 98 - DNA, 5934 bp, Homo sapiens
  misc_feature (1240)..(1260): n is a, c, g, or t
  misc_feature (2041)..(2066): n is a, c, g, or t
  misc_feature (2752)..(2752): n is a, c, g, or t
aagcttgggaaactgggcaactttttctttatttttgtttttatttattattattttggagatggagtttagctctttcgccccaggctacagtgaagtggcttgatcttggcctcactgcagcctctgcccatcccggttcaagtgattctctgccctcagcctcccgagtagctgggattataggtgcctgccacatgcccggctaatttttttgtatttttagtagagaggagtttctccatgttggtcaggctggttttgaactcctgacctcaggtgatccacctgtcttggcctcccaaagtactaagattacaggtgtgagccaccgtgcctggccaacttattttttttctgagttcagtcttctagactatcggttaatacttttgaagttttgtcagttaccagaatatcagatatattcatatgcaaccagtggttttggtatgctgccattttgttaatctgtaccacattccacatttgtgcttataaggatgcatatcctattttaaacccgtagaataagagaagtgagattttgacccagttgatttagttgatgtgactaatctagaattatattctgtattactacagaataaaaggattacagctccttaaagtatacccttagttcagtcgtagagaaaactgcccatcaagacaggaagagctgggctgccttggagaagaacaatgactttattcccaaatggaggcgtagaagaaggagggtagaagtcaaaggaaatttctattcagggaaaagaaaaagctaacagaaagatgtatttttctttccttaacaagatagtaaacgtgagagtgggaatcctctaattctattcagggaaaagaaaaagctaacagagaaagtagtatttctttcctaacaaagatagtacagtgagtggggaaatccctctaacacgattcattaaaaaatgtgaactacgcagctggaggccattatcctaagcgaattaacccaggaacagaaaaccaaatagcccacatgtctcacttgcaagtggaagctaaacatggagtacttatggatataaaaatggcagcaacagacactgaggacagagcgggagggagaagaggggggttgaaactgttgtatacatgctcgctaccttggtgatggctacaattgcaccagacctcagctacatatgaaccgtgtacaactgtgctgtaccttgattaataattgaccggccannnnnnnnnnnnnnnnnnnnngaggttgcagtgacccgagatcatggcattgcaactccgccctggggccaccaagagtgaaactccgtcttcaaaagggcaaaaaaacgaaaaaaaaaaaaaaaaaaaaaaaaaaaaagttgaagttataaaaaacaaaaacgtgaattaaaattgtgaaacttagatccaggtgtcgcattctgatgttgtctaatttcttgggccctatgacaaatatattttaatacatgtaatataacatgttactgataattattgaaactctgttcatttgtgggtgttttttaggattttttttttttaataggggagttgctggaagccatcaaacgtgactttggttcctttgacaagtttaaggagaagctgacggctgcatctgttggtgtccaaggctcaggttggggttggcttggtttcaataaggaacggggacacttacaaattgctgcttgtccaaatcaggatccactgcaaggaacaacaggttagatttaaaaattgtgatttcatttgggagagatgctctactgtaaagcattcaactagaaataaggaaaactaacagtgttttaagaacatgtaataatttgcaaatcttaacagataacacccagagtcttgtgtaagaaaaatgttttagaagtctgatatttcataaaattaagtacacgtaattttataggtacattaacaaacatgtttatttttatttattttttttgagacagactctactgttggcccccaggctggagtgcagtggtgcgatctcggnnnnnnnnnnnnnnnnnnnnnnnnnngttaattttcccagtctattttattgttagtatttgtcacattttctttgtaaacagtgaattaaaatattttataggtattcattcttatctagatttcctacttatataaaaaaacaagtgaatgagattgttacaaagggtaattttgtgtgagtagaataataaaagttgaaattgagaagatgcaatgttttagactgaaactgtggttggtttgttttccccttctttctaacaggccttattccactgctgggaattgatgtgtgggagcacgcttactaccttcagtataaaaatgtcaggcctgattatctaaaagctatttggaatgtaatcaactgggagaatgtaactgaaagatacatggcttgcaaaaagtaaaccacgatcgttatgctgagtatgttaagctgctctttatgactgtttttgtagtggtatagagtactgcagaatacagtaagctgctctattgtagcatttcttgatgttgcttagtcacttatttcataaaccaacttaatgttctgaataatttcttactaaacattttgttattgggcaagtgattgaaaatagtaaatgctttggtggattgaatctgattgggacatttcttcagagagctaaattacaattgcatttataaaaccatcaaaaatattccatccatatacttntggggacttgtagggatgcctttctagtcctatttattgagttatagaaaatctagtcttttgccccagttacttaaaaataaaatattaacactttcccaagggaaacactcggcttttctatagaaaattgcactttttgtcataatcctctgcagtgatacttctggtagatgtcacccagtggtttttgttaggtcaatgttcctgtatatagtttttgcaaatagagctgtatactgtttaaatgtagcaggtgaactgaactggggtttgcctcacctgcacagtaaaggcaaacttcaacagcaaaactgcaaaaaggtggtttttgcagtaggagaaaggaggatgtttatttgcagggcgccaagcaaggagaattgggcagctcatgcttgagcccaatctccatgatgcctacaagctagagtatttaaaggcagtggtaaatttcaggaaagcagaagttaaaggcaaaattgtaaatcagtcgagatcgggtgccttcagggtggtatggctagtataccaaaattgtaaatcactacatgaagcttatatattggtttggcctgaaaggtgaagtgggtaggcagggggcgggcttacaggttatggtggattcaaagactccctgatttgtgattggttaaggaagcaagctttgtctaaaaacttggggtccgcagaaaggaacattaaggtctggccaggcccctcaggaaagaaactgagagcaaagaatggaggtcagatttagtccctggtgttcccccttatctgacgtctgtgtgaatccatttggtgggggtctgggtttctgaaaagtagctcaggggcacgtgttaaggatgtctctaggtgactctaacttccctggctattgtttgaaactgttatgaccttcttgcttatcagcttgctggtttccttctcggggcgagctgggtgcctggagttttcggtgaaggaaactcaagattctcctttatttctgtgcttgtgggaatccccctgctcccaaagaggggtccctgactccgtctcacagggatctttttgtatatttggcttagcatcatacatttgccatgttgtttcatcatcttgcctaatttactgtttttgaatatttcatttgtttctaattgttactacagataatgctggggtgagcaactctgtgtacataggtttatctcctattggaatattttctttatataggcgttttttttttttctttttttttggagacagagcttgctctgttgcccaggctggagtgcaggtggccgcgacctggagctccactgcaacctccacttcccgggtccaagtgatgtcccaacctcagcctcctgaatagctgggattataggtgcatgctaccatgcctggctactttttgtatttttagcagagacagggtttcaccatgttggccagggtggtctcgaactcctgacctcaagtgatccgtctggctcagcctcccaaagtgctgggattacaggtgtgagccactgcacctggcctatataggcttttttcttaaacctatttagtaatgttttccaagtttcccaagttattttttattttaattttccccagttatttttctatttttttttcatggaaaaatggggtaacttagcagtttcaatattgaagactgaagtttaaaaaaatttaaattcaaggtacttttaaaattcagttagaaaagtaggctttaaaaattattagagacaagagtaccaaagcggtgtgtgtatgtgtgtgtgtgtatgcatgcttgtggattggaaaaactttggagactgattacttttcattatatatgtgtcacagtgaaacagcttttatgtgtcatgtaagattactgcttgcctctctaaggaaggtcgtgactgtttaaatagacgggcaaggtggaaccttttgaaagatgagcttttgaatataagttgtctgctagatcatggtttgtattgaactaacaaggtttgcagatctgctgacttatataaagctttttgattcctactaagctttaagatttaaaaaatgttcaatgttgaaatttctgtggggctctatttttgctttggctttctggtgagagagtgaggaagcattctttccttcactaagttttgtctttcttgtcttctggatagattgaattttaagagactaagggaatttacaaactaaggaatttagtcatctggtggaaaaggagactttaagattgttagggctgggcggggtgactcacatctgttaatcccctttgggcggccaaggcggcagaacacttgaaggagttcaagaccagcgtggccaacgtggtgaaaccctgtctctactaaaaaatacaaaattgtttagctctgtttttcataatagaaatagaaaaggtaaaattgcttttcttctgaaaagaacaagtattgttcatccaagaagggtttttgtgactgaatcagcagtgcctgcccatgtcatagctgtgcttcaaaaacctcagcatgattagttgtttggagcaaacaaggaagcaaagcaatacgtttttgaaattctatctgttgcttgactatattgtaataattaacattgaagttgagaaattcacaactttaattgtacacttcattgcaacttgaaattcatggtcttaaagtgagatttgaatttctattgagcgcctttaaaaaagtaataccaaaccataaagttaaaatctatgtatattgagtcatatctaaaaccacgtataaacataaattgtatttcctgttttaattccaggggaagtactgtttgggaaagctattattaggtaaatgttttacaaattactgtttctcactttcagtcaataccctaatgatcccagcaagataatgtcctgtcttctaagaggtgcatcaagcctggtacatactgaaaaccctataaggtcctggataatttttgtttgattattcattgaagaaacatttattttccaattgtgtgagtttttgactgttaataaaagaatctgtcaaccatcaaagaggtctgcattatgcttgcatgtcaaaaacattaaaaatcctataaatctactgtcattttcactgaagtttccaagggaaaggaattgtaattttgggctgttg

SEQ ID NO: 99 - DNA, 2355 bp, Homo sapiens
ccgttgcctcaacgtccaacccttctgcagggctgcagtccggccaccccaagaccttgctgcagggtgcttcggatcctgatcgtgagtcgcggggtccactccccgcccttagccagtgcccagggggcaacagcggcgatcgcaacctctagtttgagtcaaggtccagtttgaatgaccgctctcagctggtgaagacatgaccaccctggactccaacaacaacacaggtggcgtcatcacctacattggctccagtggctcctccccaagccgcaccagccctgaatccctctatagtgacaactccaatggcagcttccagtccctgacccaaggctgtcccacctacttcccaccatcccccactggctccctcacccaagacccggctcgctcctttgggagcattccacccagcctgagtgatgacggctccccttcttcctcatcttcctcgtcgtcatcctcctcctccttctataatgggagcccccctgggagtctacaagtggccatggaggacagcagccgagtgtcccccagcaagagcaccagcaacatcaccaagctgaatggcatggtgttactgtgtaaagtgtgtggggacgttgcctcgggcttccactacggtgtgctcgcctgcgagggctgcaagggctttttccgtcggagcatccagcagaacatccagtacaaaaggtgtctgaagaatgagaattgctccatcgtccgcatcaatcgcaaccgctgccagcaatgtcgcttcaagaagtgtctctctgtgggcatgtctcgagacgctgtgcgttttgggcgcatccccaaacgagagaagcagcggatgcttgctgagatgcagagtgccatgaacctggccaacaaccagttgagcagccagtgcccgctggagacttcacccacccagcaccccaccccaggccccatgggcccctcgccaccccctgctccggtcccctcacccctggtgggcttctcccagtttccacaacagctgacgcctcccagatccccaagccctgagcccacagtggaggatgtgatatcccaggtggcccgggcccatcgagagatcttcacctacgcccatgacaagctgggcagctcacctggcaacttcaatgccaaccatgcatcaggtagccctccagccaccaccccacatcgctgggaaaatcagggctgcccacctgcccccaatgacaacaacaccttggctgcccagcgtcataacgaggccctaaatggtctgcgccaggctccctcctcctaccctcccacctggcctcctggccctgcacaccacagctgccaccagtccaacagcaacgggcaccgtctatgccccacccacgtgtatgcagccccagaaggcaaggcacctgccaacagtccccggcagggcaactcaaagaatgttctgctggcatgtcctatgaacatgtacccgcatggacgcagtgggcgaacggtgcaggagatctgggaggatttctccatgagcttcacgcccgctgtgcgggaggtggtagagtttgccaaacacatcccgggcttccgtgacctttctcagcatgaccaagtcaccctgcttaaggctggcacctttgaggtgctgatggtgcgctttgcttcgttgttcaacgtgaaggaccagacagtgatgttcctaagccggaccacctacagcctgcaggagcttggtgccatgggcatgggagacctgctcagtgccatgttcgacttcagcgagaagctcaactccctggcgcttaccgaggaggagctgggcctcttcaccgcggtggtgcttgtctctgcagaccgctcgggcatggagaattccgcttcggtggagcagctccaggagacgctgctgcgggctcttcgggctctggtgctgaagaaccggcccttggagacttcccgcttcaccaagctgctgctcaagctgccggacctgcggaccctgaacaacatgcattccgagaagctgctgtccttccgggtggacgcccagtgacccgcccggccggccttctgccgctgcccccttgtacagaatcgaactctgcacttctctctcctttacgagacgaaaaggaaaagcaaaccagaatcttatttatattgttataaaatattccaagatgagcctctggccccctgagccttcttgtaaatacctgcctccctcccccatcaccgaacttcccctcctcccctatttaaaccactctgtctcccccacaaccctcccctggccctctgatttgttctgttcctgtctcaaatccaatagttcacagctaaaaaaaaaaaaaaaaaaag

SEQ ID NO: 100 - protein, 614 aa, Homo sapiens
MTTLDSNNNTGGVITYIGSSGSSPSRTSPESLYSDNSNGSFQSLTQGCPTYFPPSPTGSLTQDPARSFGSIPPSLSDDGSPSSSSSSSSSSSSFYNGSPPGSLQVAMEDSSRVSPSKSTSNITKLNGMVLLCKVCGDVASGFHYGVLACEGCKGFFRRSIQQNIQYKRCLKNENCSIVRINRNRCQQCRFKKCLSVGMSRDAVRFGRIPKREKQRMLAEMQSAMNLANNQLSSQCPLETSPTQHPTPGPMGPSPPPAPVPSPLVGFSQFPQQLTPPRSPSPEPTVEDVISQVARAHREIFTYAHDKLGSSPGNFNANHASGSPPATTPHRWENQGCPPAPNDNNTLAAQRHNEALNGLRQAPSSYPPTWPPGPAHHSCHQSNSNGHRLCPTHVYAAPEGKAPANSPRQGNSKNVLLACPMNMYPHGRSGRTVQEIWEDFSMSFTPAVREVVEFAKHIPGFRDLSQHDQVTLLKAGTFEVLMVRFASLFNVKDQTVMFLSRTTYSLQELGAMGMGDLLSAMFDFSEKLNSLALTEEELGLFTAVVLVSADRSGMENSASVEQLQETLLRALRALVLKNRPLETSRFTKLLLKLPDLRTLNNMHSEKLLSFRVDAQ

SEQ ID NO: 101 - DNA, 634 bp, Homo sapiens
cacgttgctctctgtttttacctaaaagagccagaagcgctatcacgaagatatctatggtgctgtatttccttacgaggcgaagaaggacagggtggcggtgcagcccagcagcctggagatgtcagcgctctgagggcctacaggaggggttatagctgccggcacagaacttaaggatggagccagctctgcattatctgaggtcacagggcctggggagatggaggaaagtgatatcccccagcctcaagtcttatttcctcaacgttgctccccatcaagccctttacttgacctcctaacaagtagcaccctggattgatcggagcctcctctctcaaactggggcctccctggtcccttggagacaaaatcttaaatgccaggcctggaagtgggtgaaagatggaacttgctgctgagtgcaccacttcaagtgaccaccaggaggtggtatcgcaccactgtgtttttaactgccttgtgtacaaagatttatgcctcttgtttttaaaaaactaaaaccagtctgttccccatggccactgggtcttccccatggccacttgggtcttccctgtatgattccttgatggagatatttacatgaatttgcatttttactttaatc

SEQ ID NO: 102 - DNA, 1531 bp, Homo sapiens
gaattccccggatctcccttctaactctccacctttggcctaagctttgcttccacatggtcatcaacatttggtggttatagaactaataacccctatctcacttcactcctatgccagaggggccctagcatcagctcatgggattgttgtttttgctttcctctctatctttggctccgggattttccccttactttaatgggagctcatctgtaccttttaagtttttattaatatcatgtgaacacagacctgtatatattgttagaagcagaaatctctaagtttacttttaaaacatgatccttgcctcgaaaccttgtagaataatataatgtccacataataccaagttatgaaaagaaacatacctaaataactaaataagtatattccttttttcccccagctttttttccccattctaggttacccagttgtactgtgttgtttgtcataggccgggtgaggtggctcacgtctgtaatcctagcaatttgggaggcgaaggcgggtggatcgcctgaggtcaggagttcgagaccagcctggctaacatggtgaaaccctgtctctactaaaaatacaaaaattaactgggtgtggtggcgggtgcctgtaattccagctacttgggaagctgaggtaggagaatcgcttgaacccaggatgcggaggttgcagtgagccgagatcacaccattgcactccagcctgggcaacaagagcgaaattcagtctcaaaaaaaaaaattatctataaaagtataggtgcaactcctcaagtattaaagacaagatagctcggattggacttgactttcagagccataactattcttaatatgttggtttatcttggaatcagaccattttcagtttcaacctgtaaaacagtgtacaaaggaaacatggaaagttttctatatataaagggttgtgaaataataacagctcacagaaaatgctgaaatgatgatttgcttcagtaccctctgaaatttctcccctaccacccctccttcatccccattgctatcaattcaaattacaacagctaattctcaggagaacagtagaagcccagtttctctcctctttcccctctgaccctcctccaattaatctgactgcagcgtaaacctttgcggtttaatattgtgcaacttccacatttccctcgctctcccacccagccccctcccccaccaaattcaggggaactcccgttaccgcagtgccaccagcattactcattcatccccattcaggctttcctcagcatttattaaggactctctgctccagcctctcactctcactctcctccgctcaaactcagctcacttgagagtctcctcccgccagctgtggaaagaactttgcgtctctccagcaatgcatctccttgcgattctgttttgtgctctctggtctgcagtgttggccgagaactcggatcattatcatctcatgtatgtgaatttggacaacgaaatagacaatggactccatcccactgaggacc

SEQ ID NO: 103 - DNA, 319 bp, Homo sapiens
tgtggtgtagggaacggcctgagagacgtgtctatccccggacgcatgcagggccccacaggagcgtgtcctatccccggacgcatgcagggcccccacaggagcgtgtactaccccaggacgcatgcagggcccccactggagcgtgtactaccccaggatgcatgcagggcccccacaggagcgtgtcctatccccggaccggacgcatgcagggcccccacaggagcgtgtactaccccaggacgcatgcagggcccccatgcaggcagcctgcagaccacactctgcctggccttgagccgtgacctccaggaag

SEQ ID NO: 104 - protein, 106 aa, Homo sapiens
CGVGNGLRDVSIPGRMQGPTGACPIPGRMQGPHRSVYYPRTHAGPPLERVLPQDACRAPTGACPIPGPDACRAPTGACTTPGRMQGPHAGSLQTTLCLALSRDLQE

SEQ ID NO: 105 - DNA, 6010 bp, Homo sapiens; identical to SEQ ID NO: 57

SEQ ID NO: 106 - protein, 1937 aa, Homo sapiens [sequence omitted]

SEQ ID NO: 107 - DNA, 1279 bp, Homo sapiens
ccctgtcttgcgttcctgtgttttctaatgcacgcccgaggtcaaagagactttgatttggcagatgcccttgatgaccctgaacccaccaagaagccaaactcaggtcttgttgccttcgttccccggtactactgaatcgtccagtttaagagggataaagtggcgtcgcacaggagcgaggatggagagcggcgactaggcggctatggagaggtacagcgtccagttgcgcccagccacactgcaggacgccgcccccgccacactacacctgataccctgcggcccaccacggtgtggcgcttcatcacgcctgccatccgccagggccccgagggactcttaagtgtagtttcggggccgcagtctacggggcgacgaggtggcagtgccgtccggcctcgtgggatacgtgatggtgactgaacaggaggaggtgtcgatggggaagccagacccctggcggggttccgggagtgacaaccaagaagaggaacctctggagcgggactttgaccgcttcctcggaaccactaccagcttcagccgcttcaccctgtagggcatggggcttcaccctgtggggcaccctgtggggcttccttggcccggaagccaaactgcgtggggccttaacttggcccagcctcgcggcaacgattcacgcgcaggtgcccaaggacacagaaccagagcttgaaattcaaagccgcgaaccctttacagcagtaaaccagctccttactttgtagccactggttccatcaccccagtaaaggagttcttcacagcacacattcacaaaagataaagtggtgaattttatattcttatatacatatgtccaaccatctatatgtttttaagaaggcaaaaaagacctcccagatgcatatattacaggacggggtgtgtgaggagactcacttgggggtggcagtcaacaaaatttaaataaagacacgagattttattatttttctgtctacagctcctaggatagtgtgtgacatgtagtaggttctcagtatacttctctggtacttaaattaatgaaatgtgtaaacatgcctctgggttcagaaaaacaaactcaaccacttaaaaaaaaaaaaaggaaaaaagtgttggttctcctgtaaagtaataaacctacatgcaaaaataaggatgcagggggaggccgagagcattaaatttgcctctataatatcatatcaacacattttaatctctcaaccagggctaataattcactcactgtctccaggggact

SEQ ID NO: 108 - DNA, 225 bp, Homo sapiens
  misc_feature (106)..(110): n is a, c, g, or t
  misc_feature (205)..(206): n is a, c, g, or t
tcttacggcaggcagcagtagcgggagaaggtggaagatccttcaatgtgctggaaaatcaccaacctagcaccctgtgttgttcaagagtacaaaaaaaaaaaannnnnctcgagggggggcccggtacccaattcgccctatagtgagtcgtattacaattcactggccgtcgttttacaacgtcgtgactgggaaaaccctnngttaccaacttattgcctt

SEQ ID NO: 109 - DNA, 265 bp, Homo sapiens
tctggaaaaaacacgctttattgggtagacaaataggcctgatgggaaggcctgagtcacagtgcactggggagtgaaaaagtaggcaaagtgcttgaagcttcccctttgcccccaccttaacctcctggggagcagctctggacactcagtacccagacctgggctcagcaaggcctggggtgactgtgcccctcactcctgctgcctgatctgggcagcccacccttcactggtaagacagaattctcaagggataggcgca

SEQ ID NO: 110 - DNA, 252 bp, Homo sapiens
ttttttttttttttaaaagcttcaagatgcttttatgtcaagggtgtggggttgccctgcttggcctgcagtgctttggggccccatgtggtggaggggtgggcaccatggtacccaccaccctgctgcctgggcagaagtgcaacatggcacacgatgcctgggggatcactccccccagggactcatggtcagtgtccactcacaaggcctgcttccctcatgacatctggccagtgacacccacagggg

SEQ ID NO: 111 - DNA, 251 bp, Homo sapiens
taatgttggccaggctggtctcaaactcctggcagtaagggatcttcccacctcagcctcccaaagtgctgggattacaggtgtgagccaccacacccggcctcagggcaattttgcataatagaaattcaagaaagactttaggaaatcagtacccccttctatgatgctgagaagtcaagatattagcttgatataaaagctagatattagcttgatataaaagactcagttctaatcaattagacatt

SEQ ID NO: 112 - DNA, 498 bp, Homo sapiens
  misc_feature (492)..(492): n is a, c, g, or t
ggctgctcctcaactcctggtctcaagtgattctcctgcctaggcctcccaaagagctgggattacaggcgtgagtgcagcacctgaccacataagggttttatggggagtaaagagttaaggcattaggctggactgtaaatatttgatttctcttagtgcctctggtttaatattggtgacagggtctgcacatcagcgtatgtggcaggctaagtcttttccccagttctcctattcctcttctatctgctcaactctttgcctctatgacttatttatttccttttaaatctgcttggttctttggacttaacggaggaccttatgtagggggagaaacacgtgtattatgggaacaactgaaaggtcagcctgaagacttttgccctgttgctttctgagagtgctggatatgagtccctgtctctgaaacttctaaaaatatgcacccttaaccagctttccacggaggggataagcccttggtcnatacaa

SEQ ID NO: 113 - DNA, 562 bp, Homo sapiens
  misc_feature (5)..(6): n is a, c, g, or t
  misc_feature (68)..(68): n is a, c, g, or t
  misc_feature (70)..(70): n is a, c, g, or t
  misc_feature (499)..(499): n is a, c, g, or t
  misc_feature (504)..(504): n is a, c, g, or t
  misc_feature (521)..(521): n is a, c, g, or t
gttanngatttatttatttatttgagatggagtcttgctctgttgcccaggccagagcgcagtagcgntncttcggctcactgtaacctccacctcctgtgatctcctgacggtgaactcctgactttgtgatccacccgcctcggcctcctaaagtggtgggattacaagggagagccaccgcgcccggtctttttattttgttttttaaatgtttagtagagatgcagtctcgctatgttgtctaggctggtcctgaactcctgagctcaagctatcttcctccctcagccttccaaagtgttgggattacaggggtgagccaccgtgctcagctgctaaagacttttaaatcataaggaaaaggataactgcaggaacatcatcaggaactcagacgcctgggcaaaggtaaaccacactggtttcttatgacagaaaccctccttgattcccttcaccaccaccaaattctcccctttgcccagcagcctagggngaggnaataggggactgctttntcactacccatgaagagagggactttggatccctgatattt

SEQ ID NO: 114 - DNA, 112 bp, Homo sapiens
ttaagaaataagaaatacatatatattgaaaaagtgataaatgtaggtatcctgagattctcaactataaaaagaacagtaatagcaatttgaataatacacataaaatcct

SEQ ID NO: 115 - DNA, 405 bp, Homo sapiens
  misc_feature (4)..(4): n is a, c, g, or t
gcgnccgcactttgggaggcagggtaggcagatcacttgaggccaggagttggagaccagcctggccaagatggcgaaacccaatctctattaaaaatacaaaaatttgccaggcatggtggcacacacctgtaatcccagctacttgggaggctgaggcaggagaatcactgggaacccgggagcagaggctgcagtaaactgagatcatgccactgcactccagcctgggtagagcaagagactctgtcttaaataaataaataaataaaatgtcaaattttataaaaatccagttataaactactaaatggtttggatttgaaaatacaagcaaggcataataattcattaagctggaggtcagaaatcaagactagaaatttacatttttaagacatgttt

SEQ ID NO: 116 - DNA, 538 bp, Homo sapiens
  misc_feature (374)..(374): n is a, c, g, or t
  misc_feature (381)..(381): n is a, c, g, or t
  misc_feature (435)..(435): n is a, c, g, or t
  misc_feature (442)..(442): n is a, c, g, or t
  misc_feature (473)..(473): n is a, c, g, or t
  misc_feature (508)..(508): n is a, c, g, or t
  misc_feature (533)..(533): n is a, c, g, or t
ttttttttttgctagtcacaaagcccaactttttattgaagtataacatacacacagaaaagtgcccagatcaaaagtgtacagctccaagaatgttcacaaacggaaagcacccaggtaaccgggcaaccagatcaagaaacagaacaccccaggaagcaccacctcatgcccccttctggttactgtcttcttagggactgatctctacttggcaaccgcatgggatggaattttggctggggttttaaactttatataaatgggaatcctatgggtgcatttttgccttatctcgttcaacactaggggttgggtgaatacacttccaaggttggggggtgggagtttgcaggcttcatttccccatttgncagtctnggggatttcccttcgtgtggaaatattacccctaattgtggctttattcccggnccaaacnggggggctttggggggtgtttttcccgtttncaggggtttttttttggggggagtttttttttgtngaaggttttagggggcttttttttntgggg

SEQ ID NO: 117 - DNA, 535 bp, Homo sapiens
  misc_feature (8)..(8): n is a, c, g, or t
  misc_feature (322)..(322): n is a, c, g, or t
  misc_feature (376)..(376): n is a, c, g, or t
  misc_feature (407)..(407): n is a, c, g, or t
  misc_feature (418)..(418): n is a, c, g, or t
  misc_feature (426)..(426): n is a, c, g, or t
  misc_feature (436)..(436): n is a, c, g, or t
  misc_feature (469)..(469): n is a, c, g, or t
  misc_feature (477)..(477): n is a, c, g, or t
  misc_feature (490)..(490): n is a, c, g, or t
  misc_feature (516)..(516): n is a, c, g, or t
  misc_feature (526)..(526): n is a, c, g, or t
cttggtantctcaagtcctccctatgtttcccaggctggtctcaaactcctgggctcaagcaatcctcctgccttggctctcaaagtgctgggatcacaggcatgagcactgttatgtgtttttaatgtgttcccttctattacccctccctctctacctcccggggaagagaaaaagtagagaaggaaagttgacaattcccttgttccctcaaggagtaacagctcaccctgcaggcatacagcagggaactctcagaccaagggaggacgtaggaagggagtgggttttgggggatgccaccagcaccagggagagctntgggtggctagggcaggaggtggaataatttcatttcacaggctttccagagtnttaagggtagaaagagcccagggagattttnatgagggtttncagagatnggagaaactnaggcaaaatggggttgtttactttgctgaaagncccagatnggggaggaaattnatggggggcccccctcttccttcaangggccccatntggcccctt

SEQ ID NO: 118 - DNA, 477 bp, Homo sapiens
taagaaactgaagatgaaaacacaacaatctttttatttatgtaaatcagattaacactggacaataaaccaatttctacccattaccataacagcttgtttataaagaacagaaaaattcagataggattctatctagggtcaagaggttttttaaccacccattcacagaggtatagattcacagataaataatcccaaactacttgctcgccatatttacacattcccattaaattaagcataaataaatatatacaaacttaacatgaataccctccagagctcttctcgtgaagagtcaatagattgatatttcttgattgtgtggcaaaaacaatgttagagaattagagaccaactcaaaggtggagtcgattttggcatttaaagaaggatagtgttcattccgttaaaaaaaaattgatacttttttttttaagccagtaatttcacatacatcgtcaaaggtggggg

SEQ ID NO: 119 - DNA, 332 bp, Homo sapiens
ttttaatcagaaatatctgcgcacattgacaaatgtccaccggatgggaagaagaatgtggggtgtaaaattcccatttttgagacccacttgcttagaatgtattaaagacctataattgaaaataccttggcaaaatctcccaaaattgtctctcaaaataacagtatatacagtgtaacatacacaacatcctgttatactaatgaaaaaatctaagaaaaactctataggatgatatttagatattacagtcactatattaactattaggataatgtgccactaattcccaatcgtcactgctttcatgtagtgcttgctccatattg

SEQ ID NO: 120 - DNA, 369 bp, Homo sapiens
cctgaccgtactcctcaaaatccagattgtttgtgcatacatttaaaaaaaaaatcaatggaaatttccacctttgttcgaacacataaagtatgccatgagcaatataacatcacaaacgtactgtgacaaaccattaataaagaaggattactaagccaggtgtggtggtgcatgcctgtagcccagctatgcaggaggctgaggcaggaggatcacttgagcccgggagtttgagtccaccctgggtaacacaccaaggactccatctctaaaaaattaaaattaaaaggattactgaaagatctcatttctaaaaaaagaaaaaagaaaaagatcactggaagtccagacatgatatttttaatt

SEQ ID NO: 121 - DNA, 295 bp, Homo sapiens
  misc_feature (84)..(84): n is a, c, g, or t
  misc_feature (201)..(201): n is a, c, g, or t
  misc_feature (282)..(282): n is a, c, g, or t
  misc_feature (288)..(288): n is a, c, g, or t
ttttttttttttttttttttttttctgagatggttctcgctacgttgcctaggctgtagcgcagaagctatacacaggcatganggcagcacactacagtctccaattcctgggctcaagtggtccttctgcttcacctcctgagtagctgggactacagggacgtgccaccccacctggcatgatacctatttcacagantctgttactatagaaaaacagctctcctactcacttttttcttgtaaaattgtataacattattaggcaaaactgggagantacaanttttaaa

SEQ ID NO: 122 - DNA, 224 bp, Homo sapiens
ttttaggtctgcagagcatttattccgtcccagtggggaggggcagggatccaggtggccggaggtacagggcctacgtgtaccacatgaagccgtggctggcatggagagcctcctctgtggtgcgcagccgctacagctccccgatcaaggggggcacacagcgcgtgtgtgtggaacacagactcccccaccttccagtcgggcacgtccttcatgatgat

SEQ ID NO: 123 - DNA, 150 bp, Homo sapiens
tttcacacttcatcttttattttttcttacaaaaggccttcatatcatcgtttgtcttacaaaaaccaaagtccttgtctctgagtttgaaaaacatcttcccagaataaatgggaaaggatctcttataaatatatatatattttaaaa

SEQ ID NO: 124 - DNA, 398 bp, Homo sapiens
  misc_feature (6)..(6): n is a, c, g, or t
  misc_feature (12)..(12): n is a, c, g, or t
  misc_feature (15)..(15): n is a, c, g, or t
  misc_feature (18)..(18): n is a, c, g, or t
  misc_feature (36)..(36): n is a, c, g, or t
  misc_feature (39)..(39): n is a, c, g, or t
  misc_feature (42)..(42): n is a, c, g, or t
  misc_feature (45)..(45): n is a, c, g, or t
  misc_feature (57)..(57): n is a, c, g, or t
  misc_feature (78)..(80): n is a, c, g, or t
  misc_feature (83)..(83): n is a, c, g, or t
  misc_feature (86)..(86): n is a, c, g, or t
  misc_feature (89)..(89): n is a, c, g, or t
  misc_feature (221)..(221): n is a, c, g, or t
  misc_feature (248)..(248): n is a, c, g, or t
  misc_feature (251)..(251): n is a, c, g, or t
  misc_feature (263)..(263): n is a, c, g, or t
  misc_feature (314)..(314): n is a, c, g, or t
  misc_feature (317)..(317): n is a, c, g, or t
  misc_feature (335)..(335): n is a, c, g, or t
  misc_feature (344)..(344): n is a, c, g, or t
  misc_feature (378)..(378): n is a, c, g, or t
atggtncayytnacnccngtggagaagtcygcygtnacngcnctntggggyaaggtnaaygtggatgaagggatctgnnnacnccngangcagttatgggcaaccctaaggtgaaggctcatggcaagaaagtgctcggtgcctttagtgatggcctggctcacctggacaacctcaagggcacctttgccacactgagtgagctgcactgtgacaagctncaygtggatcctgagaacttcaggctnctnggcaacgtgytngtctgygtgctggcccatcactttggcaaagaattcaccccaccagtgcangcngcctatcagaaagtggtngctggtgtngctaatgccctggcccacaagtatcactaagctngcyttyttgytgtccaattt

SEQ ID NO: 125 - protein, 147 aa, Homo sapiens
  misc_feature (4)..(4): Xaa can be any naturally occurring amino acid
  misc_feature (24)..(24): Xaa can be any naturally occurring amino acid
  misc_feature (31)..(31): Xaa can be any naturally occurring amino acid
  misc_feature (43)..(44): Xaa can be any naturally occurring amino acid
  misc_feature (50)..(50): Xaa can be any naturally occurring amino acid
  misc_feature (53)..(53): Xaa can be any naturally occurring amino acid
  misc_feature (111)..(111): Xaa can be any naturally occurring amino acid
  misc_feature (128)..(128): Xaa can be any naturally occurring amino acid
MVHXTPVEKSAVTALWGKVNVDEXGGEALGXLLVVYPWTQRFXXSFGDLXTPXAVMGNPKVKAHGKKVLGAFSDGLAHLDNLKGTFATLSELHCDKLHVDPENFRLLGNVXVCVLAHHFGKEFTPPVXAAYQKVVAGVANALAHKYH

SEQ ID NO: 126 - DNA, 3464 bp, Homo sapiens; identical to SEQ ID NO: 47

SEQ ID NO: 127 - protein, 526 aa, Homo sapiens; identical to SEQ ID NO: 48

SEQ ID NO: 128 - DNA, 101 bp, Homo sapiens
gatctcagcaatttgaacactaacctctcccctcctggctcaagaattactccgaagtcagtctgcagaaaataaatatttagtatgacatgacacttaaa

SEQ ID NO: 129 - DNA, 374 bp, Homo sapiens
gagaggtctgctactttattttgataatgcagggatattatttatctttgcagaatcaggtgactcccaacgttcccggaatcttctagtggtctgtgtcaggggtctgggctggctggggttcagtgatgtctactggaggcagcttccatgccttctggggtcctgagtctccatggcttgtggggtctgggtcccccctggattagtggatggccagagtggcatagacactgggctcagctggagaggccccttcctgggatggaggaggctcagttgccttctgtctgaagggtaaaagctgtgcagctgggcgtaggtcacatcctggggggcttcagatgcagcagcctcagtgtccatctgtctgt

SEQ ID NO: 130 - DNA, 468 bp, Homo sapiens
tcctctgtccacacaggtcagcccaaggccaccccctcggtcactctgttcctgccgtcctctgaggagctccaagccaacaaggccacactggtgtgtctcatgaatgacttctatctgggaatcttgacggtgacctggaaggcagatggtacccccatcacccagggcgtggagatgaccacgccctccaaacagagcaacagcaagtacatggccagcagctacctgagcctgacgcccgagcagtggaggtcccgcagaagctacagctgccaggtcatgcacgaagggagcactgcagagaagacggtggcccctgcagaatgttcataggttcccagcccccagcccacccacaggaggcctggagctgcaggatcccaggggaggggtctctctccccatcccaagtcatccagcccttctccctgcactcatgaaaccccaataaatatcctcattgac

SEQ ID NO: 131 - protein, 144 aa, Homo sapiens
FLLQRGSWTGPGCWPRGFQSKHNSVKHVFGSGTQLTVLGQPKATPSVTLFLPSSEELQANKATLVCLMNDFYLGILTVTWKADGTPITQGVEMTTPSKQSNSKYMASSYLSLTPEQWRSRRSYSCQVMHEGSTAEKTVAPAECS

SEQ ID NO: 132 - DNA, 81940 bp, Homo sapiens
attagaggctcaccgattcatgtcggagatggtcagaaaaaccaactctccataggacgtcgtttcagaagcaaccttgggcttagtcccaccctttttaggcactcttgagaaatcagagtgcctagaaagatgacaactcaagcaccgacgtttacgcagccgttacaaagcgttgtggtactggagggtagtaccgcaacctttgaggctcacattagtggttttccagttcctgaggtgagctggtttagggatggccaggtgatttccacttccactctgcccggcgtgcagatctcctttagcgatggccgcgctaaactgacgatccccgccgtgactaaagccaacagtggacgatattccctgaaagccaccaatggatctggacaagcgactagtactgctgagcttctcgtgaaagctgagacagcaccacccaacttcgttcaacgactgcagagcatgaccgtgagacaaggaagccaagtgagactccaagtgagagtgactggaatccctaaccctgtggtgaagttctaccgggatggagccgaaatccagagctcccttgatttccaaatttcacaagaaggcgacctctacagcttactgattgcagaagcataccctgaggactcagggacctattcagtaaatgccaccaatagcgttggaagagctacttcgactgctgaattactggttcaaggtgaagaagaagtacctgctaaaaagacaaagacaattgtttcgactgctcagatctcagaatcaagacaaacccgaattgaaaagaagattgaagcccactttgatgccagatcaattgcaacagttgagatggtcatagatggtgccgctgggcaacagctgccacataaaacacctcccaggattcctccgaagccaaagtcaagatccccaacaccaccgtctattgctgccaaagcacagctggctcggcagcagtccccatcgcccataagacactccccttccccggtcagacacgtgcgggcaccgaccccatctccggtcaggtccgtgtctccagcagcaagaatctccacatcccccatcaggtctgttaggtctccattgctcatgcgtaagactcaggcatccaccgtggccacaggtcctgaagtgcctcccccttggaagcaagagggctacgtggcctcctcatctgaggctgagatgagagagacaacgctgacaacctctactcagatcaggacagaagagagatgggaagggagatacggtgtccaggagcaagtgaccatcagtggtgctgcgggtgctgccgccagtgtgtcggccagtgctagctacgcagcagaggctgttgccactggtgctaaagaggtgaaacaagatgctgacaaaagtgcagctgttgcgactgttgttgctgccgttgatatggccagagtgagagaaccagtgatcagcgctgtagagcagactgctcagaggacaaccacgactgctgtgcacatccaacctgctcaagaacaggtaagaaaggaagcggagaagactgctgtaactaaggtagtagtggccgccgataaagccaaggaacaagaattaaaatcaagaaccaaagaaataattaccacaaagcaagagcagatgcacgtaactcatgagcagataagaaaagaaactgaaaaaacatttgtaccaaaggtagtaatttccgcagctaaagccaaagaacaagaaactagaatttctgaagaaattactaagaaacagaaacaagtaactcaagaagcaataatgaaggaaactaggaaaacagttgtacctaaagtcatagttgccacacccaaagtcaaagaacaagatttagtatcaagaggtagagaaggcattactaccaaaagagaacaagtgcaaataactcaggagaagatgagaaaggaagccgagaaaactgccttgtctacaatagcagttgctactgctaaagccaaagaacaagaaacaatactgagaactagagaaactatggctactagacaagaacaaatccaagttacccatggaaaggtggacgttggaaaaaaggctgaagctgtagcaacagttgttgctgcagtagaccaggcccgagtcagagagcccagagagcctgggcatcttgaagaatcctatgctcagcagaccactttggagtacggatataaggaacgcatttccgccgcaaaggtagctgagcctccccaacgtccagcctcagaaccccacgttgtccctaaagcagtcaagcctagagtaatccaggctccttctgagactcatatcaaaactactgatcaaaagggaatgcacatatcatcacagatcaagaaaactacagatctaacaacggaaagattagtccatgtggataaacgcccccgcacagctagccctcactttactgtttcaaaaatttctgttcctaagacagaacatggatatgaggcatcaatagccggtagtgctattgccacattacaaaaagagttgtcagccacatcttctgctcagaagatcaccaaatcggtgaaggctcctactgtgaagcccagtgagactagagtaagggcagagcccacacccttgccacagttccccttcgctgacacaccagatacttacaagagtgaagctggcgttgaggtgaaaaaggaagtaggggtgagcatcactggcaccaccgtccgtgaagagcgctttgaagtactgcacggacgcgaagccaaggtaacagaaacagcaagagtaccagcacctgttgaaattcctgttactccaccaactttggtctcgggcttaaaaaatgtgactgtcatagaaggtgaatctgtcaccttggagtgccacatctctggatacccatccccgacagtgacatggtacagggaagactaccaaatcgaaagttccattgacttccagataaccttccagagtggaattgctcgtcttatgattcgcgaagcatttgcggaagacagcgggcgatttacttgcagtgctgtaaatgaggctggaaccgtcagcacatcctgctatctggctgtgcaggtgtcagaagaatttgaaaaggaaaccacagccgtgactgagaaatttactacagaagagaaacgctttgttgagtcaagagatgtggttatgactgatactagcctcacagaggaacaagcagggcctggagaacctgccgcgccttactttattacaaaaccagtggtccagaaactggtggaaggtgggagcgtggtgtttggatgccaagttggcggcaacccaaagccccatgtatactggaaaaaatctggtgttcctctaaccactggatacagatacaaagtgagttacaacaaacaaaccggtgaatgcaagctggtgatttctatgacttttgctgatgatgctggagaatacactattgttgttcgcaataagcatggagaaacttctgcatctgcttccttgcttgaagaagctgattatgagttactgatgaagtcccagcaagaaatgctttatcagacacaagtgactgcatttgttcaagaacctgaagttggagaaacagcacctggatttgtatactctgagtatgaaaaagagtatgaaaaagaacaagccttaattaggaagaaaatggccaaagatactgtagtggtcagaacttatgtagaagatcaggaattccatatttcttcctttgaagagagacttattaaagaaattgaatatagaataataaagactacattagaagaacttcttgaagaagatggagaagaaaagatggcagttgacatttctgaatctgaagctgttgaatcaggatttgatttaagaatcaagaattatagaattcttgaggggatgggtgtcacttttcattgcaagatgtctggatatccattaccaaagattgcttggtacaaagatggcaagcgcatcaaacatggagaaagataccaaatggactttctacaagatggcagagctagtctgcgtatacctgttgttcttccagaagatgaaggaatctacactgcatttgccagcaatattaaaggaaatgcaatttgctcagggaaattgtatgtggagcctgctgcaccacttggagctccgacttacattcccacactagagccagtgagcagaatcagatctctctctccacgttcagtgagcaggtctcctatacgcatgtctcctgcacggatgtcacctgcaaggatgtctcctgcacggatgtcccctgcaagaatgtcccctggacgtaggctggaggagacagatgagtcacaacttgagagactatataaaccagtctttgtgttaaaacctgtttctttcaaatgtttagaaggggcaaactgcagatttgacttaaaggttgttggtagacctatgccagagacgttctggtttcatgatggccagcaaattgtcaatgactatacccataaagtagtcattaaagaagatggtactcaatcactaattattgtccctgccacacccagtgattctggggaatggactgtggttgcccaaaacagggcaggcagatcttcaatttcagtgattttaactgtggaagctgtggaacatcaggtaaaaccgatgtttgtagaaaaactgaaaaatgtcaatataaaggaaggttcccgacttgaaatgaaagtcagagctacgggtaaccccaaccctgacattgtatggttgaaaaacagtgacatcattgtgcctcataaatatcccaaaatcagaattgaaggaaccaagggagaagctgcccttaaaatcgattccactgtcagccaagattctgcctggtatactgcgactgctattaataaagctggcagagacactacaagatgcaaagtaaatgttgaagttgagtttgcagagcctgagccagagagaaagttaatcatcccacgggggacatatagagcaaaggagattgcagccccagaactggagcccctccatttgcgatatggccaagagcaatgggaagaaggtgatctctatgacaaagagaaacaacagaaaccatttttcaagaaaaaactcacttccttaagacttaagcgctttgggcctgcccactttgaatgcaggctaacacccattagtgacccaacgatggtggtggagtggctccatgatggaaagccacttgaagcagccaacaggctccgtatgatcaatgaatttgggtactgcagccttgattatggcgttgcatattctagagacagtggtatcattacttgcagagccactaacaaatatggaacagatcacacatctgctacccttattgttaaagatgagaaaagtcttgtggaagaatcccaattgcctgaggggaggaaaggcttacagagaattgaagaattagagagaatggctcatgaaggtgcacttacaggtgtaacaacagatcagaaagaaaagcaaaagccagacattgtcttgtacccagagccagttagagtacttgaaggggagactgcaaggttccgctgcagggtaacaggctaccctcagcccaaagtcaactggtacctcaatggacagctcatccgcaaaagcaaaaggttcagagttcgctatgatggtatccattacctggacatcgtggactgcaaatcatatgacacaggtgaagtgaaggtcaccgcggaaaatcctgaaggtgtgatagagcataaagtgaagcttgagattcaacagagggaagattttaggtctgtccttaggagagctcctgaaccaaggcctgagtttcacgtacatgaaccaggaaagcttcagtttgaagtacaaaaagtggatagacctgttgacaccactgaaaccaaagaagttgtgaagttgaaaagggctgaaagaattacccatgaaaaagtgcctgaagagtcggaagagctgcgcagtaaattcaagcgcagaacagaagagggctattatgaagccattaccgctgtggagctcaagtctcgaaagaaggatgaatcctatgaggaactcctcaggaagacaaaagatgaacttctccactggaccaaagagttaactgaagaggaaaagaaagctcttgccgaagaaggcaaaatcacgattccaacttttaaacctgacaagattgaactaagtcctagtatggaggctccaaaaatcttcgaaagaatccagagccaaacagtgggccaaggatctgatgcacacttccgggtcagagtcgtggggaaaccagaccccgaatgtgaatggtacaaaaatggtgtcaaaattgaacggtctgaccggatctactggtactggcccgaagacaatgtttgtgaattggtcataagagatgtgactgctgaggactctgccagcatcatggtaaaagccatcaacatagctggagaaacctccagtcacgcattcttacttgtccaagccaagcaattgatcactttcacacaggaattacaagatgttgttgctaaggaaaaagacactatggcaacctttgaatgtgaaacttcagaaccatttgtcaaagtgaaatggtataaagatggtatggaggttcatgagggagataaatacaggatgcactctgacagaaaggttcacttcctctccatactgaccattgatacgtctgatgctgaagattacagctgtgtacttgtggaagatgaaaatgtcaaaacgactgctaaacttattgttgaaggtgcagttgttgagtttgtgaaagaacttcaggacatagaagttccagaatcatattcaggagaattagagtgcattgtatccccagaaaatatagaaggaaaatggtatcataatgatgtggagcttaaatccaatggcaaatatacaattacatctcgtcgtggacgtcagaacctcacggtcaaggatgtaaccaaggaggaccagggagaatacagctttgtcatcgacgggaaaaagacaacctgtaaattaaagatgaaaccccgccccattgctatcctacaaggacttagtgaccaaaaagtctgtgagggtgacattgttcagcttgaagttaaagtctccttggaaagtgtggaaggcgtctggatgaaagacggccaagaagtgcagcccagtgacagggttcacattgtgatagacaaacaatctcatatgctgctcattgaagacatgactaaggaagatgctggaaattactctttcaccattccagcccttggcctctccaccagtgggcgtgtctctgtctatagtgtggacgtgataacacctctaaaagatgttaatgtgattgaaggcaccaaggctgtgcttgaatgtaaggtgtcagtccctgatgtgacttctgttaagtggtacttaaatgatgaacaaatcaagcctgatgaccgtgtacaggccattgtgaaaggtactaaacagcgactagtcattaaccgaactcatgcttcagacgaaggaccttataagctgatagttggcagagttgaaaccaactgtaatctctctgtagaaaaaattaaaattatcagaggtcttcgtgaccttacctgtacagaaactcaaaatgtggtgtttgaggttgagctgtcccactctggaattgatgtcctgtggaattttaaggacaaggaaatcaagcccagttctaaatataaaattgaagcacatggaaaaatatataaattgacagttctaaatatgatgaaagatgatgaaggaaaatacacattttacgcgggagaaaatatgacatctggaaaacttactgtggcaggtggggccatctccaagccactcacagatcagaccgtagctgaatcccaggaagctgtgtttgaatgtgaagttgccaacccagattccaaaggcgaatggttgagggatggcaaacacctaccactgactaacaacatcagaagtgagtctgatggccacaaaaggagacttatcattgctgccaccaaattagatgacattggagaatatacctacaaggtggccacctccaaaacatctgccaaactcaaagttgaagctgtcaaaattaagaagactctgaagaacctcacagtgacagaaacacaggatgctgttttcactgtcgagcttacacaccctaatgtcaaaggtgtccagtggatcaaaaatggagttgtgctggaatccaatgaaaagtatgctatctctgtcaaaggaacaatttactctctgaggattaaaaactgtgccatcgtggatgagtctgtttatggcttcaggcttggaaggcttggagccagtgccagactgcacgtggagactgtcaagatcattaaaaagccaaaggatgtgacagccttggaaaatgccactgttgcctttgaagttagtgtttcccatgacactgttccagtaaaatggttccataagagtgtggaaattaagccaagtgacaaacacagactggtctcagaaaggaaagtccacaagctgatgctgcagaacatctccccctcagatgctggggaatacacagctgtggtcgggcaattggaatgcaaagcaaaactgtttgtggagacattacatattacaaaaaccatgaaaaatatcgaggtgcctgagaccaaaactgcctcttttgagtgtgaggtgtcccacttcaatgtcccttccatgtggctgaagaatggtgtggaaattgagatgagtgaaaagttcaagatagttgtgcagggaaaactccatcagctgatcatcatgaacaccagcacagaggactcggcagaatacacatttgtctgtggcaatgaccaagtcagtgccaccctgacagtcactccaatcatgattacttccatgctgaaagacatcaacgctgaagaaaaagacactattacttttgaggtgacagtgaactatgaaggcatctcttacaaatggttaaagaatggtgtggaaatcaaatcaactgacaagtgccagatgagaaccaaaaagctcacacactcactgaacatcaggaatgttcactttggggatgctgctgactacacctttgtggctggaaaagcaacatcaacagccacactttatgtggaagctcgtcatatagaatttaggaaacacattaaggacattaaggtactggagaagaagcgagccatgtttgaatgtgaagtttctgaacctgacatcactgtacagtggatgaaagatgaccaggaactgcagatcacagacagaataaagattcagaaggagaaatatgtccaccgccttctgatcccatccacccggatgtctgatgctgggaagtacacagtggtggcaggaggcaacgtgtcaactgcaaaactctttgtagaaggcagagatgttcgcatccgaagtattaaaaaggaggttcaggtcattgagaaacagcgtgctgttgttgaatttgaggtcaatgaagacgatgttgatgcccactggtataaagatggcattgaaatcaatttccaagttcaagaacgacacaaatatgtagtggaaagaagaatccaccgaatgtttatctctgagaccagacagagcgatgcaggagaatacacctttgtggcaggaaggaacaggagttctgtcactctctatgtcaatgctcctgaaccgccccaagttctgcaggagctccagcctgtcactgtgcagtctggcaagcctgcccgcttctgtgccatgatatccggaagaccacagcccaaaatttcctggtacaaggaagagcagctgctttccactggcttcaagtgcaaatttcttcatgatgggcaagagtacacgcttttgctaattgaagccttcccagaggatgcggcagtctatacctgtgaagccaagaatgactatggtgttgccacaacatcagcttcactctcagtggaagttccagaagttgtgtctcctgatcaggaaatgcctgtttatccacctgccatcatcaccccgcttcaggacactgtcacttctgaagggcagccagcccgttttcaatgccgggtttctggaacagatctaaaagtgtcgtggtacagcaaagacaagaaaatcaagccatctcggttctttagaatgactcaatttgaagacacttatcaactggaaattgccgaagcttatccagaagatgaaggaacttacacgtttgttgctaataatgctgtaggccaagtatcaagcacagccaacctgagtctggaagctcctgaatcaattttgcatgagaggattgaacaagagattgagatggaaatgaaagagttttctagttcttttctgtctgccgaggaagaaggacttcatagcgccgaacttcaattatctaaaataaatgaaacacttgaacttttgtctgaatctccagtttacccaactaaatttgattccgaaaaggaaggcactggcccaattttcatcaaagaagtgtcaaatgctgatataagcatgggggatgtggctacactgtctgtaactgtcattggcatccccaaacctaaaattcagtggttctttaatggagtgctattaaccccttctgctgactacaaatttgtttttgacggtgatgatcatagcctgatcattctgttcaccaaattggaggatgagggagagtatacatgtatggccagtaatgactatggaaagacaatatgtagtgcctatctaaaaattaattccaaaggagagggtcacaaagacactgaaacagaatcagcagtggcaaaatctctggaaaagctgggaggtccttgtcctcctcacttccttaaggagttaaaaccaattcgctgtgctcaagggcttcctgccatctttgagtacacagtggttggagagcctgcccctactgttacatggttcaaagaaaacaagcagctttgcaccagtgtttattacactatcattcataaccctaatggctctggaactttcattgtcaatgaccctcagagggaagacagtggcctctatatctgtaaagcagagaatatgttgggtgagtccacctgtgcagcagagctgcttgtgcttctggaagacacagacatgactgataccccctgcaaagcaaagtccacaccagaggctcctgaggattttccacagacacccttaaagggtcccgcagttgaagcacttgactcggagcaggaaattgcaacgtttgtaaaagacaccattttgaaagctgctttaattacagaagaaaaccagcaactatcttatgagcatattgctaaagccaatgaattgagcagtcagcttcctttgggagctcaggaattgcaatccattttggagcaagacaagctcactcctgaaagcaccagggaatttctttgcatcaatggcagtattcactttcagcctctcaaggaaccatctcccaacctacagctgcagattgtacagtcccagaaaaccttctccaaagaaggtattctaatgcctgaagagcctgagacacaggcagttctatcagataccgagaaaatcttcccaagtgccatgtccatagaacaaattaattcattaacagttgagcctctgaaaactttattagctgaacctgaagggaattatccacagtcttcaatagaacctccaatgcattcttatctaacctctgtggctgaggaagtactttcactaaaagaaaagacagtatctgacaccaacagagagcaaagagtgactcttcaaaagcaagaggcacaaagtgcgctcatcttgagtcagagcttagctgagggacacgtggagagtctccagagtcctgatgtcatgatctctcaggtaaactatgagcccctagtcccttcagaacactcatgcacagaaggaggtaaaattttgatagaaagtgcaaatccactggaaaatgcagggcaagattctgcggtcagaattgaggaaggcaagtccttaagatttccactagcacttgaagaaaagcaggtactgctcaaagaagagcattctgacaacgtggtgatgcccccagaccaaatcattgagtctaaaagagagcccgtggcaataaagaaagtgcaggaggtacagggaagggaccttctttctaaggaaagcttgctttctggtattccagaagagcagagattaaacctgaaaattcaaatctgccgggctttgcaagcagccgtggccagcgagcagccaggtcttttctctgagtggctaagaaatattgaaaaggtggaggtcgaggctgtaaacatcacccaagagcccagacacatcatgtgcatgtaccttgttacttcggcaaagtctgtaacagaagaagtaaccatcattattgaagatgttgatcctcaaatggctaacctgaaaatggaacttagggatgctttgtgtgctattatatatgaggaaatagacatcctaacagctgagggtcctagaattcagcaaggagccaaaacaagtttgcaagaagaaatggattctttttcaggttcacagaaggttgaacccattactgaaccagaagttgaatctaaatatctgatctcaactgaagaggtcagttattttaacgtgcaaagtagggttaaatatttggatgccacacctgtcactaaaggggttgcttcagctgttgtctctgacgaaaaacaagatgagagtctgaaaccatcagaggaaaaagaggagtcttcctctgaaagtggtactgaggaggttgctacagtaaagatacaggaagctgagggtggcttaatcaaagaggatggccccatgatacatacacctttagtggacactgtttctgaggaaggtgatattgtacacctcacaacatccataacaaatgctaaagaggtgaattggtattttgagaataaactggtgccttcagatgaaaagttcaagtgtttacaagatcaaaatacatatacgctagtcatcgacaaagtaaataccgaagaccatcaaggagagtatgtctgtgaggccttgaatgacagcggaaaaacagcaacttcagccaaactcactgtagtaaaaagagctgccccagtgatcaagaggaaaatcgaacccctggaagtagcactgggccacctagccaaattcacctgtgagatccaaagtgctcccaatgtccggttccagtggtttaaagctggccgagaaatttatgagagtgacaagtgttctattcgatcttcaaagtatatctccagccttgaaatcctgagaacccaggtggttgactgcggcgagtatacatgcaaagcttccaatgagtatggcagtgtcagctgtacagccacactaactgtgacagtgcctggaggtgaaaagaaagttcgcaaattacttccggaacgtaaacctgaaccaaaggaagaagttgttctgaaaagcgttctaagaaaaagacctgaagaagaagaacctaaagtagaacctaaaaaactagaaaaagttaaaaaacctgcagtaccagaaccaccacctccaaaacctgttgaagaggttgaagtacctactgttacaaaaagggaaaggaagattcctgaaccaacaaaagtgcctgaaatcaagccagcaatacctctccctgcacctgaaccgaaaccaaagcccgaagcagaagtgaaaacaatcaaaccacctcctgtggaacctgaaccaacccccatcgctgccccagtaacagtgccagtggttggaaagaaagcagaagccaaagcacctaaggaagaggctgccaagccaaaaggtcctatcaaaggtgtacccaaaaagactccttcaccaatagaagccgaaaggagaaagttaaggccaggaagtggtggagagaaacctcctgatgaagccccgttcacctaccagctaaaggctgtgccactgaagtttgtgaaagaaatcaaagacatcatcttgacagaatcagagttcgttggctcttcagcaatctttgaatgtttggtctccccttccactgcaattacaacctggatgaaagacggtagcaatatccgtgagagtcccaagcacaggtttattgcagatggtaaagacagaaagctgcacatcattgatgttcaactttccgatgctggtgaatacacctgtgttttacgtttgggaaacaaagaaaagacctccacggctaaacttgttgtagaagaacttcctgtgcgttttgtaaaaacactggaagaggaagtcacagtggtcaaaggacagccattgtacttgagctgcgagttaaacaaagagcgtgacgtggtctggaggaaggatggcaagattgtggtggagaaacctggccgaattgtgccaggcgtcattggcttgatgcgggctctgaccatcaacgatgcagatgacacagatgctggaacatacacagttactgtggaaaacgccaacaacctggagtgttcatcttgcgtaaaagtagtagaagtcattagagattggctggtgaaacctatacgagaccagcatgtgaaacccaaggggacagctatttttgcctgtgatatagcaaaagatactccaaacattaagtggttcaaaggatatgatgaaatccctgcggaaccaaatgataagactgaaatactgagagatggaaatcatctgtacctcaaaattaagaatgctatgccagaagatattgctgagtatgcagtggaaattgaaggaaaaagataccctgcaaagctgacacttggagagcgtgaagttgaactgcttaaaccaatagaggacgttaccatttatgagaaagaaagtgcaagctttgatgcagaaatctcagaggcagacattcctggacaatggaaactgaaaggagaacttctaaggccctcacctacttgtgaaatcaaagcagaaggtggaaaacgcttcttaactttgcacaaagtcaaactggaccaagctggtgaagtcctctaccaggcccttaatgcaattacaactgccattttgacagtaaaagaaatcgaacttgactttgctgtgcccctgaaggatgtcactgttccagaaaggcgacaggctcgattcgaatgtgtcctcacccgagaggcaaatgttatatggtccaaaggacctgatataattaagtcatctgacaaatttgatatcatcgctgatggaaagaaacatattcttgttattaatgattctcaatttgatgatgaaggggtctatactgctgaggtggagggcaagaagacctcagctcggttgtttgtcacaggtataagactgaaattcatgtcacctcttgaagatcaaacagtaaaagaaggtgaaacagcaacttttgtttgtgaactttctcatgaaaaaatgcatgtagtctggttcaaaaatgatgccaaactccatacaagcagaacagtactcatctcttctgagggcaagactcacaaattggaaatgaaagaagtgacattggatgatatatctcagataaaagctcaagtcaaggagctgagctccacagcacagctgaaggtcttagaggccgatccctacttcactgtgaaattacatgacaaaactgcagtggagaaggatgagattactttgaagtgtgaagtgagcaaagatgtaccagtgaaatggttcaaagatggtgaagagattgtcccttcacccaaatattctatcaaggcagatggcctgcgccgcatcttaaaaatcaaaaaggcggaccttaaagataaaggcgaatatgtgtgtgactgtggcacagacaagaccaaggcaaatgttactgttgaggctcgactaatagaagtggaaaagcctctgtacggagtagaggtgtttgttggtgaaacagcccactttgaaattgaactttctgaacctgatgttcacggccagtggaagctgaaaggacagcctttgacagcttcccctgactgtgaaatcattgaggatggaaagaagcatattctgatccttcataactgtcagctgggtatgacaggagaggtttccttccaggctgctaatgccaaatctgcagccaatctgaaagtgaaagaattgcctcttatcttcatcacacctctcagtgatgttaaagtcttcgagaaagatgaggctaagtttgagtgtgaagtatccagggagcccaaaacattccgttggctaaaaggaacccaggaaatcacaggtgatgacagatttgagcttataaaggatggcactaagcattcaatggtgatcaagtcagctgcttttgaagatgaagcaaaatacatgtttgaagctgaagataagcacacaagtggcaaactgatcattgaaggaatccggctcaaattcctcacccctctcaaagatgtaactgccaaagagaaggaaagtgctgtatttactgtggagttatctcatgataacatccgagttaaatggttcaagaatgaccagcgcctacacaccaccaggtcggtctcaatgcaagacgaagggaaaactcattcgatcacattcaaagacctgtctattgatgacacctcccaaattagagtagaagctatggggatgagttcagaagctaaactcactgtgcttgagggagacccatattttacaggaaaacttcaagattatactggtgtagagaaagatgaagttattctacagtgtgaaattagcaaagcagatgcaccagtgaaatggtttaaggatgggaaggaaataaagccatccaaaaatgctgttattaagacagatggcaagaaacgcatgctaatcctaaagaaagccttgaaatcagatattggacagtacacctgtgactgtgggacagataagacctcaggaaaacttgacattgaggatcgggaaattaaactggtgcgacccctgcacagtgtggaggtgatggagactgagacagcacgctttgaaaccgaaatctctgaagatgatatccacgccaactggaaactcaagggagaggccctactccaaacacctgattgtgaaattaaggaagaaggcaaaatacactcccttgttttgcacaactgtcgcctggaccagacgggtggggtggatttccaagctgccaatgttaaatctagtgcccacctccgagttaagccacgagtaattggtcttctgaggcctttaaaggatgtcaccgtgactgcaggggaaacagccaccttcgactgcgagctctcctacgaagatatcccagtggaatggtatctcaaagggaagaaactagagcccagcgataaggtggtcccacgttcagaaggaaaagttcatacacttactctgagggatgtaaagttagaagatgctggggaagtccaactaacagcaaaagatttcaaaactcacgccaacctctttgtgaaagaacccccagttgaattcactaagcctcttgaggaccagacggtcgaagagggagccactgcagtgctggagtgtgaagtctccagagaaaatgctaaggtgaaatggttcaaaaatgggacagaaatcctcaaaagcaagaagtatgaaattgttgctgatggcagggtcagaaaacttgttatacatgactgtaccccagaggatattaaaacatacacttgtgatgctaaggattttaagacttcctgtaacctgaatgtcgtgcctcctcatgtggaattcttaagaccactcaccgaccttcaagttagagaaaaagaaatggctcgatttgagtgtgaactttcccgagaaaatgctaaggttaagtggtttaaagatggtgctgaaattaaaaagggcaaaaaatatgacatcatatccaagggagcagtgcgcattcttgtcatcaacaaatgtctactggatgatgaagctgaatattcctgtgaagtaaggacagcgagaacttctggcatgctgacagttctggaagaagaagctgtctttaccaaaaatcttgccaacattgaagttagtgaaacagacactataaaactggtttgtgaagtctccaaacctggcgcagaagtgatttggtataaaggggatgaggagatcattgaaacaggaagatatgaaatactgactgaaggacggaagagaatcctggtcattcagaacgctcaccttgaggatgctggcaactacaactgtcgactcccaagctctcgaaccgatggcaaagtcaaagtacatgaactggctgctgaatttatctcaaagcctcaaaaccttgaaatacttgaaggagaaaaggctgaatttgtctgctctatatcaaaagaaagctttccagtccagtggaagagggatgataagacacttgaatctggagataaatatgacgttattgctgatggtaaaaagagggtcctagttgtgaaagatgccacattacaagatatgggcacttacgttgtcatggtaggggccgccagagcagcagctcacttgacagtcattgaaaaactcaggatcgtagttcctcttaaggacacccgggtgaaggaacaacaggaagttgtcttcaactgtgaagtcaatactgaaggtgccaaagccaaatggttcagaaatgaagaagctatatttgatagttcaaaatacatcattctccaaaaagacctagtctacaccctcagaattagagatgcacacttagatgaccaagccaactataatgtgtctttgaccaatcacagaggtgaaaatgttaaaagtgcagccaatctaatagtagaagaggaagaccttaggattgttgagcctcttaaagatattgaaacaatggagaagaaatctgtcacattctggtgcaaggtgaatcgtctcaatgtaacactgaagtggaccaaaaatggtgaagaagtgccttttgacaaccgtgtctcatacagagttgataagtacaagcacatgttaaccattaaagactgtggcttcccagatgaaggtgaatacattgtcactgctggacaagataaatctgttgctgagcttctcatcatagaagccccgacagaatttgtggaacacttggaagatcagacagtcactgagttcgatgacgctgtcttctcctgccagctctccagagagaaagccaatgtaaaatggtacagaaatgggagagaaatcaaagaaggcaaaaaatacaaatttgaaaaagatggaagtatacacagactcattataaaagattgcaggctggatgatgagtgtgaatatgcttgcggggtagaagacaggaagtctcgtgctagactttttgtggaagaaattcctgttgagatcatcaggcctccacaagatattcttgaagcccctggtgctgatgttgtctttttagcagaactcaataaagataaggtggaagtccaatggctaagaaataacatggttgttgtccagggtgataaacaccagatgatgagtgaaggaaagatacatcgactacagatttgtgatattaagccccgtgaccagggtgaatacagatttattgccaaagacaaagaagccagagctaagcttgaactggcagctgcaccaaaaatcaagacagctgaccaagaccttgtggttgatgttggcaagcctctgacaatggtggtgccatatgatgcctaccccaaagcagaagctgaatggtttaaagaaaatgaacctttatctacaaaaaccattgatactacggctgaacaaacttctttcagaattttagaagccaagaaaggagacaaagggaggtataaaattgtgcttcagaacaaacatggaaaagcagaaggattcatcaatttaaaagttattgatgttcctgggccagtacgtaacttagaagtgacagaaacatttgatggtgaagtgagccttgcttgggaagaacctttaactgatggtggaagcaaaatcataggttacgttgttgaaagacgtgacattaagagaaagacctgggttctggccacagaccgtgcagagagttgtgagtttactgtcactggtctacagaaaggaggagttgagtacctattccgtgtgagtgcaagaaacagagttggcactggtgagccagtagaaactgacaatcctgtagaagcaaggagtaaatatgatgttccaggccctcctttgaatgtaaccatcactgatgtgaatcgatttggtgtctcactgacatgggaaccaccagagtatgatggaggtgctgagatcacaaactacgtcattgaattaagagacaagacttctatcaggtgggatactgccatgactgtgagagctgaagacctgtctgcaactgttactgatgtggtagaaggacaggagtacagtttccgagtgagagcccaaaatcgaattggagttggaaaaccaagtgcagccacacccttcgtcaaagttgctgatccaattgagagaccaagtcctcctgtaaacctaacttcctcagatcagactcagtcatcagttcagctcaaatgggaacctcctctgaaagatggaggaagcccaatattaggctatataattgagcgatgcgaagaaggaaaagataattggattcgttgcaatatgaaacttgtccctgaactgacttacaaggttaccggattggaaaaaggaaataaatatttatatagagtatctgcagaaaataaagctggtgtttcagatccatctgaaattcttggtcctctcaccgctgacgatgcatttgttgaaccaacaatggatttaagtgcatttaaagatggtctggaagttattgtcccaaatcctatcacgatcctggttccaagtacaggctatccaaggccaactgcaacctggtgttttggagataaagtactagaaacaggggaccgggtgaaaatgaagaccttgtctgcctatgccgaacttgtcatttctccaagtgaacgttcagacaagggcatttatacactgaaattagaaaaccgtgtgaaaacaatttctggggaaattgatgtcaatgtaattgctcgcccaagtgcacccaaagaattgaaatttggtgatataaccaaggactcagtacatttgacttgggaaccacctgatgatgatggaggaagtccgttaactggatacgttgttgaaaaacgagaagtcagccggaaaacatggactaaagttatggactttgtgactgatctagaattcacagttcctgatcttgttcaaggaaaagagtacttatttaaagtttgtgctcgtaacaaatgtggccctggagaacctgcatatgttgatgaacctgtaaatatgtcaactcctgcaacggtacctgacccaccagagaatgttaaatggagagatcgaacagccaatagcatcttcttaacatgggatccacctaaaaatgatggtggttcacgcatcaaaggatatatagttgaaagatgtccacgtggttctgataaatgggttgcctgtggagaacctgttgcagaaacaaaaatggaagtgacaggtcttgaggaaggcaaatggtatgcctaccgcgtgaagaccttaaacaggcagggtgctagcaaaccaagcagacccacagaggaaatccaggctgtggacacacaagaggccccagaaatcttcctcgatgtgaagctccttgctggtctcactgtaaaagctgggaccaagattgaacttcctgccaccgtaaccggaaaacctgaacctaaaataacttggacaaaggctgatatgattctgaagcaggacaaaagaattaccattgaaaatgtccctaagaaatccacagtgactattgttgatagtaagagaagtgacactggcacatatatcattgaggctgtgaatgtgtgtggccgggccactgctgtggtggaagtgaacgtcttagataaacccggaccaccagctgcctttgacatcacagatgtaaccaatgagtcatgtcttctaacatggaacccaccacgcgatgatggtggatctaagatcacaaactatgttgtggagagacgagcaactgatagtgaagtgtggcacaagctctcatccaccgtcaaggatacaaacttcaaggccaccaaattaatccccaataaagagtacatcttcagagttgctgcagaaaacatgtatggtgctggtgaaccagttcaggcctctccaataacagccaaatatcagtttgatccacctggtcctccaactcgcctagaaccttctgatatcactaaagacgcagtgactctcacatggtgtgagccagatgatgatggtggcagcccaatcacaggatactgggttgaaagactggatcctgatacagataaatgggttagatgcaataagatgccagtaaaggacacaacatacagagtgaaaggtctcactaataagaaaaaatacagattccgtgtgttggctgaaaatcttgctggacctggaaaaccaagcaaatcaactgaaccaatcttaataaaggatcccatagatcctccatggccccctggaaaaccaactgtaaaagatgtaggcaaaacatcagtaaggttgaattggacaaaaccagaacatgatggaggtgcaaagattgagtcttatgtcattgaaatgctgaagactggaacagatgagtgggtcagagtggcggaaggggttcccaccactcagcacttgctcccagggctcatggaaggacaggaatactcattccgagttagagctgtgaataaggctggggaaagtgaacccagtgaacccagtgaccctgtgctttgccgggagaagctatatcctccatcaccaccacgctggcttgaagttattaatatcacaaaaaatacagcagacctaaaatggacagttcctgagaaagatggagggtcccccatcaccaactacattgtggaaaagagagacgtcaggcgaaaaggctggcaaacagtggataccactgtcaaggacaccaagtgcacagtcaccccactgactgagggctctttatatgtgttccgagttgctgcagaaaatgctataggacaaagcgactacaccgaaattgaggactctgtgctggccaaagacacctttaccactcctggaccaccctacgccctggcagtggttgatgtgacaaaacgacatgttgacctaaagtgggagccacctaaaaatgatggtggaagaccaatacagagatatgtcattgagaagaaagaaaggttaggtacccgttgggtgaaagctggaaagactgcaggacctgactgtaacttcagagtaactgatgtcatcgaaggaacagaggtccagtttcaggttcgggctgaaaatgaagctggagttggccacccaagtgaacccacagaaatcctatccattgaagatccaacaagtcctccctcaccaccccttgacctacatgtgactgatgctgggagaaaacacattgccattgcttggaagcctccagagaaaaatggtggaagtcctatcataggataccatgttgaaatgtgtccagtaggcactgagaaatggatgagagttaattctcgcccaataaaggacttgaaattcaaggttgaagaaggtgttgttcctgacaaagaatatgtcctgagagtgagagcagtcaatgctattggtgtcagcgagccatctgaaatctctgaaaatgtggttgccaaagacccagactgcaagccaacaattgacctggagactcatgacattattgttattgaaggtgaaaagttaagcattcctgttcccttcagagctgtcccagttccaactgttagttggcataaagatggcaaagaagttaaagcaagtgatagattaacaatgaagaatgatcacatctctgcacaccttgaagttcccaagagtgtccgtgcagatgccggaatttataccattacactggagaataagctcggctcagcaacagcctcaatcaatgtcaaagtcataggcctacctggaccatgcaaagatattaaagcaagtgacattaccaagagttcttgtaagttaacttgggaacctccagaatttgatggtggaaccccaattcttcattatgtcctggagcgcagagaagctgggaggagaacatatataccagtcatgtctggtgagaacaaactgtcatggactgtgaaggatctcataccaaatggtgaatacttcttccgtgttaaagcagtcaacaaggttggtggaggagaatatattgaactgaaaaatccagtcattgctcaagatccaaagcaaccccctgatccacctgtagatgtagaggttcataatcctacagcggaggcaatgactattacatggaagccacctttgtatgatggagggagcaagataatgggctacatcatagagaagattgctaagggtgaagaaaggtggaagagatgcaatgaacacctggtaccaatcctgacctatacagcaaaaggacttgaagaggggaaagagtaccaattccgtgtgcgagcagagaacgccgcgggtattagtgaaccttctcgggctactcctccaaccaaagctgtagatcccattgatgcccccaaagtcattctgagaacaagcctagaagtgaaacgaggtgatgaaatagcacttgatgcaagtatttctggatcaccttacccaactattacatggataaaggatgaaaatgttattgtaccagaggaaattaagaagcgtgcagcacccttggttaggagaaggaagggtgaagttcaagaagaagaaccatttgtcctgcctctgacacagcgtttgagtattgacaacagcaaaaagggagaatctcagctacgcgtccgagattctctccgacctgaccatggtctgtatatgatcaaagttgaaaatgaccacggtattgcaaaagctccttgtactgtcagtgtgttagatacaccgggaccaccaatcaactttgtatttgaagatatcagaaagacctcagtcctttgtaaatgggaaccaccccttgatgatggtggcagtgaaatcataaactacactttggaaaagaaagacaagacaaaacccgactcagaatggattgttgtcacttcaacacttagacattgcaaatattcagtaacaaaactgattgaaggaaaagagtacctcttccgtgtaagagctgaaaacagatttgggccaggtccaccatgtgtttcaaagccacttgtggctaaagatccatttggaccacctgatgcaccagataagcccattgtggaagatgttaccagcaacagtatgctagtgaaatggaatgaaccaaaagataatggaagccccattttgggttactggcttgaaaaacgtgaagttaacagtacacattggtctcgtgtcaacaaaagccttctgaatgccttgaaagccaatgtagatggcttattagaaggactcacctatgtcttcagagtatgtgctgaaaatgcagctggacctggaaagttcagtccaccttcagatcccaaaacagcacatgatccaatctctcctcctgggccacctatcccaagagtcactgacacaagctctacaactattgaactagaatgggaacccccagctttcaatggtggtggggaaattgttggctattttgttgataagcagttggttggcacaaataaatggtcacgctgcacagagaagatgatcaaggtccgtcagtacaccgtcaaagaaatccgagagggtgctgattacaaacttcgggtgagtgctgtcaatgccgcaggggaaggaccgcctggagaaacacaacctgttactgtggctgaaccacaagagcctccagctgtggaactggatgtttctgtcaagggtggaatacaaataatggctgggaagactcttagaattccagctgtggtgactggtcgccctgtacctacaaaagtatggaccaaagaagaaggggagctggataaagaccgtgttgtaatagacaacgttggaaccaaatctgaactaattatcaaggatgcactgcgaaaagaccatggcagatatgtgattacagctacaaatagctgtggttccaaatttgcagcagccagggtagaagtttttgatgtccctggtccagttcttgacttaaaacctgttgtaacaaacagaaaaatgtgtctacttaactggtctgatccagaagatgatggaggaagtgaaataacaggctttatcattgaaagaaaagatgccaagatgcatacttggagacaaccaatagagactgagagatctaaatgtgacatcacaggtctgcttgagggacaagaatataagttccgtgttattgccaagaacaagtttggctgtggccctcctgttgaaataggaccaattcttgcagttgatccactaggtcctccaacatctccagagaggctcacatacactgaaagacaaaggtccactatcacacttgactggaaagagccccgcagtaatggtggcagtcccatccaaggatatatcattgaaaaacggcgtcatgacaaacctgactttgaaagagttaacaagcgactctgcccaaccacatcttttctggttgaaaatcttgatgaacaccaaatgtatgagttccgtgtcaaagctgtcaatgaaattggtgaaagtgaaccatccctacctcttaatgtagtcatacaagatgatgaagtgcctccaactattaagttgcgtctgagtgttcgaggagacactatcaaagttaaggcaggagagcctgtccacatccctgcagatgtgacaggccttccaatgcctaagattgaatggtccaaaaatgaaactgtaattgaaaaacccactgatgcacttcagataaccaaggaagaggtatcccgaagtgaggcaaaaactgagcttagcattcccaaagcggtccgggaggacaaaggcacttacacagttactgcttccaatcgccttggctcagtgttccgaaatgttcacgttgaagtatatgaccgcccatccccaccaagaaatcttgctgttactgacattaaagctgaatcttgctacttgacatgggatgcccctcttgataatggtggcagtgaaatcacccattatgttattgacaaacgtgatgcaagtaggaagaaagcagaatgggaggaagtcaccaacactgctgtagagaaaagatatgggatctggaaacttatccccaatggtcagtatgagttccgagtcagggcagtgaataaatatggaatcagtgatgagtgcaaatcagataaagtagtcattcaagatccttatcgccttcctggacctccaggaaaaccaaaagttttggcacgcaccaaaggatcaatgctagtgagctggactcctcctttggacaatggtggctctccaattactggctactggctggagaaaagagaagagggaagtccttattggtcacgtgttagccgagcaccaataaccaaagtgggattgaaaggcgtggaatttaatgttcctcgtttgcttgaaggcgttaaataccagttcagagccatggcaataaatgctgcaggaattggtcctcccagtgaaccatcagatccagaggttgcaggagatcccatatttccaccggggccaccttcttgcccagaagttaaagataaaacgaagtcaagcatctcactaggatggaaacctccagccaaagatggtggcagcccaatcaaaggatacattgtagaaatgcaagaagaaggtactactgactggaaaagagtaaatgaaccagacaaacttataactacctgtgaatgtgtggtgcctaatctgaaagagctcaggaagtacagattcagagtgaaagctgtcaatgaagctggtgaatctgaaccaagtgatacaactggggagatccctgccactgatattcaagaggaaccagaagttttcattgacattggagcacaggactgtctggtttgtaaagctggctcacagattaggattcctgctgtcatcaagggacgcccaacaccaaaatcatcttgggaatttgatggaaaggcaaagaaagcaatgaaggatggagttcatgacatacccgaagatgcacagctggagactgctgaaaactcctcagtaattattattccggagtgtaaacgatctcatacaggcaaatacagcatcacagccaagaataaagcaggacaaaagactgcaaattgcagagttaaagtcatggatgtaccaggcccacccaaagatctgaaagtcagtgatatcacaaggggtagttgcagactttcatggaagatgccagacgacgatggaggagacaggatcaaaggctatgttattgagaagaggactattgatggaaaagcctggaccaaagtcaatccagactgtggaagcaccacatttgtagtgcctgatctcctctctgaacagcaatatttcttccgtgtgcgagcagaaaaccgttttggtattggcccacctgtggaaaccattcagaggaccactgccagagatccgatatatcctcctgatcctcctattaaactcaagattggcctcatcacaaagaacacagtgcatctgtcatggaaacccccgaagaatgatgggggctcccctgttacccactatattgttgagtgccttgcatgggaccctactgggacaaagaaagaagcctggaggcagtgcaataagcgtgatgtggaagaactgcaatttactgttgaagacctagtagaaggtggggaatatgaattccgagtcaaagctgtcaatgctgcaggagtcagcaagccttcagccactgttggcccctgtgactgtcaaagaccagacatgccaccatcaattgatctaaaagaattcatggaggttgaagaaggaaccaatgttaacattgtggccaaaattaaaggtgtgccattcccgacactaacctggtttaaagctcctccaaagaagcctgataacaaagaacctgttctctatgacacccatgtcaacaaactggtggtagatgatacttgcactttagttattccgcagtctcgcaggagtgacactggcttatataccatcacagctgtaaataatctgggaacagcatcaaaggagatgagactgaatgtcctgggtcgtcctggccctccagtgggacccataaaatttgaatctgtttcagcagatcaaatgacactatcttggtttccacctaaagatgatggtgggtctaagattacaaactatgtaattgagaaaagagaagctaacaggaagacatgggtccatgtctccagtgaacctaaggagtgcacgtacacgattcccaaattgctagaaggccatgaatatgtattccgaatcatggcccagaataaatatggcattggagaacctcttgacagtgaacctgaaacagcaagaaacctcttctctgtccctggagcaccagataaaccaacagttagcagcgtgactcgtaactccatgactgtcaactgggaagagccagaatatgatggaggctctcctgtgacagggtactggctggaaatgaaagacaccacttcaaagagatggaagagagttaaccgagatcctatcaaagccatgactttgggtgtttcttataaagtgactggtcttattgaaggttccgactatcaattccgggtatatgcaatcaatgctgctggcgtgggtccagcaagtctgccatcagacccagcgactgctagagatccaattgcccctcctggtcctccatttcccaaagtgacagattggactaaatcatctgcagatctggagtggtctcccccactaaaagatggtggatccaaagtaactggatacatcgttgaatataaagaagaaggaaaagaagaatgggaaaagggtaaagataaagaagtgagaggaacaaagctcgttgtgacaggattaaaggaaggagcattctacaaatttagagttagtgcagtcaacattgctggcattggagaacctggagaggtcacagatgtcattgaaatgaaggacagacttgtttcacctgaccttcagctagatgccagtgtcagagatagaattgttgtccatgctggaggggtgatccgaatcattgcctatgtgtctggaaagcctcctccaaccgtcacctggaacatgaatgaaagaaccttacctcaagaagccaccattgagaccacagccattagctcatccatggtcatcaagaactgccagaggagccatcaaggcgtctattctcttcttgccaaaaatgaagccggagaaagaaagaagacaattattgttgatgtattagatgttccaggtcccgttggaacaccattcctagctcacaacctaaccaatgagtcctgcaaactgacatggttttctccagaagatgatggaggctctccaatcaccaattatgtcattgaaaagcgtgaatctgaccgcagagcatggaccccagtgacatatacagttacccgacaaaatgctactgtccagggtctcattcaaggaaaagcctactttttccgaattgcggctgaaaatagtattggcatgggtccatttgttgagacatcagaggcacttgttatcagagagccaataactgtaccagagcgtcctgaagacctggaagtcaaagaagttactaaaaatactgtaactttgacttggaatcctcctaagtatgatggtgggtcagaaattattaactatgtcctagaaagtcggctcattgggactgagaagttccacaaagttacaaatgacaacttgcttagcagaaaatacactgttaaaggcttaaaagaaggtgatacctatgagtaccgtgtcagtgctgtcaacattgttggacaaggcaaaccatcattttgcaccaaaccaattacttgcaaggatgagctggcacccccaacgcttcacctcgacttcagagataagctcacgattcgagttggtgaagcttttgccctcactggccgttactcaggcaaaccaaagcctaaggtttcctggttcaaagatgaagctgatgtgctggaagatgatcgcactcatataaagactacaccagcaacacttgctttagagaagatcaaggccaaacgttcagattccggcaaatactgtgtggttgtggagaacagtacaggctctaggaaaggtttctgtcaagttaatgttgttgaccatcctggaccaccagtaggaccagttagttttgatgaggtgaccaaagattacatggttatctcttggaagcctcctttagatgatggaggcagtaaaatcaccaattatattattgagaagaaggaagtgggtaaagacgtctggatgccagtgacatctgcaagtgctaaaacaacatgcaaagtttctaaactacttgaaggaaaagattatattttccggatacatgctgaaaatctgtatggaataagtgatcctctggtgtctgattcaatgaaagccaaagatcgtttcagggttcctgatgcacctgatcagccaattgttacagaagttaccaaagactctgcattagtaacctggaataagccacatgatggaggaaaacccatcacaaactacatcctggaaaagagagaaactatgtctaaacgatgggctagagttaccaaagatcctattcatccatacactaaatttagggttcctgatcttctagaaggatgtcagtatgaattccgggtttctgcagaaaatgaaattggtattggagatccaagcccaccatccaaaccagtctttgctaaagatccaattgctaaaccaagtccacctgttaatcctgaagcaatagatacaacatgcaattcagtcgatctaacttggcagccaccacgtcatgatggtgggagcaagattctgggttatattgttgagtaccagaaagttggagatgaagagtggagaagagccaatcacacccctgagtcatgtcctgaaactaaatataaagtcaccggtcttcgggacggtcaaacctataagtttagagtgttagcagtcaatgcagctggtgaatcagatccagctcatgttccggagccagtcctagtaaaagacaggcttgaaccccctgagttgattcttgatgccaacatggcaagagaacaacacattaaagttggtgatactctaagacttagtgccatcatcaaaggagtgccattcccaaaagtaacttggaaaaaagaagacagagatgctccaactaaagcaagaattgatgtgactccagttggtagcaagcttgaaattcgtaatgctgcccatgaagatggtggaatttattctttaacagtggagaatccagctggttcaaaaactgtctcagtaaaagtacttgtattagataaacctgggccacctagagatctggaagtcagtgaaattaggaaagattcatgttaccttacttggaaagaaccactagatgatggtggttctgttattaccaattatgtggttgagaggagagatgttgccagcgcccagtggtcacctctctcagctacatcaaagaaaaagagtcacttcgctaagcatctgaatgaaggcaaccagtacctcttccgagtagctgcggagaaccagtatggacgtggtccttttgttgaaacaccaaaaccaatcaaggctttggatcctctccatcccccagggccacccaaggacctgcaccatgtagatgttgacaagactgaagtctccctagtctggaataagccggatcgtgatggtggttctccaatcactggatatttggtagaatatcaagaagaaggcacccaggactggattaaatttaagactgtgacaaacttagagtgtgtggttactggactacaacaaggaaagacctatagattccgtgtaaaagctgaaaacattgtgggtcttggtctccctgacacaactatcccgatagaatgtcaagaaaaactagtgcctccatccgtggagctagatgtgaaattaattgaaggtcttgtggtaaaggctggaaccacagtcagattccctgctattataagaggtgtgcctgttcctactgcaaagtggacaaccgatgggagtgagattaaaaccgatgagcactacacagttgaaacagacaacttctcatcagtacttaccattaagaactgcttaaggagagacactggggaatatcaaatcacagtttccaatgcagccggtagcaaaacagtagccgtacatcttactgttcttgatgttcctgggccaccaacaggtcctattaatattctggatgttactcctgaacacatgactatctcatggcagccacctaaggatgatggaggaagccctgtgataaattatattgttgagaaacaagatacaaggaaagacacgtggggtgttgtctcttccggaagcagtaagacaaagctgaaaatcccacatctgcagaagggctgtgaatatgttttccgagttagagcagagaataagataggtgttggtcctccccttgactccacacctactgttgctaagcataaatttagtcctccgtctcctcctggtaaaccagtggttactgacattactgaaaatgcagcaacagtgtcttggaccctgccaaaatctgatggtggcagtccaataactggctactatatggaacgtcgagaagtaactggcaaatgggtgagggtcaacaaaacacctatcgctgacctgaagttcagagtgactggactctatgaaggaaatacatatgagtttagagtttttgctgaaaatcttgcaggactaagcaaaccatccccaagttctgatccaataaaagcttgccggcccatcaaaccacctggaccacctattaatcctaaactgaaagacaagagcagagaaacagctgatttggtgtggacaaagcctctcagtgatggtggtagccccattctaggatatgtagtggaatgtcagaaacctggcacggcacaatggaacaggattaataaagatgaactcattaggcaatgtgcctttagggtacctggactaattgaaggaaatgagtacagattccgtataaaggcagctaatattgtaggagagggtgagccaagagaactagcagaatctgtgattgcaaaagatatccttcatcctccagaagtagaacttgatgttacttgtcgtgatgttattaccgtgagagtaggccaaactatccgcattctagctcgagtcaaaggcagacctgaaccagacataacttggactaaggaaggcaaagtattggtccgagaaaagagggtggaccttattcaggatctacctcgtgttgagttacaaattaaagaagctgttagagctgatcatggcaagtatatcatctcagctaagaacagcagtggacatgcccaaggttcagccatcgttaacgtccttgacagacctgggccttgccagaatttgaaggttaccaatgtaaccaaagagaactgtacaatttcttgggaaaacccactagataatggtggctcagaaataacaaacttcatagtagaatatcgcaaaccaaaccagaaaggctggtcaattgttgcatcagatgtcactaaacgattaatcaaggccaaccttttagccaacaatgaatactatttccgagtttgtgcagagaataaagtaggtgttgggccaaccatcgaaacaaaaactcccattctggctattaaccctattgacagaccaggtgagcctgaaaaccttcacattgcagataaaggaaagacatttgtctacctaaagtggcggaggcctgactatgatggtggcagtccaaatctgtcatatcatgttgagagaaggcttaagggctccgatgactgggaaagagtgcataaaggaagcattaaagaaactcactacatggttgacagatgtgttgaaaaccagatttatgagttcagagtgcaaacaaagaatgaaggtggggaaagtgactgggtgaagacagaggaagttgttgtgaaagaagacttacaaaaaccagtacttgatctgaaattaagtggggtcctaactgtcaaagcaggggacaccattaggcttgaggcaggggttagaggcaaaccattcccagaagttgcatggaccaaggacaaagacgctacagacttaacaagatcaccaagggtcaagattgatacccgtgctgattcatctaaattttctcttactaaagcaaagcgaagtgatgggggtaaatatgtagttacggcaactaacacggctggcagttttgtggcctatgccactgtcaatgttttagataagcctggtcctgtgagaaatctgaaaattgttgatgtgtccagtgataggtgtactgtttgctgggatccaccagaagatgatggtggctgtgaaatccaaaattatattctagaaaaatgtgagacaaagcgaatggtttggtctacctattctgctactgtcttgacacctggtactacagtaacacgtctcatagaaggaaatgaatatattttcagagtccgtgcagaaaataaaataggcacagggcctccaacagaaagtaaaccagtcatagccaaaaccaagtatgataaacctggtcgccctgatcccccagaagtcactaaagtaagcaaagaagagatgactgtggtttggaatccacctgaatatgatggtggaaagtctataactggatactttttggagaaaaaggaaaagcattcaacacgatgggtccctgtcaacaagagtgcaatccctgagagacgtatgaaagtacagaatctcctcccagaccatgaatatcagttccgtgtcaaggcagaaaatgaaattggaattggagaaccaagcttgccttcaagaccggtggtggcaaaagaccccatagagccacctggtccaccaaccaatttcagagtggttgatacaaccaaacattccataactcttgggtggggaaaaccagtctatgatggtggtgcaccgatcattggatatgttgtggaaatgagaccaaaaatagcagatgcgtctcctgatgaaggctggaaacggtgtaatgctgcagcacagcttgtacgcaaggaattcactgttaccagcttggatgaaaaccaggaatatgagttcagggtgtgtgcccaaaaccaagttggtattgggcgccctgcagagctaaaggaagctatcaaacctaaagaaatactagaacctccggagattgatttggatgccagcatgaggaaactggtcatagtgagagcaggatgccctattcgtctctttgctatagtgagaggacgaccagcccctaaagtcacttggcgaaaagttggcattgataatgtggtcagaaaaggacaagttgatctggttgacactatggccttccttgtcatccccaattctacccgtgatgactcaggaaaatattccttaacacttgtgaacccagcaggagaaaaggctgtattcgtaaatgtcagagtattagacactcctgggcctgtgtctgatttaaaagtttcagatgtcactaaaacatcatgccatgtgtcctgggcccctcctgaaaacgacggtgggagccaagtgacacattatatcgtggagaaacgtgaggcagacagaaagacatggtcgaccgttaccccagaagttaagaaaacaagcttccatgtaaccaatcttgtccctgggaatgagtattacttcagagtaactgctgtcaacgaatatggccctggcgtcccaacagatgtcccaaaaccagtgcttgcatcagatcctctaagtgagccggatcccccaaggaaattagaagcgactgaaatgaccaagaacagtgccaccttagcctggttacctcccctacgtgatggaggtgctaaaatcgatggctacatcattagttacagagaagaagagcagcctgcagatcgctggacagagtactcagtggtaaaagatctgagccttgttgtcactggcctaaaggaaggaaagaaatacaaatttagagtagcggccagaaatgctgttggagtcagtttgccaagagaagctgaaggagtgtatgaagccaaagagcaactgttgccaccaaagatccttatgccagagcaaataactatcaaagctgggaaaaaactccgaattgaagcccatgtgtatggaaagcctcatcccacctgtaaatggaaaaaaggagaagatgaagttgtcacatccagccacctggcagtgcataaagcagacagctcttcaattctgatcataaaagatgtgactaggaaagacagtggttactacagcctcacagcagagaacagttctgggacagacactcagaaaatcaaagttgtagtcatggatgcccccggcccccctcagcctccatttgacatttctgatatagacgctgatgcttgctccctgtcatggcacatccctctggaggacggaggcagtaacatcaccaattatatagtggagaagtgtgatgtaagccgaggtgactgggtcacggctctagcttcagtcacaaaaacttcctgcagggttggaaagctgatcccaggccaagagtacatcttccgggtccgtgctgaaaaccgatttggcatttcagagcctctcacatctccaaagatggttgcgcagttcccatttggtgttcctagtgaaccaaagaatgcacgagtcaccaaagtcaacaaggactgtatttttgttgcttgggacagaccagatagtgatggagggagccccattattggttatctgattgaacgcaaggaaagaaacagtttgctgtgggtgaaagccaatgatactcttgtccggtcaactgaatatccttgtgctggccttgtagaaggtcttgagtattcattcagaatctatgccctaaacaaagctggatccagcccacccagcaaacccacagaatatgtaactgcaagaatgccagttgatcctcctgggaaacctgaggttattgatgtcaccaagagtactgtatctctgatctgggctcgtccaaagcatgatggaggcagtaaaattattggctatttcgtagaagcttgcaaacttcctggtgataaatgggtacggtgcaatactgcacctcaccagattccccaggaagagtacacagctactggcctagaagagaaagctcagtatcaatttagagctattgccaggaccgcggtaaacattagcccaccttctgaaccttctgatccagtgactatcctcgcagaaaatgtccctcccaggatagacctgagtgtggctatgaaatctttgcttactgtgaaagctggaactaatgtctgcttggatgctactgtttttggtaaaccgatgccaacagtttcttggaaaaaagatggcacactgctaaaaccagcagaaggcataaagatggccatgcagcggaatctgtgcaccttggagctattcagcgtgaaccggaaggactcaggagactataccattactgctgaaaattcaagtggttctaaatcagccaccattaagcttaaagtgttagataaaccgggtcctccagcatctgttaaaatcaacaaaatgtattcagatcgtgctatgctttcttgggaaccgcctcttgaagatggaggctcagaaatcaccaactatattgttgacaaacgtgaaacaagcaggcccaactgggctcaagtctctgcaactgtgcctatcaccagctgcagcgtggagaaacttatagagggccatgagtatcagttccgtatttgtgctgaaaataaatatggagtaggcgatccagtcttcactgaaccagcaattgccaaaaacccatatgacccaccaggacgctgtgatcctcctgttattagcaacataaccaaagatcacatgacagtcagctggaagccaccagcagatgatgggggctcacccatcactggctatttgcttgaaaagcgggaaacccaggctgttaactggactaaggtcaacagaaaacctattatagaaagaacattaaaagcaacaggtcttcaagaaggtaccgaatatgagttccgtgttacagctataaataaagctggaccaggcaaacccagtgacgcatccaaggccgcttatgctcgggaccctcagtatcctcctgcgccaccggctttccctaaagtatatgatacaactcgcagctctgtgagtctatcttggggcaagccagcctatgacggcggcagccctatcattggttatctcgttgaagtaaaacgggctgactccgataactgggtgaggtgcaacttaccacagaatctacagaaaacccgctttgaggttactggcctgatggaagacacacaatatcaattccgtgtgtatgccgttaataagattggatacagtgaccccagtgatgtgccagataaacactatcccaaggacatcttaattccacctgagggagaacatgatgcggacttaaggaagacactcatattacgtgctggagttactatgagactatatgtaccagtaaaaggacgcccacctccaaagattacttggtctaaaccaaatgtcaatctaagagacaggattggactggacataaagtcaactgactttgacactttcttgcgctgtgaaaatgtgaacaaatatgatgcaggaaaatatatcttaaccctggagaacagctgtggtaaaaaggaatataccattgttgtgaaagtgcttgatactcctgggccacctatcaatgtgactgttaaggaaatatccaaagactctgcttatgttacctgggagcctcccattattgatggcggaagccccatcataaactatgtggtacaaaaacgtgatgcagagaggaaatcctggtctacagtgacaactgagtgctccaaaacaagcttcagagtacctaatttggaggagggaaaatcctacttcttccgagtgtttgctgaaaatgagtatggcattggtgatcccggtgaaactcgtgatgctgtcaaagcttcccaaactcctggaccagttgtggacctgaaagtgaggtctgtatctaagtcatcctgtagcattggctggaaaaagcctcacagtgatggtggaagtcggattattggatatgtagttgatttcctgactgaagaaaataagtggcaacgagttatgaaatccttaagcctacagtactctgcaaaagatttgactgaagggaaggaatataccttcagagtgagtgctgagaatgaaaatggagaaggaaccccaagcgaaatcactgttgtggcaagggatgatgttgtggctcctgatcttgacttaaagggtctacctgatttgtgctacttggctaaagaaaacagcaacttccggcttaagatccccataaaaggcaagccagctccatcagtctcctggaagaaaggggaagatcctctagcaactgacactagagtcagtgttgagtcatctgcggttaacacaactcttatagtgtacgattgccaaaaatctgatgctggaaaatacacaatcacacttaagaatgttgctggcaccaaggaaggaactatctccataaaggttgttggcaagcctggcatccccactggaccaatcaaatttgatgaagtcacagcagaagccatgaccttaaagtgggctcctccaaaggatgatggaggttctgaaatcaccaactatatcctagagaagagggattctgtgaacaacaagtgggtgacgtgcgcctcagctgtccagaaaaccacctttagagtaaccagacttcatgagggcatggaatataccttcagggtcagtgccgaaaataaatatggtgtaggggaaggcctgaaatcggagccaattgttgcgagacatccatttgatgtgcctgatgctcccccacctcccaatattgtggatgtcagacacgattcagtatctctaacttggactgaccccaagaaaactggtggttctccaattacagggtatcatctcgagttcaaggaaagaaacagccttttgtggaagagagctaacaagactccgataaggatgagagactttaaagtgacaggattaactgaaggtcttgaatatgaattccgagttatggcaatcaatttagcaggtgtgggcaagccaagcctaccatcagagcctgttgtggcactggacccaattgatcctcctggaaaacctgaggttattaacataacaaggaattcagtgactctcatttggactgaacctaaatatgacggtggtcataagttaactggatatatagtggagaagcgagatctaccttcgaagtcttggatgaaagccaaccatgttaatgtcccagaatgtgcctttactgtaactgaccttgttgagggtggaaaatatgaattcagaattagagcaaagaatacagcaggtgctatcagtgctccatcagaaagtacagaaaccattatttgcaaggatgaatacgaggcaccaacaattgtccttgatcccacaataaaagatgggctaacaattaaagcaggggataccattgttttgaatgccattagcattcttggcaaaccccttccaaaatcaagttggtccaaggcaggaaaagacattagaccatcagatatcactcagataacttcaaccccaacatcttccatgcttactatcaagtatgccactagaaaagatgcgggtgaatataccatcactgctaccaatccttttggcacgaaggtggaacatgtgaaggtaacagtccttgatgtacctggtcccccaggtcctgttgaaatcagtaatgtttctgctgaaaaagcaacacttacatggacacctcccttggaagatggcggctcaccaattaagtcctatatacttgaaaagagagaaaccagccgacttttgtggacagtggtttctgaagatattcagtcttgcaggcatgtggcaaccaaacttatccaaggaaatgagtacatcttccgggtctcagctgtaaaccactatggcaaaggagaacctgtacagtctgaacctgtcaaaatggtagacagatttggtccccctggccctcctgaaaaaccagaggtatcaaatgtcactaagaacactgccactgtcagctggaaaaggccagtggatgatggtggcagcgaaattacaggatatcatgtagaaaggagagaaaagaaaagcctgcgatgggtgagagcaataaaaacaccagtttccgatctcaggtgcaaagtaacaggactgcaagaaggaagcacctacgaattccgtgtcagtgcagaaaacagagcaggaattggtccacccagtgaggcttcagattctgttctgatgaaagatgcagcatatcctccaggaccaccttcaaatccgcatgtcactgatactaccaagaaatctgcttctttggcatggggcaagcctcattatgatggtggacttgaaatcactggctatgtcgtggagcatcaaaaagtaggagacgaggcctggataaaagataccacaggaaccgccctcagaatcactcagttcgttgttcctgatcttcagactaaagaaaaatacaacttcagaatcagtgccatcaacgatgcaggtgttggggagccagcggtgattccagatgttgaaatcgtagaacgggagatggctcctgattttgaactagatgccgagcttcgaagaacacttgttgttagagcaggactcagtattaggatatttgtgccaattaaaggtcgtcctgctcctgaagtgacatggaccaaagataacatcaacctgaaaaaccgagccaacattgaaaatacggaatcatttactcttctgattatcccagaatgtaacagatatgataccggtaaatttgtcatgaccattgaaaacccggctgggaagaaaagtggctttgtgaacgtcagagtcttggacacgccaggcccagtcctcaacctgcggcctacagacatcacaaaggacagtgtcaccctgcactgggacctccctctgatagatggaggctcacgtataacaaactacattgtagagaaacgtgaagcaacacggaaatcttattccacagccaccactaagtgccataaatgcacatataaagttaccggcttgtctgaagggtgtgaatatttcttcagagtgatggcagagaatgaatatggaattggtgagccaacagaaactacagagcccgtaaaagcctctgaagcaccatctccaccagacagccttaacatcatggacataactaagagcaccgtcagcctggcatggcctaagcccaaacacgatggtggcagcaagatcactggctatgtgattgaagcccaaagaaaaggctctgaccagtggacccacatcacaaccgtgaaagggttagaatgtgttgtgaggaatctaactgaaggagaggaatataccttccaagtgatggcagtgaacagcgcggggagaagtgcccctagagaaagcagacccgtcattgtcaaggagcagacaatgcttccagagctggatctccgtggcatctatcagaaactggtcattgccaaagctggtgacaacatcaaagttgaaattccagtgctcggtcgaccgaagcccacagtgacatggaaaaaaggagaccaaattcttaaacagacacagagagttaattttgaaaccacagcgacttcaaccattttaaatatcaatgagtgtgtcagaagtgatagtgggccctatccattaacagcaaggaacattgtaggagaggttggtgatgtcatcaccattcaagtccatgatatcccagggccacctactggaccaatcaaatttgatgaagtttcatctgattttgtaaccttctcttgggacccacctgagaacgatggtggtgtaccaataagcaactatgtagtggaaatgcggcagactgacagtactacctgggttgagttagcaaccaccgttatacgtactacctataaagccacccgccttactactggattagagtatcagttccgtgtaaaagctcagaatagatatggagttggaccaggcatcacatcagcatggatagttgccaactatccatttaaggttcctggacctcctggtacccctcaggtaactgcagttaccaaggattcaatgacaattagctggcatgagccactttctgatggtggaagccccattttaggatatcatgttgaaagaaaagaacgaaatggtattctctggcagactgtgagcaaagctttagtaccaggcaacattttcaaatcaagtggacttacagatggtattgcttatgagttccgggtgattgcagaaaacatggcaggcaaaagtaagccaagcaagccatcagaacctatgttggctctggatcccattgacccacctggaaaaccagtacctctaaatattacaagacacacagtaacacttaaatgggctaagcctgaatatactgggggctttaaaattaccagttatatcgttgaaaagagagaccttcctaatggacggtggctgaaggccaacttcagcaacattttggagaatgaatttacagtcagtggcctaacagaagatgctgcatatgaattccgtgtgatcgccaaaaatgctgcaggtgccatcagtccaccatctgagccatctgatgctatcacttgcagggatgatgttgaggcaccaaagataaaggtggatgttaaatttaaggacacggttatattaaaagcaggtgaagcattcagactggaagctgatgtttcaggccgcccacctccaacaatggaatggagcaaagatggaaaagagctggaaggcacagcaaagttagaaataaaaattgcagatttctctactaatctggtaaacaaagattcaacaagaagggatagtggtgcctatacccttacagcgactaatcctggtggctttgctaaacacattttcaatgtcaaagttcttgacagaccaggcccacctgaaggacctttggctgtaactgaagtgacatcagaaaagtgtgtactatcatggttccctccactggatgatggaggtgccaaaattgatcattacatagtacagaaacgtgaaaccagcagattggcatggacaaatgtagcctcagaagtccaagtaacaaagctaaaggtcactaaactcttgaaaggcaatgaatacatattccgtgtcatggctgtaaataaatatggagtgggagagccactggaatcagagcctgtgcttgcagtgaatccttatggaccccctgatccgcccaaaaaccctgaagtgacaactattactaaagattcgatggttgtctgctggggacatcctgattctgatggtggaagtgaaatcatcaattatattgtggaacggcgtgataaagctggccaacgctggattaaatgcaacaaaaaaactcttactgatttaagatataaagtgtctggactgacagaaggacatgaatatgagttcaggattatggctgaaaatgctgctggaattagtgcaccaagtcctaccagtccattttacaaggcttgtgacactgtgtttaaacctggaccaccaggtaacccacgtgttctggatacaagcagatcatccatttcaatcgcttggaataaacctatctatgatggtggttcagaaatcactgggtatatggttgagattgccctgccagaggaagatgaatggcagattgtcactccaccagcaggactcaaggcaacttcgtatactatcactggcctcacagagaatcaggaatataagatccgcatctatgccatgaattccgaaggacttggggaacctgcccttgttcctggaactccaaaggctgaagacagaatgctgcctccagaaattgaactggatgctgacctgcgcaaagttgttactataagggcctgctgcaccctgagactttttgttcccatcaaaggaaggcctgaccctgaggtgaagtgggcccgggaccatggagaatctttagataaagctagcatcgaatccgcaagctcttacaccctgcttattgttggaaatgtaaacagatttgacagtggcaaatatatactaactgtagaaaatagttcaggcagcaagtctgcatttgtcaatgttagagttctcgatacaccaggccccccacaggatctgaaggtaaaagaggtcactaagacatctgtcacactcacatgggacccacctctccttgatggaggttcaaaaatcaagaactatattgttgaaaagcgggaatcaacaagaaaagcatattcaactgttgcaacaaactgccacaagacttcctggaaggtagaccagcttcaagaaggctgtagctactatttcagggttctcgcagaaaatgaatatggcattgggctgcctgctgaaaccgcagaatctgtgaaagcatcagaacgacctcttcctccaggaaaaataactttgatggatgtcacaagaaatagtgtgtcactctcttgggagaaaccagagcatgatggaggcagccgaattctaggctacattgtggagatgcagaccaaaggcagtgacaaatgggccacgtgtgccacagtcaaggtcactgaagccactatcactggattaattcagggtgaagaatactctttccgtgtttcagctcagaatgaaaagggcatcagtgatcctagacaactgagtgtgccagtgatcgccaaagatcttgtcattccaccagccttcaaactcctgttcaatactttcactgtactggcaggtgaagacctaaaagttgatgttccattcattggccgccctaccccagctgtaacctggcataaagataatgtaccactgaagcagacaactagagtaaatgcagagagcacagaaaataattcactactgacaataaaggacgcctgccgagaagatgttggccattatgtggttaaactgactaactcagctggtgaagctattgaaacccttaatgttatcgttcttgacaaaccagggcctccaactggaccagttaaaatggatgaagtgacagctgatagtattactctttcctggggcccacccaagtatgatggcggaagttctatcaataattacattgttgagaaacgggacacttccacaaccacctggcaaattgtatcagctacagttgcaaggacaacaataaaggcttgcagactgaagactggatgtgaatatcagtttagaattgcagctgaaaacagatatgggaagagtacctacctcaattcagagcctactgtagcccaatatccattcaaagttcctggtcctcctggcactccagttgtcacactgtcctccagggacagcatggaagtacaatggaatgagccaatcagtgatggaggaagtagagtcattggctatcatctagaacgcaaggaaagaaatagcatcctctgggttaagttgaataaaacacctattcctcaaaccaagtttaagacaactggccttgaagaaggtgttgaatatgaatttagagtctctgcagagaacatcgtgggcattggcaagccgagtaaagtatcagaatgttatgtggctcgtgacccatgtgatccaccaggacggccagaggcaatcattgtcacaaggaattctgtgactcttcagtggaagaaacccacctatgacggtggaagcaagatcactggttatattgttgagaagaaagaattacctgagggccgttggatgaaagccagttttacaaatattattgacactcattttgaagtaactggcctagttgaagatcacagatatgagttccgggttatagcccgaaatgccgcaggagtgtttagtgagccttcagaaagcacaggagcaataacagctagagatgaggtagatccaccacgaataagtatggatccaaaatacaaagacacaatcgtggttcatgctggtgaatcattcaaggttgatgcagatatttatggcaaaccaataccaaccattcagtggataaaaggtgatcaggagctttcaaacacagctcgattagaaataaagagcaccgactttgccaccagtctcagtgtaaaagatgcagtacgtgtcgacagtggaaattacatactgaaggccaaaaatgttgcaggagaaagatcagttactgtgaatgtcaaggttcttgacagaccagggccacctgaaggacctgttgttatctcaggagttacagcagaaaaatgcacactagcttggaaacccccacttcaggatggtgggagtgacatcataaattatattgtggaaaggagagaaaccagccgcttagtttggactgtggttgatgccaatgtgcagactctcagctgcaaggttactaagcttcttgaaggcaatgaatatactttccgtataatggcagtaaacaaatatggtgttggtgaacctcttgaatctgagccagtagttgccaagaatccatttgtagtaccagatgcaccaaaagctccagaagtcacaacagtgaccaaggactcaatgattgttgtatgggaaagaccagcatctgatggtggtagtgaaattcttggatatgttcttgagaaacgggataaagaaggcattagatggacaagatgccataagcgtctgattggagagttgcgcctgagagtaactggactcatagaaaatcacgattatgagttcagagtttctgctgagaatgctgctggacttagtgaaccaagccctccttctgcttaccaaaaggcttgtgatcctatttataaaccaggacccccaaacaaccccaaagtcatagacataaccagatcttcagtattcctttcttggagcaaaccaatatatgatggtggctgtgaaattcaaggatacattgttgaaaaatgtgatgtgaatgttggtgaatggacaatgtgcactccaccaacaggaattaataaaacaaacatagaagtagagaagctgttggaaaagcatgaatacaacttccgtatctgtgctattaataaagctggagttggagaacatgctgacgtccctggacctattatagttgaagaaaaattagaagcaccagacattgatcttgacctagaactaaggaaaatcataaatataagggcaggtggctccttaaggttatttgttcctataaaaggtcgtcctacaccagaagttaaatggggaaaggtggatggtgaaatccgagatgcagctataattgatgtcactagcagtttcacctctcttgttcttgacaatgtcaaccgatatgatagtggaaaatatacgcttacattagaaaacagcagtggaacaaagtctgcctttgttactgtgagagttctggacacgccaagtccacctgttaacctgaaagtcacagaaatcaccaaagactcagtatcaattacatgggaacctcctttgttggatgggggatccaaaataaaaaattacattgttgagaaacgtgaagccacaagaaaatcatatgctgctgttgtaactaactgccataagaattcttggaaaatcgatcagctccaagaaggttgcagttattactttagagtcacagctgagaatgagtatggtattggccttcctgcccagactgctgatccaattaaggttgcagaagtgccacaacctcctggaaaaataactgtggatgatgtcaccagaaacagtgtctctctgagttggacaaaacctgaacatgatggtggcagtaaaatcattcagtatattgtggaaatgcaagctaaacacagtgagaaatggtcagagtgtgctcgagtaaagtctcttcaggcagtaattaccaacctaactcaaggggaagaatatctttttagagttgttgctgtaaatgaaaaggggagaagtgatcctcggtcccttgcagttccaatagttgccaaagatctggtaattgagccagatgtaaaacctgcattcagtagttacagtgtacaggttggccaagatttgaaaatggaagtgccaatttctggacgtcctaagccaaccattacctggactaaagatggtctcccactgaagcagaccacaagaatcaatgttaccgattcactggatctcaccacactcagtattaaagaaactcataaggatgatggtggacaatatggaatcacagttgccaatgttgttggtcagaagacagcatccatcgaaattgtaactctagataaacctgatcctccaaaaggacctgttaaatttgatgacgtcagtgctgaaagtattacattatcttggaaccctccattatatacagggggctgccaaatcaccaactacattgttcagaaaagagatacaaccaccacagtatgggatgttgtttctgctactgttgctagaactacactcaaagtgaccaaactgaaaactggtacagaataccaatttagaatatttgccgaaaacagatatggacaaagctttgccttagagtctgatccaattgtagctcaatatccctacaaagaaccaggccctccaggtacaccatttgccacagccatttccaaagactccatggtcatacagtggcatgaaccagtcaacaatggtggaagccccgtcataggttaccacctggagagaaaagaaagaaacagtattttgtggacaaaggtcaacaaaactattattcatgacacccaattcaaagcacagaatcttgaagaaggcattgaatatgaattcagagtgtatgctgaaaatattgttggtgtaggcaaagcaagcaagaattctgaatgctatgtagccagagatccctgtgacccaccaggaaccccagaaccaataatggttaaaagaaatgaaatcactttacagtggaccaaacctgtgtatgatggtggaagtatgattacaggctacattgtagagaaacgtgatttgcctgatggtcgttggatgaaagctagctttacaaatgtcattgaaactcaatttactgtgtcaggtcttactgaagatcaaagatatgaattcagagtcattgcaaagaatgcagctggtgcaataagtaaaccctctgacagtactggaccaataactgccaaggatgaggttgaactcccaagaatttcaatggatccaaaattcagagacacaattgtggtaaatgctggagaaacattcagacttgaggctgatgtccatggaaagcccctacctaccattgagtggttaagaggagataaggaaattgaagaatctgctagatgtgaaataaagaacacagatttcaaggctttacttattgtaaaagatgcaattagaattgatggtgggcagtatattttaagagcttccaatgttgcaggttctaagtcattcccagtaaatgtaaaagtattagatagaccaggacctccagaagggccagtccaggttactggagtcacttctgaaaaatgctctttaacatggtctccaccacttcaagatggtggcagtgacatttctcactatgttgttgaaaagcgagaaaccagtcgacttgcctggactgttgttgcttcagaagttgtgaccaattctctgaaagttaccaaactcttagaaggtaatgaatatgttttccgtataatggctgtcaacaaatatggtgttggagagcctttggaatctgcaccagtactaatgaaaaatccatttgtgcttcctggaccaccaaaaagcttggaagtcacaaatattgccaaagactccatgaccgtctgttggaaccgtccagatagtgatggtggaagtgagattattggttacattgtagagaaaagagacagaagtggcattcgatggataaaatgtaataaacgccgcattacagatttgcgtctaagagtgacaggattaacagaagatcatgagtatgaattcagggtctctgcagaaaatgctgctggagttggggaaccaagtccagctacagtttattataaagcctgtgatcctgtgttcaaacctggcccacctaccaatgcacacattgtagacaccactaaaaattcaatcacacttgcctggggtaaacccatctatgatggcggcagtgagatcttgggatatgtagtagaaatctgtaaagcagatgaagaagaatggcaaatagttactccacagactggcctgagagtcactcgatttgaaatttcaaaactcactgaacaccaagagtataaaatacgagtctgtgccctcaacaaagttggtttaggtgaggctacatcagttcctggtactgtgaaaccagaagataaacttgaagcacctgaacttgaccttgactccgaattaagaaaaggaattgttgtaagagctggtggatctgccagaattcacattccattcaaaggtcgtccaatgcctgagatcacttggtctcgagaggaaggtgaattcacagataaggtccaaattgaaaagggagtaaactatacccaactatcaatagataactgtgatagaaatgatgctggaaaatacattcttaagttggaaaacagcagtggatcaaagtctgcttttgtaactgtgaaagttcttgacactccaggaccaccacagaatttggcagtcaaagaagtgagaaaagattctgccttcctggtatgggagccacccatcattgatggaggggcaaaggtcaagaactatgtgattgacaaacgtgagtcaaccagaaaagcgtatgctaatgtgagtagtaaatgcagcaaaacaagttttaaagtggaaaaccttacagaaggagccatttattacttcagagtcatggctgaaaatgaatttggagttggtgttccagtggaaactgttgatgccgtgaaagctgctgaacctccttccccaccaggaaaggttacactcactgatgtgtcccagaccagtgcatcacttatgtgggagaaacctgaacatgatggcggtagcagagtcctggggtacgttgttgaaatgcagcccaaaggaactgaaaaatggagcattgtggctgaatccaaagtctgtaatgcagttgttactggtttgagttctggacaagaatatcagttccgtgtcaaggcttataatgagaaaggaaaaagcgatccaagagtgttgggtgttcctgtcatagccaaggacttgactatacagcctagtttaaagttaccatttaacacatatagtatccaagctggagaagatcttaaaatagaaattccagttataggccgaccaagacctaacatttcttgggtcaaagatggtgagcctcttaaacagacaacaagagtaaacgttgaagaaacagctacctcaactgttttgcacattaaagaaggtaacaaagatgactttggaaaatacaccgtaacggcaacaaatagtgcaggcacagcaacagaaaatctcagtgttatcgttttagaaaagcctggacctccagttggcccagttcggtttgatgaagttagtgcagactttgtagtcatatcttgggaacctccagcctatactggtggctgccaaataagcaactacattgtagagaagcgagatacaaccaccaccacttggcacatggtatcagcaacagttgcaagaacaacaattaaaataaccaaactgaaaacaggcacggagtaccagtttagaatttttgctgaaaacaggtatggaaaaagtgccccactggattctaaggcagttattgtacaatatccatttaaagaacctggaccacctggaactccttttgtgacatcaatctcaaaagatcagatgcttgtgcaatggcatgagccagtgaatgatggaggcaccaaaattattggctaccatcttgaacagaaagaaaagaacagtattttatgggtcaagttaaataagacccccattcaggacaccaaattcaaaacaactgggcttgatgagggccttgagtatgagttcaaagtttctgctgaaaatattgttggcattggcaagcctagcaaagtgtcagaatgctttgttgctcgtgatccatgtgacccacctggtcgccctgaagccattgttattacaagaaacaatgtcacactgaaatggaagaaacctgcctatgatggtggtagcaaaataacaggttatattgtagaaaagaaagatctacctgatggccgctggatgaaagccagctttaccaacgtattagaaactgaatttacagtgagtggacttgtagaagaccaaagatatgaatttagagtaattgcaagaaatgcagctggaaactttagtgaaccatctgatagtagtggtgccattactgcaagagatgaaattgatgcaccaaatgcctctctggatccaaaatataaagatgtcatcgttgttcatgcaggagagacttttgttcttgaagccgacatccgtggcaaacctatacctgatgttgtttggtcaaaagatggaaaagaacttgaagaaacagctgctagaatggaaattaaatctactattcagaaaacaactcttgttgtcaaagactgtatacggactgatggaggacaatatattctgaaactcagcaatgttggtggtacaaagtctatacccatcactgtaaaggtacttgacaggccagggtctcctgaagggcctctgaaagttactggagttactgcggaaaaatgttacctggcatggaacccacctttgcaagatggtggtgctaatatttcacattacatcattgaaaagagggagacaagccgactctcttggacccaggtttcaactgaggtacaggcccttaactacaaagttactaaacttcttcctggtaatgagtacattttccgtgtcatggctgtgaataaatatggaattggagagcccttggaatctgggcctgttacggcctgtaatccttataagccaccaggtcctccctcaacacctgaagtctcagcaatcaccaaagattctatggtagtaacatgggcacgcccagtagacgacggaggtaccgaaattgagggctacattcttgaaaaacgagataaggaaggcgttagatggaccaagtgcaacaagaaaacattaacggatctgcggctcagggtaactggtcttaccgaaggccattcctatgaattcagagttgctgctgaaaatgcagctggtgtgggagaacctagtgagccatctgttttctaccgtgcgtgtgatgccttgtatccaccaggtcccccaagcaatccaaaagtgacggacacttccagatcttctgtctccctggcatggagtaagccaatttatgatggtggcgcacctgttaaaggctatgttgtagaggtcaaagaagctgctgcggatgaatggacaacctgcactccaccaacaggattacaaggaaagcagttcacagtgaccaagcttaaagaaaacactgaatataacttccgtatttgtgccatcaattctgaaggtgtaggtgaacctgcaactctacctggctcagtggttgctcaggagaggatagagccaccagaaatagaactcgatgctgatctcagaaaggtggtcgttctgcgtgcaagtgctactttacgcttatttgtcactatcaaaggtcgaccagaacccgaagttaaatgggaaaaggcagaaggcattctcactgacagggctcagatagaggtgaccagctcatttacaatgttggtgattgataatgttaccagatttgacagtggtcggtataatctgacattagaaaataatagtggctccaaaacagcttttgttaacgtcagagttcttgactcaccaagtgcccctgtgaatttgaccataagagaagtgaagaaagactcagtgacgttgtcctgggaaccaccacttattgatggtggagctaagattacaaactacattgtcgaaaaacgagaaactacaagaaaagcctatgctaccattacaaataattgcactaaaactactttcagaattgaaaatctacaagaaggatgttcttactacttccgagtcttggcttccaatgaatatgggattggtttgccagctgaaacaacagaacccgttaaagtgtctgaaccacccctcccacctggaagagtaactcttgttgatgtgacccgtaatacagctacaattaagtgggagaaaccagaaagtgatggtggcagcaaaattactggttatgtggttgaaatgcagactaaagggagtgaaaagtggagcacctgcacacaagttaagactctagaagcaactatatctggcttaactgcaggagaagagtatgtcttcagggtagctgcagttaacgaaaagggaagaagtgatccaagacaacttggagtgccagtaattgcaagggatattgaaataaagccttcagttgagcttcctttccatactttcaatgtaaaggctagagaacaacttaagattgatgtgccattcaaaggaagacctcaagctactgtgaactggagaaaagatggtcagactcttaaagagacaactagagtcaatgtttcttcttcaaagactgtaacatcactatctattaaggaagcttcaaaggaagatgttggaacttatgaattatgtgtttcaaacagtgctggatccataacagttcctattactataattgtccttgacagaccaggacctccaggtcctatacgtattgatgaggttagttgtgacagcataaccatttcttggaatcctccagaatatgatggtggctgccaaattagcaattacattgttgaaaagaaagaaaccacctctacaacatggcacatagtttcacaagcagttgcaagaacatccattaaaatagttcgcctgacaacaggaagtgagtatcagttccgtgtttgtgcagaaaaccgctatggaaagagctcctacagtgaatcttcagctgttgttgcagagtatccattcagtcccccaggtcctcctggtactcctaaagttgtgcatgccacaaaatctaccatgcttgtaacctggcaagtgccagttaatgatggaggaagtcgagtaattggctatcatcttgagtataaagaaagaagcagcattctttggtcaaaagcaaataaaatcctcattgctgatactcaagtgaaagtctccggccttgatgaaggactgatgtatgagtatcgtgtatatgctgaaaatattgctggaattggtaaatgcagtaaatcttgtgaaccagtccctgcaagagatccttgtgaccctcctggacaacctgaagtcacaaatatcacaagaaaatcagtgtcacttaaatggtctaaaccacattatgatggtggagctaagatcacaggatacattgttgaacgcagagaactaccagatggccggtggctaaagtgcaattatactaatatacaagaaacatactttgaagtaactgaacttactgaagatcagcgttatgaattccgggtttttgcaaggaatgctgctgactcagttagtgagccatctgaatccactgggcctattatagttaaagatgatgttgagcctccaagagttatgatggatgtcaagttccgagacgttattgttgtcaaagctggagaggtccttaagataaatgcagacattgcagggcgacctctgccagtaatttcctgggccaaggatggtatagaaattgaagaaagagcaagaacagaaatcatctcaacagacaatcatactttgttaacagttaaagactgtataagacgagacactgggcaatatgtactaacactgaagaatgttgccggcactcggtctgtggccgttaattgcaaagtacttgataagcctggtccaccagcaggaccacttgaaataaatggcctcactgctgagaaatgctctctttcctggggacgtccccaagaagatggtggtgcagatatcgactattaccatcgtaaaaaacgtgaaacaagccaccttgcatggacaatatgtgaaggagagttacagatgacatcctgtaaagtaaccaagttactcaaaggcaatgaatatatatttagagtaactggtgttaataaatatggtgttggtgagcccctagagagtgtagctataaaggcactagatccatttacagttccaagtccacccacgtctttggaaattacttctgtgaccaaagaatctatgacactttgctggtcaagacccgagagtgatggaggtagtgaaatatctggatatataattgaaaggcgagagaaaaatagcctaagatgggtgcgtgtaaacaaaaaaccagtttatgatctaagagtgaaatcaacaggacttcgggaaggatgtgaatatgaatatcgtgtttatgcagaaaatgctgctggcctaagtcttccaagtgaaacctctcccttaattagggcagaagatccagtgttcctaccatctcctccatccaaacccaaaattgtggactcaggcaagacaactataactattgcctgggttaagccgctgtttgatggtggggccccgataactggatatactgtagaatacaaaaaatctgatgacactgactggaaaacttccattcagagcttacgagggacagaatatacaataagcggactaacaacaggagctgaatatgttttcagagtaaaatctgtcaataaggttggtgctagtgaccccagtgatagctctgaccctcagatagcaaaggaaagagaagaagaacctttatttgatattgacagtgaaatgaggaagaccttgattgtcaaggctggtgcctcatttaccatgactgtgcctttccgaggaagaccagtacccaatgtcttgtggagtaagccagacactgacctccgtactagagcttatgttgataccacagactctcgtacatcactgaccattgaaaatgccaacagaaatgactctggaaagtacacattaacaattcagaatgttttgagtgctgcttcactgaccttagttgtcaaagttttagataccccaggtcctccaaccaacattactgtgcaagatgtaaccaaagagtctgcagtgttatcctgggatgttcctgaaaacgatggtggagcaccagtgaagaattaccacatagaaaaacgtgaggccagcaagaaagcatgggtctctgtgaccaacaactgtaaccgcctctcctacaaagttaccaatttacaagaaggagctatctattacttcagagtctctggagaaaatgagtttggtgttggtataccagctgaaacaaaggaaggagtaaaaataacagaaaaaccaagcccacctgaaaaacttggagtaacaagtatatccaaagacagtgtttccctgacctggctgaagcctgaacatgatggcggaagcagaattgtacactatgtcgttgaagcactagaaaaaggacagaaaaactgggttaaatgtgcagtggcaaagtcaacccatcacgttgtttccggtctgagagagaattctgaatactttttccgagtgtttgctgaaaatcaagctggcctgagtgacccgagagagcttctgcttcctgttcttattaaggagcaactagaaccacctgaaattgatatgaagaatttcccaagtcacactgtatatgttagagctggttcaaaccttaaagttgacattccaatctctggaaaaccacttcccaaagtgaccttatcaagagatggtgtcccccttaaggcaaccatgagatttaataccgaaattactgctgagaacctgaccatcaatctcaaagaaagtgttacagctgacgctgggagatatgaaatcactgctgccaactccagtggtacaaccaaagctttcattaacattgttgtgctagacaggcctggtcctccaactggccctgttgttattagtgatataactgaagaaagtgtgactctcaaatgggagccacctaagtatgacggtggaagtcaagttaccaactacattctactcaaaagagaaacaagtactgcagtgtggactgaagtgtctgcaacagttgcaagaaccatgatgaaagtcatgaaactgaccacaggagaagaataccaattccgcatcaaggcagaaaaccgctttggcatcagtgatcatatagattcagcttgtgtgactgtcaaactaccatacacaacacctggaccaccatctacaccatgggtcactaatgttactcgagaaagcatcactgtgggctggcatgaaccagtgtcaaatggaggcagtgcagtcgtaggctatcacctggaaatgaaagacagaaacagtattttatggcaaaaagccaacaaactggtcatccgcacaactcacttcaaagtcacaacaatcagtgctggacttatttatgaattcagggtgtatgcagaaaatgctgctggagttggaaaacctagccatccttctgaaccagtcttggcaattgatgcttgtgaacccccaagaaatgttcgtatcactgatatttcaaagaactctgtcagcctttcatggcaacaaccagctttcgatggaggtagcaagattacaggctacattgttgagagacgtgaccttccagatggcagatggaccaaggccagcttcaccaatgttactgaaactcaattcaccatctctggcttgactcagaattcccagtatgaattccgtgtctttgctaggaatgctgttggttccattagcaatccatctgaggttgtagggcccattacttgcatcgattcttatggtggtcctgtaattgatttgcctctagaatatacagaagttgtcaaatacagagcaggtacatctgtgaagctcagagctggcatttctggcaaacctgcgcctactattgagtggtataaagatgataaagaattacaaaccaatgcactggtgtgtgttgaaaataccacggacctcgcatctatactcatcaaagatgccgatcgccttaatagtggatgctatgaattaaaactaaggaatgccatggcgtcagcctcagccaccatcagagtacagatccttgacaaaccaggcccacctggtggaccaattgaatttaagactgtaactgctgagaagatcacccttctctggcggcctccagctgatgatggtggtgcaaaaatcactcactacattgtggaaaagcgtgagacaagccgcgttgtgtggtctatggtgtctgaacatttggaagagtgcatcattacaaccaccaaaattatcaaaggaaatgaatacatcttccgggtccgagccgtgaacaaatatggaattggcgagccactggaatctgattccgttgtagccaagaacgcatttgttacacctgggccaccaggcataccagaagtgacaaagattaccaagaattcgatgactgttgtatggagcaggccaattgcagatggcggtagtgatataagtggctatttccttgaaaaacgagacaagaagagcctaggatggtttaaagtactaaaagagactatccgtgacaccagacaaaaagtaacaggactcacagaaaacagtgactatcaatacagagtttgtgctgtaaacgctgctggacagggtccattttctgaaccatctgaattctacaaagctgctgatcctattgatcctccaggtccacctgctaagataagaatcgcagattcaaccaagtcatccatcacccttggctggagtaagcctgtctatgatgggggcagtgctgttactgggtatgttgtcgagataagacaaggagaggaagaggaatggactactgtctctaccaaaggagaggtcagaactacagaatatgtggtatccaacctgaaacctggagtcaattactacttccgggtatctgctgtaaactgtgctggacaaggagaacctatagaaatgaatgaacctgtacaagctaaagatatacttgaggcaccagagattgacctggatgtggctctcagaacttctgttattgccaaagctggtgaagatgtacaagtgttgattccctttaaaggcagacctccacctactgtcacatggagaaaagatgagaagaatcttggcagtgatgccagatacagcattgaaaacactgattcatcctcattactcaccattcctcaagttactcgcaatgatacaggaaaatatattctcacaatagaaaatggagttggtgaacctaagtcttcaactgtgagtgttaaagtgcttgacacaccagctgcctgccagaaactacaggttaaacatgtttctcgaggcacagtcactttgctctgggatcctcctctcattgatggaggatctccaataattaattatgtcattgaaaagagagatgccaccaagagaacatggtctgtcgtgtcacacaaatgttctagcacatccttcaagctaatagatttgtcggagaagactccattcttcttcagagttcttgcagaaaatgaaattggaattggggaaccctgtgaaactacagagccagtgaaggctgctgaagtaccagctcctatacgtgatctctcaatgaaagactcaacaaagacatctgtcatcctcagctggaccaaacctgactttgatggtggtagcgtcatcacagaatatgttgtagaaaggaaaggtaaaggtgaacagacgtggtcccacgctggcataagtaagacatgtgaaattgaggttagccaacttaaggagcagtcagtcctggagttcagagtgtttgccaaaaatgagaaaggactgagtgatcctgtcactattgggccaattacagtgaaagaacttattattacacctgaagttgacctgtcagatatccctggggcacaagtcactgtgagaattgggcacaatgtgcaccttgaattaccttataagggaaaacccaaaccatccatcagttggctgaaagatggcttgccactgaaagaaagtgaatttgttcgcttcagtaaaactgaaaacaaaattactttgagtattaagaatgccaagaaggagcatggaggaaaatacactgttattcttgataatgcagtgtgtagaattgcagtccccattacagtcatcacccttggcccaccatcaaagcccaaaggacccattcgatttgatgaaatcaaggctgatagtgtcatcctgtcatgggatgtacctgaagataatggaggaggagaaattacttgttacagcatcgagaagcgggaaacttcacaaactaactggaagatggtgtgttcaagtgttgccagaacgactttcaaagttcctaatctagtcaaagatgctgaataccagtttagagtgagagcagaaaacagatacggagtcagccaaccacttgtctcaagcattattgtggcaaaacaccagttcaggattcctggtcccccaggaaagccagttatatacaatgtgacttctgatggcatgtcactaacttgggatgctccagtttatgatggtggttcagaagttactggattccatgttgaaaagaaagaaagaaatagcatcctctggcaaaaagttaatacatcaccaatctctggaagagaatatagagccactggactggtagaaggtctggattaccaattccgtgtatatgctgaaaattctgctggcctaagctcacctagtgacccaagcaaatttaccttagctgtttctccagtagacccacctggcactcctgactacattgatgtcacccgggaaaccatcacacttaaatggaacccaccattgcgtgatggaggcagtaagattgtgggctatagcattgagaaacggcaaggaaatgaacgctgggtgagatgcaactttactgacgtcagtgaatgtcagtacacagttacaggactcagtcctggggatcgctatgagttcagaataattgcaagaaatgctgttggaactataagcccgccctcacagtcttctggcattattatgacaagagatgaaaatgttccaccaatagtagagtttggccctgaatactttgatggtctcattattaagtccggagagagccttagaattaaagctttggtacaaggaagaccagtgcctcgagtaacttggttcaaagatggagtggaaatcgaaaagaggatgaatatggaaataaccaacgtacttggatccaccagcctatttgttagagatgctactcgggaccatcgtggtgtatacacagtggaagccaaaaatgcatctggttctgcaaaagcagaaattaaagtgaaagtacaagatacaccaggaaaagtagttgggccaataagattcaccaatattactggggagaagatgactctgtggtgggatgccccactcaatgacggttgtgctcccataacccactacatcattgaaaaacgggaaaccagcagacttgcctgggcactaattgaggataaatgtgaagcccaaagttacactgccattaaactaataaacggcaatgaataccaattccgtgtttctgcagttaacaagtttggtgttggcaggccacttgattctgatccagtggttgctcaaatacaatatactgttcctgatgcccctggcattccagaacctagcaacataacaggcaacagcattaccctgacatgggcaaggccagaatcagatggtggcagtgaaattcaacagtatatccttgaaagaagagaaaagaaaagcacaagatgggtaaaagtgatcagcaaacgaccaatctctgaaacaagattcaaagtcactggtctgacagaaggcaatgagtatgaattccatgtcatggctgaaaatgctgcaggagttggacctgcaagtggcatctcaagactcattaaatgtagagagcccgtcaacccaccaggtcctcccacagtggtcaaagtaacagacacatcaaagacaactgtgagcttagaatggtccaaaccagtgtttgatggtggcatggaaataattgggtatattattgaaatgtgtaagaccgacttaggagactggcacaaggtgaatgcagaggcatgtgtgaaaacaagatatacagtcactgatctacaagcaggtgaagaatacaaattccgagttagtgctatcaatggtgctggaaaaggcgacagctgtgaagtgactggcacaattaaagcagttgaccggttaacagctcctgagttagacatagatgcaaacttcaaacagactcatgttgttagagctggggccagtattcgcctcttcattgcctaccaaggtagacctactcctacagctgtgtggagcaaaccagactctaaccttagccttcgggctgatatccatacaacagattccttcagcaccctcactgtggaaaactgcaacagaaatgatgcagggaaatatacccttactgtggaaaacaacagtggtagtaagtcaatcacattcaccgtgaaagtgctagacactccaggcccacctggcccaattaccttcaaagatgtgacccggggatctgctacattgatgtgggatgcccctcttcttgacggtggtgcccgaatccatcattatgtggtagagaaacgagaggcaagtcgccgtagttggcaggttatcagtgaaaaatgcactcgtcagatcttcaaggtcaatgacctggccgaaggtgttccgtactatttccgtgtttctgcagtaaatgagtatggtgttggtgagccctatgaaatgccagaaccaattgtagccacggaacagcctgctccacctaggagacttgatgttgttgatactagcaaatcctccgcagtcttagcttggcttaaacctgaccacgatggaggcagccggatcactggctacctgcttgaaatgagacaaaagggatctgacctctgggttgaagctggtcacaccaaacagctaactttcacagtagagcgtcttgttgagaaaactgaatatgaattccgtgtgaaggccaagaatgatgctggctatagtgaacccagagaagccttctcttctgtcatcattaaggagcctcaaatcgagcccactgctgacctcactggaattaccaatcagcttataacttgcaaagcaggaagcccatttaccattgacgtaccaatcagtggtcgtcctgcccccaaagtaacatggaaactggaagaaatgagacttaaagagacagatcgagtgagcattacaacaacaaaagacagaaccacactgactgtaaaggacagcatgagaggtgactctggaagatacttcttgaccctggaaaatacagctggtgttaaaacatttagcgtcacagttgtggtcattggaaggccaggtccagtaaccggccccattgaggtctcatctgtctcagctgaatcgtgtgtcctgtcatggggagaacctaaagatggaggaggcactgaaattactaattacatagttgaaaagcgtgaatcgggtacaacagcttggcagcttgtcaattccagtgtcaagcgcactcaaattaaagtcactcatctcacaaaatacatggaatattctttccgtgtcagttcagagaacagatttggtgtcagcaaacctctagaatcagcaccaataattgctgaacatccatttgtcccaccaagcgctcctaccagacctgaggtctaccatgtgtctgccaatgccatgtctattcgttgggaagaaccctaccacgatggtggcagtaaaatcattggctactgggttgagaagaaagaacgtaatacaattctttgggtgaaagaaaacaaagtgccatgcttagagtgcaactacaaagtaactggtttagtagaaggactggaatatcagttcagaacttatgcactcaatgctgcaggtgttagcaaggccagcgaagcttcaagacctataatggctcaaaatccagttgatgcaccaggcagaccagaggtgacagatgtcacaagatcaacagtatcactgatttggtctgccccagcgtatgatggaggcagcaaggttgtgggctacatcatagagcgtaagccagtcagtgaggtaggagatggtcgctggctgaagtgcaactacaccattgtatctgacaatttcttcaccgtgactgctctcagtgaaggagacacttatgagttccgtgtgttagccaagaatgcagcaggcgtaattagcaaagggtctgaatctacaggccctgtcacttgccgagatgaatacgctccacccaaagccgaactggatgcccgattacacggtgatctggttaccatcagagcaggttctgatcttgttctggatgctgcagttggtggcaaacctgaacccaaaattatctggaccaaaggagacaaggagctagatctctgtgaaaaagtctctttgcagtatactggcaaacgagcaactgctgtgatcaagttctgtgacagaagtgacagtggaaaatacactttaacagtgaaaaatgccagcgggaccaaggccgtgtctgtcatggtcaaagtgcttgattcccctggcccatgtggaaagctcaccgtcagcagagtaacacaggagaagtgcactttagcctggagccttccgcaggaagacggaggagcagaaatcactcactacatcgtggaaagacgcgagactagcaggctcaactgggtgattgttgaaggcgaatgcccaaccctatcctatgtcgttaccaggctcatcaagaacaatgagtacatattccgagtgagggcagtaaacaaatatggccctggtgtgcctgttgaatcagagccaattgtagccagaaactcattcactattccatcaccacccggcatacctgaagaagttgggactggcaaagagcatatcatcattcagtggacaaaacctgaatctgatggtggcaatgaaatcagcaactacctagtagacaaacgtgagaaggagagcctgcgctggacacgtgtcaacaaagactatgtggtgtatgataccaggctgaaggtgaccagcctgatggagggttgtgattaccagttccgggtgaccgcagtgaatgcagctggtaacagtgagcccagcgaacgttccaacttcatctcatgcagagaaccatcatatacccctggaccaccttctgctccaagagttgtggataccaccaaacacagcattagtttggcatggaccaaacccatgtacgatggtggtactgacattgtaggatatgttctggaaatgcaagagaaggacactgatcagtggtaccgagtgcataccaatgccacaataagaaatactgaattcactgtgccagaccttaaaatgggccagaaatattccttcagagttgctgccgtgaacgtgaagggtatgagcgaatacagcgaatcaattgctgaaattgagcccgtggaaagaatagaaataccagatcttgagcttgcagatgatctaaagaagactgtgaccatcagggctggggcctccttgcgcttgatggtgtctgtatctggaagaccacctcctgtcataacgtggagcaagcagggcattgaccttgcaagccgggcaattattgacaccactgagagctactcattgctaatagtggacaaagttaatcggtacgatgctggaaaatacacaattgaagctgaaaaccaatctggcaagaaatcagcaacagtccttgttaaagtctatgatactcctggtccctgtccttcagtgaaagttaaggaagtatcaagagattctgtgactataacttgggaaattcccacgattgatggtggagctccaatcaacaattacatcgttgagaagcgtgaagctgctatgagagcattcaaaacagtaactaccaaatgcagcaagacactttacagaatttctggacttgtagaaggaaccatgcactatttcagagtgctgccagaaaatatttatggcattggagaaccttgtgaaacatctgatgcagtactggtctcagaagtgcctttggtgcctgcaaagctagaagtggtcgatgtcaccaaatccactgttacccttgcctgggaaaaaccactctacgatggtggtagccgactcactggatatgttctcgaggcctgcaaagctggcacagagagatggatgaaggttgtcaccttaaaacccacagtcctagagcacactgttacttccttaaatgaaggtgaacaatacttatttagaataagggcacaaaatgagaaaggtgtgtcagaaccaagagagactgtcacagccgtgactgtacaagacctcagagtgttgccaacaatcgatctttctacaatgcctcagaagaccatccatgtcccagctggcagaccagtagagctggtgatacctattgctggccgtccacctcctgctgcttcctggttctttgctggttctaaactgagagaatcagagcgtgtcacagttgaaactcacactaaagtagctaaattaaccatccgtgaaaccactatcagagatactggagaatacacacttgaattgaagaatgttaccggaactacttcagaaaccattaaagttatcattcttgacaagcctggtccaccaacaggacctattaagattgatgaaattgatgctacatcaattaccatttcctgggaaccacctgaattggacggtggtgctccactgagtggttatgtggtagaacaacgtgacgctcatcgtccaggatggctgcccgtttctgaatcagtgactaggtccacgtttaagtttaccagactcaccgaaggaaatgagtatgtgttccgtgtggctgcaacaaaccgcttcgggattggctcttacttgcagtctgaggtcatagagtgtcgcagcagcatccgtattcctggacccccagaaacattacagatatttgatgtttcccgtgatggcatgacacttacttggtacccaccagaggatgacggtggctcccaagtgactggatatattgtggagcgcaaagaagtgagagcagatcgatgggtccgtgtaaataaagtacctgtgacaatgacacggtaccgctccactggccttactgaaggcttagaatatgaacaccgtgtcacagccattaatgcaagagggtctgggaaaccaagtcgtccttccaaacccatcgttgccatggatccaattgctcctccaggaaagccacaaaacccaagagttactgatacaacaaggacatcagtctccctggcctggagtgttccagaagatgaaggaggatctaaagtcacaggctacttgattgaaatgcaaaaagtagatcaacatgaatggaccaagtgtaacaccactccaaccaagattcgagagtatactctaacacacctacctcagggtgcagaatacaggttccgcgtcctagcttgtaatgctggtggacctggtgagcctgctgaggtaccaggaacagtcaaagtcactgaaatgcttgaatatcctgattatgaacttgatgaaagataccaagaaggtatctttgtaaggcaaggtggcgtcatcagacttaccataccaatcaaaggaaaaccattcccaatatgtaaatggaccaaggaaggccaggatattagtaagcgtgccatgattgcaacatctgaaacacacactgagcttgtgatcaaagaagcagacaggggtgattctggcacttatgacctggttctggaaaataaatgtggcaagaaggctgtctacatcaaggtcagggtgataggaagtcccaacagtccagaagggccactggaatatgatgacatccaagtccgctctgtgagggtcagctggagacctcctgctgatgatggtggtgctgacatcttaggctacatcctcgagagacgagaagtgcctaaagccgcctggtataccattgattccagagtccgaggtacatctctggtggtaaaaggcctcaaagagaatgtagaataccatttccgtgtttcagcagaaaaccagtttggcataagcaaacccttgaaatctgaggaaccagtcacaccaaaaacaccattgaatcctccagaacctccaagcaatcctccagaagtactcgatgtaaccaagagttctgttagcttgtcctggtcccggcccaaagatgatggtggttctagagtcacaggctactacatcgaacgcaaagagacatccactgacaaggtggtcagacacaacaagactcagatcaccaccacaatgtacactgtcacagggcttgttcccgatgctgagtatcagttccgcatcatcgcacagaatgatgttggcctgagtgagaccagccctgcttctgaaccagttgtttgcaaagatccatttgataaaccaagccaaccaggagaacttgagattctttcaatatccaaagatagtgtcactctacagtgggagaaacctgaatgtgatggtggtaaagaaattcttggatactgggttgaatatagacagtctggagacagtgcctggaagaagagcaataaggaacgtattaaggacaagcaattcacaataggaggtttgctggaagctactgagtatgaattcagggtttttgctgagaatgagactgggctgagcagacctcgcagaactgctatgtctataaagactaaactcacatctggagaggccccaggaatacgcaaagaaatgaaggatgttaccacaaaattgggtgaagctgctcaactctcatgccagattgttggaaggcctcttcctgacattaaatggtacagatttggtaaagagctcatacaaagccggaaatacaaaatgtcttcagatggacgcacacacactcttacagtaatgacagaggaacaggaagatgaaggtgtttatacctgcatagccaccaatgaggttggagaagtagaaaccagtagtaagcttctcctgcaagcaacaccgcagttccatcctggttacccactgaaagagaaatattatggagctgtgggttccacacttcggcttcatgttatgtacattggtcgtccagtacctgccatgacttggttccatggtcagaaacttttgcaaaactcagaaaacattactattgaaaacactgagcactatactcatcttgtcatgaagaatgtccaacgtaagactcatgctgggaaatacaaagtccagctcagcaatgtttttggaacagttgatgccatccttgatgtggaaatacaagataaaccagacaaacctacaggaccaattgtgatcgaagctctattgaagaactccgcagtgatcagctggaaaccacccgcagatgacggaggctcctggatcaccaactatgtggtggaaaaatgtgaggccaaggagggggctgaatggcaattggtgtcttcagccatctcagtgacaacctgtagaattgtgaacctcacagaaaatgctggctattacttccgggtttcagctcagaacactttcggcatcagtgaccctctagaagtgtcctcagttgtgatcattaagagtccatttgaaaagccaggtgctcctggcaaaccaactattactgctgtcacaaaagattcttgtgttgtggcctggaagccacctgccagtgatggaggtgcaaagattagaaattactaccttgagaagcgtgagaagaagcagaataaatggatttctgtgacaacagaagaaattcgagaaactgtcttttcagtgaaaaaccttattgaaggtcttgaatacgagtttcgtgtgaaatgtgaaaatctaggtggggaaagtgaatggagtgaaatatcagaacccatcactcccaaatctgatgtcccaattcaggcaccacactttaaagaggaactgagaaatctaaatgtcagatatcagagcaatgctaccttggtctgcaaagtgactggtcatccaaaacctatcgtcaaatggtacagacaaggcaaagaaatcattgcagatggattaaaatataggattcaagaatttaagggtggctaccaccagctcatcattgcaagtgtcacagatgatgatgccacagtttaccaagtcagagctaccaaccaagggggatctgtgtctggcactgcctccttggaagtggaagttccagctaagatacacttacctaaaactcttgaaggcatgggagcagttcatgctctccgaggtgaagtggtcagcatcaagattcctttcagtggcaaaccagatcctgtgatcacctggcagaaaggacaagatctcattgacaataatggccactaccaagttattgtcacaagatccttcacatcacttgttttccccaatggggtagagagaaaagatgctggtttctatgtggtctgtgctaaaaacagatttggaattgatcagaagacagttgaactggatgtggctgatgttcctgacccacccagaggagtcaaagttagtgatgcctcacgagattctgtcaacttaacatggactgagccagcctctgatggtggcagcaaaatcaccaactacattgttgaaaaatgtgcaactactgcagaaagatggctccgtgtaggacaggcccgagaaacacgttataccgtgatcaacttatttggaaaaacaagttaccagttccgggtaatagctgaaaataaatttggtctgagcaagccttcagagccttcagaaccaaccataaccaaagaagataagaccagagctatgaactatgatgaagaggtagatgaaaccagggaagtctccatgactaaagcatctcactcttcaaccaaggaactctatgagaaatatatgattgctgaagatcttgggcgtggtgagtttggaattgtccatcgttgtgttgaaacatcctcaaagaagacatacatggccaaatttgttaaagtcaaagggactgatcaggttttggtaaagaaggaaatttccattctgaatattgctaggcatagaaacatcttacacctccatgaatcatttgaaagcatggaagaattagttatgatctttgagtttatatcaggacttgacatatttgagcgcattaacacaagtgcttttgaacttaatgaaagagaaattgtaagttatgttcaccaggtctgtgaagcacttcagtttttacacagtcataatattggacactttgacattagaccagaaaatatcatttaccaaaccagaagaagctctaccattaaaatcatagaatttggtcaagcccgtcagctgaaaccaggggacaacttcaggcttctattcactgccccagaatactatgcacctgaagtccaccagcatgatgttgtcagcacagccacagacatgtggtcacttggaacactggtatatgtgctattgagtggtatcaacccattcctggctgaaactaaccaacagatcattgagaatatcatgaatgctgaatatactttcgatgaggaagcattcaaagagattagcattgaagccatggattttgttgaccggttgttagtgaaagagaggaaatctcgcatgacagcatcggaggctctccagcacccatggttgaagcagaagatagaaagagtcagtactaaagttatcagaacattaaaacaccggcgttattaccacaccctgatcaagaaagacctcaacatggttgtgtcagcagcccggatctcctgtggtggtgcaattcgatctcagaagggagtgagtgttgctaaagttaaagtggcatccattgaaattggcccagtttctgggcagataatgcatgcagttggtgaagaaggaggacatgtcaaatatgtatgcaaaattgaaaattatgatcagtctacccaagtgacttggtactttggtgtccgacagctggagaacagtgagaaatacgaaatcacctacgaagatggagtggccatcctctatgtcaaagacattaccaaattagatgatggtacctacagatgcaaagtagtcaatgactatggtgaagacagttcttatgcagagctatttgttaaaggtgtgagagaagtctatgactattactgccgtagaaccatgaagaaaattaagcgcagaacagacacaatgagactcctggaaaggccaccagaatttaccctgcctctctataataagacagcttatgtaggtgaaaatgtccggtttggagtaactataactgtccacccagagcctcatgtaacatggtataaatcaggtcagaaaatcaaaccaggtgacaatgacaagaagtacacatttgagtcagacaagggtctttaccaattaacaatcaacagtgtcactacagatgatgacgctgaatatactgttgtggcaaggaacaaatatggtgaagacagctgtaaagcaaagctgacagtaaccctacacccacctccaacagatagtaccttaagacccatgttcaaaaggttactggcaaatgcagaatgccaagaaggccaaagtgtctgctttgagatcagagtgtctggcatccccccaccaacattaaaatgggagaaagatggtcagccactgtccctcgggcctaacattgaaattatccatgaaggcttggattattatgctctgcacatcagggacactttgcctgaagacacgggttattatagagtcacagccactaacacagctgggtccaccagctgccaggctcacctacaagtggaacgcctgaggtacaagaaacaggaattcaagagtaaggaggagcatgagcgacacgtacaaaaacaaattgacaaaaccctcagaatggctgaaattctttctggaactgaaagtgtaccactgacacaggtagctaaagaggctctgagagaagctgctgtcctttataaaccggctgtaagcaccaagactgtaaaaggggaattcagacttgagatagaagaaaagaaggaggagagaaaactccggatgccttatgatgtaccagagccacgcaagtataagcagactaccatagaagaagaccaacgcatcaagcagttcgtgcccatgtctgacatgaagtggtataaaaagatacgtgatcagtatgaaatgcctgggaaacttgacagagttgtacagaaacgacccaagcgcatccgcctttcaagatgggaacagttctatgtgatgcctcttccacgcattacagatcaatacagacctaaatggcgtattcctaaactgtcccaagatgatcttgagatagtgagaccagcccgccggcgtacaccttctcctgattatgacttttactaccgacctagaagacgttctcttggggacatctctgatgaagaattactcctccccattgatgactacttagcaatgaaaagaacagaggaagagaggctgcgtcttgaagaagagcttgagttaggtttttcagcttcacccccaagtcgaagccctccacactttgagctttctagcctacgttactcttcaccacaagctcatgtcaaggtggaggaaacaagaaaaaacttcaggtattcaacctatcacatcccaacgaaggctgaagctagtacaagttatgcagaactgagggaacggcatgcccaggctgcgtacagacagccaaagcaacggcaaagaatcatggctgagagggaggatgaagagttgcttcgcccagttacgaccacccagcatctctcagaatacaaaagcgaacttgacttcatgtcaaaggaggaaaagtctagaaagaaatcaaggcgacaaagagaagtgacagaaataacagaaattgaggaagaatacgaaatctcaaaacatgctcaaagagaatcatcctcatctgcgtctagactactgagacgacggcgctccctgtctccaacttatattgagttaatgaggccagtgtctgagctgatccggtcacgtccacaaccggctgaggaatacgaagatgacacagaaagaaggtcacctactccagagagaactcgcccacgatcccccagccctgtgtctagtgagagatcactctcgagatttgagaggtctgcaagatttgatatcttttccaggtatgagtccatgaaagctgctttaaaaactcagaagacatcagaaaggaagtatgaagttttgagtcagcagcctttcacactggaccatgcccctcgaatcacactgagaatgcgctcgcacagggtaccatgtggccaaaatacacgttttattttaaatgttcagtctaagccaactgccgaagttaaatggtaccacaatggtgtggaactccaagaaagcagtaagattcattacaccaacacgagtggagttctcaccctggaaattctggactgtcatactgatgacagtggaacctaccgtgctgtgtgcaccaactacaagggcgaagcttctgactatgcaacgttggacgtgacaggaggggattataccacctatgcttcccaacgcagagatgaagaggtccccagatctgttttccctgagctgacaagaacagaggcgtatgctgttccatcatttaagaaaacatctgagatggaagcttcgtcttctgtcagggaagtgaaatcacagatgacggagacaagggaaagtctctcctcatatgaacactctgcatctgcagaaatgaaaagtgctgcattagaagaaaagtcactggaagaaaaatccacaaccagaaagatcaagacgactttggcggcaagaattctaacaaagccacggtccatgaccgtctacgagggcgagtctgcaaggttttcttgtgacaccgatggtgagccggtaccaactgtgacctggctgcgtaaaggacaagtgctaagtacttctgcccgccaccaagtgaccaccacaaagtacaaatcaacctttgagatctcttcagtccaggcttccgatgagggcaattacagcgtggtggtagaaaacagtgaagggaaacaagaagcagagttcactctgactattcaaaaggccagggtaactgaaaaggctgtgacatcaccaccaagagtcaaatccccagagcctcgggtgaaatccccagaagcagttaagtctccaaaacgagtgaaatctccagaaccttctcacccgaaagccgtatcacccacagagacaaaaccaacaccaagagagaaagttcagcacctcccagtctctgccccaccaaagattactcagttcctgaaagcagaagcttctaaagagattgcaaaactgacctgtgtggttgaaagcagtgtattaagggcaaaagaggtcacctggtataaagatggcaagaaactgaaggaaaatgggcatttccagtttcattattcagcagatggtacctatgagctcaaaatcaataacctcactgaatctgatcaaggagaatatgtttgtgagatttctggtgaaggtggaacgtctaaaaccaacttacaatttatggggcaagcctttaagagtatccatgagaaggtatcaaaaatatcagaaactaagaaatcagatcagaaaaccactgagtcaacagtaaccagaaaaactgaaccaaaagctcctgaaccaatttcctcaaaaccagtaattgttactgggttgcaggatacaactgtttcttcagacagtgttgctaaatttgcagttaaggctactggagaaccccggccaactgccatctggacaaaagatggaaaggccattacacaaggaggtaaatataaactctctgaagacaagggagggttcttcttagaaattcataagactgatacttctgacagtggactttatacttgtacagtaaaaaattcagctggatctgtgtcctctagctgcaaattaacaataaaagctataaaagatactgaggcacagaaagtctctacacaaaagacttctgaaattacacctcagaagaaagctgttgtccaagaggaaatttcccaaaaagccctaaggtctgaagaaattaagatgtcagaggcaaaatctcaagaaaagttagccctcaaagaggaagcttcaaaggttctgatttctgaagaagtcaagaaatcagcagcaacctccctggaaaaatccattgtccatgaggaaatcactaaaacatcacaggcatcagaagaagtcagaactcatgctgagattaaagcattttctactcagatgagcataaacgaaggtcaaagactggttttaaaagccaacattgctggtgccactgatgtgaaatgggtactgaatggcgtagagcttaccaactctgaggagtaccgatatggtgtctcaggcagcgatcagaccctaaccatcaagcaagccagtcacagagatgaaggaatcctcacctgcataagcaaaaccaaggaaggaatcgtcaagtgtcagtatgatttgacactgagcaaagaactctcagatgctccagccttcatctcacagcctagatctcaaaatattaatgaaggacaaaatgttctctttacttgtgaaatcagtggcgagccatcccctgaaatcgaatggtttaaaaacaacctgccaatttctatttcttcaaatgtcagcataagccgctccagaaatgtatactcccttgaaatccgaaatgcatcagtcagcgacagtggaaagtacacaattaaggccaaaaatttccgtggccagtgttcagctacagcttccttaatggtccttcctctagttgaagaaccttccagagaggtagtattgagaacaagtggtgacacaagcttgcaaggaagcttctcgtctcagtcagtccaaatgtctgcctccaagcaggaggcctccttcagcagtttcagcagcagcagtgctagcagcatgactgagatgaaatttgcaagcatgtctgcccaaagcatgtcctccatgcaagagtcctttgtagaaatgagttccagcagctttatgggaatatctaatatgacacaactggaaagctcaactagtaaaatgcttaaagcaggcataagaggaattccgcctaaaattgaagctcttccatctgatatcagcattgatgaaggcaaagttctaacagtagcctgtgctttcacgggtgagcctaccccagaagtaacatggtcctgtggtggaagaaaaatccacagtcaagaacaggggaggttccacattgaaaacacagatgacctgacaaccctgatcatcatggacgtacagaaacaagatggtggactttataccctgagtttagggaatgaatttggatctgactctgccactgtgaatatacatattcgatccatttaagagggcctgtgccttatactctacactcattcttaacttttcgcaaacgtttcacacggactaatctttctgaactgtaaatatttaaagaaaaaaagtagttttgtatcaacctaaatgagtcaaagttcaaaaatattcatttcaatcttttcataattgttgacctaagaatataatacatttgctagtgacatgtacatactgtatatagccggattaacggttataaagttttgtaccatttattttatgacattttacaatgtaagttttgaaactaactgttggtaggagaaagtttcttatggaacgaataccctgctcaacatttaatcaatctttgtgcctcaacatactgttgatgtctaagtatgcctcagtgggttgagaaaatccccattgaagatgtcctgtccacctaaaagagaatgatgctgtgcatatcacttgatatgtgcaccaatacctactgaatcagaaatgtaaggcattggtgatgtttgcatttaccctcctgtaagcaacactttaacgtcttacattttctctgatgatgtcacacaaaattatcatgacaaatattaccagagcaaagtgtaacggccaacactttgttcgctcattttacgctgtctctgacataaggagtgcctgaatagcttggaaaagtaacatctcctggccatcccttcatttaaccaagctattcaagtattcctatgccagagcagtgccaactcttggaggtcccagagtgcagccaatgcctttgtgtggtagttctaaattttaattgcacctgaaaaacctgggcacctaagcaatgagccacagcaaaaagtaaagaacaacaacaaaataaagctgttgttaaattttaaacaatattactaattgcccaaaatgtcaatttgatgtagttcttttcatgcaagtataaattcaattgttagttataattgttggacctccttgagatagtaacaacaaaataaagcaagctatctgcacctcaaaaaaaaaa

SEQ ID NO: 133 - protein, 26926 aa, Homo sapiens
MTTQAPTFTQPLQSVVVLEGSTATFEAHISGFPVPEVSWFRDGQVISTSTLPGVQISFSDGRAKLTIPAVTKANSGRYSLKATNGSGQATSTAELLVKAETAPPNFVQRLQSMTVRQGSQVRLQVRVTGIPNPVVKFYRDGAEIQSSLDFQISQEGDLYSLLIAEAYPEDSGTYSVNATNSVGRATSTAELLVQGEEEVPAKKTKTIVSTAQISESRQTRIEKKIEAHFDARSIATVEMVIDGAAGQQLPHKTPPRIPPKPKSRSPTPPSIAAKAQLARQQSPSPIRHSPSPVRHVRAPTPSPVRSVSPAARISTSPIRSVRSPLLMRKTQASTVATGPEVPPPWKQEGYVASSSEAEMRETTLTTSTQIRTEERWEGRYGVQEQVTISGAAGAAASVSASASYAAEAVATGAKEVKQDADKSAAVATVVAAVDMARVREPVISAVEQTAQRTTTTAVHIQPAQEQVRKEAEKTAVTKVVVAADKAKEQELKSRTKEIITTKQEQMHVTHEQIRKETEKTFVPKVVISAAKAKEQETRISEEITKKQKQVTQEAIMKETRKTVVPKVIVATPKVKEQDLVSRGREGITTKREQVQITQEKMRKEAEKTALSTIAVATAKAKEQETILRTRETMATRQEQIQVTHGKVDVGKKAEAVATVVAAVDQARVREPREPGHLEESYAQQTTLEYGYKERISAAKVAEPPQRPASEPHVVPKAVKPRVIQAPSETHIKTTDQKGMHISSQIKKTTDLTTERLVHVDKRPRTASPHFTVSKISVPKTEHGYEASIAGSAIATLQKELSATSSAQKITKSVKAPTVKPSETRVRAEPTPLPQFPFADTPDTYKSEAGVEVKKEVGVSITGTTVREERFEVLHGREAKVTETARVPAPVEIPVTPPTLVSGLKNVTVIEGESVTLECHISGYPSPTVTWYREDYQIESSIDFQITFQSGIARLMIREAFAEDSGRFTCSAVNEAGTVSTSCYLAVQVSEEFEKETTAVTEKFTTEEKRFVESRDVVMTDTSLTEEQAGPGEPAAPYFITKPVVQKLVEGGSVVFGCQVGGNPKPHVYWKKSGVPLTTGYRYKVSYNKQTGECKLVISMTFADDAGEYTIVVRNKHGETSASASLLEEADYELLMKSQQEMLYQTQVTAFVQEPEVGETAPGFVYSEYEKEYEKEQALIRKKMAKDTVVVRTYVEDQEFHISSFEERLIKEIEYRIIKTTLEELLEEDGEEKMAVDISESEAVESGFDLRIKNYRILEGMGVTFHCKMSGYPLPKIAWYKDGKRIKHGERYQMDFLQDGRASLRIPVVLPEDEGIYTAFASNIKGNAICSGKLYVEPAAPLGAPTYIPTLEPVSRIRSLSPRSVSRSPIRMSPARMSPARMSPARMSPARMSPGRRLEETDESQLERLYKPVFVLKPVSFKCLEGANCRFDLKVVGRPMPETFWFHDGQQIVNDYTHKVVIKEDGTQSLIIVPATPSDSGEWTVVAQNRAGRSSISVILTVEAVEHQVKPMFVEKLKNVNIKEGSRLEMKVRATGNPNPDIVWLKNSDIIVPHKYPKIRIEGTKGEAALKIDSTVSQDSAWYTATAINKAGRDTTRCKVNVEVEFAEPEPERKLIIPRGTYRAKEIAAPELEPLHLRYGQEQWEEGDLYDKEKQQKPFFKKKLTSLRLKRFGPAHFECRLTPISDPTMVVEWLHDGKPLEAANRLRMINEFGYCSLDYGVAYSRDSGIITCRATNKYGTDHTSATLIVKDEKSLVEESQLPEGRKGLQRIEELERMAHEGALTGVTTDQKEKQKPDIVLYPEPVRVLEGETARFRCRVTGYPQPKVNWYLNGQLIRKSKRFRVRYDGIHYLDIVDCKSYDTGEVKVTAENPEGVIEHKVKLEIQQREDFRSVLRRAPEPRPEFHVHEPGKLQFEVQKVDRPVDTTETKEVVKLKRAERITHEKVPEESEELRSKFKRRTEEGYYEAITAVELKSRKKDESYEELLRKTKDELLHWTKELTEEEKKALAEEGKITIPTFKPDKIELSPSMEAPKIFERIQSQTVGQGSDAHFRVRVVGKPDPECEWYKNGVKIERSDRIYWYWPEDNVCELVIRDVTAEDSASIMVKAINIAGETSSHAFLLVQAKQLITFTQELQDVVAKEKDTMATFECETSEPFVKVKWYKDGMEVHEGDKYRMHSDRKVHFLSILTIDTSDAEDYSCVLVEDENVKTTAKLIVEGAVVEFVKELQDIEVPESYSGELECIVSPENIEGKWYHNDVELKSNGKYTITSRRGRQNLTVKDVTKEDQGEYSFVIDGKKTTCKLKMKPRPIAILQGLSDQKVCEGDIVQLEVKVSLESVEGVWMKDGQEVQPSDRVHIVIDKQSHMLLIEDMTKEDAGNYSFTIPALGLSTSGRVSVYSVDVITPLKDVNVIEGTKAVLECKVSVPDVTSVKWYLNDEQIKPDDRVQAIVKGTKQRLVINRTHASDEGPYKLIVGRVETNCNLSVEKIKIIRGLRDLTCTETQNVVFEVELSHSGIDVLWNFKDKEIKPSSKYKIEAHGKIYKLTVLNMMKDDEGKYTFYAGENMTSGKLTVAGGAISKPLTDQTVAESQEAVFECEVANPDSKGEWLRDGKHLPLTNNIRSESDGHKRRLIIAATKLDDIGEYTYKVATSKTSAKLKVEAVKIKKTLKNLTVTETQDAVFTVELTHPNVKGVQWIKNGVVLESNEKYAISVKGTIYSLRIKNCAIVDESVYGFRLGRLGASARLHVETVKIIKKPKDVTALENATVAFEVSVSHDTVPVKWFHKSVEIKPSDKHRLVSERKVHKLMLQNISPSDAGEYTAVVGQLECKAKLFVETLHITKTMKNIEVPETKTASFECEVSHFNVPSMWLKNGVEIEMSEKFKIVVQGKLHQLIIMNTSTEDSAEYTFVCGNDQVSATLTVTPIMITSMLKDINAEEKDTITFEVTVNYEGISYKWLKNGVEIKSTDKCQMRTKKLTHSLNIRNVHFGDAADYTFVAGKATSTATLYVEARHIEFRKHIKDIKVLEKKRAMFECEVSEPDITVQWMKDDQELQITDRIKIQKEKYVHRLLIPSTRMSDAGKYTVVAGGNVSTAKLFVEGRDVRIRSIKKEVQVIEKQRAVVEFEVNEDDVDAHWYKDGIEINFQVQERHKYVVERRIHRMFISETRQSDAGEYTFVAGRNRSSVTLYVNAPEPPQVLQELQPVTVQSGKPARFCAMISGRPQPKISWYKEEQLLSTGFKCKFLHDGQEYTLLLIEAFPEDAAVYTCEAKNDYGVATTSASLSVEVPEVVSPDQEMPVYPPAIITPLQDTVTSEGQPARFQCRVSGTDLKVSWYSKDKKIKPSRFFRMTQFEDTYQLEIAEAYPEDEGTYTFVANNAVGQVSSTANLSLEAPESILHERIEQEIEMEMKEFSSSFLSAEEEGLHSAELQLSKINETLELLSESPVYPTKFDSEKEGTGPIFIKEVSNADISMGDVATLSVTVIGIPKPKIQWFFNGVLLTPSADYKFVFDGDDHSLIILFTKLEDEGEYTCMASNDYGKTICSAYLKINSKGEGHKDTETESAVAKSLEKLGGPCPPHFLKELKPIRCAQGLPAIFEYTVVGEPAPTVTWFKENKQLCTSVYYTIIHNPNGSGTFIVNDPQREDSGLYICKAENMLGESTCAAELLVLLEDTDMTDTPCKAKSTPEAPEDFPQTPLKGPAVEALDSEQEIATFVKDTILKAALITEENQQLSYEHIAKANELSSQLPLGAQELQSILEQDKLTPESTREFLCINGSIHFQPLKEPSPNLQLQIVQSQKTFSKEGILMPEEPETQAVLSDTEKIFPSAMSIEQINSLTVEPLKTLLAEPEGNYPQSSIEPPMHSYLTSVAEEVLSLKEKTVSDTNREQRVTLQKQEAQSALILSQSLAEGHVESLQSPDVMISQVNYEPLVPSEHSCTEGGKILIESANPLENAGQDSAVRIEEGKSLRFPLALEEKQVLLKEEHSDNVVMPPDQIIESKREPVAIKKVQEVQGRDLLSKESLLSGIPEEQRLNLKIQICRALQAAVASEQPGLFSEWLRNIEKVEVEAVNITQEPRHIMCMYLVTSAKSVTEEVTIIIEDVDPQMANLKMELRDALCAIIYEEIDILTAEGPRIQQGAKTSLQEEMDSFSGSQKVEPITEPEVESKYLISTEEVSYFNVQSRVKYLDATPVTKGVASAVVSDEKQDESLKPSEEKEESSSESGTEEVATVKIQEAEGGLIKEDGPMIHTPLVDTVSEEGDIVHLTTSITNAKEVNWYFENKLVPSDEKFKCLQDQNTYTLVIDKVNTEDHQGEYVCEALNDSGKTATSAKLTVVKRAAPVIKRKIEPLEVALGHLAKFTCEIQSAPNVRFQWFKAGREIYESDKCSIRSSKYISSLEILRTQVVDCGEYTCKASNEYGSVSCTATLTVTVPGGEKKVRKLLPERKPEPKEEVVLKSVLRKRPEEEEPKVEPKKLEKVKKPAVPEPPPPKPVEEVEVPTVTKRERKIPEPTKVPEIKPAIPLPAPEPKPKPEAEVKTIKPPPVEPEPTPIAAPVTVPVVGKKAEAKAPKEEAAKPKGPIKGVPKKTPSPIEAERRKLRPGSGGEKPPDEAPFTYQLKAVPLKFVKEIKDIILTESEFVGSSAIFECLVSPSTAITTWMKDGSNIRESPKHRFIADGKDRKLHIIDVQLSDAGEYTCVLRLGNKEKTSTAKLVVEELPVRFVKTLEEEVTVVKGQPLYLSCELNKERDVVWRKDGKIVVEKPGRIVPGVIGLMRALTINDADDTDAGTYTVTVENANNLECSSCVKVVEVIRDWLVKPIRDQHVKPKGTAIFACDIAKDTPNIKWFKGYDEIPAEPNDKTEILRDGNHLYLKIKNAMPEDIAEYAVEIEGKRYPAKLTLGEREVELLKPIEDVTIYEKESASFDAEISEADIPGQWKLKGELLRPSPTCEIKAEGGKRFLTLHKVKLDQAGEVLYQALNAITTAILTVKEIELDFAVPLKDVTVPERRQARFECVLTREANVIWSKGPDIIKSSDKFDIIADGKKHILVINDSQFDDEGVYTAEVEGKKTSARLFVTGIRLKFMSPLEDQTVKEGETATFVCELSHEKMHVVWFKNDAKLHTSRTVLISSEGKTHKLEMKEVTLDDISQIKAQVKELSSTAQLKVLEADPYFTVKLHDKTAVEKDEITLKCEVSKDVPVKWFKDGEEIVPSPKYSIKADGLRRILKIKKADLKDKGEYVCDCGTDKTKANVTVEARLIEVEKPLYGVEVFVGETAHFEIELSEPDVHGQWKLKGQPLTASPDCEIIEDGKKHILILHNCQLGMTGEVSFQAANAKSAANLKVKELPLIFITPLSDVKVFEKDEAKFECEVSREPKTFRWLKGTQEITGDDRFELIKDGTKHSMVIKSAAFEDEAKYMFEAEDKHTSGKLIIEGIRLKFLTPLKDVTAKEKESAVFTVELSHDNIRVKWFKNDQRLHTTRSVSMQDEGKTHSITFKDLSIDDTSQIRVEAMGMSSEAKLTVLEGDPYFTGKLQDYTGVEKDEVILQCEISKADAPVKWFKDGKEIKPSKNAVIKTDGKKRMLILKKALKSDIGQYTCDCGTDKTSGKLDIEDREIKLVRPLHSVEVMETETARFETEISEDDIHANWKLKGEALLQTPDCEIKEEGKIHSLVLHNCRLDQTGGVDFQAANVKSSAHLRVKPRVIGLLRPLKDVTVTAGETATFDCELSYEDIPVEWYLKGKKLEPSDKVVPRSEGKVHTLTLRDVKLEDAGEVQLTAKDFKTHANLFVKEPPVEFTKPLEDQTVEEGATAVLECEVSRENAKVKWFKNGTEILKSKKYEIVADGRVRKLVIHDCTPEDIKTYTCDAKDFKTSCNLNVVPPHVEFLRPLTDLQVREKEMARFECELSRENAKVKWFKDGAEIKKGKKYDIISKGAVRILVINKCLLDDEAEYSCEVRTARTSGMLTVLEEEAVFTKNLANIEVSETDTIKLVCEVSKPGAEVIWYKGDEEIIETGRYEILTEGRKRILVIQNAHLEDAGNYNCRLPSSRTDGKVKVHELAAEFISKPQNLEILEGEKAEFVCSISKESFPVQWKRDDKTLESGDKYDVIADGKKRVLVVKDATLQDMGTYVVMVGAARAAAHLTVIEKLRIVVPLKDTRVKEQQEVVFNCEVNTEGAKAKWFRNEEAIFDSSKYIILQKDLVYTLRIRDAHLDDQANYNVSLTNHRGENVKSAANLIVEEEDLRIVEPLKDIETMEKKSVTFWCKVNRLNVTLKWTKNGEEVPFDNRVSYRVDKYKHMLTIKDCGFPDEGEYIVTAGQDKSVAELLIIEAPTEFVEHLEDQTVTEFDDAVFSCQLSREKANVKWYRNGREIKEGKKYKFEKDGSIHRLIIKDCRLDDECEYACGVEDRKSRARLFVEEIPVEIIRPPQDILEAPGADVVFLAELNKDKVEVQWLRNNMVVVQGDKHQMMSEGKIHRLQICDIKPRDQGEYRFIAKDKEARAKLELAAAPKIKTADQDLVVDVGKPLTMVVPYDAYPKAEAEWFKENEPLSTKTIDTTAEQTSFRILEAKKGDKGRYKIVLQNKHGKAEGFINLKVIDVPGPVRNLEVTETFDGEVSLAWEEPLTDGGSKIIGYVVERRDIKRKTWVLATDRAESCEFTVTGLQKGGVEYLFRVSARNRVGTGEPVETDNPVEARSKYDVPGPPLNVTITDVNRFGVSLTWEPPEYDGGAEITNYVIELRDKTSIRWDTAMTVRAEDLSATVTDVVEGQEYSFRVRAQNRIGVGKPSAATPFVKVADPIERPSPPVNLTSSDQTQSSVQLKWEPPLKDGGSPILGYIIERCEEGKDNWIRCNMKLVPELTYKVTGLEKGNKYLYRVSAENKAGVSDPSEILGPLTADDAFVEPTMDLSAFKDGLEVIVPNPITILVPSTGYPRPTATWCFGDKVLETGDRVKMKTLSAYAELVISPSERSDKGIYTLKLENRVKTISGEIDVNVIARPSAPKELKFGDITKDSVHLTWEPPDDDGGSPLTGYVVEKREVSRKTWTKVMDFVTDLEFTVPDLVQGKEYLFKVCARNKCGPGEPAYVDEPVNMSTPATVPDPPENVKWRDRTANSIFLTWDPPKNDGGSRIKGYIVERCPRGSDKWVACGEPVAETKMEVTGLEEGKWYAYRVKTLNRQGASKPSRPTEEIQAVDTQEAPEIFLDVKLLAGLTVKAGTKIELPATVTGKPEPKITWTKADMILKQDKRITIENVPKKSTVTIVDSKRSDTGTYIIEAVNVCGRATAVVEVNVLDKPGPPAAFDITDVTNESCLLTWNPPRDDGGSKITNYVVERRATDSEVWHKLSSTVKDTNFKATKLIPNKEYIFRVAAENMYGAGEPVQASPITAKYQFDPPGPPTRLEPSDITKDAVTLTWCEPDDDGGSPITGYWVERLDPDTDKWVRCNKMPVKDTTYRVKGLTNKKKYRFRVLAENLAGPGKPSKSTEPILIKDPIDPPWPPGKPTVKDVGKTSVRLNWTKPEHDGGAKIESYVIEMLKTGTDEWVRVAEGVPTTQHLLPGLMEGQEYSFRVRAVNKAGESEPSEPSDPVLCREKLYPPSPPRWLEVINITKNTADLKWTVPEKDGGSPITNYIVEKRDVRRKGWQTVDTTVKDTKCTVTPLTEGSLYVFRVAAENAIGQSDYTEIEDSVLAKDTFTTPGPPYALAVVDVTKRHVDLKWEPPKNDGGRPIQRYVIEKKERLGTRWVKAGKTAGPDCNFRVTDVIEGTEVQFQVRAENEAGVGHPSEPTEILSIEDPTSPPSPPLDLHVTDAGRKHIAIAWKPPEKNGGSPIIGYHVEMCPVGTEKWMRVNSRPIKDLKFKVEEGVVPDKEYVLRVRAVNAIGVSEPSEISENVVAKDPDCKPTIDLETHDIIVIEGEKLSIPVPFRAVPVPTVSWHKDGKEVKASDRLTMKNDHISAHLEVPKSVRADAGIYTITLENKLGSATASINVKVIGLPGPCKDIKASDITKSSCKLTWEPPEFDGGTPILHYVLERREAGRRTYIPVMSGENKLSWTVKDLIPNGEYFFRVKAVNKVGGGEYIELKNPVIAQDPKQPPDPPVDVEVHNPTAEAMTITWKPPLYDGGSKIMGYIIEKIAKGEERWKRCNEHLVPILTYTAKGLEEGKEYQFRVRAENAAGISEPSRATPPTKAVDPIDAPKVILRTSLEVKRGDEIALDASISGSPYPTITWIKDENVIVPEEIKKRAAPLVRRRKGEVQEEEPFVLPLTQRLSIDNSKKGESQLRVRDSLRPDHGLYMIKVENDHGIAKAPCTVSVLDTPGPPINFVFEDIRKTSVLCKWEPPLDDGGSEIINYTLEKKDKTKPDSEWIVVTSTLRHCKYSVTKLIEGKEYLFRVRAENRFGPGPPCVSKPLVAKDPFGPPDAPDKPIVEDVTSNSMLVKWNEPKDNGSPILGYWLEKREVNSTHWSRVNKSLLNALKANVDGLLEGLTYVFRVCAENAAGPGKFSPPSDPKTAHDPISPPGPPIPRVTDTSSTTIELEWEPPAFNGGGEIVGYFVDKQLVGTNKWSRCTEKMIKVRQYTVKEIREGADYKLRVSAVNAAGEGPPGETQPVTVAEPQEPPAVELDVSVKGGIQIMAGKTLRIPAVVTGRPVPTKVWTKEEGELDKDRVVIDNVGTKSELIIKDALRKDHGRYVITATNSCGSKFAAARVEVFDVPGPVLDLKPVVTNRKMCLLNWSDPEDDGGSEITGFIIERKDAKMHTWRQPIETERSKCDITGLLEGQEYKFRVIAKNKFGCGPPVEIGPILAVDPLGPPTSPERLTYTERQRSTITLDWKEPRSNGGSPIQGYIIEKRRHDKPDFERVNKRLCPTTSFLVENLDEHQMYEFRVKAVNEIGESEPSLPLNVVIQDDEVPPTIKLRLSVRGDTIKVKAGEPVHIPADVTGLPMPKIEWSKNETVIEKPTDALQITKEEVSRSEAKTELSIPKAVREDKGTYTVTASNRLGSVFRNVHVEVYDRPSPPRNLAVTDIKAESCYLTWDAPLDNGGSEITHYVIDKRDASRKKAEWEEVTNTAVEKRYGIWKLIPNGQYEFRVRAVNKYGISDECKSDKVVIQDPYRLPGPPGKPKVLARTKGSMLVSWTPPLDNGGSPITGYWLEKREEGSPYWSRVSRAPITKVGLKGVEFNVPRLLEGVKYQFRAMAINAAGIGPPSEPSDPEVAGDPIFPPGPPSCPEVKDKTKSSISLGWKPPAKDGGSPIKGYIVEMQEEGTTDWKRVNEPDKLITTCECVVPNLKELRKYRFRVKAVNEAGESEPSDTTGEIPATDIQEEPEVFIDIGAQDCLVCKAGSQIRIPAVIKGRPTPKSSWEFDGKAKKAMKDGVHDIPEDAQLETAENSSVIIIPECKRSHTGKYSITAKNKAGQKTANCRVKVMDVPGPPKDLKVSDITRGSCRLSWKMPDDDGGDRIKGYVIEKRTIDGKAWTKVNPDCGSTTFVVPDLLSEQQYFFRVRAENRFGIGPPVETIQRTTARDPIYPPDPPIKLKIGLITKNTVHLSWKPPKNDGGSPVTHYIVECLAWDPTGTKKEAWRQCNKRDVEELQFTVEDLVEGGEYEFRVKAVNAAGVSKPSATVGPCDCQRPDMPPSIDLKEFMEVEEGTNVNIVAKIKGVPFPTLTWFKAPPKKPDNKEPVLYDTHVNKLVVDDTCTLVIPQSRRSDTGLYTITAVNNLGTASKEMRLNVLGRPGPPVGPIKFESVSADQMTLSWFPPKDDGGSKITNYVIEKREANRKTWVHVSSEPKECTYTIPKLLEGHEYVFRIMAQNKYGIGEPLDSEPETARNLFSVPGAPDKPTVSSVTRNSMTVNWEEPEYDGGSPVTGYWLEMKDTTSKRWKRVNRDPIKAMTLGVSYKVTGLIEGSDYQFRVYAINAAGVGPASLPSDPATARDPIAPPGPPFPKVTDWTKSSADLEWSPPLKDGGSKVTGYIVEYKEEGKEEWEKGKDKEVRGTKLVVTGLKEGAFYKFRVSAVNIAGIGEPGEVTDVIEMKDRLVSPDLQLDASVRDRIVVHAGGVIRIIAYVSGKPPPTVTWNMNERTLPQEATIETTAISSSMVIKNCQRSHQGVYSLLAKNEAGERKKTIIVDVLDVPGPVGTPFLAHNLTNESCKLTWFSPEDDGGSPITNYVIEKRESDRRAWTPVTYTVTRQNATVQGLIQGKAYFFRIAAENSIGMGPFVETSEALVIREPITVPERPEDLEVKEVTKNTVTLTWNPPKYDGGSEIINYVLESRLIGTEKFHKVTNDNLLSRKYTVKGLKEGDTYEYRVSAVNIVGQGKPSFCTKPITCKDELAPPTLHLDFRDKLTIRVGEAFALTGRYSGKPKPKVSWFKDEADVLEDDRTHIKTTPATLALEKIKAKRSDSGKYCVVVENSTGSRKGFCQVNVVDHPGPPVGPVSFDEVTKDYMVISWKPPLDDGGSKITNYIIEKKEVGKDVWMPVTSASAKTTCKVSKLLEGKDYIFRIHAENLYGISDPLVSDSMKAKDRFRVPDAPDQPIVTEVTKDSALVTWNKPHDGGKPITNYILEKRETMSKRWARVTKDPIHPYTKFRVPDLLEGCQYEFRVSAENEIGIGDPSPPSKPVFAKDPIAKPSPPVNPEAIDTTCNSVDLTWQPPRHDGGSKILGYIVEYQKVGDEEWRRANHTPESCPETKYKVTGLRDGQTYKFRVLAVNAAGESDPAHVPEPVLVKDRLEPPELILDANMAREQHIKVGDTLRLSAIIKGVPFPKVTWKKEDRDAPTKARIDVTPVGSKLEIRNAAHEDGGIYSLTVENPAGSKTVSVKVLVLDKPGPPRDLEVSEIRKDSCYLTWKEPLDDGGSVITNYVVERRDVASAQWSPLSATSKKKSHFAKHLNEGNQYLFRVAAENQYGRGPFVETPKPIKALDPLHPPGPPKDLHHVDVDKTEVSLVWNKPDRDGGSPITGYLVEYQEEGTQDWIKFKTVTNLECVVTGLQQGKTYRFRVKAENIVGLGLPDTTIPIECQEKLVPPSVELDVKLIEGLVVKAGTTVRFPAIIRGVPVPTAKWTTDGSEIKTDEHYTVETDNFSSVLTIKNCLRRDTGEYQITVSNAAGSKTVAVHLTVLDVPGPPTGPINILDVTPEHMTISWQPPKDDGGSPVINYIVEKQDTRKDTWGVVSSGSSKTKLKIPHLQKGCEYVFRVRAENKIGVGPPLDSTPTVAKHKFSPPSPPGKPVVTDITENAATVSWTLPKSDGGSPITGYYMERREVTGKWVRVNKTPIADLKFRVTGLYEGNTYEFRVFAENLAGLSKPSPSSDPIKACRPIKPPGPPINPKLKDKSRETADLVWTKPLSDGGSPILGYVVECQKPGTAQWNRINKDELIRQCAFRVPGLIEGNEYRFRIKAANIVGEGEPRELAESVIAKDILHPPEVELDVTCRDVITVRVGQTIRILARVKGRPEPDITWTKEGKVLVREKRVDLIQDLPRVELQIKEAVRADHGKYIISAKNSSGHAQGSAIVNVLDRPGPCQNLKVTNVTKENCTISWENPLDNGGSEITNFIVEYRKPNQKGWSIVASDVTKRLIKANLLANNEYYFRVCAENKVGVGPTIETKTPILAINPIDRPGEPENLHIADKGKTFVYLKWRRPDYDGGSPNLSYHVERRLKGSDDWERVHKGSIKETHYMVDRCVENQIYEFRVQTKNEGGESDWVKTEEVVVKEDLQKPVLDLKLSGVLTVKAGDTIRLEAGVRGKPFPEVAWTKDKDATDLTRSPRVKIDTRADSSKFSLTKAKRSDGGKYVVTATNTAGSFVAYATVNVLDKPGPVRNLKIVDVSSDRCTVCWDPPEDDGGCEIQNYILEKCETKRMVWSTYSATVLTPGTTVTRLIEGNEYIFRVRAENKIGTGPPTESKPVIAKTKYDKPGRPDPPEVTKVSKEEMTVVWNPPEYDGGKSITGYFLEKKEKHSTRWVPVNKSAIPERRMKVQNLLPDHEYQFRVKAENEIGIGEPSLPSRPVVAKDPIEPPGPPTNFRVVDTTKHSITLGWGKPVYDGGAPIIGYVVEMRPKIADASPDEGWKRCNAAAQLVRKEFTVTSLDENQEYEFRVCAQNQVGIGRPAELKEAIKPKEILEPPEIDLDASMRKLVIVRAGCPIRLFAIVRGRPAPKVTWRKVGIDNVVRKGQVDLVDTMAFLVIPNSTRDDSGKYSLTLVNPAGEKAVFVNVRVLDTPGPVSDLKVSDVTKTSCHVSWAPPENDGGSQVTHYIVEKREADRKTWSTVTPEVKKTSFHVTNLVPGNEYYFRVTAVNEYGPGVPTDVPKPVLASDPLSEPDPPRKLEATEMTKNSATLAWLPPLRDGGAKIDGYIISYREEEQPADRWTEYSVVKDLSLVVTGLKEGKKYKFRVAARNAVGVSLPREAEGVYEAKEQLLPPKILMPEQITIKAGKKLRIEAHVYGKPHPTCKWKKGEDEVVTSSHLAVHKADSSSILIIKDVTRKDSGYYSLTAENSSGTDTQKIKVVVMDAPGPPQPPFDISDIDADACSLSWHIPLEDGGSNITNYIVEKCDVSRGDWVTALASVTKTSCRVGKLIPGQEYIFRVRAENRFGISEPLTSPKMVAQFPFGVPSEPKNARVTKVNKDCIFVAWDRPDSDGGSPIIGYLIERKERNSLLWVKANDTLVRSTEYPCAGLVEGLEYSFRIYALNKAGSSPPSKPTEYVTARMPVDPPGKPEVIDVTKSTVSLIWARPKHDGGSKIIGYFVEACKLPGDKWVRCNTAPHQIPQEEYTATGLEEKAQYQFRAIARTAVNISPPSEPSDPVTILAENVPPRIDLSVAMKSLLTVKAGTNVCLDATVFGKPMPTVSWKKDGTLLKPAEGIKMAMQRNLCTLELFSVNRKDSGDYTITAENSSGSKSATIKLKVLDKPGPPASVKINKMYSDRAMLSWEPPLEDGGSEITNYIVDKRETSRPNWAQVSATVPITSCSVEKLIEGHEYQFRICAENKYGVGDPVFTEPAIAKNPYDPPGRCDPPVISNITKDHMTVSWKPPADDGGSPITGYLLEKRETQAVNWTKVNRKPIIERTLKATGLQEGTEYEFRVTAINKAGPGKPSDASKAAYARDPQYPPAPPAFPKVYDTTRSSVSLSWGKPAYDGGSPIIGYLVEVKRADSDNWVRCNLPQNLQKTRFEVTGLMEDTQYQFRVYAVNKIGYSDPSDVPDKHYPKDILIPPEGEHDADLRKTLILRAGVTMRLYVPVKGRPPPKITWSKPNVNLRDRIGLDIKSTDFDTFLRCENVNKYDAGKYILTLENSCGKKEYTIVVKVLDTPGPPINVTVKEISKDSAYVTWEPPIIDGGSPIINYVVQKRDAERKSWSTVTTECSKTSFRVPNLEEGKSYFFRVFAENEYGIGDPGETRDAVKASQTPGPVVDLKVRSVSKSSCSIGWKKPHSDGGSRIIGYVVDFLTEENKWQRVMKSLSLQYSAKDLTEGKEYTFRVSAENENGEGTPSEITVVARDDVVAPDLDLKGLPDLCYLAKENSNFRLKIPIKGKPAPSVSWKKGEDPLATDTRVSVESSAVNTTLIVYDCQKSDAGKYTITLKNVAGTKEGTISIKVVGKPGIPTGPIKFDEVTAEAMTLKWAPPKDDGGSEITNYILEKRDSVNNKWVTCASAVQKTTFRVTRLHEGMEYTFRVSAENKYGVGEGLKSEPIVARHPFDVPDAPPPPNIVDVRHDSVSLTWTDPKKTGGSPITGYHLEFKERNSLLWKRANKTPIRMRDFKVTGLTEGLEYEFRVMAINLAGVGKPSLPSEPVVALDPIDPPGKPEVINITRNSVTLIWTEPKYDGGHKLTGYIVEKRDLPSKSWMKANHVNVPECAFTVTDLVEGGKYEFRIRAKNTAGAISAPSESTETIICKDEYEAPTIVLDPTIKDGLTIKAGDTIVLNAISILGKPLPKSSWSKAGKDIRPSDITQITSTPTSSMLTIKYATRKDAGEYTITATNPFGTKVEHVKVTVLDVPGPPGPVEISNVSAEKATLTWTPPLEDGGSPIKSYILEKRETSRLLWTVVSEDIQSCRHVATKLIQGNEYIFRVSAVNHYGKGEPVQSEPVKMVDRFGPPGPPEKPEVSNVTKNTATVSWKRPVDDGGSEITGYHVERREKKSLRWVRAIKTPVSDLRCKVTGLQEGSTYEFRVSAENRAGIGPPSEASDSVLMKDAAYPPGPPSNPHVTDTTKKSASLAWGKPHYDGGLEITGYVVEHQKVGDEAWIKDTTGTALRITQFVVPDLQTKEKYNFRISAINDAGVGEPAVIPDVEIVEREMAPDFELDAELRRTLVVRAGLSIRIFVPIKGRPAPEVTWTKDNINLKNRANIENTESFTLLIIPECNRYDTGKFVMTIENPAGKKSGFVNVRVLDTPGPVLNLRPTDITKDSVTLHWDLPLIDGGSRITNYIVEKREATRKSYSTATTKCHKCTYKVTGLSEGCEYFFRVMAENEYGIGEPTETTEPVKASEAPSPPDSLNIMDITKSTVSLAWPKPKHDGGSKITGYVIEAQRKGSDQWTHITTVKGLECVVRNLTEGEEYTFQVMAVNSAGRSAPRESRPVIVKEQTMLPELDLRGIYQKLVIAKAGDNIKVEIPVLGRPKPTVTWKKGDQILKQTQRVNFETTATSTILNINECVRSDSGPYPLTARNIVGEVGDVITIQVHDIPGPPTGPIKFDEVSSDFVTFSWDPPENDGGVPISNYVVEMRQTDSTTWVELATTVIRTTYKATRLTTGLEYQFRVKAQNRYGVGPGITSAWIVANYPFKVPGPPGTPQVTAVTKDSMTISWHEPLSDGGSPILGYHVERKERNGILWQTVSKALVPGNIFKSSGLTDGIAYEFRVIAENMAGKSKPSKPSEPMLALDPIDPPGKPVPLNITRHTVTLKWAKPEYTGGFKITSYIVEKRDLPNGRWLKANFSNILENEFTVSGLTEDAAYEFRVIAKNAAGAISPPSEPSDAITCRDDVEAPKIKVDVKFKDTVILKAGEAFRLEADVSGRPPPTMEWSKDGKELEGTAKLEIKIADFSTNLVNKDSTRRDSGAYTLTATNPGGFAKHIFNVKVLDRPGPPEGPLAVTEVTSEKCVLSWFPPLDDGGAKIDHYIVQKRETSRLAWTNVASEVQVTKLKVTKLLKGNEYIFRVMAVNKYGVGEPLESEPVLAVNPYGPPDPPKNPEVTTITKDSMVVCWGHPDSDGGSEIINYIVERRDKAGQRWIKCNKKTLTDLRYKVSGLTEGHEYEFRIMAENAAGISAPSPTSPFYKACDTVFKPGPPGNPRVLDTSRSSISIAWNKPIYDGGSEITGYMVEIALPEEDEWQIVTPPAGLKATSYTITGLTENQEYKIRIYAMNSEGLGEPALVPGTPKAEDRMLPPEIELDADLRKVVTIRACCTLRLFVPIKGRPDPEVKWARDHGESLDKASIESASSYTLLIVGNVNRFDSGKYILTVENSSGSKSAFVNVRVLDTPGPPQDLKVKEVTKTSVTLTWDPPLLDGGSKIKNYIVEKRESTRKAYSTVATNCHKTSWKVDQLQEGCSYYFRVLAENEYGIGLPAETAESVKASERPLPPGKITLMDVTRNSVSLSWEKPEHDGGSRILGYIVEMQTKGSDKWATCATVKVTEATITGLIQGEEYSFRVSAQNEKGISDPRQLSVPVIAKDLVIPPAFKLLFNTFTVLAGEDLKVDVPFIGRPTPAVTWHKDNVPLKQTTRVNAESTENNSLLTIKDACREDVGHYVVKLTNSAGEAIETLNVIVLDKPGPPTGPVKMDEVTADSITLSWGPPKYDGGSSINNYIVEKRDTSTTTWQIVSATVARTTIKACRLKTGCEYQFRIAAENRYGKSTYLNSEPTVAQYPFKVPGPPGTPVVTLSSRDSMEVQWNEPISDGGSRVIGYHLERKERNSILWVKLNKTPIPQTKFKTTGLEEGVEYEFRVSAENIVGIGKPSKVSECYVARDPCDPPGRPEAIIVTRNSVTLQWKKPTYDGGSKITGYIVEKKELPEGRWMKASFTNIIDTHFEVTGLVEDHRYEFRVIARNAAGVFSEPSESTGAITARDEVDPPRISMDPKYKDTIVVHAGESFKVDADIYGKPIPTIQWIKGDQELSNTARLEIKSTDFATSLSVKDAVRVDSGNYILKAKNVAGERSVTVNVKVLDRPGPPEGPVVISGVTAEKCTLAWKPPLQDGGSDIINYIVERRETSRLVWTVVDANVQTLSCKVTKLLEGNEYTFRIMAVNKYGVGEPLESEPVVAKNPFVVPDAPKAPEVTTVTKDSMIVVWERPASDGGSEILGYVLEKRDKEGIRWTRCHKRLIGELRLRVTGLIENHDYEFRVSAENAAGLSEPSPPSAYQKACDPIYKPGPPNNPKVIDITRSSVFLSWSKPIYDGGCEIQGYIVEKCDVNVGEWTMCTPPTGINKTNIEVEKLLEKHEYNFRICAINKAGVGEHADVPGPIIVEEKLEAPDIDLDLELRKIINIRAGGSLRLFVPIKGRPTPEVKWGKVDGEIRDAAIIDVTSSFTSLVLDNVNRYDSGKYTLTLENSSGTKSAFVTVRVLDTPSPPVNLKVTEITKDSVSITWEPPLLDGGSKIKNYIVEKREATRKSYAAVVTNCHKNSWKIDQLQEGCSYYFRVTAENEYGIGLPAQTADPIKVAEVPQPPGKITVDDVTRNSVSLSWTKPEHDGGSKIIQYIVEMQAKHSEKWSECARVKSLQAVITNLTQGEEYLFRVVAVNEKGRSDPRSLAVPIVAKDLVIEPDVKPAFSSYSVQVGQDLKMEVPISGRPKPTITWTKDGLPLKQTTRINVTDSLDLTTLSIKETHKDDGGQYGITVANVVGQKTASIEIVTLDKPDPPKGPVKFDDVSAESITLSWNPPLYTGGCQITNYIVQKRDTTTTVWDVVSATVARTTLKVTKLKTGTEYQFRIFAENRYGQSFALESDPIVAQYPYKEPGPPGTPFATAISKDSMVIQWHEPVNNGGSPVIGYHLERKERNSILWTKVNKTIIHDTQFKAQNLEEGIEYEFRVYAENIVGVGKASKNSECYVARDPCDPPGTPEPIMVKRNEITLQWTKPVYDGGSMITGYIVEKRDLPDGRWMKASFTNVIETQFTVSGLTEDQRYEFRVIAKNAAGAISKPSDSTGPITAKDEVELPRISMDPKFRDTIVVNAGETFRLEADVHGKPLPTIEWLRGDKEIEESARCEIKNTDFKALLIVKDAIRIDGGQYILRASNVAGSKSFPVNVKVLDRPGPPEGPVQVTGVTSEKCSLTWSPPLQDGGSDISHYVVEKRETSRLAWTVVASEVVTNSLKVTKLLEGNEYVFRIMAVNKYGVGEPLESAPVLMKNPFVLPGPPKSLEVTNIAKDSMTVCWNRPDSDGGSEIIGYIVEKRDRSGIRWIKCNKRRITDLRLRVTGLTEDHEYEFRVSAENAAGVGEPSPATVYYKACDPVFKPGPPTNAHIVDTTKNSITLAWGKPIYDGGSEILGYVVEICKADEEEWQIVTPQTGLRVTRFEISKLTEHQEYKIRVCALNKVGLGEATSVPGTVKPEDKLEAPELDLDSELRKGIVVRAGGSARIHIPFKGRPMPEITWSREEGEFTDKVQIEKGVNYTQLSIDNCDRNDAGKYILKLENSSGSKSAFVTVKVLDTPGPPQNLAVKEVRKDSAFLVWEPPIIDGGAKVKNYVIDKRESTRKAYANVSSKCSKTSFKVENLTEGAIYYFRVMAENEFGVGVPVETVDAVKAAEPPSPPGKVTLTDVSQTSASLMWEKPEHDGGSRVLGYVVEMQPKGTEKWSIVAESKVCNAVVTGLSSGQEYQFRVKAYNEKGKSDPRVLGVPVIAKDLTIQPSLKLPFNTYSIQAGEDLKIEIPVIGRPRPNISWVKDGEPLKQTTRVNVEETATSTVLHIKEGNKDDFGKYTVTATNSAGTATENLSVIVLEKPGPPVGPVRFDEVSADFVVISWEPPAYTGGCQISNYIVEKRDTTTTTWHMVSATVARTTIKITKLKTGTEYQFRIFAENRYGKSAPLDSKAVIVQYPFKEPGPPGTPFVTSISKDQMLVQWHEPVNDGGTKIIGYHLEQKEKNSILWVKLNKTPIQDTKFKTTGLDEGLEYEFKVSAENIVGIGKPSKVSECFVARDPCDPPGRPEAIVITRNNVTLKWKKPAYDGGSKITGYIVEKKDLPDGRWMKASFTNVLETEFTVSGLVEDQRYEFRVIARNAAGNFSEPSDSSGAITARDEIDAPNASLDPKYKDVIVVHAGETFVLEADIRGKPIPDVVWSKDGKELEETAARMEIKSTIQKTTLVVKDCIRTDGGQYILKLSNVGGTKSIPITVKVLDRPGSPEGPLKVTGVTAEKCYLAWNPPLQDGGANISHYIIEKRETSRLSWTQVSTEVQALNYKVTKLLPGNEYIFRVMAVNKYGIGEPLESGPVTACNPYKPPGPPSTPEVSAITKDSMVVTWARPVDDGGTEIEGYILEKRDKEGVRWTKCNKKTLTDLRLRVTGLTEGHSYEFRVAAENAAGVGEPSEPSVFYRACDALYPPGPPSNPKVTDTSRSSVSLAWSKPIYDGGAPVKGYVVEVKEAAADEWTTCTPPTGLQGKQFTVTKLKENTEYNFRICAINSEGVGEPATLPGSVVAQERIEPPEIELDADLRKVVVLRASATLRLFVTIKGRPEPEVKWEKAEGILTDRAQIEVTSSFTMLVIDNVTRFDSGRYNLTLENNSGSKTAFVNVRVLDSPSAPVNLTIREVKKDSVTLSWEPPLIDGGAKITNYIVEKRETTRKAYATITNNCTKTTFRIENLQEGCSYYFRVLASNEYGIGLPAETTEPVKVSEPPLPPGRVTLVDVTRNTATIKWEKPESDGGSKITGYVVEMQTKGSEKWSTCTQVKTLEATISGLTAGEEYVFRVAAVNEKGRSDPRQLGVPVIARDIEIKPSVELPFHTFNVKAREQLKIDVPFKGRPQATVNWRKDGQTLKETTRVNVSSSKTVTSLSIKEASKEDVGTYELCVSNSAGSITVPITIIVLDRPGPPGPIRIDEVSCDSITISWNPPEYDGGCQISNYIVEKKETTSTTWHIVSQAVARTSIKIVRLTTGSEYQFRVCAENRYGKSSYSESSAVVAEYPFSPPGPPGTPKVVHATKSTMLVTWQVPVNDGGSRVIGYHLEYKERSSILWSKANKILIADTQVKVSGLDEGLMYEYRVYAENIAGIGKCSKSCEPVPARDPCDPPGQPEVTNITRKSVSLKWSKPHYDGGAKITGYIVERRELPDGRWLKCNYTNIQETYFEVTELTEDQRYEFRVFARNAADSVSEPSESTGPIIVKDDVEPPRVMMDVKFRDVIVVKAGEVLKINADIAGRPLPVISWAKDGIEIEERARTEIISTDNHTLLTVKDCIRRDTGQYVLTLKNVAGTRSVAVNCKVLDKPGPPAGPLEINGLTAEKCSLSWGRPQEDGGADIDYYHRKKRETSHLAWTICEGELQMTSCKVTKLLKGNEYIFRVTGVNKYGVGEPLESVAIKALDPFTVPSPPTSLEITSVTKESMTLCWSRPESDGGSEISGYIIERREKNSLRWVRVNKKPVYDLRVKSTGLREGCEYEYRVYAENAAGLSLPSETSPLIRAEDPVFLPSPPSKPKIVDSGKTTITIAWVKPLFDGGAPITGYTVEYKKSDDTDWKTSIQSLRGTEYTISGLTTGAEYVFRVKSVNKVGASDPSDSSDPQIAKEREEEPLFDIDSEMRKTLIVKAGASFTMTVPFRGRPVPNVLWSKPDTDLRTRAYVDTTDSRTSLTIENANRNDSGKYTLTIQNVLSAASLTLVVKVLDTPGPPTNITVQDVTKESAVLSWDVPENDGGAPVKNYHIEKREASKKAWVSVTNNCNRLSYKVTNLQEGAIYYFRVSGENEFGVGIPAETKEGVKITEKPSPPEKLGVTSISKDSVSLTWLKPEHDGGSRIVHYVVEALEKGQKNWVKCAVAKSTHHVVSGLRENSEYFFRVFAENQAGLSDPRELLLPVLIKEQLEPPEIDMKNFPSHTVYVRAGSNLKVDIPISGKPLPKVTLSRDGVPLKATMRFNTEITAENLTINLKESVTADAGRYEITAANSSGTTKAFINIVVLDRPGPPTGPVVISDITEESVTLKWEPPKYDGGSQVTNYILLKRETSTAVWTEVSATVARTMMKVMKLTTGEEYQFRIKAENRFGISDHIDSACVTVKLPYTTPGPPSTPWVTNVTRESITVGWHEPVSNGGSAVVGYHLEMKDRNSILWQKANKLVIRTTHFKVTTISAGLIYEFRVYAENAAGVGKPSHPSEPVLAIDACEPPRNVRITDISKNSVSLSWQQPAFDGGSKITGYIVERRDLPDGRWTKASFTNVTETQFTISGLTQNSQYEFRVFARNAVGSISNPSEVVGPITCIDSYGGPVIDLPLEYTEVVKYRAGTSVKLRAGISGKPAPTIEWYKDDKELQTNALVCVENTTDLASILIKDADRLNSGCYELKLRNAMASASATIRVQILDKPGPPGGPIEFKTVTAEKITLLWRPPADDGGAKITHYIVEKRETSRVVWSMVSEHLEECIITTTKIIKGNEYIFRVRAVNKYGIGEPLESDSVVAKNAFVTPGPPGIPEVTKITKNSMTVVWSRPIADGGSDISGYFLEKRDKKSLGWFKVLKETIRDTRQKVTGLTENSDYQYRVCAVNAAGQGPFSEPSEFYKAADPIDPPGPPAKIRIADSTKSSITLGWSKPVYDGGSAVTGYVVEIRQGEEEEWTTVSTKGEVRTTEYVVSNLKPGVNYYFRVSAVNCAGQGEPIEMNEPVQAKDILEAPEIDLDVALRTSVIAKAGEDVQVLIPFKGRPPPTVTWRKDEKNLGSDARYSIENTDSSSLLTIPQVTRNDTGKYILTIENGVGEPKSSTVSVKVLDTPAACQKLQVKHVSRGTVTLLWDPPLIDGGSPIINYVIEKRDATKRTWSVVSHKCSSTSFKLIDLSEKTPFFFRVLAENEIGIGEPCETTEPVKAAEVPAPIRDLSMKDSTKTSVILSWTKPDFDGGSVITEYVVERKGKGEQTWSHAGISKTCEIEVSQLKEQSVLEFRVFAKNEKGLSDPVTIGPITVKELIITPEVDLSDIPGAQVTVRIGHNVHLELPYKGKPKPSISWLKDGLPLKESEFVRFSKTENKITLSIKNAKKEHGGKYTVILDNAVCRIAVPITVITLGPPSKPKGPIRFDEIKADSVILSWDVPEDNGGGEITCYSIEKRETSQTNWKMVCSSVARTTFKVPNLVKDAEYQFRVRAENRYGVSQPLVSSIIVAKHQFRIPGPPGKPVIYNVTSDGMSLTWDAPVYDGGSEVTGFHVEKKERNSILWQKVNTSPISGREYRATGLVEGLDYQFRVYAENSAGLSSPSDPSKFTLAVSPVDPPGTPDYIDVTRETITLKWNPPLRDGGSKIVGYSIEKRQGNERWVRCNFTDVSECQYTVTGLSPGDRYEFRIIARNAVGTISPPSQSSGIIMTRDENVPPIVEFGPEYFDGLIIKSGESLRIKALVQGRPVPRVTWFKDGVEIEKRMNMEITNVLGSTSLFVRDATRDHRGVYTVEAKNASGSAKAEIKVKVQDTPGKVVGPIRFTNITGEKMTLWWDAPLNDGCAPITHYIIEKRETSRLAWALIEDKCEAQSYTAIKLINGNEYQFRVSAVNKFGVGRPLDSDPVVAQIQYTVPDAPGIPEPSNITGNSITLTWARPESDGGSEIQQYILERREKKSTRWVKVISKRPISETRFKVTGLTEGNEYEFHVMAENAAGVGPASGISRLIKCREPVNPPGPPTVVKVTDTSKTTVSLEWSKPVFDGGMEIIGYIIEMCKTDLGDWHKVNAEACVKTRYTVTDLQAGEEYKFRVSAINGAGKGDSCEVTGTIKAVDRLTAPELDIDANFKQTHVVRAGASIRLFIAYQGRPTPTAVWSKPDSNLSLRADIHTTDSFSTLTVENCNRNDAGKYTLTVENNSGSKSITFTVKVLDTPGPPGPITFKDVTRGSATLMWDAPLLDGGARIHHYVVEKREASRRSWQVISEKCTRQIFKVNDLAEGVPYYFRVSAVNEYGVGEPYEMPEPIVATEQPAPPRRLDVVDTSKSSAVLAWLKPDHDGGSRITGYLLEMRQKGSDLWVEAGHTKQLTFTVERLVEKTEYEFRVKAKNDAGYSEPREAFSSVIIKEPQIEPTADLTGITNQLITCKAGSPFTIDVPISGRPAPKVTWKLEEMRLKETDRVSITTTKDRTTLTVKDSMRGDSGRYFLTLENTAGVKTFSVTVVVIGRPGPVTGPIEVSSVSAESCVLSWGEPKDGGGTEITNYIVEKRESGTTAWQLVNSSVKRTQIKVTHLTKYMEYSFRVSSENRFGVSKPLESAPIIAEHPFVPPSAPTRPEVYHVSANAMSIRWEEPYHDGGSKIIGYWVEKKERNTILWVKENKVPCLECNYKVTGLVEGLEYQFRTYALNAAGVSKASEASRPIMAQNPVDAPGRPEVTDVTRSTVSLIWSAPAYDGGSKVVGYIIERKPVSEVGDGRWLKCNYTIVSDNFFTVTALSEGDTYEFRVLAKNAAGVISKGSESTGPVTCRDEYAPPKAELDARLHGDLVTIRAGSDLVLDAAVGGKPEPKIIWTKGDKELDLCEKVSLQYTGKRATAVIKFCDRSDSGKYTLTVKNASGTKAVSVMVKVLDSPGPCGKLTVSRVTQEKCTLAWSLPQEDGGAEITHYIVERRETSRLNWVIVEGECPTLSYVVTRLIKNNEYIFRVRAVNKYGPGVPVESEPIVARNSFTIPSPPGIPEEVGTGKEHIIIQWTKPESDGGNEISNYLVDKREKESLRWTRVNKDYVVYDTRLKVTSLMEGCDYQFRVTAVNAAGNSEPSERSNFISCREPSYTPGPPSAPRVVDTTKHSISLAWTKPMYDGGTDIVGYVLEMQEKDTDQWYRVHTNATIRNTEFTVPDLKMGQKYSFRVAAVNVKGMSEYSESIAEIEPVERIEIPDLELADDLKKTVTIRAGASLRLMVSVSGRPPPVITWSKQGIDLASRAIIDTTESYSLLIVDKVNRYDAGKYTIEAENQSGKKSATVLVKVYDTPGPCPSVKVKEVSRDSVTITWEIPTIDGGAPINNYIVEKREAAMRAFKTVTTKCSKTLYRISGLVEGTMHYFRVLPENIYGIGEPCETSDAVLVSEVPLVPAKLEVVDVTKSTVTLAWEKPLYDGGSRLTGYVLEACKAGTERWMKVVTLKPTVLEHTVTSLNEGEQYLFRIRAQNEKGVSEPRETVTAVTVQDLRVLPTIDLSTMPQKTIHVPAGRPVELVIPIAGRPPPAASWFFAGSKLRESERVTVETHTKVAKLTIRETTIRDTGEYTLELKNVTGTTSETIKVIILDKPGPPTGPIKIDEIDATSITISWEPPELDGGAPLSGYVVEQRDAHRPGWLPVSESVTRSTFKFTRLTEGNEYVFRVAATNRFGIGSYLQSEVIECRSSIRIPGPPETLQIFDVSRDGMTLTWYPPEDDGGSQVTGYIVERKEVRADRWVRVNKVPVTMTRYRSTGLTEGLEYEHRVTAINARGSGKPSRPSKPIVAMDPIAPPGKPQNPRVTDTTRTSVSLAWSVPEDEGGSKVTGYLIEMQKVDQHEWTKCNTTPTKIREYTLTHLPQGAEYRFRVLACNAGGPGEPAEVPGTVKVTEMLEYPDYELDERYQEGIFVRQGGVIRLTIPIKGKPFPICKWTKEGQDISKRAMIATSETHTELVIKEADRGDSGTYDLVLENKCGKKAVYIKVRVIGSPNSPEGPLEYDDIQVRSVRVSWRPPADDGGADILGYILERREVPKAAWYTIDSRVRGTSLVVKGLKENVEYHFRVSAENQFGISKPLKSEEPVTPKTPLNPPEPPSNPPEVLDVTKSSVSLSWSRPKDDGGSRVTGYYIERKETSTDKVVRHNKTQITTTMYTVTGLVPDAEYQFRIIAQNDVGLSETSPASEPVVCKDPFDKPSQPGELEILSISKDSVTLQWEKPECDGGKEILGYWVEYRQSGDSAWKKSNKERIKDKQFTIGGLLEATEYEFRVFAENETGLSRPRRTAMSIKTKLTSGEAPGIRKEMKDVTTKLGEAAQLSCQIVGRPLPDIKWYRFGKELIQSRKYKMSSDGRTHTLTVMTEEQEDEGVYTCIATNEVGEVETSSKLLLQATPQFHPGYPLKEKYYGAVGSTLRLHVMYIGRPVPAMTWFHGQKLLQNSENITIENTEHYTHLVMKNVQRKTHAGKYKVQLSNVFGTVDAILDVEIQDKPDKPTGPIVIEALLKNSAVISWKPPADDGGSWITNYVVEKCEAKEGAEWQLVSSAISVTTCRIVNLTENAGYYFRVSAQNTFGISDPLEVSSVVIIKSPFEKPGAPGKPTITAVTKDSCVVAWKPPASDGGAKIRNYYLEKREKKQNKWISVTTEEIRETVFSVKNLIEGLEYEFRVKCENLGGESEWSEISEPITPKSDVPIQAPHFKEELRNLNVRYQSNATLVCKVTGHPKPIVKWYRQGKEIIADGLKYRIQEFKGGYHQLIIASVTDDDATVYQVRATNQGGSVSGTASLEVEVPAKIHLPKTLEGMGAVHALRGEVVSIKIPFSGKPDPVITWQKGQDLIDNNGHYQVIVTRSFTSLVFPNGVERKDAGFYVVCAKNRFGIDQKTVELDVADVPDPPRGVKVSDASRDSVNLTWTEPASDGGSKITNYIVEKCATTAERWLRVGQARETRYTVINLFGKTSYQFRVIAENKFGLSKPSEPSEPTITKEDKTRAMNYDEEVDETREVSMTKASHSSTKELYEKYMIAEDLGRGEFGIVHRCVETSSKKTYMAKFVKVKGTDQVLVKKEISILNIARHRNILHLHESFESMEELVMIFEFISGLDIFERINTSAFELNEREIVSYVHQVCEALQFLHSHNIGHFDIRPENIIYQTRRSSTIKIIEFGQARQLKPGDNFRLLFTAPEYYAPEVHQHDVVSTATDMWSLGTLVYVLLSGINPFLAETNQQIIENIMNAEYTFDEEAFKEISIEAMDFVDRLLVKERKSRMTASEALQHPWLKQKIERVSTKVIRTLKHRRYYHTLIKKDLNMVVSAARISCGGAIRSQKGVSVAKVKVASIEIGPVSGQIMHAVGEEGGHVKYVCKIENYDQSTQVTWYFGVRQLENSEKYEITYEDGVAILYVKDITKLDDGTYRCKVVNDYGEDSSYAELFVKGVREVYDYYCRRTMKKIKRRTDTMRLLERPPEFTLPLYNKTAYVGENVRFGVTITVHPEPHVTWYKSGQKIKPGDNDKKYTFESDKGLYQLTINSVTTDDDAEYTVVARNKYGEDSCKAKLTVTLHPPPTDSTLRPMFKRLLANAECQEGQSVCFEIRVSGIPPPTLKWEKDGQPLSLGPNIEIIHEGLDYYALHIRDTLPEDTGYYRVTATNTAGSTSCQAHLQVERLRYKKQEFKSKEEHERHVQKQIDKTLRMAEILSGTESVPLTQVAKEALREAAVLYKPAVSTKTVKGEFRLEIEEKKEERKLRMPYDVPEPRKYKQTTIEEDQRIKQFVPMSDMKWYKKIRDQYEMPGKLDRVVQKRPKRIRLSRWEQFYVMPLPRITDQYRPKWRIPKLSQDDLEIVRPARRRTPSPDYDFYYRPRRRSLGDISDEELLLPIDDYLAMKRTEEERLRLEEELELGFSASPPSRSPPHFELSSLRYSSPQAHVKVEETRKNFRYSTYHIPTKAEASTSYAELRERHAQAAYRQPKQRQRIMAEREDEELLRPVTTTQHLSEYKSELDFMSKEEKSRKKSRRQREVTEITEIEEEYEISKHAQRESSSSASRLLRRRRSLSPTYIELMRPVSELIRSRPQPAEEYEDDTERRSPTPERTRPRSPSPVSSERSLSRFERSARFDIFSRYESMKAALKTQKTSERKYEVLSQQPFTLDHAPRITLRMRSHRVPCGQNTRFILNVQSKPTAEVKWYHNGVELQESSKIHYTNTSGVLTLEILDCHTDDSGTYRAVCTNYKGEASDYATLDVTGGDYTTYASQRRDEEVPRSVFPELTRTEAYAVPSFKKTSEMEASSSVREVKSQMTETRESLSSYEHSASAEMKSAALEEKSLEEKSTTRKIKTTLAARILTKPRSMTVYEGESARFSCDTDGEPVPTVTWLRKGQVLSTSARHQVTTTKYKSTFEISSVQASDEGNYSVVVENSEGKQEAEFTLTIQKARVTEKAVTSPPRVKSPEPRVKSPEAVKSPKRVKSPEPSHPKAVSPTETKPTPREKVQHLPVSAPPKITQFLKAEASKEIAKLTCVVESSVLRAKEVTWYKDGKKLKENGHFQFHYSADGTYELKINNLTESDQGEYVCEISGEGGTSKTNLQFMGQAFKSIHEKVSKISETKKSDQKTTESTVTRKTEPKAPEPISSKPVIVTGLQDTTVSSDSVAKFAVKATGEPRPTAIWTKDGKAITQGGKYKLSEDKGGFFLEIHKTDTSDSGLYTCTVKNSAGSVSSSCKLTIKAIKDTEAQKVSTQKTSEITPQKKAVVQEEISQKALRSEEIKMSEAKSQEKLALKEEASKVLISEEVKKSAATSLEKSIVHEEITKTSQASEEVRTHAEIKAFSTQMSINEGQRLVLKANIAGATDVKWVLNGVELTNSEEYRYGVSGSDQTLTIKQASHRDEGILTCISKTKEGIVKCQYDLTLSKELSDAPAFISQPRSQNINEGQNVLFTCEISGEPSPEIEWFKNNLPISISSNVSISRSRNVYSLEIRNASVSDSGKYTIKAKNFRGQCSATASLMVLPLVEEPSREVVLRTSGDTSLQGSFSSQSVQMSASKQEASFSSFSSSSASSMTEMKFASMSAQSMSSMQESFVEMSSSSFMGISNMTQLESSTSKMLKAGIRGIPPKIEALPSDISIDEGKVLTVACAFTGEPTPEVTWSCGGRKIHSQEQGRFHIENTDDLTTLIIMDVQKQDGGLYTLSLGNEFGSDSATVNIHIRSI

SEQ ID NO: 134 - DNA, 213 bp, Homo sapiens
ggtcgacacaaaactcgccaagctcgccttctggctcctggcggttccggccgtggcgccagaagcgggtgtgtaaatatgtgtgaacaagcgcttctaatcaaacggaggcggctgctcagtccagaagatatgaataaactcatgtttctgaaatccaacatgctttaagacttgacttcgggggaaaaaaaaaaaaaaaaaaagtcgacg

SEQ ID NO: 135 - DNA, 437 bp, Homo sapiens
tttcacatccaatatggaatatttattgttaaaaaaaaaacccaaaagacaaaaaaaacagtacatcacaagtggcaaaaatgtgcagaaatgggagacttatgttctgttgctggaaatgtataatggtgcaaagaagtatgggccaggtacggtggctcacgcctgtaatcccagcactttgggaggctgaagcgggtagatcacctgagaccaggagttggagaccagcctggccaacatggtaaaaacctgtctctattaaagaagtacaaaaattagatgggtatggaggcacacgcctgtaatcccagctacttgggattacaggcacacgacaccacacctgctagtttttatatttttagtaaagatggggttttaccttgtttgccaggctggtcttgaactcctgacctcaagtgatccgccagcct

SEQ ID NO: 136 - DNA, 269 bp, Homo sapiens
tttttttttttttttgtcacttaaaacaacacacatttattatctcacacagtttctgggggtcaggaatccaggagtcacttagctggtggttctggcttagggactttcatggggctgcacataagatgtctactgggctgtgatctcatccgaagccctactggggcagaggatccacttccacattcactcacgtggctgttggcaggaggccttagttccttgccatgtgggcctctccatagggctccttaacatgccagctg

SEQ ID NO: 137 - DNA, 324 bp, Homo sapiens
aggaaaaaaaatattcctacttaaattttaagtctataattcaatttaaatatgtgtgtgtctcatccaggataggataggttgtcttctattttccattttacctatttactttttttgtaagaaaagagaagaatgaattctaaagatgttccccatgggttttgattgtgtctaagctatgatgaccttcatataatcagcataaacataaaacaaattttttacttaacatgagtgcactttactaatcctcatggcacagtggctcacgcctgtaatcccagcacttggggaggacaatgtggggtggatcacgaggtc

SEQ ID NO: 138 - DNA, 957 bp, Homo sapiens; identical to SEQ ID NO: 14

SEQ ID NO: 139 - protein, 318 aa, Homo sapiens; identical to SEQ ID NO: 15

SEQ ID NO: 140 - DNA, 305 bp, Homo sapiens
acgggtaagaccgagaccaccaaggacctggcgaaagccttgggcttgctctgtgttgtcaccaactgtggcgaaggcatggattacagggccgtggggaagattttctctggcctggcacagtgcggggcttggggctgctttgatgagtttaatcgaatcgatgcttctgtgctctccgtgatctcctcccagatccagacgatccgaaatgctctgatccatcagttaaccacgttccagtttgaagggcaggagatttccctggactcccgcatgggcatctttatcacaatgaacccggg

SEQ ID NO: 141 - protein, 101 aa, Homo sapiens
TGKTETTKDLAKALGLLCVVTNCGEGMDYRAVGKIFSGLAQCGAWGCFDEFNRIDASVLSVISSQIQTIRNALIHQLTTFQFEGQEISLDSRMGIFITMNP

SEQ ID NO: 142 - DNA, 529 bp, Homo sapiens
ggacgagaaatccacgaccaatcccgatcggctcttattagctccccgctccacaagacacctgtgctttggaaatccaccaccaatcccgatcggctcttattagctccccgctccacaagacacctgtgatctggaaatctaccaccaatcccgatcggctcttattagctccccgctccacaagacacctgtgacatcctccagggccacaggagcacgtgctgaccagttttcccttccagttcctgcacaaaaagtgtccagagggctgtttgcaaacactagtgcactttgtagcttttcaccctctgtcccagggaatctaggagagatgaggcccgtcagagtcaagagatgtcatccccccagggtctccaaggcatttccacactattggtggcacctggaggacatgcaccaaggcttgccagagccaacaggaagtgagcccagagcatggcacatgagcatcacccgctgatggtggcctgctgtgcctggtgccaacagggggcatcccggcccg

SEQ ID NO: 143 - DNA, 411 bp, Homo sapiens
  misc_feature (78)..(78): n is a, c, g, or t
  misc_feature (80)..(80): n is a, c, g, or t
  misc_feature (408)..(408): n is a, c, g, or t
gttttcctcgaagtgcccttccaccctcctgcccgtatactatggtgccattgggaggactcccaggccaccagcagntnggacagccctacctcagtggcatcagtggacgggcctgtgctaatgggatccacatgaataggggctgcccctcggctgcagtgggctacccgggcatgaagcccagcagcactgcccaggcgagcttcacagatcacgaggggtcccaagtctagcccggacgagggtcttttcttatacacacttgcccgacgactccactcaccagcttgcttgcagccccatcacgactgctgccaacgccaggaagcagcctgctggtggtgggccagtcaggggtgaaggagaagcccccgacagtcctgtcctggaagcagtgtgggaccncca

SEQ ID NO: 144 - DNA, 615 bp, Homo sapiens
ttgcgccagtcccagcatccctattcagtagcaccagctggtcatggctttggccgtggccagcacttccacagggactcctgtccccaccaagccctgctccggcacctcgaatccctggcgaccatgagtcaccagctccaagccttactgtgcccccagaccaagagctccatcccccgccctctgcagcgtttgtctagcgcccttgcagctccagagccccctggcccagcccgtgactcctctttggggcctacagatgaagctggctctgagtgtcccttccctagaaaggcctgaccctccttacccaccagaacaggggttttgatgccctcactagtgttgaagcctgttccagagagaggtgggactgcaaggagaggatggtcagccctacccacctgccctgtttgaacttcctgtttgacaatgtttgctggtgattttttgttcaataaagaatttggtaaaaaaaaaaaaaaaaaaaactcgagggggggcccgggacccaatttgccctatagggagtcgtattacaattcactggccggcgttttacaacgtcatgactgggaaaaccttggcgtttcccaaattaaacggcttgca

SEQ ID NO: 145 - DNA, 421 bp, Homo sapiens
ttttttttttttttttttttttgttttatacaacaggttttattgaggatgtgtcaatacagttaacatggttgcttgtcttttcaaaaagaagttccattttctttgattcccaagtgcatttttcctgaatcttctgtgatacagggcacatgataggtatgtagagagctaagcttcctataccaagttagaagtgaaatgactaggggaaaacatttaaactttaatcttaaaaaaaaaaataggaatcaatataaaaatgcacaaggtaatgtcgttttcatagttaaaatctgacattgtttatcaaagctagtcagttaagtggacacctgcaactcaaatcccataaacattttagaaacgccaaccacccctcctgaaaggtttgaggaatgaaatttggcagaagctcagc

SEQ ID NO: 146 - DNA, 101685 bp, Homo sapiens
gatcacaaggtcaggagatcaagaccatcctggctaacacagtgaaaccctgtctctactaaaaatacggaaaattagccgacctggtggcgggcgtgcctgtagtcccagctactcgtaaggctgaggcaggagaatagtgtgaacctgggaggcagagcttgcagtgagccgagatcgggcgccattgcactccagcctgggtgacagagcgagactccgtcgcaaaaaaaaaaaaaaaaaaaaaaaaaagccggatggtagtggtacgcacctataatcccagctactcaggaggctgaggcaggagaatcgcttgagcctgggagtggaggttgtgatgagccaagatcacactgcagcactctagtatgggtgacacaatgagaccctgtctcaaaaaaccaaacaaaaacaaaaaactatgtaactgtcactcagaacggtttttattattttagaaatttcgctcagagacatttacaaaccacagtaaaaagtaaaaatgttttaaactttatagcagttatgtttaacttatttattaatcttgaccccaaaagatttttggctgttgaagaaaattaaagaagtactagaggagtaagctccctgtagatgcctctcagtggtaacgtaattggaatagtcatgcatttgaaaaaggtgaccattttgagtgagatggtgtttgtatatagagaggtgtaattacggcagccattttaaagtcataaagttgaactttgaacctccacagtaagctttcagtgagtatttgatagactggcctttgatttctgtaatgtgctaagcttaaattttgtgttacacatttgtatttcttcagatgtagttacatgtctgttctgccccagctagactgtgatatactaaccaatatgttgtctaattcacggttgtgtcctaagtaactggcgaagactagcatatgtgttttatttaacagaattgtatgggagagaaaagaggtcatgggggtcaattactattgtaatagctttaaaaattttttttttctgtaatagccttttttaggggatgatcatcccttaattccacagttttatttacttcattcctaaaatacctaaattctgaatctcagtgtaacatgttaactggacttcatgggcttcttgctatgtagaaacacagagtgatgtttgtatgtatatatgtgtgtatgtatttattcatttatttttgagatagagttttgctcttgtcacccaggctgcagtgcaatggtgcagtctcagctcactgcaacctctgcctcccgggttcaagtgattctctgcctcatcctcctgagtagctgggattataggtgccagccaccacgcctggctaattttttatatttttagtagagatagggtttcaccatgtgggccaggctggtctcgagctcctgacctcaggtgagccaccacactggccaaaacacagagtaatttaaagttcttgcttagtagctaaattcctaccaaaatgtgcttcttgctgttaacagagctaaatttcctttccgatttttataaatttatatataatttgttgaaatgagctaggtaatgggctaaatcaagggtacagtacatcatctgaacattggcagcatacatacagtggaatcattttccatgattttcaatggttggctttgtttaaaaaagtcacattattgtagtaattgaagaagaacttatcctagcgcatgtttgatctgtcaggctgtaggttactattggatgttgatttcagtgttccagtgtacagatttgaatggatgattgaagtgacatcttgcatcctcatgagtaacatactggctgtcgtggtttcaggcatgtttatatatttgggtgggtaatcattttacatcaatttataactatgcaaatatttttacaaaatacaccataaaatgcccatttttgatcatgcttatttggagttaacatacttggagcctgaaatacttaatttggaataaaccaagccctggacattctgacttactgttttaaaaattatttgagtggccaggcatggtggtttacacctgtaatcccagcagtttgggaggccagggcaggtggatcatgagttccggagttcaagaccaacctggccaagatgctgaaaccccgtctccactaaaaatacaaaaaatagctggggatggtggcgggcacctgtaatcacagctactagggaggctgaggcaggagaatcgcttgaacctgggtggcagaggttgcagtaagccgatatcgcaccactgcactccagcctgagggacagagcaaggctccatctggggggaaaaaatttatttgagcctgtaatcccagtactctgggaggctgaagtgggtggatctcttgaagtcaggagttcgagaccagcctggccaacatggtgaaaccccatctctactaaaattacaaaagttagccaggcatagttgcgtgcgcctgtagtccccagctactcaggaggctgaggcaggagaattgcttgaacttgggaggcagaggttgcagtgagccgagatcatgccactgcattcgagcctgggcaacagaacaagactccatctcaaaaaaaaaaaagccaggcgtggtggctcatgcatgtaatgtaatcccagcactttgggagggcaaggtgggcggatcacctaaggtcaggagttcaagaccagcctggccaacatagcgaaaccccgtctctaaaaatacgaaaattagctgggcgtggtggtgggtgcctgtaatcccagctactcgagggaggctgaggcaggagaatcacttgaacccgggaggcggaggttgcagtgagccaagatcatgccattgcactgcagcctgggcgacagcgtggactccatctcaaaaaaaaaaaaaaattatttgagacaccttagttctcaacctgccttttaccactttaatggatttacctaactttgttgccaggctggagtatagtggcaaaatcgaagctcgctgcagccttgaactcctgggctcaagtgatctcccacctcagccttccaagtatctgggattataggcatgagcctctgtgcccagctttagttagtgaattttattttatttgagagaagatattactctgtcacccaggctggagtatactggtgagatcacagcttactgcagccttaaatcctgggctcaatgaccaccctgcccgccccccgctgcctctgcctcctcagtaattgggactacaggtgtgccaccaagagtggctaagctttttttgtttggttggttttagggtcttactgcgttgctcaggctggtcttgaactcctagcctcaagtaatcctctgctgaggttatagggatgaaccaccatgcccagccctgcagtaaattttagatagttgacatcatttactcatttatcgttataatcaggatttactggctttgataatttttgttctgttcaaataggacagatttcacatacatatgacagattacaaaaatttttattacttaacgtgcttaaatctgaataaagcaattgtgtgtttaaaaatgaacagttatcccagcttgcctggttggtggctattttcacagctggcctatctcaattttcacttcttgtggttaggaaagtagcactagccaaataaaggcaaatatttaaaggcattttaaattaattatattggttatagctcaaatttgccatcctgttaagctttattcatttatcttttttttttttttttttttttttgagacagagtcttgctgtgtcacccaggctggagcgcagtggtgcaatctcggcttaccgcaacctccacctcccgggttcaagcaattctcctgcctcagcctcctgagtagctaggattacaggcatgcaccaccacacccagctaatttttgtatttttagtagagacggggtttcaccatgttggccaggctggtctcgaactcctgaccttgtgatccacctgccttggcctcccaaagtgctgtgattacagccatgagacaccacgcccggccagtcatttatcttttgagacaccatatattcatttcaatctttgaagcgagttttataactacttaaaaatttcaccttatgccgggcacggtggctcatgcctgtaatcccagaactctgggaggccgaggcaggcagatcacctgaggttgggagttagagaccagcctgaccaacatggagaaaccccatctctactaaaaatacaaaattatccaggcgtggtggcacatgcctgtaatcccagctacttgggaggctgaggcaggagcattgcttaaacctgggaggtggaggttgcggtgagccaagatggtgccattgcactccagcctgggcaacaagagcaaagctccgtctcaaaaaaaaaaaaaagaagaaaagaaaatcaccttacaagagccccagttccctctttagaaatataagaaaataaattccgttaaatatatttactttaaattacatgttttcatttcttaagctttggatttgtagccaactttctgggagacagtctgtgttaatagcaatataggatatcagtgtttttaaattggcttatgaaaaagtacagatttttaaatgaaaattatttaatcagtatccattgatttacttaaaagagccacatgtattaagtgatagcattctttttagtttagtgttttttttgtttgtttgttttgtttttttgagatggagtcttgctctgtcgcctaggctggagtgcagtggcgctatctcagctcactgcaacctccacctcccaggttcaagcgattctcctgttctcagcctcccaagtagctgggattacaggcatccaccaccacactcagctaagttttatatttgtagtagagatgaggtttcaccatgttggccagcctggtttcgaactcctgacctcaagtgatctgccccccttcacctcccaaaatgctaggattacaggcatgagccacccgccatgcccggcctctttttagttttgctattagaagtgataacattctttttagtttcactattagctttccttgcattcacattttacattctctcattagcatttctatccttggcattgttgagtttctaatgcttttttgcgtgagtgttttacccattaaatgtttttgtttaatttattattttcaagctttccttttgtttccataatgaatctttgtgagattcctgtattttagccatttccaaaaagtgccattttacttatttcactggaagtatttaaccattccaaactacaggctctaagtagcatcctgacattttagatctggaaagggccctttaagatcactgtatagaagtgtaccattagagtgtctttgttgtatatatatttcgttgttaatttagtgatggctgattatttctgcccattaggacagggcttaattcaatcagtatattaatcaccagtgtgaaggataaaaccttttagaacaacatgggatctaaataagttttttttaaatgccactgttaaggaggtagtgttttgtttttatttttccccctaaacacaagagagaagtcagggaattgttacggaggattcttaacaattttatcagtttgggagaaagcagtggtgaatatagacagcttttaatctagtttttgttttctctactgtcagctttctacagatcaaaaaattgggttgccgggggcagggcagcaaataccagttactttaaatgttttaccatgatcttctttttttatagggaactgactcttttttggagtaaactgcaaagaagaattgacccttctttagatacttttttggagcgctgtcgtcagtttggtgtcatagctaaaacgcagcagcatttattttgcctcattagagttatacaaactgaagtgagtactttatgccttctctgctaactgtagctggaggaaagaaatgagtgggaagataacttctcaggaaattccctttaaaggaagataagaaataatgagttttaataagattaatggaattgaccacatctgactgtttctccagattgacttcctataattaatcagaaacaaattgatggtcaaacaagttaggtgatatttatttctaattactgtgaatgaagttgtgtctcctgtcacgttaagaacattttaagaggccaggcacggtggctcaagcctgtaatcccagcactttgggaggccaaggcgggtggattacttgagctcaggagttcgagaccagcctggccaacctggtgaaaccccgtctctactaaaaatacaaaaattagccgggcatggtggcgggcgcctgtaatcccagctactttggaggctgaggcaggagaatcgcttgaacagggaaggcggaggttgtggtgagccaagattgcactgctgcactccagcctaggtgacagagtgagacttggtctttttttttttaaaaaaaaaaaaaagaacatttcaaggtaactatagaacttgcctgtttaaacaattactttataattggccattagaacattttgttttgtttaaatctttaataaaggtactaattttctattgttgaataacatcacaaaaattaatacttaaaacaatgtccgtttttatcagttcagttttgtaaatcagaaatccagcacaatgtggcaggattctcttctaagattatcatattggctaaaatgtagtttgccaggctaagttctatcagaggctctgtggaaaatccacttcaaagcttattcttatcgacaggtttcagttcctgtggttgtaggactaaggtttctgttttctggctggctgccaatcagggtctgttctcaggtgctagaagctacactcagtctttacctctgttttcaagcagcaagggtgcaacaagttggtgcttgaaacctgacatcctccatctctgactttagttttcagtttttggttgagacaggtctcgctctgtcacccaggctgtagtgcagtggtgcgatcatagctcattacagcttcaaactccttggctcaagcaatcctcccgtctcagcctccagagtagctgagattgcaggcgtgtgccactatacctggctttttcttttttggcggggagcagtggtagatacagggtcttgctttgttgcccagactggttctgaactcctggcctcaagcaattctcccacctcagccttccaaagtgctgggattataggtgtaagctgccccacctgcttgaacttgggaggcagaggtggcagtgagccgagatcacaccattgcactccagcctgggcgacagagtgagactctgtctcaaaaaaaaaaaaaaaagcaaagattgaatgacttggctatatcctatgtgcgcttgcaacagtatgccaagtcactcttgatccctcaccttcctagtttaagacccaccaatttcttcaaaattcagctccacattgcatatcctgattcacatttattcactactcctttcagtaactttttggcatatctgttcagaatatataatagtatttctggttacttttctttgaaaaatgttgttagtgatttttcaaatgttaccatcccagccagattaggctgtttaagaaagaatggccattctttgctgtccacctcacagtcttccaaaaggagttagtaacttgttgagaaactgaattattttaaaatttagctgactttccccaagtcctctctgctcttacttacaaatgataaacttctatcacatcatcctaataagtcaagagacccatggtctagtcctgtggagccactaaagcaacatggcctgttttacttggactacattccaaatgagagggagaaacttctatattctttaggccactactgttgtgggaagtctgccactcacaacagaaccagatcctagctgatacaggctaggtaatgcctctctttcaaaaaagctagagtctcagctcgtctgaaaggtagggagttatctcaattgattgttcacagtcagttacagactgaactctgttctactctttcccccttctcactattacacttgactagttttaaagaaaaaaaagttggagtctcagtttgcaagggattctacactcactcactcccttttcacctaccagtccacatctcttctactcttcaggccaaatatcttcttttttttgagacggagtctcactctgttgcccaggctggcatgcagtggcgtgatctcagctcactgcaacctccgcttcccaggttcaagggattctgatgcctcagcctcccaagtagctggggctttgggcctgcatcaccatgcctggctaattttttgtatttttattagaaatggggttttgccatgttggccctgctggtcttaaactccatgcctcaagtgatgtgcctgcctcggcctcccaaagtgctgggattacaggtgtgagccactgtgcccggcctaaatgcttttaagtccttgctcctctgctcactagttagtgacattgggcaacttaacgttctgagtgttgggggttttttgtctataaaatgaggataatacgtgcaaaaaagtttatttcaaataagtgcctaggctgtagtaggggttctgtaaatcaatgacagtgatttctttgtgttcccagcatttagaatgaatgatgcccaacacagaattaaatgcctggcaaattgtttactgatttaaacagtggaatttactccattattttacattgtattctgttaaatagttacaatgtgccagcgttattatttcatctttataaccttaggaggaaaatctgttattaacattactgttatcattttaccaataaggaaactgaagtttagaggttgagaacttgtcacttgttgtgaagctggggttcaaaggcagtcaaagtctgattctaaagtctctgctcatagcagtgcgttttaagccactctgacatatcttgcttttctttgctcatgtcatttttgtattttatttcagcctctcagataaaaagagttatcttgtatgtaccaagcttttatcacatatgaccaggtcttcctaattttaaactagtttctgagaacctgctgccatagcaagatttctgatttctgttttttccctggaaagctgagattcagtacacctgtgacggtgactataaattaccagattctttcaggaggaaatggaaaggatcatttattttatctttgaagttttgaaaaatccaagtgttcatgatagagagaatttttttttttttttttttttttgagacggagttttgctcttgttgcccaggctggagtgcaatggtgtgatcttggctaaactgcaacctccacctcctgggttcaagcgattctgctgcctcagcctccgagtagctgggattacaggcatgcaccaccacacctggctaattttgtatttttagtagagacggggtttctccgtgttggtcaggctggtctcaaactcaggtgatacacctgcctcggcctcccaaagtgctgggattacaggcgtgagccaccgtgcccagccaaagagaatttcttaaattgaatttaatcttagactcacatctatacctgtgtttcctgttgctgccattttaaaccctgcccctctactcaacatcattctattttgaatcctccagtgaccttttttatcctgaatttctttggattcacatgcatttattgtttatgcattcggggtacagataaattccttggaagtaaggaactgctttaatacacagtgcctagtaaatgtacattgttcgtagttgtagcatctaatttagttctttgcatgttgagacaagaaatatctaaatgtaactttcatgaagaaagatttaagataaaatttaggaactctaaaagtttttacaagctaaaattccttatcagtgaaagttatataatctttctgtatgcaaaaaaataatttttttatcctcttttacttacaggcacaagatgctggtcttggggtgtcaattttactgtgtgtcagagctcttcaactcagatcaagtgaagatgaggaaatgaaggcatcagtttgtaaaacaattgcctgtcttttaccagaagatttagaagttagacgagcctgtcagcttacagaattcttaattgaacccagtttggatggatttaatatgttagaagaactatatttgcaaccagatcaaaaatttgatgaagaaaatgcaccggttccaaattctcttcgatgtgagctcttactagctttaaaagcccactggccttttgatcctgagttttgggactggaaaactttaaaacgacactgccaccaacttttaggacaagaagcctcagattctgatgatgatttaagtggctatgaaatgtccattaatgacacagatgttttagagtcatttctcagtgactatgatgagggtaaagaagataaacaatatagaagaagagatttgacagatcagcataaggagaaaagagacaaaaaacctattggctcttctgaaagatatcagaggtggcttcagtacaagtttttctgtttgttatgtaagcgggaatgtatagaggctagaattcttcatcattctaagatgcatatggaagatggaatttacacctgtccagtttgtattaaaaaatttaagagaaaagaaatgtttgttcctcatgtgatggagcatgttaaaatgccaccaagcagaagggaccgctctaaaaagaaattactgttaaaaggctctcaaaagggtatttgtcctaagagcccctctgcaatcccagagcaaaaccattcattgaatgaccaagccaaaggagagtctcatgaatatgtcacattcagcaaattagaagattgccacctgcaagacagagatttgtatccatgtcccggtacagactgttcccgtgtgtttaagcaatttaaatacttaagtgtgcatcttaaagctgaacaccaaaataatgatgaaaatgccaagcactacttggatatgaaaaatagaagagagaagtgtacttactgtcgacgacattttatgtctgcttttcaccttcgagagcacgaacaagtgcattgtgggcctcagccttatatgtgtgtatctatagattgctatgctaggtttggatcagtaaatgaactacttaaccataaacaaaagcatgacgatctgcgttacaaatgtgaattaaatggctgtaatattgttttcagtgacttgggacagctttaccaccatgaagcacaacactttagggatgcatcttacacatgcaacttccttggctgtaaaaagttctattactccaaaattgaataccagaatcacctctcaatgcataatgttgaaaattcaaatggagacataaagaaatcagtgaaacttgaggagtctgcaacaggtgaaaagcaagattgtattaatcagccccatctacttaaccaaactgataaatcacatttacctgaagatcttttctgtgcagaatcagctaattctcaaatagatacagaaactgcagaaaacctgaaagaaaacagtgacagtaattctagtgatcagttaagtcatagctcttcagcttcaatgaatgaagagctaattgacacactagatcactctgaaactatgcaggatgtattgttatctaatgagaaagtctttgggccctccagtttaaaagaaaaatgttccagtatggcagtttgttttgacgggactaagtttacctgtggttttgatggctgtggttccacatacaaaaatgcaagaggaatgcagaaacatttacggaaggttcatccataccatttcaagcccaaaaagataaagacgaaagatctgtttccctctttgggtaatgaacataatcagacaactgaaaagttggatgcagaacctaaaccctgctcagatacaaacagtgactccccagatgaaggtctagatcacaatattcacattaaatgtaaacgagaacatcaaggttattcctcagaatcctccatttgtgcttctaaaaggccctgtacagaggataccatgttggaacttctgttacgcttgaaacatttaagcttgaaaaactcaataacacatggatctttctcagggtcattgcaggggtacccatccagtggtgctaagtctcttcagtcagtttcatctatctcagaccttaattttcagaatcaagatgaaaacatgccaagtcagtaccttgcacagttggcggctaagccgtttttctgtgagcttcaaggatgcaaatatgaatttgtgaccagagaggctctgttaatgcattatcttaaaaagcataattattcaaaagaaaaagtccttcagttaaccatgttccaacatcggtattccccatttcagtgtcatatttgccaaaggtcatttacaagaaaaacacaccttaggattcattataaaaataaacatcaaattggcagtgacagagcaactcacaaactattagataatgaaaagtgtgatcatgaaggcccatgttcagtagataggttgaaaggtgattgttctgcagaacttggaggtgatcccagtagtaactctgagaaaccacactgtcatcctaaaaaggatgaatgtagttctgaaacagatttggaatcatcttgtgaagaaacagaaagtaaaacatctgacatttcatcaccaataggcagccatagagaagaacaagaaggaagagagggcagaggtagcaggcgaactgttgctaaaggaaatctgtgttatattttgaataaataccacaaaccattccattgtattcataaaacttgcaactcctcattcaccaatctaaaaggcttaattcgccattacagaactgtacatcagtacaacaaagaacagttatgtttggagaaagacaaagcaagaaccaaaagggaacttgtcaaatgtaaaaagatatttgcttgcaaatataaggaatgtaataaacgcttcctgtgttccaaagctcttgctaagcactgtagtgattctcataacctagaccatattgaagagcctaaagtactttccgaagctggatctgcagcaaggttttcttgtaaccagcctcagtgccctgctgttttttatacattcaacaagttgaagcaccacttgatggaacagcataatattgaaggggaaatacattcagattatgaaattcattgtgatcttaatggctgtggccagattttcacccatcgcagtaattactcacaacatgtatattaccgacataaagactattatgatgatttgtttagaagccagaaagtagcaaatgagagactactaaggagtgaaaaggtatgtcaaacagctgatactcaggggcatgaacatcagaccaccaggagatcatttaatgctaagtctaaaaaatgtggcttaatcaaagaaaagaaagccccaataagttttaaaaccagagctgaggccctccatatgtgtgtggagcactctgagcacacacagtacccctgcatggttcaaggatgcttatctgtggtgaagttggagagcagcattgtgaggcattacaaacgcactcatcagatgagtagtgcctatttagagcaacagatggagaatcttgttgtttgcgttaagtacggtaccaaaattaaggaggaacccccttctgaagcagatccctgtataaagaaagaagaaaatagaagctgtgaatcagagcgcacagaacacagccattccccgggtgacagtagtgcacccatccagaacactgattgctgtcattcaagtgaaagggatggaggtcagaaagggtgcatagaaagcagctcagtatttgatgcagatactctgctctacaggggaactttgaaatgtaatcatagttccaaaaccacttccctagaacagtgtaatatagttcagcctcctcctccttgtaaaatagaaaattccatacctaatcccaatgggactgaaagtgggacttatttcacaagtttccagctgcctttaccaaggatcaaagaatcagaaactaggcagcatagttcagggcaagaaaacactgtaaaaaatccaacccatgtcccaaaagagaattttaggaaacattcacagccccggtcatttgatttgaagacttacaaacctatgggatttgaatcttcatttctgaaatttattcaggaaagtgaagagaaagaagatgattttgatgattgggagccttcagagcacttaacattaagtaattcttcacagtccagtaatgatttaacagggaatgttgtggcaaataatatggtgaatgacagtgaacctgaagttgacatacctcattcttccagtgactctacaattcatgagaacctgactgcaatcccacctttaatagtagctgaaacaacaacagttccttccttggaaaacctgagggttgtattggacaaagcattaacagactgtggagagcttgccttaaaacagcttcattatcttcggccagtggtggttcttgaaagatctaagttttccacaccaattttagacttatttccaacaaaaaagacagatgagctttgtgtaggaagttcataagtagcaattttgttttagtaacagactggctccaacactgcaacatggggacatttgccaactcgaacaaaggctgagaagcagccacaccgttgtttagggtagaataggctgtgtatttacatgaatgtataatatctatgtcagcagtattggctgagtccattagctctccagttggtttaatgattgggtttatttttgtttgtttgtttattaaaaaaatggaactgtacacttgtttggtgctaattaatacatcaaaatatactggggcttcctttttcaaattaagtgtgcatgattgtatatggaacaaatactaaggtcccagggtgggagggctagggaaagggatatggagttcttacttgacttgaatgtgcacctgagggtgctttgtgtaatatattgtacactacagcatcttatattttttgagttgagtttcaataaattacaatttttcacccattcgttgtttactcataatgagctttcatgccacatgtaaactgaaattgcacttgtattttctgaaatatgccattcacattttaccccagtaatttttttatttattattagctaaatcattcagaacaaggttcttttttttttttttttttttaagacagagtttcgttcttgttgcccaagctggagtgcaatggtgcagtctcgactcactgcaacctcctcctcccaggttcaagttattctcctgccccggcctcccaaagtgctgggattacaggcatgagccaccgtgcccatcccagaacaaggttctttttatcttaaaatttttgtttttgtggaaagataattctgagattaattagctgcgggagtcaagatagctcccagaggatgtccagatgttggccgagtagaaaggagaggatatgccaacctagaacatgaaggacgtagcaaattcagagggcatgtttctaggaaactacaaataatttgatatgctggcaataaaaggggaacaagagagtgacatcattgtagagatagcaggaactaaatcatgaagactaaggagtttggatttgagtctataggcatatatcagttgaagtgtggagtgctcacttgatttgagaagctgaaattggaaacagtatacttgaagtaattgaggcaagcttggtgagtgtatttactgacaattgcagcagaaggcagagtagatgaagtatttaaggagacaggattttgggggcttggagagtgaaggaaaagatttggtactgatgcaaccattttaagtaggtatacaaagaaggaatgaatatttgggaagataatggaaaccaaggtgagtttggcttttagatgtgttgagtttcattggactgtgggatgtctgtctaatgaggatagcagtatatccttttaatacagcagcttcatttcctgttgcttgtgaagttttcaactactttcattagctagtaatgaagtgactcagacaactaacatctctttctcatccttgtggttagattttttttttttttcaacggagtcttgctttgtcgctcaggctggagtgcagtggcgcgatctcgactcactgcaacctccgcccctccaggtttaagcagttctctgcctcagcctccagagtagctgggattacaggcttgtgccaccacgcccggctaattttttgtatttttagtagagacagggtttcaccatcttggccaggctggtcttgaactcctgacctcgtgatccaccctcctcggcctcccaaagtgctgggattacaggcgtgagccaccacacccagtctattgtggttagaatttcaagaccttttctctgactcttaaaccttattttcttgttttgtcagctcttcaggaatttcattctgtcacctcaccctgagtctaaagcactcccataaccaagtcgtttattgtctcagatcccagtaggtaacagaggattctgagaaatccaagtgatctgagtaagactctgttgaaagaagtggcagaaacaaggatcttagagactgagaccagtattgtttctttggaatcaagctaatttcttcagtggctttaatttcctcacttacgaagggaggaggtagaggtgaaaggtccctttttgtgatatgagcatgagaagcacctgtaggcctagtaaaaattcctcatacgagagagatggttagtccagagtaagagaaagctactaagactgaactatatccattcaaccacacagaacttgtagcccctggaaggaccaagtgaggccattcacagtggaactaaacctagattttaagaacccaattaggccgggcgcggtggctcatgcctgtaatcccagcactttgggaggctgaggtgggcggatcatgaggtcaggagatcaagaccatcctggctaagacggggaaaccccgtctctactaaaaatacaaaaaattagctgggcatgatggcacacgcctgtagtctcagctacttgggaggctgaggcaggagaatcgcttgaacccgtgaggcggatgttgcagtgagccgagatcgcggcattgcactccagcccaggtgacagagcgagacttgtctcaaaaaaagtaaaataattcaagtataagcctaagtagttgatcccaagatcactgtctatcccagttagagcagcttgcatcatttgatctttattaaagacttttggctgggcgcgatggctcgcacctgtaatcctggcactttgggaggctgaggcgggtaggtaacctgaggtcaggagtttgagaccaggctgaccaacatggagaaaccccgtctctactaaaaatacaaaaattagctgggtgtggtggcagatgcctgtaatcccagctactcaggaggctgaggcaggagaatcgctgttggaccctgaaggtggaagttggagtgagctgagattgcaccattgcactccagcctggtcaacaaagcaagactccatttcaaaaaaaaaaaaaaaaaaagactttcctgtttaaaccagcatgagtgactatacgataatacagggcaaagggttatttttttagcttgtagtaatcattttaacttgatatctctggaatttgtcccaaccctggcacagacctgaaagcactgactttgttttcaaagctttttcaattcaagagtgcctccaaaatggtgagtaggaatgaagacttccagacacttctattcttgcctttacccagaattctcttgcttcagtgttttccccattttcatgagcccatgtgtgaaatagggtaaggaactgtggaggagaaagttttttattagccttcctcagggtattccattctcaatctatcctttctcagtcccaaaaggcctactgagctgaactgcctaagacataatcattcaccaaatatttaaatacacacatttaaagagatacaattccagatgcaatgggagacaaaaaaaaaaaaaagttgtcagggccatcaagaagctttcacaaggtgaagggagggctggagtatctcagaacattgttacttaaagtgtggtagtgggccagcagtataggtgtcacctaggagattgttattaataaaaatgcataaattcaggccctactccagacctactggaccaaaatgtgcgtgttagtaagatctccaggtgattcttaggcacagaaaagttctagaagcactggcctggaagtggaaagtactgtgagaattcagggtaattgtgctttttagcattttacataaaattatgttgttgaattttcataatcctatgaagtaggtgctgttactatatttgacaaagaacgagatgaagtgtcttgcctggctggcacaaatagaggtggagcccagtttccaatctcttctgactagaagaatgtcagagagggacatttagtgtaaaggaataacagatggaaagttgcaggtggtatttgaagtaccaaaaataccacagttctgtaatgtgagtgttgtttgtgaaggtgaatagtgggaaatacaatttgaagtgtaggtgaaagccaggttattcaactcaaactccacagtcatatggtgctgacatttcttcatttgagtatagagatgggaaacgtgcatatttttttctgtgaataacatgtaacctacgaaaaaggcaagttttcttttctgaaagaaacttactcatttttgttattttttgaggcgaggtctcattaggttgcccaggctgatcttgaactcctgagcccaagcaatcttcccaccccagcctcccaaagtgctggaattgcgggcatgaaccgctgcacccggccagaaacttctaaaactcagaaaagttgctcctcctcacctcctaccccaaggtaaactgtgatacctcctggctttatactactgattttataccctattatatagaactgtgtctagagagagtggcctatccctctgtgaccttcttggtctactcctgcaggagtggcttctgtgacagactgcatttggaggtttgattcactctggggaaggtaaccaggataggcaagagatttaaaaatctgtcagcatgtatttgacaggtataacctgaaaaaaaagaccagaggcgtaggaaagctatctaaatggttaagaagccaaatatttacaaagcatataccatctgctagcccctgggtggtaggtgttgaacaagactcatttcctgcatcatagagatttaagaatccagtaagggactgggtgcggtgactcatgcctgtaatcccagcactttgggaggcacaggcaggaggatatttgaggtcaggagtttgagaccagcctggctaacatggtgaaaccctgtctctactaaaaatacaaaaattagccgcgctgtagtggtgcatgcgcctgtaatcccagatactagggaggctgaggcaggagaaccgcttgaacccaggaggcacaggttgcggtgagccaagatcaggccactgcactccagcctgggcaacagagtgagaccctgtgcccccaacctccccacccccaacaaaaaaaataatccagtagggaagacagacattaaaacagtacaaataataaagtaaaagtgcttttaaacagggggggtggaggggcttatgagaaggggaccaaaaaaggacagcaaaagcttcattgaggataatgtttaaactgaaacctaaagaatcaatagaagttagccaggcaataatctgtagtcccagctactcgggaggctgaggtaggaggatcacttgagcccaggagttagaggctgtactgtgcaataatcgcacctgtgaataggcattgacctccaagctgggggaggagggggaagctaggcaaagaacaagagtaatccaattatgtgccaaagctttgtggttcaacagcttggtgtgttggtgacattgataagactactatagctggagttgaaagaacaaatggcagaggaagagaagacttggtaggtaagcagggaccaggcattttagtgccctgttagccatgttacagattttggattttgtttgaaagacaatgaagaacctataagaatttttcaaaggcggactgggtgctatttctcatgcctgtaatcccagcactttaggagggcaaggtaggaggatcacctgagatcaggagttcgagaccaatctggccaatatggtgaaaccccatttctactaaaaatgcagagatcagccaggcgtggcacgtgcctgtagtcccagccactcaggaggctgaggcaggagaatcgcttgaacccaggaggcagaggttgcaatgagctgagatcgcaccactgcactccagcctgggcaacagagcgagaccctgtctcaaaaaaaaaaaaaaaaagaatttaccaaaggcttgaaagtaggcattgcctaagtcagtaagtcctaatagggcatgatatggaagactactgagtggaagtgactgacagatgagtgggtggatgccactattaaaggtaaactgaaggccgagtgtggtggttcacgcctgtaatcccagcactttgggaggcctaggcgggtggatcacgaggtcaggagttcgagaccagcctaaccaacatggtaaagccccgtctctactaaaaataaaaaaattagccaggcgtggtggcacatgcctgtaatcccagctactcaggaggctgagccaggagaatcgcttgaaccccagaggcagaggttgcagtgagccaagattgcgccactgcactccagcctgggagacagggcgagaccaaaaccccgcctcaaaaaaaaaaaaaaaaaaaaaaaaaaaaaaaaaaaaaagccctgtttatatcctacctccttgctgggtgcagtggctcatgcctgtaatctctgcactttgggaggccagggcaggtggatcacttgaggtcaggcattctagaccagcctggccaaaatggtgaaaccccatctctactaaaaatacaaaaaattagccaggcgtggtggcgggcgcctgtaatcccagctactcaggaggctgaggcaggagaatcgcttgaacctaggaggcataggttgcagtgagctgagatcgcaccactgcactccagcctgggcgacagagtgacacgccagctcaaaaaaataaaaataaaaaatcccatctcctcacatttccattcaacctcaatacaactcagttttttttattatgtgaaaacagctgcaacagctgctgtccatttgaattgttggaaatgtagatctacactaaccaagagagaagccactagccacaggtggctatttaacttttttttttttttttttagatggagtctcgttctgtcaccaaggctggagcacaacatcagctcactgcaacctctgcctcccaggttcaagtgattctcctgcttcagcctcccaagtagctgggactacaggtgtgcaccaccacgtcaggctaatttttgtatttttagtagagacaagatttcaccatgttggccaggctggtctcgaactcctgggctcaagtgatccacctgcctcagcctcccaaagtgctgggattacaggcgtgagccaccatgcccagccaaatttagttaaaatgtaaaatgcaatctctgctgcactattcacatttcaggtaactagtggttaccatattggacatggcagataaagaacattttcattattgcaaaaagttgtactggacagcactatgctagagccagaactagccaaagatcagacaaagcaatatgaatgaactgaaaacccaggccggtgcctggttggttttgagtaagattcattggttgggtgagtgggaagcaagctgacctttggaacagtgacatcacaaagcacagctcacaatggctctggaatacctaggcctccagactactccccctaactcatatttagattcctgaagcttctgcacatgtagttcctagagctgctgcttattaaaatgtcaacatcttcatcttctagctgggacaacctcttagagtctctctctctcagcacagtatggaattggatacaagcaagttttttgggagagactagtgcacctcagcaaacaagtttgggactattagataatcttgctccagctgtgcaaatcatcttgaggatttctttcttgattttattgggaataggaatatatgccttatggaaacgaagtattcagtcaattcaggttatactcttttgttacaaacatttatatagttataaattgaaatttgattagttctctcccatattgctgccaccagttttaagatcatgcagatgtgcaaaggcgaacctttgtctcttaagttggcaaaaactaggttatccttgaaaatctccaccaattaggctttgggcataaaaatgcttttctcacaatggtctttggcttgtcttctgtaataaaatagaccaaacatgttggtaacctgaaaagacagccttaccctcaaaaatttttgatcacttattcatctttgagtgctactatgtttatacaataggcaccaaagtagctaggatcatgagtatggcctttcttactatgccattgttctgtaactgataaggaggcatatgtattaagtcatcacaatgtgttcattattgtgttttgacaagataaggctccataagtatataggagctctttggggagtaggaatttaactggctgggattgtgagagacaggattttacatacttctgtgtagtcaccaataataatagttgacatacaatatagttgaatgctttgagaatctcaaaaattccatgaaatggatggagattattttcacatgacaagtgaagaaactgaggtgcactgaggttcagtggaaacttaaggtgacaggcttttaaaacggctttcttagagtgacaagtttacttgataaatgcagagagaagttgttattggatcattttttagcattcacttattttcatatgtcactattgtttagtaatcatggtcacggggcctttctattttaaaccatcacaatcctgcataacagtcagggagagattatttgctccattttgtagatgagagaacttgattgctacccacccaagttcacatagtttgtaagagctggcaaaattggagtttgaatcgaatttttaggatttgaaattcagttcttctccaaaatctcatttaatgcaaaccaactgacctaaatcttgaacaggaatgtgtgtgtgtgtgtgtgtgtgtgtgtgtgtgtgtgtgtgtgtgtgtacgcgcatgcgcatatatatgtgtattgtgaggattaaagaagatattgtatgtgtaaatcttagcacatatattcaataagtggtgctacagtgaaaccccatctctacttaaaatacaaaaattagccgggtgtggtggtggcacgcgcctgtagtcccagctactcaggaggctgaggcagaagaattgcttgaacccgggaggtggaggttgcagtgagccaagatcgtgccactgcactccagcctgggcgacaaagactgtgtctcaaaaaaaaaaaaagtggtgctagttgttataataaggaacaagatgattttttttcttatcctagcaagaatctgtcctactatacatattcttttgttatttatttatttattttgagatgaagtcttgctcttgtcccctagtctggagtgcaatggtgcaatttcggctcactgcaacctctgcctcccaggttcaagcaattctcctgcctcaccctcccgagtagctgggattacaggcgcataccaccacacccagctaatgttttgtattttaagtagagacagggtttcaccatgttggccaggctggtctcgaactcctgacctcaggtgatccgcccaccttggcctcccaaagtgctgggattacaggcatgagccaccgtgcccagcatatgctttatttttattttttattttttttttatgttttagagacagtgtcttgctctgtcgcccaggctggagtgcagtggtgtcatcatagctcactgcagcctcaaattcctgatctcaggtgatcctcctgcctcagcctcctgagcagttggaaccataggcatgcaccaccaggcttggctaattttaaaaatttttttgtagagacagggtctcgctacgttcactatgttgctcaggctggtctttaactcctggcctcatgcaatcctcccatctcagcctctcaaagtgctggatgcagtggtccacacctataatttattttatataaataaaatatatatatatatacattaatttttttaagagacagggtctggctatcttgcccaggctgaagtgcagtagccattcacaggtgccatcatagcacactactcctgggctcaggtgatcctcccaccttaccctccctagtagctgggactatatgtgtgtgccattgtacccagatctctcctagtatattttaaaaaccttttccatgaccaagaaatccagtttttcagactactatgtcctaaagtgtacttggaagtgtgaatttctggattcctgtcctggctctgccacttccaatatataaccttggacaatgacagagttcaaactagaaggtatatagttatccagttgtgttttttctgcataaatagatcatgcaaaggcaaagttacttccagacattcagaaaatggttatctattattacaatcttgattaaatgcaaataataatcctgcctgacctgcctacctctccagtttgcagtgaaaatcaaaagatgaaataggtgtgaaaatattttgctaaggccgggcatggtggcttacgcctgtaatcccagcattttgggaggccacgatgggcggatcacgaggtcaggagattgagaacatcctggctaacacggtgaaacctcgtctctattaaaaatacaaaaaattagccgggcgtggtggtgggcgcctgtagtcccaactactcaggaggctgaggcaggagaatggcgtgaacctgggaggcggagcttgtagtaagctgagattgcgccacagcactccagcctgggtgacagagtgaaactccatctcaaaaaaaaaaaaaaaaaaaatttgctaaatgggagacttgttattggaatgaggaattattgttactattaggtttttgttttgtttttctcttatagatagtaaactgtagcaactaacactcaacttctgttgttccattttagaaaacattgttgtttgtaatcacactctacaaactttacaagaagggctcacatatttttgaggctttgctagccaacccagaaggaagtggtctccgaattcaagacaataataatcttttcctgtccttgggtctgcaagagaaaattttgaaaaaacttaagacagtggaaaacaaaatgaagaacctagaagggataatcgttgctcaaaaacctgccacgaagagggattgctcctctgagccctactgcagctgctctgactgccagagtcccttgtccacatcagggtttacttcccccatttgaaatgtgatggactccaatcttttccaggaaagcactgtttccctcatgtgtgcagtggtgtatcaataaagatagagaacgctattgaaattaccgtgcaaagactagctctctatttagtagggctgagcttctacttgtatggatggtggggtatagtggggtatagtggtagttaaaaatgtctctaggattgtggtgtacactcagcaggctggagaccataagctgccatagatgggagaggatagctgggctggaatctaaggctgtaggaagagaagggagggtggtcaggtacatggccttgaggtccatgctgacgaggttagactaaatataataaaaagtaggaaagtgctgtttgagggccctgcagtggactgtcctttagaggtaggctgacccctgtgctggtctttggcctaaaggtatatatgcagtccaggggtctcctgcattaattactcaaaagtgggcaagggtgggagtagatacagactgacataaaggagactaattttatccaacttttactgatacctactctatgctaagcattgtgataatccctaggcatctttcctgagtgcttcaggagcattcagtttggctggatggacaagtaatttcagatcagggaattataatacagtggggtcataactttttttttttttttttttttttttgagtcagagtctcgctttgtaacccaggctggaatacagtggcaggatctcttctcactgcaacctccgcctcctgggttcaagtgattctactgcctcagcctcccaagtagctgggattacaggtgtgcatcaccacgccttgctaatttttgcattgttagtagagacagggtttcaccatgttggccaggctggtcttgaactcctggcctcaagtaatccacccaccctggcataaccaagtgcggggattacaggcatgagccactgcacctggccataacatcttgaactgaagagaattctccttggcagggagggaagaatgtagagattccactcaatgagtatgtaccctgagagagagagatggcccgcctgggaggtggcaaaaaatggttctctcagcaggcctcagattccaccaaccttatagtgtgtgcatttttgccccaataaatgagatcatggtcatctgaaacactgtgtaactatctggcacctaaatgaaatatttcatacccacagaggaggtctacagaaaaaaaacatttcatctggtatgcagataaagtgatttgttgccttcctggagaaaaactggctatgctgctcaacaagacacaatgtaaggctgggtgcagtggctcacgcctgtaatcccagcactttggggggccaaggcaggaggattgcttgagttcaggagttcgagacccacctgggcaacatagtgagaccttatctctacaaaaaataaaaaaattagctgggtgtggtggtgcacacctgcagtcccagatactcagggggctgaagcaggagggtcacttgagcctaggagattgctgcagcaagcagcctggatggcagagtgagaccctgtctttaaaaaaaaaaatagcagtctccaaaggggcatcttcctaagggaagggtaatcttgaccatttgtaatttctgcctgatccactggagttaaaatgccacccctggatgagacttcactgtatcgtgtactaaatgcaaaaacaggtgggtgaatacagggtggggccaggaaaggctttgcaaaggaagtgacatcgaggtgtcccataaatgattacataggcagacaaagaaatggaagataatattcctgagcgggatcatcatggaagtatatttttatttttattactttttgagacagagtttcgctcttgttgcccaggctggagtgcagtggcgcgatctcagctcaccgcaacctctgcctcccaggttcaagcgattgtgctgcctcagcctcccgagtaggtgggattataggcgcccgccaccatgcctggctaactttttgtatttttagtagagatggggtttcaccatgttggcccggctggtctggaactccggacctcaggtgatccacccgccttgggctgccggagtgctgggattacaggcatgagccactgcgcccggcccagaaggatatatatatatgtatattttttgagacggagtctcgctctgttacccaggctggagtgcagtggcgcaatcttgtctcgctgcaacttcagcctcccgggttcatgccattctcctgcctcagcctcccaagtagctgggactacaggcacccgccaccacgcctggctaattttttgtatttttagtagagacagggtttcaccgtgttagccaggatggtctcgatctcctgacctcatgatccacccgcctcggcctcccaaagtgctggaattacagccgtgagccaccgcgcccggccaaaaaagaagagttttgaagagtagactgatgtcaggtaatgaaggacctcgaaggtcataccatatataccatatataggttgggctttatactatcataaatggaccattacagggtttttgtttttgttcttttttaacagggagtaacacagaattagtagcctatatgagagacagaacgtatgagctagaaagtagaatgagctagatgcaaaagaaataacagctgctcttgtaagggtacccaggctggagtgcagtggtgtgatctccgctcactgcaacctccgccttccgggttcaagcgattctcctgcctcagcctccagattatacgcgtccaccaccatgcctggttttttgtcttttgtttttttttttgtatttttagtagagatggggtttcgccatgttggccaggctggtttcaaactcctggcctcaagtgatccacccacctcggcctcccaaaatgctaggattacgggcgtaagccactgcgcccagccaagggggatcattcttttcttgaggccagagcacttatggccagagtttcaattaagggaccttgaatgcttggtaagcagagaatcaaggcaagatagggaaaaagcttgagagcaactctatgatttaggttagacagggtagatggactaccctacagcaatgtctatcactctagggataataatctttatctttcaaattcagtcattttatttatttttatagagatgaagtctcactgtgttgcctaggctggtctcgaactcctgcactcaagcaattatcccaccttggcctcccaaagaactgagattacaggtgtgagccagcacaccctgccagtctttctcctttagcaaaatcctgccaacagcctgttttgaggttcccatttttagactccacacaggccagcccttctattagtactgtctttctgaaaagagaaacaagtgattattcactttccataattcactagttctccactgccaccacattagtctgcactaccatctctcacctggattcttttttctttttttctgatatccttggcaactgctaaatcacctggattcttgaaatggcctcctaactgcactccctccttccattccccattaaatttattctccacgttgtaatgagaaggattgtctgctcaaaactctgcaatgctctgctcaaaatcctgcaatggcttattctttcattctaagtaaaagtcttttaactaaaagactgcatgatggcatggatctgcactccccctcttccttactctttccacagcctcttgccattcctcagatatgataagcattggccaatctcagggcctttgcacttgctcttcactctgactggcaatttcctcagatatccacacagcttgttctcttactttttttgggggactcaaatgccagttaatctgagaaggcttccttgaccaacttatgtaaagcagcatccctcacaccaacatgctgtattgcctttttgctgctttttcttcatagcacttatcaccacttccacttttactattaaatatttgcttattatttatcaaacactgcatccaccccagctaagaatgtaagctccaggagaggggctttggttcactgctatatccctggcacctggaaatgcgtctggcatttcgcagacattcagtatttattgaatgaatgaattccagtcagtcttggctttttgacacctcggcctcctactctcctatctcttcagacacatggtgacagatcaatgctatgatgcccctctcccaagcagtagctaacctttattgggcactcagggccatctacattgctaggagctttacatgaattttctcatttgatcctaacagtatgagaaagtaagtacatactatgttattctcattttactgatgaggatctgatgcacagattaaagaacgtgctaatacatggtgcggccgtggctggcaatcaagcagcttgactctaaacctgtgcccttagccacaaagcttgggtggtagaagctcctgtgaggctttggactcacagacagctgaagtcaagagtgaagagggcatagcaatgatggcctgagggagagaaaattttgaaaaagtgtttaccccttatatatttaagttggtatctaactggttccatcataaattcaaatagttgcaatggatgtaaattcttgcaaattgtaaatactgacattttaagataaaactgttaaatcactctttataatgtatccaagagaatctacataacaactgaataaccaccattatgcattaaaacatacactaatgagctcttcaacattgttcttttattatctctaacatatttagattgtactctaacaaaaaatgttattcaaatatagtactttgatgtttgaacaaccttttcttgatcacttcttcgcaataaaaatatgacatatgtagtaaaccttaaaaaatttcgtgtaactttatggctctacgctggaattcttctgaagtgagtaatcatcacaatcatctttagtatataatggatcaaaatgacacgattgcaaatattgataacacacagttataaaaggtgaaattctattgggaacacatctcttagtgagatagatggggctgacccaccaattaattcatttatctggatgaatagttcctactggtagattaacagggttcattttcaattctgttgttttcacagatacaagtgctgagaaatggttttacataaataggtgagaatgctagtagttttgttgtaagcatgtcaatcaatcgtttggtttctttccgagttgcatgccaaaaaccaaatagtgttccttcatcagctgacaattcatgggccaccattaattttgttgaaagcaaagaactggaaaccatctgacttgaaaagaatttgttatcctgttattagagtcattcactttctctagtgacttttaattatactaattactctcagaggcatttaggcagggttgagaaattcaagatattaatttcaacacatctttagcatcacaatatcacagtaatttaaatatattttagttgtagctatttagctcactttattgtaaataataattatgctaattagcaacgatagtatgtttaaccaattaatcatcagattaactttcggtcagaataatggacttcaatttttaagtcaaagcaatgtacaggcgtcccagtcaccatatttcacttctgaattccaagagagaaatggcgttgcgccttactgacgcaaatatgtacctagataaagtaagacgctttcatttcaggtatgtctaacccacgctatccttgctttgttccagggcactctcgcagggaaaacgccgcctctgactacacttggggtggttaagacgagatcttcaaatgaaaattctcaacgctaccgtccactctctcatacgcttgaattccgaacaccccaatactggccaaaagactccatttctcatgcttggtcttgcttttgaggtagctctaactcagaggcacgatttttagagcctgggaagtcggctgctgttcagtccttcctagcctcctcaggcgggagccgcggcccactcagtcagttgcggcccactcagtcagttccggccccagccccgactacctgtcgccttgttgggggaaggaaggcagataccgcagcccagtcagggtaagccgctgacccagaggatggaactgcggctctggagattagaaagaggaggacttcgccgcgttcactagcccaggaggaaagccagaaccctaggccggaacccagcgtcaagacgtgggggaagaatgttgatgcaacacagctcagccgggcccggaactcggcgtttgggtccccgccctctttgggccggaagtgaggaaggtggggctggggcttttcctgtagaaactaggagggactagggagagtctgcaaggggaagagtgtgtctgtgacactgccagcagcgcgcagagggagggatgggggcgggtatcggcgtaggggccctcggaaagaacggatattgctgtgacaccgcggggacgctctgaagggacgagtgtcggtgtggcaccggtgcacgctgaaggagccggcggaaccgggtggccatggggatgtgggcatcgctggacgctttgtgggagatgccggccgagaagcgtatcttcggggccgtgctgctcttttcctggacagtgtatctttgggagaccttcctagcacagcggcaggtgagcctagacagggtccaacctgacccccatacccggccagccctggagtagccttggcttcgaccctgagactcttgattgcttcggtccccgcgccagtctcgtctttgtggtccctgctgagtctcgtaacttggcccgatggcggactgtggctttgaggagggtcttggtgcgtcaaggaagttttctgtaacgttatcatgggacccaatccctttagggcctggaggaaggcttgggctcttgtgccctccctgcagcttccttgggatccttgggcccagacttggcctcctttatctttggaataagcctttaaaaggatttagacacccaacttcctcatgacatttatgtaatcatgcctaaccataggattttgcagtccttccaagaacttgcactcttgtttctccttaaagtgcatatattgtttctgcttgaaaaaacaaacaaacaaacaaaaaacttatcgggcccggcgtggtgtctcatgcctgtaatcccagcactttgggaggccgaggcgggcggatcacctggggtcaggagttcgagaccagcctgaccaacgtggcgaaaacccgtctctactaaaaatagaaaaattagccgggtgtggtggcgcgcacctgtagtcccagctacttgggaggctgaggcaggagaatcatttgaacccagtaggcggaggttgcagtgagctgagattgtgccactgcactccagcctgggcgacaagagtgaaactcaatctcaaaataaataaataaatgaaattaaatgaaatatatttctcgtttttcataaaatcaacattattttagtttaaatattaaaatggtaaaataaaaagtgaaagttaacaatttacctgagataaccatggtttagagatctgaacttttatttatttatttttaatctttatttatttatttaattttagagtctagctctgtcaccaggctggagtacagtggcgttatctcggctcactgcaagaaactaggagggacgagggagagtctgcaaggggaagagtgtgtctgtgacactgccagcagcgcgcagagggagggatgttcaaatgattctcctgcctcagcatcccgagtagctaggattacaggcacgtgccaccacgcccagctaattttagtatttttagtagagacggggtttcaccatcttggccaggatagaatatttattgtatttagagacaggggctcactctgccacccagactggagcacagtagcatcatcatagctcaaggcagcctcgaactcgtgggctcaaacgacccctccacctccacctcagccttctgagttgctaggaccacaggtgcggatcactgtgcctggctaattgtttgatttttttgtagagatgttgcccggggtggtctggagttcctggactcaagtcatcttgccgcctccacctcccaaagggctgggattacaggcatgagccaccgtgctcgatctcccctcagcttttattggcacacaacaatatatagggaaagcatgttgtagtggcccattattttgtttggtatccattctctgtattacatttcctggactgaaattacccttaccttttataatttagtataatgagatagttgatctttctccttttttttttttttttttttttttaaggagatagattctctgtcacccagggtgtagtgctgtggcacaatatgggcttactgcaacctctgcctcccaggctcaagtgatcctcccacctcagccccccaaatagctgggaccacaggtgcataccaccacactctgctaatttttgtattttttgtagagacgggatttcaccacattgctcaggccagtcttgaactcctgggctcaaggaatccttctgcccctgtcttccaaactgctgggattacaggcgtgacccaccgtgcccggctgaaaattggtcttttctcacagacctgatatgtttccatctggtgatcctcaagtttctggcatttaggaccaaatttaatgagcagcctcagtatctgttcatactcacagttagcatgtgtgcttctcctttgcatgaatttgttttccgtattataggaggtatgtaatacccagaatgagtagtacatgtaacaaagttgtgatgttaacagctttggtttacatatacaaactgaagtgtgatgacaaccctgattatagttttaccagtcaggtcacctcaggttctcttgttctgcttttattttcctgcatcagtcgtttcatgtacttgatcaagtgcaatatttgtgtaggtataaagcaaattcaacagatataagtggcaagctataaaccattcgatgtttgatcataaatgactattgtaataaacaactatttcactaaagtgttttctttaaaatatttcagagaaggatatataaaacaacaactcatgtaccaccggagttaggacagatcatggattctgaaacatttgagaaatctcgactctatcaactggataaaagcactttcagcttctggtcaggactctattcagagactgaaggcactgtgagtaatttacttcttggagagacagtctgtctggttgttttcattttcatatttttgtaacacaaaagagggtaccacacttacaagtcccagaatgctttcttaacctttgttattgatagtaacggctgtggagcaaaaaagacagaaacataactgcttagtcagttgaaaactatagaatatgggaactattaccctgaagccaggtaggaaaaagatcctcttccattaggatccagctgagatgtcatgtcttctaagcaaccatttgaaactccctgcctgacgaatgtggatagggtagcattctatcattattcctgtcagagtacttatctcattatgttgaatttgcctggatttttttttttttcttctggcacagtcttgctctgtcacccaggctgaagtacagtggcgtgatcttggctcactgcaacctctgcttcctaggcgcaaatgatcctcccacctcagcctcccgagtagttgggactacagttgcatgccaccataccgtctcagagtgctgggattataggcatgagccacactgtacctggcctgatttgactgtttaattggcagactggtagttccttaaagaaatagttaagtcttgttcatcattttatacctagtgcctggcatgtaatcagcatatagttcctatttattgaatgaaataatgtggggtttttttgttgctttttttgttttgttttgtttttgtttttgagcagtgtcttgctctgtcgcccaggctggagtgcagtcgcacgatcttggctcactgcaatctccacctcccgggttcaagcgattctcctaccttaggctcctgagtagctgggactacaggcgcgtgccaccacacctggctaattttttgtatttttagtagagacggggtttcaccatgttagccaggatggtctcgatctcttgacctcgtgatctgcctgccttggcctcccaaagtactgggattacagtcatgagccactgtgccctgccacttttatttttatcatcctgatcatcatcatcatcatttctctagaacttttagatctactagtaccactaagagaaagattcctaaatttaaaagaattatgatcagctaccatcattgtttcatgagttaaagaaactggctttatgtagctgtggtaaatgacagaattgtctagctcatcacaaaatttttcttaacaagtatggaataataagactagtgtggttagatccaaattattagaaactgcacttatttcttcaaggtgatggaaaatggcaatgcttctagaagagttaaattttggtatttagaaaaattaataaatgatttggaaaacaaagtctcattggctttggggatacacagctattgctattaagtaatcttttcaataaagacttggctttagttaatttatctgagcattgcttctgttagggacatgtcacaagtaggaaatcatccttcagagacagatggaagtagaagtggttaatttagacactattcttttttttttttttttaaatagatgaaagagagtttacttatgtatttatataatggccttggtccaaaaaagactaaagggagctcaaaaaagaattatagtaactttaaaaaatacattaaacatatccaagatcttaaatgtatcattctccccaaaagctagttgcttccaaacttgacttaatattttgcatgttttccctccattgcttggtaagtgtatttgcctcttctttctgcagttgatgtctgacggctgagttttgctgttttgtcaactgacatttccccttctgtttcaccagttccagagaattgttgaacaacttaacaacactacctgaagaagtaatactcaagagttcttgttctatactgattaatagctcccatattttcttcatctctgaaaagtctgaattctctgtttaataatgacaaggcaattagatgaggtagacactattctctttctgatgtttgcttcttggaagtcctttgactttacccactacagggccatagtaaaataataggaaaagcattttcaatctccttggttgtccctggtaaatagtgccaggaaagatagacagtagcttggtaattatggttggtgaccataggaatggctgtttgttctaggggatgacagaaatagggagaatacatatataaagtgagagctttgtaatgtactgtggctcaaactagaagcagtactgatgggctaaggttgggaacagtaatagttaatagtcgtcatgattttcacttcatacatagtttttatatgtattgtttgatgtttacaacagtgaagtggaaaggataggcattattattcccttcttatgaatgaggaagcaaaggcttggataaattaaagggtttgcatgtttaattgccaagggacatgctaataagtaggataactgggtttcaaactctgttctgctgagtctttaaaatgacattgaaaaatccattcttgaaactctaaagactgcaacatgaatgtgctaaatttatctctggggattttctggctgcatttatgcttggcaggaagaatattttgggtaactttgaaaccttgttttgtttggaaacaagttcattaatttctattttgtgttgattagaattaataggtttgtatgttttggtcacagagatcaagtgagaagattagcttcgactttttttttttttttttttgccgtagtactttctacctgagggaacctaaatagagtcattgtgtggccatttatggttgccactgttcacataaatatgacactgcacccagacagaaaattccagcctctctgagacactttctctaatatctcacagatatcaataaagggcccactgaagaaatggaatggctggggagcagagtaggtcagggtcgaaaagtttaaattgttgcttctctaatttttgcatgtttctatgtgagcagtttcaccttcttgagcctaagttttctcatctttaaaatgagaagtgggctgggtacggtggctcacgcctgtattcccagcactttgagaggccgaggtgggggcggattacctgaggtcagaagtttgagaccagcctgaccaacatggcgaaaccctgtctctactaaaaatacaaaaattagcctggcgtgttggcacatgcctgtagtcgcagctactcaggaggctgagacacaagaattgcttgaacccgggaggtggaggctgcagtgagctgagattgcaacactgcactccagcctgggtgacagagtgagactccatctcaaaaataaataaaaataaaataagaagtgtgtggatgttaagccataccttgtatggtttgtggcaaggactaagtgagtgagatagcgtaaatgaagctcaatgcgtaggaattacttagtcattgggtttctttggacaagttacttcaacctctcagttaaagtaacctttcagttaaagagtttcagttgcctcatctattaaatagagatgattatacccttttccctgcctgtttttcaagactgtagtagtgaagccaggcatgatgactcaatcctgtaatcatagcacttcgagaggctcaggtgggaggatcacttgagcccaggagtttgagaccagcctgggaaacatagtgataccccatctttgcaaaaaaatttttaaaaaatcaactgagtgtggtgatgtgcacctgcagttctagctacttggaggctgaggtgggagggttgctggagcccaggagatggaggctgcagtgagctgtgatcacactgctgtacccccgcctggtgacagagtgagatcctgtctcaaaaaaaaaaaaaaaaaaaaaaagaatgtagtgaaataatatatgtcaaagcgctggaattattttttctgggatcattaattttgccatagaacaaccctgggagcatgcttagtgaaattgtcaacatagagacattgtacagttcaccatgctttgtttttcagtccccaaaagaaactaaacatgctttgtttttcagtccccaaaaggtttgcagtatcagttttcaaatgcatttatagatcattcagaattcatattaaaactacccttgatgcttatttaaatactggacttttaataatagttgctgtggcctttactaaaagcattataagtccttaattatacattatttattagtattgggaattggctgaaagaaataccatcccaggtcaattagatcaacaactacagcatatgtcagacagtggtaccaaagcatgtcttttgggaaaacaaggtttatgtctaagattgaattagttgtagtaaagtggaaatacctggaggtagtgttaggggagccttttgaaaagcaatttattggggctgagtgcagtagctcatgcctgtaatcccagcactttgggaggccacagtgagaggactgcttgaggccagcctgggcaacatagtgagaccccatctgtacaaaaaattaaaattagccaagtatggtggtgcatacagtcctggctacttggggggctgacatggaaagatcctttgaacccaggagttcaaaaattcagtaagctatgatcataacactgctccctagcctgagtgacagagtgagactctgtctcttaaaaaaagaaaacaatttattaaagcaatgattttcaaactttagtgtacatcaggtttacctagaaactgctgggccccacttccagcttctgatttggtacatctggggtagggcctgagactttgcatttctaagaaattcccagatgctgttgctgctgtccagagaccatatttgagacccatgatattaaaccaatccaatgtactggtaacagtctaaaagatggatagtttaaagtgtgggtgagattgtgggaaaacagaaacactggagtactgctgatgggagtgtaatttgttataaacactttaggaaatatcctgataataccaaataaagttgaagtccaccatggatggatctaagaaaatttagaatataaaaagcaaatcatagactgataagtataatatgatgtcatttatatacattctttaaaagcatacataaatcactatattatttgtagatacatgtatgaaaatgggaattagattggaagggtacccatgaaatatgatagtaccaaaacccctcaaaccatgaggaactatgtctgaaccagtgggaatattgtgcttctagtcaaggaatgtgattgatcattgtgttcctaagctgctgtcctacagagagaaaaaataaattgattcctcttgacaaatgagttccacaaagttgtatgtgttttgggcggtagaattcttaaacatgcattcttctcaaattttgagctgcttcctagctcctaatgtcctggttatttagtgaatgtctgtgttcactttatctgcccaagaccaagacaaagggtggtgctgaggaagagccttctcctgtgaaagccgggcccctacctcacctcttcctgacccagcaaagacacagataatcccattctgttccccagtttagtaagtggacatgactctccacttctgtgctttgttctgatggaaaaggactattttctttcacagaaaagacaattatggagccatattaatgtggttcaaattccatttctatcactcattagctgttggatttcgaacaagttttttttttttttttttttttttttgagacagggtctcattctgtcacccaggctggagtgcaggcacgatcatggcccactgcagcctcgacatcccaggctcaagcaatccttctacctcagctcccccgagtagctgggaccacagaatcatgccaccataattggctcatttttgtatttcttgtagggacaggtttcaccatgttgtccaggctggtctcgaattcctgagcacaagcaatctgcctgccttggcctcccaaagtgctgggattacaggcatatgctaccatacccagctgtttaacctttctaagtttagtttgtgattttgttgtggtcttttgacaaaaggtttttttttgttttgttttagaacagctttattgagataattcatgtaccatacaattcatataccatacaattcatccatatatagtgtacagacaaaaatgttatattaaccacctaaatttagtatctcaatggttagtactcatctaaatgcataatttatgctaaatgtgaaataggtctattttttaaaaaaatattttattttgttattttattttattttattttattttattttattttattttattttatttgagacagggtctcagtttattgccttgctggagtgcagtgtcacaatcacggctcactggagccttgacttcccaggctcaggcaatcctgtcacctcagtcccccaagtagctgggtctacaggtacgcactatcaggcccagctaatttttaaattttttgtagagatggggtctcaactcaccttgttgcccaggctggtcttgaattcctggcctcaagcgatgcttctgtctcagtctcccaaagtgctgggattacaggcatgagccaccgtactggcctcttttgtttttttaatagagatgattattttgtcctttctttctttataccatgctttctcatatgatagtttctagtactgttcaactgtgatcaaagtatgctttgttttatagcttattcttctctttggaggaataccttatctctggagactttctggacggttctgtggttatgctggctttggaccagaatatgaggtatgtgattcattagcatgtatttgtcatggtatttcttttagcttggcaggctttccactaaagttaattttttggcttctgccaatgttaagatttgcctctctgtttgcatagtccttggttacccatgctgtattggcataacattagttacaataacaaatcccagaatatcacaggcttatttgcaatggtttatttctcaatcacgtaatagtccagtgtgagtatttttagttatcaggtgactttcttccatgtggtaagccaagaatccaggctctttatcttagggatttgtctgtatgatttaaggtacctttcatatagtgcctgtgtaataaaaaaggaattgttttgtttctcatttacttctctcaaaagtaaacttttttgaaggcagggatgatatttcagaccttatgttatccatagaatcaagcatattgcttgggatgtagtaagtaagtgctcagcaaatacttgttgatttgtttgccagtagttcataaaaactggatttttgttttttcttttgtttagatcactcagtccctggtgtttctgctgttggctacacttttcagtgcattgactggtttgccatggagtctttataatacttttgtgatagaagaaaaacatggcttcaatcaacaggtataataaagaatacaaatgttctcttttaaatgtgaaaaacttctgtgcttttgtcctgtactgtttataatttaaacataatttactatttcagagtatgaattgagaaaaaagggaactacagatatggtaaagatcatagctgaaagtcttgggggccgcggtggctctggccagttgccctggcactcggggaggcaaggctacatgttcgaggccaacctggtcaacactgattttaaaaaaaaaatacttaaggccaggcccagtggctcatgcctgtaatcccagcactttgggaggctgaggcgggtggatcccaaggtcaggagatcgaggccatcctggctaacaccgtgaaacccgtctctactgaaaatacaaaaaattagccgggcttggtggtgggcgcctgtagtcccagctactcgagaggctgaggcaggagaatggcgtgaacccgggaggcagagcttgcagtgagctgagatctcgccactgcactccagcctgggtgacagcaagactccgtctcaaaaaaaaaaaaaaaaaaaaaaaagaaagaaaaaaagtcttgactgggtacagtggctcacgcctgtaatcccaacactttgggaggctaaggcgggaggatcacttgagttcaggagttcaagaccagcttggatagtatagtgagacttcatctctacaaaaaaattctaaaagccagttgtggtggcatgcacctgaagtcccagctacttgggaggctaaagcaggaggattgcttgagcccaggaggttgaggctacggtgagccatcattgtgccactgtactccaacctgggcaacagagccagacctgtctcttaaaaaaaaaaaagaaatttatgttataaactcctttagcactaatatctattgtttttcagctactaatcatttgtttgtttgcgacagggtctcgttctgtcacctaggctggagtgcagtggcaggatcatggctcactgtagccacgaccttccagattcaagcaatcctcccacctcagcctgcctagtatctgggactatagatgaattatactacactgggttaatttttttattattatttttagtagtgacagggtctcactatgttgcccaggctggcctggaactactgggctcaagcaatcctcccatctaggccttccaaagtgctggaattacagttgtgagccactgcactcgtcctcagttaataaggtttaaatgaattttcagctgtaaaatgcaagacatttacccattgtcttaagctgcctaatgtcatataatatagtttcactgcatgttaattttaaaaattgctttaataatgtatcctttgtatttatttatcagttattttaaaaagcagaaccagtttctcagtttcttgtggtaatgttttctttttgcagactttggggttcttcatgaaagatgcaatcaagaaatttgttgtgactcagtgtattttgttgcctgtgtcttcacttctactttacattattaaaattgggggtgactatttttttatttatgcctggctgttcacattagttgtgtctctggtgagtaaaatctttatttcgttttcttttgcaaaagttccttggtgagattactgtaatcttcattggcatgtaaacagttcttaagaagcagctgaaatataaataggtgcttatatacatttcccccttggtttctgcttttgattgtagacacaggagtattgactgaccataaatttccttctccttatgctaactcttcaggtcatagaaactagttgttagtcacttttaatgattcagttgtcaggcagttttgggttgtgcatttgcgagttgccaccagaatgactaagtgtgataatttaatgactcctgactgacctccactgcctaaaatcatggttattttgaagagaaatgagatttaagagggacaagagaaagaaagcatatacttaactggctttcttctgcttcccttcccttgcctttcccttccacgttagacactctctcccttctttgccccatctgcttccccttccccttctatcttttacccattcttcttcctttccttctcctgtcttcccttttctccccaactgccacctattcctgcctctcttctcctttccttttccctctcactcttttccccctgatttttccctccctcacatctcctattcctcttctctttccatactctcaagtgcttcacaacacaaacactacaacgcagtcaaaatggtctgttcagggccaggcacagtggcttatgcctgtaatcctggcactttgggaagccaaggtgggaggattgcttaagcccaagagtttaagaccagcctgggtaacacagtgagactctgtctctacaaataataatttttaaaaaacccaaatgaaaaaacccaaagtggtctgttcagtgcacccagaaattatcatctatcagctcttcagctccactgatgaggtttattttattttagagatagggcctccctgtgttgcccaggctggagtacagtggctatttcacaggcatgatcatagtgcactacagctttgagctcctgggctcaagcagtcctcctgccttggcctcctgagtagctgggactacaggtgtgtgacaccatgcccaagctgaggtttattttagtctgaattacataatgctcattgtttcattttccattgatgggatcaagatcagaaaatgggcgctagttggatttacaggtatctattgtatggcaaattaaagtaagatgaaaaagagcagagaaaatgctctaaaaatgcttaaggaagtgctatttcaaccacattgtacaattatgaactacaggtaattaattttagctgataagccaaccaagtaacagcacacaatcaagttctactaattcttttttgggaaagacttcaggtctattgtgattacgctaaaaggtagaactgcgtgttatgattgactcatgaagcatcagaaatccccaagatagttttgaaaggactatacttattaccacctagagattttaatcactgttagtagcattatcctttaaaataaaattcataagtttactctgttatcagactactcatttcaatttaattcatcagacagatattatgctcttactatctggtactatttgggcctgggaataccagagcaagtaagttccttgttctcaagtttgaggtcaacatagttgttttaatataatttaatctgtataataaagaatgttttttctttaagaacatgttcatatgttattctgacatttacttttcaggttcttgtcacaatctatgctgattatattgcccctttatttgacaaattcacacctctgcctgagggaaagcttaaagaagaaattgaagtaatggcaaagagtattgactttcctttgacgaaggtgtatgttgtggaaggtaaggctacctggggataagaaagttttatccaagtggtttgttttatttgatactttattcttaaaattttaataaaagaattaatcagtttttgtttttttctttttaaaatttgttatttaaaggctaggagtttaccttttggctttttaagatttacagaaattgataacataggccagggatagaaactggtggcttgataccaaatcctgctcttgtctgcagctatgtttgtttggttttacagtattgttttaaatttttggccaaggctttttcactctctgttatgttatcttatatattagactgatttattcacttctgttatctgcctagttcttttaggtagttaagttggactcttgaatagtcaaattctgtttagtattagtttggaggctcttaaacaaagccagtgttattggccttgtctcctccaagaaaatatccagtgttctggaggactcacctgaagattgattaccaaagactgcagtaccactgagtactgcagatttgttatactctgcttttttgatgattacttttgagatttaagtggtctcttgaccgttactcaaatcttgacttcccattaacacccagtctattactttctttgagactttggtagttgactattaaagtctcaaagaagactacggagatgtagagagaaactgttgtaaggttctatgactttcagaatttataaagtccatataaatgaatgtaatagttctgttcctgccacttaccagttataggatcttggacaagtgacttcacccttctgggtttcagttgtatttcctctaagctatggtttcacaaatgttttttgtaaagggctagatagtaaatattttagctttgcgggccacttgttctctgttgcaactattcagtgctactattatagcgcaaaagcagccatagacaatactaaacaaatgagtgtggctgtgttccaataaaactttatgaaaataaatggcagattggatttggcctgtgagctacagtttgctgatccctgctctaaaataaaatattaccagtgagaagcagcagtgttagatgaaggaatagaagcagaaacaatcacagggttagaggagaacagagatggtcacaactgaaaagaatgaatcaacagcaactggaagaacatagaaatttcagacatctggctgggcgctgtggctcacgcctgtaatcccagcactttgggaggccaaggcaggcggatcacctgaggtcaggcgttcgagaccagcctggccaacatggtgaaaccctgtctttactaaaatacaaaaaattagctgggcgtggtggtgcgtgcctgtaatcccagctacttgggaggctgaggcaggagaatcgcttgaacctggaggtggaggttgtggtgagccaagatcaagccattgcactctagcctgggcaacaagagccaaattctgtctaaaaaaaaaaaaaaaaaaaaaatatatatatatatatatatatatatatatatgtcagacatttagtggctcctgaggatatacagcccaactaaaggcacgattggagtagcttaaaagtctgtggagaaatggtagaataagccagttcatacttacttctttagcctctgaaataactactcttttttttttaggtaatattaaactagaaatttaatcattaatcagtacaacagaatagtctctaagctgcttttactgaaggagcaacctaagttgctgatcccttaagttacaatcagataacgtgaaataatagttaatgctatgacagtggaggtagtcaatagaatatgtgaaatatatcggtgctattttctttttatctttttttttccccctacaacatccagagtatgagagctattttcattttagataaaatagtcagggaaggctttatggaaggttatgacctgagctgggtgttaatgggaagtcaagatttgagtaggttgggggcagcatttcagacgtcaggcttcagggtcaaaaggcttgggtttgaatcatagctctaccacagattaccagtgctgggcttggtggctccagcctgtaatcccatctactggggaggctgaggtggaaggtcaggagttcgagacaaactacttgtgtgactttgcgcaacttagctttgccaaacagcagtttactcacctataatgtatgttttaattgttgttaacaacagtaacaattctcaaaaatattttgaatgaatgaatgttgttgctgacaataacaacacacattacatatttgtaaattggtagggagattgtagtgaaaagccaagaatcttgctctcaaaatattatcagatagcaagtgctatgcagcaaattaaactagtttggtctgataagttgatactgtagattggtcatcagattgagctgagacctaaagggaggagccgcccatttgacgtcaatgggaagatgttcaaggaccatgaagaagtccagtgtggctgcaccatagcaggagagtgttaggagatgaaatctgagacataggcaagaatcagtccacataggcctttgtaagtcagggtaaggagtttggattttgagttcagtgggaagagccattgaaggcttagacaggaaagtgacatgatctgctttgtgtttttaaaatatcctgggctactgtatggagaatatgttgtagagacaggcaaaagtctaggtaggacataatggtagcttagactaggataatagtaattaatggagagaagtggatacatttgggacaagttttagggtagagttgattgaattttctaattgattgcattgggagaataagggaaagagtgacatcaaagataatggcctagacttttgacctgagcagttagatatatggtagtttcctgagatggaaaaaaataggagaagagtaggtttgtggggaattaagacttctaatggctatattacatattgaggaacctactaaacattgtattagaattctgcaagcaatagaaaccaactgtggctgatttaagcagaaaaactgcttattgaagcactatttggaccaggcgcagtggcttatgcttgtaatctcagcacttggggaggccgaggtgggcggatcacttgaggtcagaaattcgagacaagcctggccaacatggtgaaaccctgtctctactaaaaatacaaaaaaaaaaaaaaaaaaaaaagccgggcgtggtggcgggcgcctgtagtcccagctacttgggagactaaggcaggagaattgcttgaacccaggaggcggaggttgcagtgagtcaagatcgtgccactgcactccagcctgggtgacaaagcaagactctgtctcaaaaaacaaacaaacaaacaaacaaaaccagtatttggccaggcgtggtggctcacgcctgtaatcccagcactttgagaggctgaggcaggtggattacctgaggtcaagagttcgagaccagcctggccaacatggtgaaaccccatctctactaaaaatacaaaaattagctgggcatggtggtgcacacctgtagttccagctactggggaggctgaggcaggaggatcgcttgaatctaggaggtagaggttgcagtgagtcgagatcgcgccactacactccagcctgggcaacaagagtgagaccctgtctcaaaaaaaaaaaaaaaaaaaaaacaacgtttgatatctcacaaaatccacaggaaaattaagtttacgaagctcagaaaatgggctgttacataggaaggctaggaacttataatcatattgcagaacctgtctggtgaggacactgctgtggctacttcagaacaccggattcagccactagcacctgcagaattaattcctcactgctttgcttttttatgtaattagctaactattcagaatccctaaggggcacatctgattgactaagccagggcatggggctagctgctcggagtgctggggaaacaaatatctggccttttagatttctcaaatgagaagcagcctcttacatagtgtgacacttcctaaactctgaaaggagattctaatattggacaagaaaaaagactacacacaagaatacaaacaacaaataagtctatagacatccctgtggagatgtcagacaggtaactgtatgtatgagtctggagttttagggcgaggtcagcgctaaaaatacagatttggaagtatctggcacatagatggtgttcagtgctatccatgaaggcacttaagagaaggggaccagggtcagagtcagcagagaaacagccaggaaggaggctaaggaggagaggcccttgaggtaggaagaaaaccaggagaaactggtgtctcaaaaaccaggagaagatcgtgttttaaggagaaagtggtcaactatgttaaatgctgctaagagattaagaggaagcattctaaacaaaaaatggcaatgccttacatttttgtagaatgtttttgtttttggagttctcaaatatgttacttcatacctcaagcgatatcattaatccattcagtaaataaacatcattgaatatacagtcatgcattgcttaataatggcaatatgttctgagaaatgcgccattaggcttttcgttgtcatgcaaacaccattatactcatacaaacctagatggtgttacctactgcacacctaggttgtatggtatagcctcttgcttctagactacaaacctatctagcgtgttactatactgaatactgtaggcaattgtagcatgatgattagcatttgtgtatctaaacatagaaaagatagtgtgctctgctacaacattacggtggctatgaggtcactaggtgataggaatttttcagctttattataattttgtgggaccactgtcctatatgtagtctgttgaccgaaatgtcattatgcggtacatgactgtatgcgacatgccaggcacagcgatataaaaagcttacagtacagtacagggattcttttttttttttttttttgagacggaatcttgctgtgtcacccaggctggagtgcagtggtgcaatcttggctcacttcaagctccgcctcccgggttcacaccattctcctgcctcagcctcctgagtagctgggactacaggcgcccgccagcacacccggctaatttttttgtatttttagtagagacaaggtttcaccgtgttagccaggatggtctcgatctcctgacctcatgatccacctgcctcggcctcccaaagtgctgggattacaggcatgagccaccgcaccctgccagggattcttaaactttagtaagtataaaagtccctcgagagtttgttaaaagacagattcctgggcttcattcccagagattctgacttagtaggtgtttccagtatctacttctaacaagtacccctaggtgattttggcgtattccttggaccacactttgagatacctggaccggtgggagatagtaagacattaatttacttttatttgtgtgcatacaatctgcttactttcataaataacttcagatagtgtttaataaatatttttaaattaattaaaaaatttaggattagcagccaggcgtggtagctcacacctgtaatcctagcactttgggaggcccaggtaggcagatcacctgaggtcaggagttcgagaccagcctggccaacatgatgaaaccccgtctctactaaaaatacaaaaattagctgggtgtggtggcgtgtgcatgtaatcccagctacccaggaggttgaggcaggagaatcgctggaacccgggaggcggaggctgcagtgagcagagatcgcactactgccagcctaggcaacagagcaagactccatctcaaaaaaaaaaaaaaaaaaaaaaaatttaggatcaggaaagatagagatagaaggataccctgtgttcaaagggtaacacagacaaaataagcaaacatgtttggctcttcctggcaaccaaaccaaaaagaaatgtaataatgcaataaataaataatagcttctatttgtcaaagttttactactaaacatactgcctagtacttttcattagaaatatgagtagatagaaaattcatgttttttgtgagagacttcaaattcccaagagaaataaatgtttatcatttcttttttgaaaaaagtatatgaataacagtagtagtataaagatcagacagcatattattgcttcacttagaatatctcgtgtaacgaggtcaggagatcgagaccatcctggctaacacggtgaaaccccgtctctactaaaaatacaaaaaattagccgggcgtggtagcgggcgcctgtagtcccagctactcgggaggctgaggcaggagaatggcgtgaacccgggaggcggagcttgcagtgagccgagatcgcgccactgcactccagcctgggcgacagagtgagactccgtctcaaaaaaaaaaaaaaaaaaaaaaaaaaaaagaatatctcgtgtaatccatcatctaacccaatgaggtagatattaggctcgcttcataaataggaaactaaagcttaaagaaattaagaaagttttctaaattgacagaactaatacatggcagagccaagatttgaacccaaagtctgtgctcttaatcactatactcaactcactgcacattgtaggacatttagaaatcaaagaagtgcataaagaagaaaataaaaatcaaccatagttcaggtactgttagctgctattaaaaatttaggtatgggccagctgtggtgattcacacctgtaatcccagcactttgggatgccaaggcaggagaattgcttgagcccaggagttagagaccagcctgggcaacatagcaagaccctgtctctacaaaaaattagccgggcatggtggtatgtgtctgtagtcctagctactcaggaggatgagtcaggaggattgattgagctcaggaggtcaaggctgcagtgagccatgattatgccattgcattgcagcctagacgacagagagaccctgtctcaaaagaaaaaaaggtatgtcttcttccagtctttataaaaattgctttaattatagaagtaggtatgctgattttaaaagtctttgggaaaagaaaggaaacaaaaatctataattttagaatttagtgataaacatttcagtattttggtatgtttcctaataggcatgggcttatgcttttctgttaatatttgttaggttggtgcaaaagtaattgcagtttcagaccatgaattttgaatccttataactaggctcaaacacatctttattaatcaaaagaagaaccattacaatcaacacatttttgccaacaagaaatacgtttgcttatttctgtagggtaaaactctgtgcttcgggatttggcaaactcttggaaagcattttctgcatccagctagttgtgaaaacgttttctctttaaaaagttgttgagatgcttgaataagtggtagtcagttggcaagaggtcaggtgaatgtggcagatcaggcaaaacttcatagcccaatttgttcaacttttgaaggattgattttgcgatgttcggttgggtgttgtcttggagaagaattgggccctttctgttgcccagtgctggttgcaggcgttgcaattttctgtgcatctcatcgatttgctgtgcatacttctcagatgtaatggttttgccaggattcagaaagctatagtggatcagactggcagcagaccaccaaacagtgaccatgacctttttttggtgcaagtttggctttgggaagtgctttggagcttcttctgtgtccacccactgagctggtcatcgcccgttgttctataaaatccatgtttcgtctcacgtcacagtctgatagagaaatggtttgttgtgtaaaataagagaagacgacacttcaaaacaatgattttttttaatttttattttcgcttagctcatgaagcacccacttatcaggctttttcacctttccagtttgcttcaaatgccaaacgaccgtagaatggtcgacattgagttcttcggcaacttcttgtgtagttgtaaggggatcagctccgatgattgctctccattggtcattgtcaacttccgatggcctgccactacgctcctcatcttcaaggctctcatctcctttgcaaacttcttgaaccaccactgcgctgtacgttcgttagcagttcctgggccaaatgcgttgttgatgttgcgagttgtctctgctgctttacgacccattttgaactcaaagaagaaaattgcttgaatttgcttttttttttttctttctttgtgagacagagtctccgtctgttgcctaggctggagtgcagtggcgacatctctgctcactgcaacctccgtctcctgggttcaagcagttctcatgcctcagccccacgtgtagctgggatgacaggtgtgcgccaccatgcccggctaattttttgtatttttggtagagacagggtttcaccatgttggccaggctggtcacgaactcctgacttcaagtgatccgcctgcctcagcctcccaaagtgctgggattacaggcatgagccactgcacccagttgaatttgctttttgtctaatataatttcccttatctaaaataaatataaaataaacagcaagtaatgtcattagcaaaaaacataaagtgagaaatgtgcattaaaatgatgtataacataaccatatttatttaagaatgtattccaatatcaaacagcaaatttcaacaatgcaaaaaccgcaattacttttgcaccaacctaatacatgcacattttttcttgacgataatggaacctgatatacgtgaagttttgtatccttcacaatatattggtgagctttttcttgttaaaattctttggaagtataatttttttctggcagcttaaaattccatttcatagttttactataattgaatcatttgtaactgttggatgtttaggctttacttatttacttactgctataaagctgtgatgagcacatttattggcaaaaaacagacactctccactgctggtggtgaattatgttgatatgatttttcttcacatattaaatgatttgaaaatgttaatgtcctttccagtaattcaatttctaggagtctctccaaaggaccccaaactttttaattatattccatgctttgaactgtcttttccttaggatctaaacgctcttcccacagcaatgcttatttttatggcttcttcaagaacaagcgaatagttttgtttgacactctactagaagagtactctgtactaaacaaagacatccaggaggattctggcatggaaccccgcaatgaggaagaagggaacagtgaagaaataaaagctaaagttaaagtgagttattttttcctaagagattctaccttagtttttatacacagttcctgtgacaactcaaaataacatcaatttctaggcagtgagtgttgaattcagggagactatcagatgaaaaccatggctcctttatagttctggtatttaggagagatcaccactattattacatgctaactaccttgcaagcttttatagaatgtggatattaaaattggaagctcttataagaaaattcatatgattataagctatctttaaaacaggaacttgtgtgtatatatatatatgtgtgtgtatatatatatataatttcttatgtgtttatgatcaaagaattcccacaagcaagataaagagaagataaacatctaatttttagctttattaagacagtaattgtaggctttggcaatggagagacttggatttgaatcctggttctgtcatttagtagctttgtatccttggatacgttgtgtaatttagtctgttttatttgtttaacacccatttatgaaatgtatactctgtgctgagagactttacttggcactaggtacacaaaaataaaaaggaataccttcctcttaagcttacagtctaaaggggaaatagtcatgcaatcacagtacaatacgtgaattgctactgtcaagctttagattctagatatagtaactggagcacaagaaaagacatttctcaaatctgacatgagagtctgagaaagctgcttctgaatccttttcgtggataagattgactgatattgattagcagaatttaaagtatcaagactaaatgggggagaggggacaatgataagaaacaatacaaactgtcagaaatgatcatcagtatttgtatgtgtgatggaatgtgccattgcctttggtgtcatacagagatgattttagatgcctgttcactcactgtctgtgtaactctgtgcaagtaagttaagctttcatttatttatgtatttatttattttgagatgaggtcttgttatgttttccaggctggtcgaactgctggcctcaagttacccgcctgccttggcctcccaaagtgctgggattataggcgtgtgccaccgcaccccgccaagctttctaaatctttgatttcttaactgaaagatgaggccagtagggtttctcaagccccacgctatttttttgagccagataatttttttgttgtgggaggtatcttgtgcatcacaggatgtttagcagcatccctggtctctccccactaggggccatttcccctacaacctctacaaattgtaacaacaaaaatgtctcagaatattgccagatgtcccctaaaggtagcggtggggccgagtctcccctggttgagaaatactaggctaaagatacctacattttagggttttgaagattaaatgaaataatatgtgtgaaataccttgtactctctacccaaatgtagagagtaccagaaaatgattagcatctgagcatctgttttgacactaaaaacaggttctagtaaagtacctagcctgttataaatacgtagatgaaataaaattctgtgaagggattagaagacatcttaaagtcatcttataaataggaaaactgaagtccagaaagaataacccagtgataacactagagaatcatgcaagtttagaaagttaatctgcttatggtcaggcactgtggcccatacctgtaatcccagcactttggaaggccaagacaggcagataacttgaggccaggagttcgagaccagcctggccaacatgacgaaacccctgtctctacaaaaaaatacaaaaattagttgggcatgatagcgcacgcctgtaatcccagtactcaggaggctgaggcacaagagttgcttgaacctgggaggtggaggttacagtgaactgagatcctgcctctgcactccagcctgggtgacaaagtgagaccctgtcttaaaaaaaaaaaaaaattgctgatccttttgttactttttttgtttttgtttttgtttgcttttctggaagtttgttagatctttctctgtttcagtgttctaaaatttcacataccttgatggggatctgttttcatctaccatgttatatgcatcacactgttttcatccactgtaatatatgcattaggcccttttattctggaaatcgaggtcctatggttgtaagaaattttctgaaattattttgttgatttttctcctctccattttttaaattctgtgttttcagggctcctcttactcgagtgctggatttgttatactgaactctcctatctttttaaccctcttttccattttaaatatatctctttctgctttctagaattccctcatcatcttccaatcctttattgtattgaactttctttctttttttttttttttttgagatgtagtcttgccctctcgcccaggctggagtgcagtggcgcgatctcagctcattgcaacctcctcccgggttcaagcaattctcctgcctcagcctcctgagtagctgggattacaggtgtgcaccagcatgcccagctaattttttttttttttttttttttggtatctttagtagagacggggtttcaccatgttggccaggctggtctcaaactcctgacctcgtgatccacctgcctcagcctcccagagtgctggcattacaggcttgagtcaccatgcctggccttcagcttggatttctaataatttttttatctgaattttccaatttacagcatttcgttactttttcttaggtgcaatgtcttaattttctaaactttctctttatataatttatttcatgttgctttttttgtggatcagatcttctgtgttaacagcttacctcatatatctggtaaatccttggttatttgctccttagtaagagaatgggactaggccccacacagcggctcatgcctgtaatcccagcactttgggaggccaaggcaggtggatcacctgcagtcaggagttcgagaccagcctgactcacatggtgaaaccctgtctctactaaaaatacaaaaattagccgggtgtggtggcatgcgcctgtaatcccagctactcaggaggctgaagcacaagaatcacttgaacccaggaggtggaggttgccgtgagccgagatcgtgccgttgcactccagcttgggcaacaagagtgaaactccatctaaaataaataataataactactgttaacatttgtatatactttcagtctactttttatatttgtatatttttatatacacattcacattgtttcataattagaatcatactatatatttttagtttgtgtcttactttcttcacctaatcattttccaatgtcaaaacatcatcccttttttttttttttttgagatggagtctcactttttcacctaggttggagtacagtggcgtgatcttggctcactacagactacgcctcccagtttcaagcagttctcatgcctcagcctcctgagtagctgggattacaggcatgcaccaccatgcctggctaatttattattattattattattattattattttgagatggagtcttgctctgtctcctaggctggagtgcaatggcgtgatctcagctcactggtgatctcagctcactgcagcctctgattctcctgcctcagcctccagagcagctgcaattacaggcgcataccacgataccctgctaattttttgtattttggtagagacagggtttcaccatgttggtcagtctggtctcggtctcctgacctcgtgatccacccaccttgacctctcaaagtgctgggattgcaggcatgagccaccatgcccagcaatattttgtatttttagtagagatgggattttgctatgttggccaggctagtctggaactcctggcttcaagttatctgtctgcctcggtttcccaaagtgttgagattacaggcgtgagccactgcaattggccctaatctttgaaaacaaaatttctaatgattttgtaatataatgtgactgtcatataactttatcatgatttatttaactattgtcccattataaagatttctatttcttccagttttttttttcctaatctaagttagtctagactgtgagctttatgtagtctgggaatgtccatcttgttcgtcattctatctatcttcagtgcttaacccactgtctcatgtggagcagtggttcagggaatgttttgttaagacaatcaacagttttgaacaaaactgattatttctttaagttaaaatctatgaagggctattactgggttaaaagataaaactttttaaaggttctcaataatttatttttgatttttttttattcagaataagaaacaaggatgtaaaaatgaggaggtactcgctgtactaggccatgaactggggcactggaagttgggacatacagtcaaaaatatcattattagccaggtaagtgtggagtgacaattctttttttatggcatgatagtcaaattagaactatggcaggcatgagaggtcatataagagaggccaaggcagacaccacagccaggctacctggtttcctatcacagctccctgacttactacctgtgtgacctcaggcaagttccttaacctctgcctctgtcccctcattgaatgataatacctcataggactggttaagaattaagtgagttaatacatgtaaagagtttagactagcacctggaacatggtgagtactatataaattattgttatcaccaccatcatcacctccagagtaagaacttggaaaatcaaaaggaacaagcctagataagttggacattaaaatgctttttaaaattaaattaaaaaaattttttttgagacagagtctcgctctgtcacccagactggagtgcagtgatgtgatctcggctcactgcaacctctgcctctcaggttcaagcgattctcctatctcagcctcctgagtagcttggactacaggcacccaccaccatccctggctaatttttgtatttttagtagacacagggtatcaccatgttggccaggctggtctcgaactcctgacctcaggtaatgcacccacctcggcctcccaaagtgctgggattataggcgtgaaccactgtgcccaccctaaaatgcttttttttttttttttgagatggagtttcactcttgttgcccaagctggagtgcaatggcgtgatctcggctcactgcagcctctgcctcccgggttcaagcaattcccctgcctcagcctcctgagtagctgggattacaggcacacgccaccacacttgactaatttttttttgtatttttagtagagacggggtttctcaatgttggccaggctggtctcgaactcctgacctcagttgatccgcctgcctcagcctcccaaattgctgggattacaggcatgagccaccactcccggcctctagaatgctttttaaaaaacatttttttctttttcttttctttttttttttgaaatggggtctctctctgtcgtccaggctagaatgcagtggcgtgatctcaactcactgcaacctgcacctcccaggctcaagccatcctccagcctctacctccctagtagctgagaccacaggtgcatgccaccgcgcccggctaatttttttgtatttttggtagagaccggttttcactatgttgtccaggctggtcttgaactcctaagctcaagcgatccactcgccttggcctcccaaagtgctgggattacaggcataagccaccgtgcccggtctaaaacatttttttcatttaaaagttattgccggcgtggtggctcatgcttgtaatcccggcactttgggaagttgagatggtggatcacttgaggtcaggagatcgagaccagcctggccaacatggtgaagccctatctctactaaaaatacaaaaattagccaggcgtggtggcacgcctgtaatcccagctacttgggaggctgaggcaggagaattgcttgaacccaggaggcagaggttgcagtgagctgagatcgccccagtgcactccagcctgggcgacagagtgagactctgtctcaaaaaaaaaaaaaaaagttgccatatattcattggaaattgtagaaaatacaaaaagaaagcaatcccaataatgttcctcttctcggttctagaacctctaaaccaacagatgtttaggctttgggtgaaaaagcactatatcatgttgactagttctgagcatatgtggccttaactgaatcttcagtggattttcagacctttaaaaaggctggctgagcaaggcatggtggctcatgcctgtaatcccaatactttggaaggttgacgagggaagatcatctgaggccaggagtttgagaccagcctgggcaacatagcgagacccccttctctccaaaaggttaaaaaattagctgggcttggtggtatgcacctgtagtcccagctacttgggaggctgggatgggaggatggcttgagtccaggagatcaaggctgcagtgagccatgatcacaccactgcacttccagcctgggtgacagaccctgtctctaaaaaaaattaaaataaaaaggccagctggttctgggtgatggattatatgggaagacttgtgaactcctgtgggcactttcctatatctttaggtatagaaatgcattccttggcctgaagctatgttgtgtggatacatggcactgagtaagattaaataagtccaggtccaagttcaattgagttttcagtctaataaggaaaatcactgccccttccatgagggaaagggttccaatggaatcagcctaccacaaggtggctaaatggtccctgagatgtggtaccttatcaaggctgggattgattgcttctctggacagattgggcatatggcatgcgccagtgaggagggtatctgtgttgactaatacattaactccatctttgtcgctgtggccactctattcataagtcccttgaccaagtcatggagcggctacagagaaaggctagctgaccttcacagagcaggtgtcttccccacttgaccaagagcctccttgaccatgggactctttgggtgaacattaacattaggccaactgtagtcaaactctatagtccaaacagtaattttggaagtttttcacatacctcttttccaaatctcgttagccatcctctacttttttccaaggccctaataattcagccgaaccatttttttcccactgccaataaattaggatatatatccttgcctcaggctctctctcctcccaggctgagtagacagtgagatatacaccttaaagttcacctcaccgagagtaattcccttcaccactgccttccaagaccatccctgagtggctctgtaataccacagcagtccactttcatctggtgccagcatattgtattaagttattgtaaaataggctctgattttgttcctgttcaactaattgattatagggaacagcatatgagtaagggttggttgagggttgttggtggtaggagttggtgtactagagtatgagccatctgcttatttaacttactggtgccttcataacttgcttcatttccactcttatatctaccacttgtccttgatgatgaagtgcttctgcgcatagcagtttcctggctaggcagattaacagattaacatagcacccagttcagaagggatagttcagtttgcaggatcacagtatcccatggccaggaattcagtctgtagtagggcccagtagcaaaccaaaagttatttttcaaaaggacaatggttacttgacaaaagtggatgcatagattataagtgtaggagacttcactgagttttctgttggagcttgtcatattggatccactgagttataaggatgagtgtcgaagctgcttgtcctggggcagctggtgagccttcttatgctctaagccccattctaagctgacagcttcttgggtcatctcgtttgggtcaaatggtttgaagcaacacacttaaataaggtacatgtggcctccaagatcctaatttgcacagaaaaagaatgttgtgtgttctccaaccttactccaagaggttgtattttggtatagattttttatttttttctcctctcatttattgatcaagatggatctacttttccccctgacctttctaactatctggtacagctccagtgggcctagagaggattcaagggaagcctgtttctttggagcctccgcttcaaagtcaggtgggaggcgttgtatctgattacagtgttataaaacaaggccagaatccattctagcccttcacccttttacagagagaaaatatcccattgctattgaccacttcaaaccctcaatgataggagcctcaacttaagcttgcccttatagaaaatgatacagtttatacatttgggaacattttattttacttttgaaataaaagtgaaactaaaaactactggcggggcagtatggttcatgcctgtaatcccagcactttgggaggcccaggtgggtggatcatctgaggtcaggagattgagaccatcctggctaacacagtgaaaccccgtctcttctaaaaatacaaaaaattagccgggcatggtggggggcgcctgtagtcccagctactcgggaggctgaggcaggggaatggcgtgaacatgggaggcggagcttgcagtgagccgagatcgtgccactgagctccaccctgggcgacagagtgagatctgtctcaaaaaaagctacttaaataatttgttctgtgatcacactaatacctttcttaaaatcacactatgaattttttttttttttttttttttttttttgagatggagtctcactctgttgcccaggctggagtgcagtggcgccatttcagctcactgcaagctccgcctcccgggttcacgccattctcctgcctcagcctcccgagtagctgggactacaggcatccgccaccacgtccggctaattttttctgcatttttagtagagacggggtttcaccatgttagccaggatggtctcaatctcctgacctcgtgatccacccgccttggcctcccaaagtgctgggattacaggcgtgagccaccgcgcccggccacactgtgatttcttatactttatggatgctactgatcccatagtgaaatcagcttggtaataacttagaaatttcatgtccttctttctagatgaattctttcctgtgtttttttttatttgctgtattaattggtcgaaaggagctttttgctgcatttggtttttatgatagccaacccactcttattggactattgatcatcttccagtttattttttcaccttacaatgaggtaatgtatgatctttaaaattatcacacatatgctcttgcctgcttcaaatctagagctttcaggatagtgaaaaaggaaatagaacagtacagttttaacaaatagatgaaacaaagtcttttagtcccctgattcactggtcagtatgacaaagtagcagaaaaattcaagcccaaataaataaacgtttgcatactcttaggaaagtataagtagaaaactagacttcagtggtgaacacctaaaaggactcggtagatggagattaactattggaatgttgtgtcctaggccacatattcaccagtgcttgggtaaaaatcttatgtgtatgaggggacaaagcaaacactaattggtacagctcagtaagggaggcttagtgactgttcctctgctccatgaccacctgcctccatatagcctgagggatccacccaaacccacaaaatcaaaatcgggtattttgtggtaaatgaaacttaagaacattgctctgtgttagctcattaggggtattccgtgtgagtgataatacataggttaatgtgagactatataacaaacctgacaatggcatcatttcatgatgtttggtaaggcttccaaattaagctaagaaataatattgaagatcttgaggtatctccattcagaagaattctttcttgggatagattgtagagttaagatgagctaaatgaattatatttttctattatgtatggtggggacaccaggaaagaaaaatggaggggcatagatcatattcatatagcattgtccacataaacaaaaataaatttggcagagaactgagatgtattatcttaaaactctttttttttttttttttttaagatggagtctcgctctgtctcccaggctggagtgcaggggtgtcatcttggctcactgcaacctccgcctcccgggttcaagcaattctcctgcctcagcctcctgaatagctgggactacaggcacccatcaccacgcccagctaatttttgtatttttactagagacagggtttcaccatgttggccaggttggtctcgaactcctgacctcaggtgatccacctgcctcagcttcccaaaagtgctgggattacaggtgtgaggcaccacacccggcctgagcatgacttttgagtctcatgtcagcactcaaaagtttcagattttggaacatttcagatttcaagtttttggttagggatgtttaacttttatatgtgtttctggcctgtttgcttgggggagaataaggctcaatttataatttcctcaccctaggtcccctaaatattagtgatctttcttttgtcctgccattcctcttatcccaagccaaacttctctacagtctcagctcatggaacctttagtaacaacaaagaggtgggcagtggctaaaaccctttcattttctttttcaggttctttctttttgcctaacagtcctaagccgcagatttgagtttcaagctgatgcatttgccaagaaacttgggaaggctaaagacttatattctgctttaatcaaacttaacaaagataacttgggattccctgtttctgactggttgttctcaatgtggcattattctcatcctccactgctagagagacttcaagctttgaaaactatgaagcaacactgagatgtccaggatctgtgactgaagacatttctgattatttctgtcctggcagcatgttccagctcttgatgtttttaaacttttttttagaagaaaaattaagtacagaaaagcccagatttaaatacatttaatatgtcattttaaaaatgattttaataattcatttcttaaaacactgaatgaattttgaagcttaatgtttttaaaggcatagttttatctttgacatctaatttaccatcaagttgtaaaattatttggaaaaatacagaactcgttttatttgtatacttatatggaatctgcatgtgaggtgtttgagggcatatgtttgaaagagggagcatcaccacaggaatcctttctgtgaggtggaaacagtggtcctgaatcattgtgctcacacctaacttgaaatctggtcttactttcatgctgttatgatttcacctggtgaatcagtgttttaaataagaaaggtaatagttggtaaggccaatgttatttaaatgaaagtagttagaaaaatgctctcctattctaccaaatttttaatttctttcttccctttcttgctacacagtgatcaagagtttctcatagtgctttgaagttagaaattatgtataggatattttaaatcattgagttttgtggggtttttttgtttgtttgtttcttttgttttttggaaaatccgtgtctttatctttttttcccacgtggtagatatgatcccattggaggtaaattgtagcttcttctcattcatgcagtaaataatacatcctttcactcagcagagatggccatattaaacacgttttgctatgttaaaagtggcagaacaggaaagacgaattaaaaataacattttttaagcgacataaggatgaaatactgatgaatctctgtgacattacagggaaaaaaatatagttttctatctctttcaagggcagaagagttttcatttttatttttgtaattttatctgtaagtcataaatattacttaatcaggcctgattctacttttgaaaattacagttcttgaaatgcagataatgtttactttgaaaacaaatgtcatgaatgatttccagtttttaaagctatatgtttcactgcttcatatctctgtccactttctgaatgagaacttattttgtgcctagagctctcactcactgataatgcttattaccttctgggcatttattccaaagtgggatcaactgtacgcctttggtatctgaccataaagtcttttgctccgctgacatttgggtgatgtcttcacatggaaatataataaaaataaaaatctagtttaatactgcattatttattttcctaaggctaaagaggagcagtcctatgcttttattcagcatcctttatctgtgacttcatgctctgataactgcctttccttccttctgtgcctttgaatacaaatttcagttctgcaaaagtgaaacattaaacattgccaacgcaaatgtatgtactttgtctttagtttgatatttgtgtatcatttttttaatttgtgtatcatttgttacctgaacatatgtttattacctgagaggaactgggtgctagcaatgaagagtggaatgaagaaatagccctaatgatgagtggtgtcagtgccaccactgtgctttacacagagtctcttcagtgtcttgctcctgctttgctccagagtatcaccagttcttgcagatatttccttggaagcttcatttggaatcattccttctctatttttataacctcaaattgttgggcctgcctggtctgctccagctgcctctttggttttccttacatatggtggcagtaattagcttttaaatatgtgactgacttagtcacccacactttatggatggcagaggcatagggatggccaaaaggatactggtaggttcctaagaaattgaccaatcaagggaagagtagataggcccaccaacgaaggaatagatggcactctgcaccctaagaaagacctggtggatgtgcagcaggggcaaaattgagtaggtcaaagccttgggtaaaatggcacaactccagcagagttaagctctgaatctaaggttgaatctctgttgtgtgtatatactggctttatctgagttggccctttgctgaggtctgagaactgcttgtaaattctgcctctgtttaggataggagaattcccaggatcagttcagtggttttagtaccaaatgatggtccccgcttgcccttatattttatatgctcactgttacccctgatcctacatgtgatattcccctccctgtggaaaccttctacttgctttttttgtttttgttttttttgagaagaagtttctctcttgttgtccaggctggagtgcaatgccccgatctcagctcaccgcaacctccgcctcctgggttcaagcgattctcctgcctcagcctcccaagtagctaggattacaggcttgcgccaccacgcctggctaattttttgtatttttagtagagatggggtttcaccatgttgcccaggctggactgcaatggtgcgatctcggctcactgcaacctccaccacccaggttcaagagattctcctgcttcagcctcttgagtagctgggattacaggcatgtgagccaccacatccggctaatttttgtatttttttcttttctttctttttttttaagactctctgtctctctgtcacccaggattgagtgtagtggcatgatcttggctcactgccacctctgcctcccaggttcaagtgattctcctgcttcagcctcccgagtaactgagattacaggcatgggccaatacacctggctaatttttgtatttttaatagagacggggtttctccatgttggccaggctggtctcaaactcctgacctcaggggatccgcccaccttgccctcccaaagtgctgggattatggggtgagccaccgtgcccagcaaatttttgtattttttagtagagatggggttactccatgttagccaggctggcctcaagctcctgaccttgtgatctgcctgccctggcctcccaaaatgctgagattacaggtgtgagtcaccactcctggccatgttcttatatactttctatatctttgatggttttgagtattctgccatcattagcagaaagctaactaccacttaagggccttacgttctatcctaagggcaaaacaaagaaaattacagataatttgtaatccaaaacttttatccagaaacattttaagaccacagtgatgtgagcaagtaacttgaacgatgtgtgccaggctgagttcagttttgtgggaaggcaaatataatccattgtggaatgggatagtcccatttagacaatatggataaggaaatcttgggctcttctctgttatccaggatgatttccagggaggaggatttcctaaacagtttgaccagaaacagctaggaagatacctctgtgtgttctaaaaacctgtgaagccgggaccgccaatactcaggaagcagatttgccttactctgcccttggctgagtccgagctcccctctggctctctggatgatggtcaataacaggtaaagtattaggattaagcctggggctctataatccaacatgccacttactagtaagactttgggtaagaaacttgaccgagactgtatttctccatctgtccccactctaccaagcgctgctctaggtgatggggaatacatggtaaacaaaaggtacaaaaatccgccacgtcttggagtttacattctagtatcagggagaaagacaactaaaatgtatttatatggtgatacatgttttggaaaaaaaggcgggggctgaggtgtttgggtgggggtaggagctgcaattttattttattatcttttatttttttgagatagagttgcactctgtcgcccaggctggagtgcagtggcacgatcttggcttactgcaacctctgcctcccgggttcaagcgattctcctgcctcagcctcccaagtagctgggattacaggcatccaccaccacacctggctagtttttgtgtttttagtagagatggggtttcatcatgttggccagactggtctcgaactcctgacctcaagtgatccacccgccttggcctcccaaagttctgggattacaggcatgagccgtgcctggccagcaattttaaatagggtggtcacaaaaaggcatcactgaaggtcacatttgaaccaagacctgaaggaaatgaagagtgaggtgttctagggaggtgtctgagggaagagcatcccagacgctagattttgcagggccttgtaggccactgtaagaattcaggcttttccttgagtgtggtaggaagccattgtagagttttaggctaaggagtgacatgatctgaagttttaataggaccactctggcttctatgttgaggagcaaaggttgaagcaggggactagttgggagaggcttgcaatccttcttgcaagaaataatggtgctagactggagtggtagtcaggaggtggtaagtggctggattctggatatatttttaagactgagccaacaggatgtgctgatggatcagatgtggggtctaagagataaagtgggagtggaggatgactccagtgtatttggcttaaataactgaaaggatggagttgcccttgggtgagatgggaaagatcgcaggaggggggattctggaggggaagatcaggaattgtttcggacatgttaaatttgagatgcccatcagacatcgaaggggagatgttgagtaggcagttggatcgacggatcaagttaagcagcgagatctggactggggatatatagataaagtttaaagccatgaaactgaatgagatatgagaggagccagagaaaaagatgtggtccaaggaacaagtgactttcagatactggagacatgagaaatcagcgcaggaatctgagaacagtgtggtgagctaaaagccaaagtgagaccaaccctccccataaaagggagcaaaaatttgggatagtatctacaggtgggattgagacagagattttattttttaacatggcagatggggtaatacctactttacagggctgtggtagggatagtatgagataatgtttgcagacacttagcacagtatctaataatataagagctcaacaattgatacttgttggtgatattaataattcaccctaattgctatgatgtaaataagcacaaaattaaaatgtttctgggccgggtgcagtggcttaagcctgtaatcccagcactttgggaggctgaggcgggtggatcatgaggtcaggagatcgagaccatcctggctaacacagtgaaaccccatctctactaaaaatacaaaaaaattagccgggcatggtggcgggtgcctgtagtcccagctactcgggaggctgaggcaggagaatcacttgaacctgggaggtggagcttgcagcgagctgagatcacgccactgcactccaacctgggtgacagagtgagactctgtctcaaaaaaaaaaaaaaaaaaaaaaaatgtttctgacccagctggccttcagggtgaggagaggattgccagagagatgaagtttgaaagaagagtcagcagcagcaggtgtgggactctccccacaggctgcattctagaggtgcagtgtggtgttgaacctttgcaaaggggctgggctgtcttggtgcaatgccctttctgttaagcttctaaatcccccttttcctaattgtaaacaggggaattgagttcctactttttttttttttttttttttttgcatcagactgttgcctcccaagattcagctgtcaaagggcaggtccctgttctcagtaggtgagggaataaaactcggacactgggccatctcagaacacatctcagccacacacaagtggagaccagatcccttccttcctggtttgatgattggtgggatcttcctctgagcatcctgaacatattcatttaataaatatttattgagcacctgctgtgtgccaggcactgtttgatgtgctgcagaatagaacagcaaataagagcaaaagtttccaccctcgtggagcttatattctagtgctttatgttgaatagtgctaagtgtggaagacaaataataaagcagaatggtattctggaatatcagggtaaggatgaggtcagtttttgaataaagacctgaagcaaggtcactggcagtgatattttggggaagaacattccaaacagggcatggcttgtgtgttgtacacgtgttagagggacagcataggctggtatggctgcagtggaatgtaccagagtctaagcacagagttgagtttagaaaggcatataggagattcgtagatcacagcaaatggtctgagtgaaatttacccaccagggagtcttacgtaggctaccaaccactggtccttagggattagccccctttcagccccttcaaattgctgtcagaaggaatgaggtgtaactgcatgagatttgtgaatcatcagcctctctgtggtgctgaaaccctccagtggaccatctctgggaatgctgcagagagggataaggaaagggccccaggtaaggtgcatcaagagacttcaaggagtagagtggctctctaaacctaaggttccaggcactaggagcaagtgagggatccagcctagggaagggagaaccctcctccccaccaggtatgtaatacctgagagcctgcccaaggcttggcttcagctgcctcctgcagctcacatcctctcccttcctcctctgtgccctgcactccagggggcccttggcggctacagtggcagcatggccttctctggggactgagatgctgtaacttgggaattgcccaagcactgagggtgaagccacatcagtggccctcagtctaaccccactgtgtccctcctgtgtccctggattggggtagggggggctgagatgtcactagtgataaatgtgtgttgaggggaggagggaggagggaggatgggctagtggagggcagtggggaggaggaggagggcaaggatgcgtcagcatagaggggacttggagccaagtttgtggtaaggtgggagggtctaggcttccgcacatgcttggacttcaggctggagtccccgagcctcagccccttcccccccttcccctcctcttcctccttgaaggcctacagagctatgggctgggaacccccaggtggtacagatcagatctgagctagtctctcccggacttttttcatccaagtccatatctgtttttctcatgaacctggaaacccctggaaggcaagaacaaggtcttccaatctttcactaccagctcctaccccagggccagcacaccgtgggtgctgaaactcacagaggaccttccaagtggcagaccccggcgagacactgggtgtgctatactggcatgaacaagatacaggtgagtccttgccacagttgtacaaaggctcaaaagggattcacccaaagttacacagcaggtcagcatcctgcttccattcctaggttcctcccacagatgttcctcaaaactgccatgctatcctaatgctcagaattcaggtgcccagagaaaacgccccatccttccctccccctccagagcctctgtccttcctgcctgggcaatggaggcccagcaacaactgccccatccacaagaagagaagcccaacaactcctctatcctagttaactccaggatagagtaactccaatatcctggtttgtacccaacttgggagcttttatttacagaaaggcctgggtggatcggggagaaaggggtggggagttatgcgagaaagagaagggagatgatgtttaaatactgagctgggaggcagggaaggaagtagtggggctggcttaagggtatagccgcctcaggggagtcacccagcagcagtcacctggtaggtccagagagtgagatgggatcaggaactggcatagacctcagtcattggtcctcaagctgaggggtggaactgtagctgggcagggcccgggcctcccgaggtgcccatgtcccactgacccaaggacaagatggccagtggagaaaggtgcagattaagatgtttgttttggtaacagccgaatgatgctcgctggaaggaaagccgccctattccttcagcgcttcgactccatcgacaccacttgccctgtgtgttggcctcactttttcacccatcagtgctctacctccccttcccccatgttttagaattccttttccttaggactcctgagtcccagacagaaggtcctgggggagatggtttcctggactggggatgggtgcatgtccacccagaggggacctggtccttcccgccaggatgcctgccaggctctgtctgggcctgatgctcaaggccccttgatggatccaggctctgtaaggcgggcagaggcataggccgaagctccaaggcaggcggcaggttcacagaagcccggcagccccacggggcctggcaggccaggtcgacctgcctctcctggagcccctggggaccctcgatctccatccttgccgttgattgcctggccaggccggccagggagtcctgtgaacaggagaaagtcaagacattaggggcacctcttgtctcaggcccagaattttgaaggtggggaaacttttcagatggagaaaatgaggccaaaacaccataggagaaaggactctgccccagaggcagagattctgtgattgtcccctacccccagctcccaatcagtgagctttgggagcaaacatcccttccatcacctctgtgaagtgatggtggtggatcctgggaagtcctgagaggcccagcttccagagctggaaccacccagagactccggggtgctccaaaggggtgcagaagctgggtatcaaggactgagctggctgagcgtgaggccgccatggaggagaccgcagtgtccacacgtcattaattcccaagctgaggaacacactgcagctgggcagggccaatggcttacctgggatccctgggggcccaggcatcccggggtgcccccgtcccacttctcctggatcacccttctctccacgttttcctgtagacaaaaaaggaaatcttcatttttcagaattggaaaatgcttttcctctattttttgctatgtttcacgcaaagaaattattcctgttttgtgctagtttgtaatagaggaaagttggaaatggtcacgcagggcttgttaaataaaggaaggtgcagacaaaggatggaagattatgtaaccaataaagtttattacaggaaagcaagcataacaatatctagcatttactgtgtctcagtgaactaagacaaactctatgtaaactactctaaggatagtcctcactgccacatgatgaggttggtactttcagtgtccccattttacagatagtaaacctaaggcccagggaaattagcaggtaactcgtctgagagccacgatgagaaaggggagtctggattcacacccgtgtgtggctccagcctgcctgctttactgctctgctggtctgccgccccatctctattgacatggaaagatgcttatggggtaccactaagcacattcaaaaacaaaccccagaaaccccgagtgataacatagtacattcattgccatccgtttgctactaggaaagagcccaggagtgtctcctggaccatgtggctgaggaaccggggaagggtctgtatgtcatcctgagaagggaatggggaaagggccggcctggacaaatcctcactgcctggcccccatgcccaccgcagaggagcactcacccttgggccccgtgttgccgatctgacccacggctcccacgatgccaggaacgccccgagggccagggtgcccatgggggccctgcttgcctgggtacccagggggcccaggaggtcctggaggacccatcatgcccaccgcacccagggcttcccgcttggcactcacggcgacctctgccagttgctctggagggagggagggagggagggagagggaagtctatgagatgggtgtcagcagtaacactaggggaggcagagcattccgatgggccctggcccctaggtttgcagacagaaaagcaccaccttccgtgggctctgttttgcggaagtcaaaggcccagagtgacttattcaaggtcccaaaacccttcagagactggactggaaggagcccccaggactccagattttcagacaagtgaacacgtggaggctccgggagggggtgagggggcggcgatgccctcgaactgactgtgaggaggggttgctgcccctcaccttgcagcatcttcagcgccacatccacgatgtgctggtcagtggcatcccggccctgaaagcagaggcctttcaggaagaagcccctggctacaagggcccaccgctcctatcccacctggctgagcgtgaggccgccatggaggagactctggtgttgagtcattaattcccaagctgaggaacagattgtacctgggcagggccaagggcttacttgggaaggtcgcggggtaatccctcaggctgcactcacagccttcctgtctgctctggggcttggaaccagtctcggggaagtcggtgagtctctgggaatccctagcctttggcgggtaagccgcaccccagaacagatctacctagaagaagcacctcctaccccggggcccgactcacctccacgccctgtctcccgggctgtcctggcacgcctcggttcccggccagtcctcgagggccggggggaccagggtagccctgaacccctggggcgcccgcatccccgctggggccagggtagccgggttctccacgtactccttgctgcggggggatgggggtgggagcagagccgggtgagaaggcgcccgggtgggcgagagtggggggtgggggtcgaggaagggagtggccgcccaggaaagtcggagaacgccgggaggggaggactcacctgtcccttgggccccggctcgccggactcgccctgcaggcacaaggagcagcggtcacgaagccgcggggaccccggggccagccgccgctccccgcccttccctaggccgcgcgctcaccttctcgcctttctctccggggaggccggccacccctgggtcaccctgcagagagaaccacgggtcagacgcgcggtggcggcggggacgcagagcagggttgggggtcgctgggaacaggggtgctggaactcaccactttgccgcggggcccggtcttccctggggagccctggagaaagcgggcagtgaggggtttggcgagctcccccctccacggggtcccccacctaactttcggccacacccctctttccaactccgcctcgccgaccagaccagaaccctgagatccgcaggtttggaggctccggaaggatctgagtcctgccgaccccactccccctgttatagggcccctttcccaggtgtttcccagccccatctggcaccttgtctcctttgacgcctggcaagccttggggccctggaattccgggggggccctgctcccccttagggccctgaggagaaaagaaaccaaaggaataaatggaatgaggggcctggatatgacgccctgcccaccttagctggcctgcactcacctgccttccctgagggcctggttgccccactggacccctctcgccttggtcaccctgaaatggaaagagaaggtcacaacctcagcagctctcagcaggggtagcctcccgcaccgaggcctggcaccgcatggtcagggtgccctccattcctgctgtcactggcagggggtcctttctccacttggcagaccagcaaagcaaacctaggccctgcctggggaggcatctcacgggctgcacggagcagatgctgtatccagcagtgccagctgccgcagaggcccccggggaggggccattgtgccaggcacttaccttctgtcccatgatgccctggggaccaatttctcctcgaggccctggctctccctggaggaaggagaaattggggctaagcgtttgacctggtggaacccacccttccacacctggccagcccctccctaccctgggtctcagctaatttgcttcatcagggaaggtttcccagaccacctgttccatggttttgggtccctgtagttttctttcaaaggacccaacacaatttgaattacttatcatgtgatcatttctttctttcttttttttttttttttttttttttgagagggagtcttgctctgtcacccaggctggaatgcagtggcgcgatctccgctcactgcaagctccgcctcccgggttcatgccattctcctgcctcagcctccagagtagctgggactacaggtgcctgccaccgccccaggctaattttttgtatttttagtagagacggggtttcaccgcggtctggatctcctgacctcgtgatccacccgcctcagcctcccaaaatgctgggattacaggcgtgagccaccgcgcccggcgtgatcatttatttcatgtctatttcttccattaaactataccctccatatgaagaggagactcatagttgcaagtgtttagtgaatgtttatgcaatgaataaatgaacgaacaactctgcctgttggattcccagcccatcaacttggccatctaggaaagtcacactccagaacagagccagtccccaccctccctgcaatgtacatagggaaacaggcccagggaggagaaagagcttccctgaatcattgggtcagggcagagccagactaactcggagctctccctaggttagggctccaccccatggcctcaccctaaagcaggaacccttgtgtcagtgcagggggcatttacctctttcccagggggaccagagaatccaggaaggccctgcgggcccggctcaccctgcaggaaaacagttctcaggtcagtctgggtggcccagtcaggcccttggcctcagggaaacccaacgaagcctaaacagagcctggaaccagatgagctgggacgggggagagggtattcttggttcaatcctcttggctcctgattttcctgtttgtttctcctctggattttaagccatgccatcctatctgcactgaggcaggctgaggagtgcatgatgggtgggaggtggcaggagggaggtggttaggcccaaggggcttatgttctggctgagcctctgagacttggctgaggcctgggccttgctgtcttcctggccccagacttccttgctcaattctgtccccagcttgggatcgcctcacctggtctccagggcctccttttgtcccaggctggcctggcacaccctgcagaaagaagttgaagtcagtttctgccctggcatgagggagccccatgcacctgctgctttgcttcccatccccaatccagatttcccccacctgtgggagctgaacaacagaaggtccagccacggcatgatgaacttaactgtacattcccacagtggtggcagaggagtggggcacagagaatggcctgtcttccaggacctggggtctacgtggaagagatggatatgtgctctcaggtgcctgagcccatgtgagtgcacgcaggaacacaagtctgcatgtgtgcacagaaacaggtttggccactcagtacccccacagggagggagggcaggctcccatggactggactccaggaggtatggaatggagatggccctgaacgataagaaggcacaaagagaccagaaagggcatttcaaacagagggaccagcaaaggcctaaaggtgtggaggcagaaaagccaaggcctgttgagaagggaaaggacagagaggggccattgctgatatggcaggaggggcaggttggggtcagattatggtggtcattgaatggtaagatgagccatgaagacaaagattgcatctgtcctatttataattgtttacctgccacttagtatacctcagatactcaataactattttttttttttttttttgagatggagtcttgctctgttacccaggctggagtgcagtggtgtaatcttggctcagtgcaacctccgcctcctgggctcaagcaattctcctgcctcagcctcctgagtagctgagattacaggcatgagccgccacgcccagctaatttttgtatttttagtagagacggggtgtcaccacattggccaggctggttttgaactcctgacctcaagtgatccactcagctgagcctcctgaagtgctgggattataggcatgagccactgcacccgacctcaataactacttattgaaggactggactgaatgactttttcctggaggcggtggggagccatggaaggtgctatagtgcagaaatggtcagatcccatttagccaacatggaggactggaatggccaaagagaaggctagagtaattgtccaagtaatgaagccttcgccaggccaggggccacagagttggtaacaaggcaagaggtggtgattgagcaagagccccgggtgtgtgtggattctaacctcatcagccactagcccctggccagcccctgtggctccacctgacacttaccgctaggccctggtggcctggacttccgggctgtcccgcctgtcctgcactgccctgggatagacagataaccaaagatacaaattaaagctccagccagagggccatggcttctacccagatgcaggtagggaaactgagatccagaggcaagaaagggcatgtccatgacctgaggaccccaggctcttggtgtctagaatccaggactcaaggtcctgcccctgccccagtcccatcagcagccccactcctaccttcatgccaggcgtgcctggggtcccatccttgccgttgatgcctggggggccctacccaggaggaaagttcaagggagagtgataatgcggagatgtctggggtctggccacccacccctgttcctctgagacagctgcagtgtgcagggagggagtggctctggtcatcccaggaagccccactggccaactgggggaggggagttgaagtgggaaggggatgagggtcacggaacacagtccttccctagtgtggagggtggtgtccccgactgctgcaagctccccatgacctcccgtatgtcatcacccctgtttacaggtgaagaaactgaggcacagaaagggaggcatttcctgaggttatggagccagcccaccagttgcagagttcagactagcatcccaggcttctcttctgggggtttggacaaagcagctgggccctggcctctgtcctggtgggcctaggcctctggcacctaccgttgctcctttcgggcctgtgatcccctggggtccacgaatacctgggctgccctgcaaagcggagagagatcaggtcaccctcaggatgttgggcccctgtctggctgtgcagagaggggaaccactgagaacagtggcctctaggtcccagagttcctctggcacaggccacaccatgcaggggccggaggagagagccttgggagtacccttcctgccctggcaccagcaggagggaggagaagtcagtgccaggaggccaggctgggctgagccagagcaggggtgggagccagaatccactgagaccttggccaaggccccacaatccactcagccaaaggaacacaacaaccgaatgcagtgtgtggatgctgtgtgagtcttgatttgaacaagaaccaggaaaagacatttttgagataattgggaaaaactgaacagagactggccattagatgatgttagggagtacttgtttattttgtcagttgtgataatgtgattatgtgagaatgagtgcttattgtttagagatatgtacaaaagtatctagggctgagatgataggatgttaaggatttacttgaaaacatcagagcaaagcaataacaaaatcaaaggaaggaggggtctgggggatagaggacacaagactgacaaaatgttaataactgaattggaacctgtgataggtacatggggattctttatatcactctcactggttttctgtatagttaaaaaattgcattaaaaaactagatattgctgggcgtgttggctcacacctgtaatcccagcactttgggaggccgaggcaggtggatcacctgaggtcaggagttcgagaccagcctaacatggtgaaaccctgtctctactaaaaatacaaaattagctgagcatggtggcgcatgcctgtaatcccagccacttgggtggctgaggcaagagaatctcttgaaccagggaggcggaggttgcagtgagccgagatcgcaccatgcactccagcctgggcaacaagaataaaactccatctcaaaaacaaaacaaaacaaaacaactagatgatctctgctgtctaatagaaaaataaaagtataagaattttttaatttttaaaaagaaaagaaaataatttaaaaaactaaataataataacagttaactgtgttttctgctccatttttctgtaaacttaaaaccgcttcccccaacaggtctattaattgggaaaaaaaaaaaaaaagagttaagagaactgggatcgagaccaaatcccattagccccatggctgatttgctggaatctcattgtctggccccagtgaccatgggactggatcccagggcttcgcctaaagtctgaatttgggctgactgggctcttggcacagatggtcctccccagcaggtcacccacttgggcagacacacacacactcactcacacacacatacatacactcacagtcacacacacacactcagagatatcctcacacactcacatacacatactacacacactcacagacagcctcacacatacacactgtacacatacactcatatacacacagtctacacacacacacactacacactcacacacactacacattcacactcacgcacacactcatgcactctcacacacacagccttagggggtgccttgtcctgcccagtactccccaggggtcctgactgaacaatgggtgcctgaggactcacctcgtcacccttctccccagctcggcctggcggtcccctaggaccttcctcaccctggcaagaaagacaagcaggaatccaggtcacacaggctcagggggagccatgcccactctgtggctgtagctgtaggagctccagcctcaggggtaggggagcaaaaagaggcttaccggtggcccagtggcaccgatagcgcccaccatgcctttatatccatgagggccctggggagaggaaagggttgcaggtcagtcctggctgaactccaggggccagaaggcagctcctggaagctcttgtagaacaccccaagattcacttaccgtctctcccttgggccctgccatgcctgggtagcccctgatgccctggggaccctgttgagaaagaaaaatgacagcaatggcaattgcaaggcccacttcatgataccttgtctgatgcccaccttcaatcttacagtgcccttttgaggtaggcagcagagtctctgtctcatggatgggacatggaggttcagagatgaggagggactcactgcattactcaaagggacagtggcagacctggacctcagcctgggcttcttgctgacagctttggttcctgtccctcattcctgacaatttcagcctccatctccccatccagagatgctcccagctagacacaggtgtctcttttacaagctagaggcctgagcaggggaatgactccatgaagggctcctggggtgagggagaagagggccactgaggcaaggtgttccttaccggtggtccagggatgccttgctctccagaggcacccacatctcccttgggaccctaaagggcagggatgagctgtcagacaggcaggcagatggaaagacacatatacagacaagcaaagataccacctcttttccccagcacaagcagacgggagggactactacgaaccctacagtcctgtgttacagatagagaaaagccaagcaaggagacatgaccagagacatgccgacctggagcacaggcctccagcccccggctcaaggctctgtccccagaacccacaggggaaggggaagggacgaagaaggggacagagccctgtaggaccatctccacgtatccctgacccacagccctcagcccttgcactcaccggcttcccctggtggccaggatcacccagaatcccgcgtttgcccgcatgcccctgaagggaaggagagagctcaatacgaggtcccctcctgtcacctgcaccaccctcccaagattcaggccaggagctctcaccttcactccctgcagccctgggggacctttcattccgggtggacagttggttggacactggaaacagaaaatcccacagggtcctgtgatcagctgggcagtgcgcccccatctctccaagccccgtgctctcctccgcctcacctggtggaacccctgcactgcagcccctccccatctctccagacacccccatctccgtggccccgcctccccatctctgtggccccgcccccctgtgttagccccgccccagacctcgtctctcaccaggaaatccgcactgccttccagaccctggatggttcccgggcgaccctgagaggagacatgaagatggagcttggcctgaccctttcccgccgcaggcttgctcaaagacccttctccttcccctgcactttgccatgtcgggggtctggggacacttacaggtttcccagggggtcctgggggccccgatggtccatctggtccagggtccccctggaagcaaaagaagcccaaatcatacccctgaccagcccttaccagcttaccctagtgccctcctccaggtcctgcctctgccctctccaccctgtcttcccggtcactttgtgagatccaccatcttgggagatgaaggcctgattgacaggggatggggccagcggcgtccctaaaagacctagtgccgggtgggctcataggaggggtttctgccccagacctggaggagtttcccagtggccaggagcaggcccaggaacttccagaaagaccacccagcttgccagcttggagatagaaggcaggaggcagtgaacagagggtggctgaggctcaccttggggcctcggattccaatctcaccagggaggccaacaggtccaggaggcccctggggagcagagagttgatggtcaggatgcctcagagggtcagataccctgggcacaaaggtagagacaggcacccaaagcccgtttctccacttttactttttttttttttttgccaaccccagagagactgacagactgaggctttaaggaccagagaattgcagagccagtggacaggcccagagtgggctggccctgggtctctggcaggtccacttattcctgacactatcacagcaagctggctccttcccatggtggccattccctcgaagcctttctgttgtcccctccttccctgggagttctggggatcctgccccatccctgaggacttacaggaggtccagcaaaaccagggccctggaacagaaagaaagaaaattggcttcatggctccctctgcaggtcccctctcccccaagagtccctcgaagcccttgcaggttgtactcaccggaaggccaggaggaccaggaagcccgggctggccctgcagaagcaacgagaaaggctcagaggctggggtttccccggctcctacttcctctctacagccactcccaaacgctggccctagattgcccacgctgaggccccagcaggccccttaccttgactccagggatccccatggggccaggctcccccttggctccagttaaaccctggggaagaatgaaaatgtaggatcaatgagggccaacctgctccctgacccacagagcagggcaggttcaagggtccctcctgggtgggccgaggctcctttttgccacacctcatgaaggcctaggaacctccacacctttctttccttttccccagttcccatagtaaccctaggaggcaggcagaacaattcccttcttttgaaagatgagaaaccaaagcccaaagatttggctttatgccagacccaggcttcatgcctccgggttcaggagtctagaagacctagccatgggtcaagattggtcatttgcttgatgtcctaccttgacaactttttcattttcttttcttttctttcctttctcttttctttttctttcttttttttttcaattgagacacagtctcactctgttgctcaggctggagtgcagtggcacagtctcagctcactgcaacccccgcttcctgggttcaaatgattcttgtgccccagcctcccaagtagctaggaccaggggcatgcgccaccacgcttgggtaatttttgtatttttagtagagatggggtttcgccatgttggccaggctggtcttgagctcctgacctcaagtaatctgcccacctcggcctcccaaagtgctgggattacaggcataagccaccacgccaggccattggcaactttttctgagccttagtttctcatctgggtgcctctctgggtggatgtgagaactgatgcaacatagaaggcaatatgccttgtaatcgttgcagggtgtggatgagtttgaaggggtcctggtgactgtcccagccctggtcacacctcatgagccagcagggcagaggcaagtcatgggggtttctcctttctcccatctttcagtgactgacccagtgtaacccccatcagatgttgtcctcatgcccctggggctggctgtgttcaagagcctgtgaccttgggggccccctgggagctctgtggtatcagctaaatgatgtttctctcctgagtcatgcctggggctgtgggtaggggtcaggggaagagcggaggaaaggacagggcacacaaggacagccccacccaacatattcagcctgatccttggaggccagaaatgtgagactaagtcctgactgctgaggggtagcaggaggaacctgcacctcccagaaagcagaccctctctctggaccccggttgcctgcaaatcaatgaccctgggtgagagtgaggttccaggaaggtcacaagtcatatcaaggtgaggggggctcacagctggagaatctccatcctgctgcccatctctgaacagatcagtgaagatgccagagccaggccctggaggtcaattggcagagccctaccctgccccacccgacactcagctactcacatcaatcccgggcttcccgtctggcccatctggcccagctttgccaggctcgcccttgggtcccttgaaaacagagatggaacaaacatgagccagaggagggcaagagcaggaagggtcaaaggccaaagaggataaagcactcaccggagggccagcttttccagggggcccattgtcaccctgcaagatacaagttggtgagacagcacactacggctcacactaccccaagtgggcacacacaggccctggcaggccgctcccaaaggctctcctcactctcctctcttctgtccaggtcccctaagccttgcaatctttgggaaaagagcccccttttcctcaaaaataaaaaccaaaaacaaatcacaggagcatgagaataaccctggccgggctggagagggtgacagcaacatgcaagaaggtacagacatgctgatgtcatgaggtgccagctgtgagacccactaccagggctgggggctccaagctgatgcctcttggatttgggcacgtgtgggaggaaggttggggcttttagagaaacgtgaagggggatgagcgagttgggcagcagctctattccagactgcagggcaggagaacgggaagctgagccagtggcaaggaccaagggggactgcaagggggaaattcagtgttcccaaggagggaaggacctccttccagtgccaaaggacccttggtggtgggcaggcagggccggtagagtgcgattcagccccagagaggcctccaggcatttcagagccctcagcagccagggcctggccgggggcccagcatcctgtgtttggggggtgggggcaccaggttgaatagaagtctgtccagactggtaaacatcaagcggccctcctgcgggagctttcagaatgaggtatttaaccctcaccctgcagggaacaagcccagctgattctaaatcggggagagaaaaccgaagggaagagacaggagtctggcccaagctggtcggtggtctggccaaggctcccaagcgaacctgaagaagcgtccagatgtgccagaggcagggtgaggggttgagtcgcctcctaccccacaaggaggggaaaggagaggagggggatgaggcctcgctgtgagctgcggccggcggactgaacagcagctccttgtctgtcggcggctataacgggctccgcatgtcagggctggtttgaggtttttgcagaacaaacggcgtccttgtggtgcgggccggcgccgcctattggcgacgaggggcactacatctccgggcaccccgaagtccccacccccaccacagcgctcacaaagttctcctttgtctgccgcctccctcccgccctggtctcaggttagagacttacgtcgatgccgtcggatccaggcactcccggcggtcccgggggacccggggggccccgctctcccggtggacctctctgaaaaacacacacggggtggggcagtcctcagacagtgcaggaagctgggcgtccccggggctgcaagcgaccctgggagcggggtcctaggggcgcagctcttccgcgaactcccacgtattgagaatcttctgtatagcaggcactgtgtgccattacatgcattcattatcttacagaatactcagaaccgggaggcgggcgctattacgggccccagtttgcagtcgaagaaactggctcagaacgtgaagggtccatggtcactgagagtgggcggcggcgccaggagtccgccctggatctgcccgactccttccactgtgccagtttgcccttgcgcggtcgcggtggggaatagatggagacgtggacagctcaaataaatcacagatggaatgtaaggttgtgcctagcaggctgccggccctcagtgagcggtggctcgggttgttgttcttacgtgaacgacaggcagagacagcgcctcctcctctccccatggtgcgggaaaacccgacgggaaagtgggggaggcgcagagaaaggaggtgtagggaggtgaagcgggtactatcttcccactcggagcgccccttcggcagcacagctgcccggtcctccctctgctaagccctgactgctgcaggggagcaggaggagccggcacctcccagaaagcagaccctctctctggatcccgtttgcctgcaattcaatgcccctgggtgggtgtgaggtttcagggaggtcacaagtcatatcaagatgaggcgagctcacagctggagagtctccatcctgctgcccatctctgaacagatcagagatcttaaaaggcggcccttttaagaggccagctcggacccaggcaggggtcccggtgcccacgacctccccaggccgcgaagtgccaggctggcgccccgcaggcgagctcgaaaccacacccagcacccgaccgggcccagtctctgccctacccgcgcgcccgcagcccccggcggccctcggaagggagacgtgggtaggcgggcagggccgagaggccgcctcggggcgacagcggcgtctggttggagccggcgccccctgggaggcggcgggggcggaggctgcgcagcgggtgaatgagcaccattgtatgccccgccacctgggctccccgggctgccaggaccgggcgccagctcctgccccacgctgcctgtcccgggccgggccgcgcgtctggggacgggtcccgtttgactctccggctcagccacctccattcacggtgccgcgatgggcaccatgtatgcacccaccgaggggacctgcccgcggcgctgtcctcaggtggcctctcgggctaggggtgtcagtaggcgcgggacacaggcagagctcctccatcccggactccagaccccgcaccctggaccctggcagcggaggggctgcgaaacttacaatctgcgccagagcgagcactaccacctggaggagaacaaggaggctgcggggggaggccgtagcggcggccatggctggcggcgagaccaagggggacgggtgcgtgtccgcgcacgcaccgacggcagagtctcccggcgctcctccagcgctggctgttcgcgggcagggtgggctggggctcctgaatatgcggggggcggggcgggggccggcgtgagctgtcacctgagaggaccggcggggttgccgggagggaggccggcgccaggcatccagctccgccccgctcggtccagcctcctgcgcccaccctctgtcctcgaggggcgaccggggtgcgggtcggagatgatggtccagtttctttgtgagaaggcataaggccgtctgaggttcccctcgggaccttcaggccccagcaccttccccctgacgcacagcctgtgccccatcacttaccctacgtcctctccagggcccaggccgagagcacctcgggctctgcagatcttgctgcaggctctccccagctcccgcccaccttgctcccctctcctctggctccttcctctccaagcacaaacaaacaggccttttccatattaatatgccacagtccttcctggatcagccgtctcatgaatactccatcggcctcttccagctctttagtggagctgtgtgcacctcccccacccccgaacttcctcacctcgctttcacctccctactctgtcccaacaagcaaatctgtctcctggaggtctgcagtgaagcccaacccttcttcggtcctccaggcaggaagctgttggcatcttcacctgcccttgaagtcttccccatccaagctcctgccatccagctcccctttttctattgcctttaattctctgcagctgccttaagcactggtgtgtttaggattgggccttctcactccatgttcatagaaacaactaccactttattcaccagagtttccgaaccccgctgtccagcatagcccgactccagagagccttcccttccctcccactcacttaggcaatattggtaaaatgctttggaatctgactttttcacaattatagatatgaccacaggcaccccaaactctatgaagtctcattttcctcatctgtaaaatggggatactaatagtccatatatatatatatatatattttttttttaagacagagtcttaaaaggctctggagtgcagtggcacgatgtcagctaactgcaacctcgcctcgcgggttcaaatgattcccctgcctcagcctctcgagtagctggaattacaggcatgagccacaatgcctggctaatttttatatttttagtagagatggggtttcgccatgttggccagactgctcttgaactcctgacttcaggtgatctgcctgcctcagcctcccaaagtgttgggattacaggcatgagccaccgtgcccagcaaattgtccttatcttaaagggtttttgtggaaattgaatgagatgactcatgcgaggcatttaacctcgaaccagcacatagtaggtgcttgatacattttagctttccttatgatttatggatgactgttttactaggttggcatccaatgtggggaagctggccacaggcagatcagctaaaatgatgaacctagttgaagctagaaaagtccaactccattgggcaggttagcaaagggctctggattttgaaaggttgtcctggagctgagtttgggagaaagagcttgagagaatgtaattgctctgcctaacagagtgaagaagaatttgaagtttgttggaagatgagagcaagaggaggaggatgtaagagagggatggtgggcattgcttggggtgggtggggtaaacctataaaggatttttagaactgggatgtccaaattcaattttaagttgtttgtttcacatcacttatctctccatcttttgtgggctaaccacaagaaaggccttgtgtgagtaagttttctttttgtgtgtggaaattatggaaagaggatgagtttcacagtctggacagcacacattgatgtattaattacctgttgcaccataacaaatcaccctaacattcagcagcttaaaatgacaatttctttggattaggaatttgagagtgactctgctggttcggtctggcctggggtctgttataaggtcatagtcagatggtggctgggcctgatgtcacctagaaggcttcttcactcacatgtctgatgtcagtactgggaagccttcaaccgctggggccggaacagctggagttgcttggacagttctctcctttatctctttgtgggctttccatgaagtttctccaacatggcagcttcaaggtagctgaacatcctctatagcagctcagagggagtaggagagcaccagactgaagagaattgccactcaggacccgtccttggaagtcatgcagtggcaccttcaccacattcttactgttgaggcaattgcaaaggtctgcccatgatcaaggggagggaacagagaccccacctcaaggatgaatgttaatgtcacattttttaattttttttttgagatggagtcttgccctgtcacccaggctggagtgcagtggcgcaatctcagctcactgcaacctccgcctcctggattcaaacgattctcctgccccaacctctggagtagctgggattacaggcgtacgccaccactcccggctaatttttgtctttttagtagagatgaggtttcatcatgttggtcaggctggtctcgaactcctgacctcatgatccgcccgcctcgtgatctgcccgctttgtcttcccaaagtgctgggattacaggcatgagccaccgcgcccagccagtgtcacattttaagaagagaataagggataaaatttatttatttatgtctttctttctttcttacttttgagacaaggtctccctctgtcacctaggctgaagtgcaatggaggaatcaccactcactgtagcctcaagttcctgggctcctgatcctcccacttcagcctcctgagtagctgggactacaggcatgcaccgctgcacccagctaattttttattttattttattttactttgagacagagtcttgctctgttgcccaggctggagtgcagtggtgtgatctcggctcactgcaacctccatctcccgggttcaagcaattctcttacctcagcctcccgagtagctgggattacaggcgcctgccaccatgcctggctaatttttgtatttttagtagagacagggtttcaccacattggccaggctggtctccaactcctgacctcaagtgatctgcccacctcggcctcccaaagtgctaggattacaggcgtgagcgactgcacccagccatgcacccagctaattttttatattttgtagacacagggtcttgtcatgtttcccaggttgtcttgaactcctgggctcaaacaatccttctgccttggactcccaaagtgctgggattacaggtgtgggccactgcacccagcctggggatgcaatttttattattgatgcaaccatctttggaaaatacatcctgccacacttggggttataaactgaaccaatccagtggtagctgaagcttaaagctggagccaatcaagataaattttaggccaggcaaggtggctcacgcctgtaatcccagcactttaggaggccgaggcaggcagatcatctgaggtcgggagtttgagaccagcctgactaatatggagaaaccccatctctactaaaaatacaaaattagccgggcatggtggtgcatgcctgtaatcccagctactcaggaaggctgaggcaggagaatagcttgaacctgggaggtggaggtagcggtgagctgaaagcacgccactgcactccagcctgggcaacaagagtgaaactctgtctaaaaaaaaaaaaaaaaaaaattatatatatatatatatatatatatatatatatatatatatataaattttagggaaggctttggaccacaagacatggactggaggttccagccaattgcatatgggtgtttgtttgtttttggaaacaggctggagtgcagtggcacaatcttagctcactgcagccttgacctccaaggctcaagtgatcctcccacttcagcctcctcagtaggtacttcttgcataggactcttaaagcacagggagaccctgaataagtggagagtcatatatctacatttctgtataagaaaactccatgttggccaggtgtggtggctcatacctgtaatctcagtactcttgaaagctcaggcaggagaatcacttgaggctaggagttcaagaccagctggggcaacacagtgagacccctttctctacaaaaaaaaaaaaaaaaattagcagggtgtagtggtgtctcccagctacttgggaggctgaggtggaaggatcacttgaaccctggagtttgaggctgcagtgagctatgattgagccatgacatcctagcctgggtgacagaacaagaccgtctctaaaaacacaaaaaataaaaatagaaacttaaaaacaaatggctaggtatggtggctcatgcttgtaatcccagcactttgggaggccaaggtgggaagatcccttgagcccaagatttcaagactgggcaacatagatgtatatatatataatatttgaaatctatgatgaaagtatatatatttagtttatgataaaggttaaattcaagagcagtgaggaaagggtagactagatgttgaggtaattggccatatattcagaaaaaaattcaacttagatttctatatcagcataccaaaactatattcttgaacaaattaattgagggcccatatataaagatagcaaattataaaaggcctaaaataaatttaaaaaataattttttttgtcatggaaaacatttctgggcagtacacaaaacctaaaaaagataagaaaaatgcttaaagttgactttatcacacttttctacactttatcacactttttaagtttttttacaataaaaattacagataaaattaaaagtcagaaaagttgagagtcatatatctacatttctgtataaggaaactccatgttggccgagtgtggtggctcacacctgtattataatgtatatttacaattacatatatatattacatatacaattacatatctaaatatatatttagataatatatattatataaattatataatttacagtatacattacgagacaaagcattaatatggaaaacatacaaagaactcttataaatcaataagacaagctctatgaaacacttaaaagaatacctggcagggcgcggtggctcacgcctgcaatcccagcactttgggaggccagggtgggcggatcacctgaggtcaggagtttgagaccagcctgcccaacatggagaaacccaatctctagtaaaaatacaaaaaattagccaggtgtgtggtgggcacctgtaatcccagctcctaggaatgctgaggcaggagaatcgcttgaacctgggaagcagaagttgcagtgagccgagattacgccactgcactccagcctgggcgataagagcgaaactccttctcaaaaaaaaaaaaaaaaaaaaaaagaatatctaattcaaatattctacaaactttttagagaatagaaaaataaagaacattctcaaactcattaatggggctgatataaacttgatacccaaaccagtgataggcagtaagagaatggaatattaaaggccaatctattttacgaacatagatgcaaaaatcccatataaaatattaacagattgggctgggcacgttggctcacgcctataatcctagcactttgagaggctgaggcaggtggatctcctgaggtcaggagtttgagaccagcctggccaacatggtaaaaccctgtctctaccaaaaatacaaaaattagctgggcataatggtacacacctgtagtcccagctactcaggaggctgaggcaagagaattgcttgaacctgggaggcagaggttgcagcgacccaagatcacgccactgctctccaacctcagcaacagagcaaggacagaacggtttcaaatgagaaaatctattaatgcaaagagtttaagatcatatcaagatacacacaaaaaagcaactcaaatgtctgtttttgctccacctaccatggtaattttttctgcaggatcaagcctgaaaatgaggacctaagaggccaggtcccagaccaggagggagcatagacaccatgccctccccagcctcatcccttctcccaaggaacaatttacagagtctggccacaccctcctagggactagagcaaaaaatagggaagataaatgtcccttctatttcctttttattagaattaactcaggatttctcttctttcaatacaattttaagttgtagtcatagagatattttatatttgaacagagattgaatctgattcatcccctgtgctccccaattgcagaagtccttcgattttgttttaaagagacacgatctcattatgttgctcaggccagactggaactcctgggctcaagcaatcctcccacttcaggcccctgagtagctgggactacaggcgtgtgccacggaatcagcaagtaacagatcactgaatcaacccccaacccacactaggctgagccttacttaaggaccttccctagctgtgcccttctctctcaggggcaggttctcagagctcagtttggagctcacggactaaatcttcttacaccttgccaaatgcaccaggctcacatcatttccttgatcatctcccaaaatctctctccttgctgttctgttttccctcccctgacccagcatccaagttctctgccagtctcccatcctaaccttcccacggtgtcttccggaacatgggttcaacaatcagccagcttccttactgttctcaatttccaggagcgtgtcctctgcctccaagccacagaactcaacatgatctctgacaacagtccttccctgcagccctcttacccggaagctgattatcctctcacaccacatccctcagggacagggggtggaatcagtgtccacattgtttcttgtaaaaaatcatatatttatttattttgagacaggatttcaccctgtcacccaggcttcagtgcagtggtgccatcagggctcactgcagcctcaacttcctgggctcagacctcccaagtagctgggaccacaagcgtgcaccaccacacctggctattttttattttttgtagtggggctgaggtgtctccctatgttgctcaggctgtcctcaaattcctggactcaagccatcctcctgcctcggccttccaaagtgctgggatcataggcatgggccggactgcacccggcctccacattgtgtctttagatatttttccagacatctgattatagaaatccctattctcaggcatacgccaactgattccttttttttttttttttctttgagaaggattctcactctgtcgcccaggctggagtgtggtggcacaatctcagctcactgcaacctctgcctcccgggttcaagagattctcctgcctcagcctcctgagtagctgggcttacaggcatgtgccaccatgcccagccaatttttgtatttttagtagagacggggtttcaccatgttggtcaggctggtctcgaactcctgacctcatgatctgcccgccccaccctcccaaagtgctgggattacaggcatgagccaccgcgcccggccgttatatcaactgattctatcatccctcctccttgttgccatcatcctgttttccctgggtcactgtctctcactcactagtgatttgggcacctggatcatatcttcccctcctctcagaatcctgccatcacctggtgcacttcaataacttcttcttcttcttcttctttttttttgagacagagtgtagtggcatgatctcagctcactgcaacctccaactcctgggctcaagcaatcctcccacctcagcctcccaagtagctgggactacagtcatgcgccaccatgcccagctaatttttggtattatgagtagagagggggtttctgccatgtttcccaggctggcctcaaactcttggactcaagtgctccactcaccttggcctcccaaagtgctgggattaaaagtgtgagcccccactcccggcctcaaccacttcttcttcttcttttttttttttttttgagacagagttttgctcttgttgtccaggccatagtgcaatggcccgatctcggctcaccgcaacctccacctcccgggttcaagcaattcttccggttcagcctcccaagtagctgtaattacaggcatgccccaccctgcctggctaagttttcgtatttttagtagagacggggtttctccatgttggtcagactggtctcgaactcctggcctcaggtgattcgcccgcctcggactcccaaagagctgggattataagcgtgagacacagtgcctggccatcaacaacttctttaggccgggcgcggtggctcatgcctgtaatcccagcactttgggaggccgaggtgggtggatcaagagggcaggagatcgagaccatcctggctgacacggtgaaaccccgcctctactaaaaatacaaaaaattagccaggcgctgtggcaggcgcctgtagtcccagctacttgggaggctgaggcaggagaatggcgtgaacccaggaagcggagcttgcagtgagctgagatcgcgccactgcactctgtctgcctaggcgacagagcgaaactctgtctcaaaaaaacaaaaacaaacaaacaaaaaaacttctttaacgacccattcaacagcctgcattctcagtttcttgactatttcctttctagtgaccatctcttcaactcttcttcagcagtatttttaaggaaggctatgcctggggtttggtatcctccagaagtgtctcacctctgaaatattaaaatcaaacaagagccactgtgtaagatgtctgacacccgtgtcggggaaaccacgtggagaggccctgagactacatggagagggagaggggccaagctgagccctgctttccagctgtccccaccaaggcactagccatttgactaaagccattttaaaccttccagaccaaccgcatcaccagctaaatacctccaaaagcccgaattgacaccaaatggagagaaagaatcgcccagccaaaccttgcctgaattcctgatccacagaatagtgaggtattaaaaaatatttttaagtttttattttgaactaattatagattcataggaagtttcaaaaatagtacagaaaggtgctaaagaccttttatccaatttgtctcagtgatagcatctttcataactgtagagcaattataaaaccaggaaactgacaatacaatccacagactacattcagatgtcaccagtgttacatgcattcatatgtgatcgcatgcatgtacagttctaagcaattttatcacatgtgacattagcgtagccaccaccacaatcaaggcacaaaactattccatttctgcaaagatcccccatgctacctttttctggtggcatctctttctcctccacttgccccttaaaccttggtgacagtactttgtttctatctctataattttgtccactacgaaaatattacagagatggaactgtacagtacacatctttttgagatcggcttttttctttttttctttttttttgagacggagtctcactctgttgcccaggctagagtgcagtggtgcggtctcggctcactgcaagctccgcctcctgggttcacaccattctcctgcctcagcctcctgagtagctgggactacagacacccgccaccatgcccagctaaattttttttgcatttttagtagagacagggtttcaccgtgttagccaggttggtcttgatctcctgacctcatgatctgcccacctcggcctcccaaagtgctgggattacaggcatgagccaccgtgcctggccgagatcggcttttttcattcaccatacttcccttgaga

SEQ ID NO: 147 - protein, 1598 aa, Homo sapiens
ELTLFWSKLQRRIDPSLDTFLERCRQFGVIAKTQQHLFCLIRVIQTEAQDAGLGVSILLCVRALQLRSSEDEEMKASVCKTIACLLPEDLEVRRACQLTEFLIEPSLDGFNMLEELYLQPDQKFDEENAPVPNSLRCELLLALKAHWPFDPEFWDWKTLKRHCHQLLGQEASDSDDDLSGYEMSINDTDVLESFLSDYDEGKEDKQYRRRDLTDQHKEKRDKKPIGSSERYQRWLQYKFFCLLCKRECIEARILHHSKMHMEDGIYTCPVCIKKFKRKEMFVPHVMEHVKMPPSRRDRSKKKLLLKGSQKGICPKSPSAIPEQNHSLNDQAKGESHEYVTFSKLEDCHLQDRDLYPCPGTDCSRVFKQFKYLSVHLKAEHQNNDENAKHYLDMKNRREKCTYCRRHFMSAFHLREHEQVHCGPQPYMCVSIDCYARFGSVNELLNHKQKHDDLRYKCELNGCNIVFSDLGQLYHHEAQHFRDASYTCNFLGCKKFYYSKIEYQNHLSMHNVENSNGDIKKSVKLEESATGEKQDCINQPHLLNQTDKSHLPEDLFCAESANSQIDTETAENLKENSDSNSSDQLSHSSSASMNEELIDTLDHSETMQDVLLSNEKVFGPSSLKEKCSSMAVCFDGTKFTCGFDGCGSTYKNARGMQKHLRKVHPYHFKPKKIKTKDLFPSLGNEHNQTTEKLDAEPKPCSDTNSDSPDEGLDHNIHIKCKREHQGYSSESSICASKRPCTEDTMLELLLRLKHLSLKNSITHGSFSGSLQGYPSSGAKSLQSVSSISDLNFQNQDENMPSQYLAQLAAKPFFCELQGCKYEFVTREALLMHYLKKHNYSKEKVLQLTMFQHRYSPFQCHICQRSFTRKTHLRIHYKNKHQIGSDRATHKLLDNEKCDHEGPCSVDRLKGDCSAELGGDPSSNSEKPHCHPKKDECSSETDLESSCEETESKTSDISSPIGSHREEQEGREGRGSRRTVAKGNLCYILNKYHKPFHCIHKTCNSSFTNLKGLIRHYRTVHQYNKEQLCLEKDKARTKRELVKCKKIFACKYKECNKRFLCSKALAKHCSDSHNLDHIEEPKVLSEAGSAARFSCNQPQCPAVFYTFNKLKHHLMEQHNIEGEIHSDYEIHCDLNGCGQIFTHRSNYSQHVYYRHKDYYDDLFRSQKVANERLLRSEKVCQTADTQGHEHQTTRRSFNAKSKKCGLIKEKKAPISFKTRAEALHMCVEHSEHTQYPCMVQGCLSVVKLESSIVRHYKRTHQMSSAYLEQQMENLVVCVKYGTKIKEEPPSEADPCIKKEENRSCESERTEHSHSPGDSSAPIQNTDCCHSSERDGGQKGCIESSSVFDADTLLYRGTLKCNHSSKTTSLEQCNIVQPPPPCKIENSIPNPNGTESGTYFTSFQLPLPRIKESETRQHSSGQENTVKNPTHVPKENFRKHSQPRSFDLKTYKPMGFESSFLKFIQESEEKEDDFDDWEPSEHLTLSNSSQSSNDLTGNVVANNMVNDSEPEVDIPHSSSDSTIHENLTAIPPLIVAETTTVPSLENLRVVLDKALTDCGELALKQLHYLRPVVVLERSKFSTPILDLFPTKKTDELCVGSS

SEQ ID NO: 148 - DNA, 616 bp, Homo sapiens
ggtacccttccttggtgtgttgcagctctatttagagaccactgggaaaagccggaccctacaaagtgggctggccttgctttatggctttctcccagattttgactggaagaagatttatttcaggcaccagccaagtgcgctgttctgctctggaagctgctattgcccggtaagaaaccagtatctggaaaaggagcagcgtcgtcagtacctcctacgtttgaaaaacagccagctggagaagacctacggagagatggccaagatcgtggatgtccccaccaagcagcttagagctgccaaccccatagactccatgctctgccacttctgccacaatgtcagctttccctgtaccagaaatggctgtgttgacatggagcacttcaaggtaattaagacccatcagatcgaggatgaaagggaaagacgggagaagaaattgtacttcgggtattctctcctgggtgcccaccccatcctgaaccaaaccatcggccggatgcagcgtgccaccgagggcaggaaagaagagctctttgccctctactctgctcatgatgtcactctgtcaccagttctcagtgccttgggcctttcagaagcccggttc

SEQ ID NO: 149 - DNA, 350 bp, Homo sapiens
  misc_feature (42)..(42): n is a, c, g, or t
  misc_feature (106)..(106): n is a, c, g, or t
  misc_feature (108)..(108): n is a, c, g, or t
  misc_feature (118)..(118): n is a, c, g, or t
  misc_feature (294)..(294): n is a, c, g, or t
  misc_feature (304)..(304): n is a, c, g, or t
  misc_feature (327)..(327): n is a, c, g, or t
gcggtcatggagggagcaggagctggatccggcttccgaagnagctggtgagcaggctgctgcacctgcacttcaaggatgacaagaccaaagaagcagcagtccncngcgtgcgcanggcccaggcagaagacgcgctccgtgtggacgtggaccagctggagaaggtgcttccgcagctgctcctggacttctagggatctcagccgtggtgaggccacccccagaggagcccctggtccacagaaagcaggccttgtgtttccagcggcctctgataagagcaagggaaangaccctgaangaatttggaagttgattcaaacnaagattcccttgggagtctccaa

SEQ ID NO: 150 - DNA, 349 bp, Homo sapiens
  misc_feature (282)..(282): n is a, c, g, or t
  misc_feature (297)..(297): n is a, c, g, or t
  misc_feature (316)..(316): n is a, c, g, or t
  misc_feature (322)..(322): n is a, c, g, or t
  misc_feature (338)..(338): n is a, c, g, or t
agttatattccaaaatatatattgagataaatgaactggtgtagaatatcagtttgctatttagttttatgaattactatacatatacatgcatagaaatgaaatgctatactgataaattttaaagaaaatatgaggaaatggctataaatattaaactaaaagggtcttcaacagtaaagtgcagttatgtcatttaaaattccaatactttaaaggccaccaaattttgatgtatatgtccttggaggggctgcttaaatttatggagggggactcacnttttcccccctaggnatttggcagtttcttgggngatccntttaggcggggtcccnagggggttccc

SEQ ID NO: 151 - DNA, 347 bp, Homo sapiens
tttcttgtacttccgcaagttataatgcatcgtcttttattttccaggcttcctgggatcagatatgacattgcactaatgagaaatgggggtttccagttgctcaggctcagattgcgcaatggcaggaagcatattaggtgctaaaaactccccctccctagccgagctgggcgggtgagaagccgagtgcgaaacgggacttggcgtgtcatgggcgctaaggaaacggagtaaggccgactcacaggcaggaacatcgggacacacacaaagaggcaacacccactgcggacggggaaacagactttggtgtttcatccacctctcagcgcgcttatcagcat

SEQ ID NO: 152 - DNA, 467 bp, Homo sapiens
acatatgtacttacgtgtgttgggaacattgttagccttttaccgcattcctggatccacaggggctatcgaggagacccagtgagaatgtagcattttggtcatccccagggtagctgccctggggtctgggcactctgcctctgggagagaggaagaagaaaggggccccattttttaaaaatctgtacagagcctttggctctatgtgtttatgttcttcacatgcatatgtgtgtatgtgtgtatatctttccccccatcaattggtacaatttttaataaaatcatttaaagcaaaaaaaaaaaaaaaaaactcgagggggggcccggtacccaattcgccctatagtgagtcgtattacaattcactggccgtcgttttacaacgtcgtgactgggaaaaccctggcgttcccaactaaatcgccttgaagacatccccctttgccagctgggtaaaagcg

SEQ ID NO: 153 - DNA, 2144 bp, Homo sapiens
cgggagcgaaagtgcgctgagctgcagtgtctggtcgagagtacccgtgggagcgtcgcgccgcggaggcagccgtcccggcgtaggtggcgtggccgaccggacccccaactggcgcctctccccgcgcggggtcccgagctaggagatgggaggcacagctcgtgggcctgggcggaaggatgcggggccgcctggggccgggctcccgccccagcagcggaggttgggggatggtgtctatgacaccttcatgatgatagatgaaaccaaatgtcccccctgttcaaatgtactctgcaatccttctgaaccacctccacccagaagactaaatatgaccactgagcagtttacaggagatcatactcagcactttttggatggaggtgagatgaaggtagaacagctgtttcaagaatttggcaacagaaaatccaatactattcagtcagatggcatcagtgactctgaaaaatgctctcctactgtttctcagggtaaaagttcagattgcttgaatacagtaaaatccaacagttcatccaaggcacccaaagtggtgcctctgactccagaacaagccctgaagcaatataaacaccacctcactgcctatgagaaactggaaataattaattatccagaaatttactttgtaggtccaaatgccaagaaaagacatggagttattggtggtcccaataatggagggtatgatgatgcagatggggcctatattcatgtacctcgagaccatctagcttatcgatatgaggtgctgaaaattattggcaaggggagttttgggcaggtggccagggtctatgatcacaaacttcgacagtacgtggccctaaaaatggtgcgcaatgagaagcgctttcatcgtcaagcagctgaggagatccggattttggagcatcttaagaaacaggataaaactggtagtatgaacgttatccacatgctggaaagtttcacattccggaaccatgtttgcatggcctttgaattgctgagcatagacctttatgagctgattaaaaaaaataagtttcagggttttagcgtccagttggtacgcaagtttgcccagtccatcttgcaatctttggatgccctccacaaaaataagattattcactgcgatctgaagccagaaaacattctcctgaaacaccacgggcgcagttcaaccaaggtcattgactttgggtccagctgtttcgagtaccagaagctctacacatatatccagtctcggttctacagagctccagaaatcatcttaggaagccgctacagcacaccaattgacatatggagttttcgctgcatccttgcagaacttttaacaggacagcctctcttccctggagaggatgaaggagaccagttggcctgcatgatggagcttctagggatgccaccaccaaaacttctggagcaatccaaacgtgccaagtactttattaattccaagggcataccccgctactgctctgtgactacccaggcagatgggagggttgtgcttgtggggggtcgctcacgtaggggtaaaaagcggggtcccccaggcagcaaagactgggggacagcactgaaagggtgtgatgactacttgtttatagagttcttgaaaaggtgtcttcactgggacccctctgcccgcttgaccccagctcaagcattaagacacccttggattagcaagtctgtccccagacctctcaccaccatagacaaggtgtcagggaaacgggtagttaatcctgcaagtgctttccagggattgggttctaagctgcctccagttgttggaatagccaataagcttaaagctaacttaatgtcagaaaccaatggtagtatacccctatgcagtgtattgccaaaactgattagctagtggacagagatatgcccagagatgcatatgtgtatatttttatgatcttacaaacctgcaaatggaaaaaatgcaagcccattggtggatgtttttgttagagtagactttttttaaacaagacaaaacatttttatatgattataaaagaattcttcaagggctaattacctaaccagcttgtattggccatctggaatatgcattaaatgactttttataggtcaaa

SEQ ID NO: 154 - protein, 588 aa, Homo sapiens [sequence omitted]

SEQ ID NO: 155 - DNA, 382 bp, Homo sapiens
  misc_feature (44)..(44): n is a, c, g, or t
  misc_feature (303)..(303): n is a, c, g, or t
ttttttttttttttttttttttttttttttttttttttttgggntttaaaaaagccctattctgcatattaaaatcacattacacagtttggtcatggtatttgtaacctggagagaatactagtgcagtcggtcttcataccaccccattcacaaccagcttaaatggcagtatccctctgtgaactcaactacccctcctgtgggtccaggctgagctctacaggtcaacctcttcatctcaacccttctaggtcctgctggcagggctgagctgtcacttcacttttttcccagagaagngcagcatcctctctgaaacctgagctatcatgacattttcttttttaattttataaattttatatttctctaatttttg

SEQ ID NO: 156 - DNA, 352 bp, Homo sapiens
  misc_feature (42)..(43): n is a, c, g, or t
  misc_feature (236)..(237): n is a, c, g, or t
  misc_feature (286)..(286): n is a, c, g, or t
  misc_feature (333)..(333): n is a, c, g, or t
gtagaaggaggcagttatgtttatattgaaggtgaaattttnntttcatttagaatggaaaacatccccaaatgtatcattataaactagtcagccttgactacacaaaattgacctttaagttgcttgagaaaaacacaatgcaaatcgttcagaagggtcaacatcctttggtgctaaaatcttgtgtatgttttcagaatggctttttctgtatgttatagaataatcactannggaaaggtagttgaatttaaagtcatgaagcaagactctttaattcagntattttaaacaagggttaaaaccccaaacatccttggcagggtttgnagcacacagaattttctag

SEQ ID NO: 157 - DNA, 725 bp, Homo sapiens
tttttttttttttttttttttttaatttaaaggtttagtttatacaattgataattctgcaaaccacaatatgtcaataactacatactgtaataaaaataaacaaagtcatacttaattctataatgcattaagaataacctaaaaaaacaaattgtgaataaaggcatatttaataaattagggaacatcttaacttctaatagactgggggaaatttttaagttttctatgtacacaaaggcagtgggaacaaatgaaaaaaacaaattactacattgttgcagcacattaaagactggatggtgtatattattcacaattacatcctctttcccatagcctggcagaggaaagtagttaccaagcacaggaacaatttcaacatctcactggagtctccaaaagcaagcagatactgcaggatgtcattaagcaacttactgtcacttcacaccatatgtggcagtaagaaacttaaaaaaaaaattaaaaggcacgcataagctgatttcaaatattttaagtccaggctactctctttagatacaatgttttgaacacttgtatagaacagtttttaaataaacatttccaaaaacttgaatacagaacttaggaaccatgaatcttcaccaaaaaaagttacattgaaaaaaaaaaaaattcatgaaataattacagctaacctatatttagagataaaatattttttggcacctata

SEQ ID NO: 158 - DNA, 583 bp, Homo sapiens
ttacaaagaatcaactttattgaacattcagggtcagtttctcttcttgctcttgcctgtgaccttggctggtgtgaggactggagctgctgcctggtacagggtggaggagatcttgttgatgtagtacagaccaaccatggagaagatgaagcaggtggtgacacagactcggtggatgaggccagatgcaaagagagccaacaggaggcacaggagaatctcagggaagatctttgcttgggatcccttgccaaagacaagattctccagatttttgtaggcagttagcgagaacacgcagagagccggatcccaaaaggggcccccctggatggtgggccccccgctggaggcccaattaagggtgtaacaactggcatccccgcaaagagcagcccggacaggaggggggagagcgccacgggttgcccgtacccaccaccatcatggcccccccgtgagttcaaacggggcctctggcaagaaaggcgcctcttgccgaattttgggcctcagggccaatttccctaagtgggtcgtataaattcggaatcatgtctaatcgtttcccgggtgaaat

SEQ ID NO: 159 - DNA, 574 bp, Homo sapiens
  misc_feature (2)..(2): n is a, c, g, or t
  misc_feature (16)..(16): n is a, c, g, or t
  misc_feature (18)..(18): n is a, c, g, or t
  misc_feature (20)..(20): n is a, c, g, or t
  misc_feature (22)..(22): n is a, c, g, or t
  misc_feature (226)..(226): n is a, c, g, or t
  misc_feature (555)..(555): n is a, c, g, or t
  misc_feature (573)..(573): n is a, c, g, or t
tngcggctgcaacggnangnanatgctcgggccggcagggtttccccgcacgctggcgcccacatcccggcgcggaggccatgtaagtttcgctttccattcagtggaaaacgaaagctgggcggggtgccacgagcgcggggccagaccaaggcgggcccggagcggaacttcggtcccagctcggtccccggctcagtcccgacgtggaactcagcagcggagnctggacgcttgcatggcgcttgagagattccatcgtgcctggctcacataagcgcttcctggaagtgaagtcgtgctgtcctgaacgcgggccaggcagctgcggcctgggggttttggagtgatcacgaatgagcaaggcgtttgggctcctgaggcaaatctgtcagtccatcctggctgagtcctcgcagtccccggcagatcttgaagaaaagaaggaagaagacagcaacatgaagagagagcagcccagagagcgtcccagggcctggactaccctcatggccttggttggtttacacaaatttgacagacctgctgccttantccttgattcaggtgttng

SEQ ID NO: 160 - DNA, 430 bp, Homo sapiens
tttttttttttttttttaatttgaagaaatgtgtatttagcaagtgaatacatgctaaaaggaataatttacagcagcagtttcattacatttttctctccagtttttctagttcccatctgaaatgcaatgataagtaaagatatggaacatatttcctacctggcaaaaaacatgcttattgaacgggcacgcaccttccgcccttaaatagtacataaaccaccttgtcacctgcgtggaaaaatcttgccttttaggatgatgttgaatacattgaaatggagtacttatagaaagttttattttacactgttcttcctctttttctcccaaattatttacatcttttttttgcctaatgtgtaggtagcaaaaatattaaacacataccactgcaaattactaaataatacataaaatgaagtgt

SEQ ID NO: 161 - DNA, 597 bp, Homo sapiens
gatgcccagtccccacgacacctcccacttcccactgtggcctgggtgggctcaggggctgcccttgacctggcctagagccctcccccagctggtggtggagctggcactctctgggagggagggggctgggagggaatgagtgggaatggcaagaggccagggtttggtgggatcaggttgaggcaggtttggtttccttaaaatgccaagttgggggccagtggggcccacatataaatcctcaccctgggagcctggctgccttgctctccttcctgggtctgtctctgccacctggtctgccacagatccatgatgtgcagttctctggagcaggcgctggctgtgctggtcactaccttccacaagtactcctgccaagagggcgacaagttcaagctgagtaagggggaaatgaaggaacttctgcacaaggagctgcccagcttgtgggggagaaagtggatgaggaggggctgaagaagctgatgggcagcctggatgagaacagtgaccagcaggtggacttccaggagtatgctgttttcctggcactcatcactgtcatgtgcaatgacttcttccagggctgca

SEQ ID NO: 162 - DNA, 450 bp, Homo sapiens
gcggccgcggggcgctgcggggctctgtccggcgctccgcccggcgctgggaactcgagtccccgccgcttcccagctgcttttgtatttcgctgtgagaccctccggtgggcgcgattcacaggcgcccggaccacgtgggagccagggggatccccctccccctcctccgcctccgctccccgccccccgctcccccgcccccttcctctcctcttccacttaaagcggcgatggctccttccgagagggagaggcggccccacactcggtccgggacttgggggcctggaggaagccggactggctgcgcccgcgccggggcgtaggagggggtggcgcagagccggagtctggggcctggcgggagggacgcgccctgggcccttgcgggggtgtcttggtcgccgggtccctttgcctaggcagcgcgggtctcctgcaaacttc

SEQ ID NO: 163 - DNA, 170 bp, Homo sapiens
ccgccctttttttttttttttcagttctttggggtcttttaggggacatcgctcagtcctgtactcacgaacagttcctgtggctttcaccccctttttcctcaaaatggacatcagtttaacacttgtgaaaaccttgtcaaaaaatcggacgcgtgggtcgacgatat

SEQ ID NO: 164 - DNA, 466 bp, Homo sapiens
  misc_feature (436)..(436): n is a, c, g, or t
gcggccgcactcagcgccacgcgtcgaaagcgcaggccccgaggacccgccgcactgacagtatgagccgcacagcctacacggtgggagccctgcttctcctcttggggaccctgctgccggctgctgaagggaaaaagaaagggtcccaaggtgccatccccccgccagacaaggcccagcacaatgactcagagcagactcagtcgccccagcagcctggctccaggaaccgggggcggggccaagggcggggcactgccatgcccggggaggaggtgctggagtccagccaagaggccctgcatgtgacggagcgcaaatacctgaagcgagactggtgcaaaagcccagccgcttaagcagaccatccacgaggaaggctgcaacagtcgcaccatcatcaaccgcttctgttacggccagtgcaactctntctacatccccaggcacatccggaaggagg

SEQ ID NO: 165 - DNA, 198161 bp, Homo sapiens
gatcattacagaagtaagtaagtatcattagtccagtagccagccagtccaacccctactttttcacactcctgggcccaaaagaacagaaacaagcccaaagcaatcctccattctttatgaaaagaaactggtcccctggagatgtgttcctgccatcactcctccagcccaatgagagagaggggacagactccccgccgggatgagggggtctgtctgtctgcagccataccaccctgaatgcacccagtgtcgtctcatcatgaaagcaagctcagcaggggggcgcagctcgatgggaaatgagggggacggccgcaggccacatggaaaccattaggttaggctgaaggggacccagtggcaggtgggagcaggactgcagtgtggggggtggctctgctccctggctggggggaatcctctgccccctgcccgtggacgagaaaagaaagagctcattccattcagtcatcttccacaagacagacaaatgtccaaaaaactttgtttttattattaaaccttgtagtacaaacctgaaaagtaaacaaaaaactcgcaataaaccacatgaagtctccctcccaagggaggggtgcagagcagcgctaataaattaaatgtcaaactgtaagccataggcagaagtttactgtcaaaaagagggaaagtacacagcaaggccatagaaaccggacaaccacattggaaaacacttgactgtttctgtaattgttaaatattccaaaacagttcagtcttctgcaacaacaaccaacaaagtggatcataggacgttcctggcagtcaccactggcaagctcagtgcaatatgggtagctacgggattgatgaatccaattatgaaacaaagaacagcttgtgaaaacagtttcccttttttattccacacatactgtacacacaaccggagaagggcaacagctactccattattatttttttgttgttgttcagtgatgtaagcagcacttataaatgttacaagaaaaaccctgtaagcatccaatccaaccgatgaagaaactgaaatgtaaggcttttcttcatcttgtcttctcacccccctccccaccccccaccgagaaaaaggctcaagtatttaaaacaatttacaggcatatgtacaaaagggatgggatttttttttcttttttcctttttgttacaacatgaagagaaaaaatagacaagatgaacgcaaatgcattttcacattcaaaaataactgcaggcctcctagtggctctctacatgatcataaatgaaacaagttttaaaagaaagattaatgctgacttgtgaaggtgtcaaacaagaagcggtgagatggagatggaatgttagaaagattgcacgtcgatgacaaagaagcacttacggcttccatcacttttttttccttttttttttttttttttttaaatcttaaggatgctattgaagggttttttgataaagtagccaacagcaccaaaaaataacagaatggatttcctaatgaaatcaggcacaggtctccctcatgtgacccctccaaggcaggcagtcttttccgtcttcctcgctcgcttttcttctttcctggaacagatgcatagtgatgtgctggtggagagcccactcgctcccgtctcctcgttccacctatggttaggaaacaacgtccgccttcagctgccacaaccgcccagagaaacaaaacgggggtgccccggcttcccagatcacaagctcatctggcacacggcagaagacgacagccaaagcaaagccatttcaagtttcgtgtgtgtgtgtgtgtgcgcgtgtgtctcctatcccttctaaaaaatctgctcacatgactgatggtttttaaatttgttctccaaacttcaccctcttcaaaaatgggttaaaaagcctttttccccccaacagttacaaaaaaaaaaaaatcaaaaccaaaaaaaaaggcttttgtcagccatggggcaatacaaattaatacagcccctccggggtttttaaaacagtgactatacggcagtttccaaaatctgactgcagtatctaggttttctaagtacaaaaaaaagttcaacagtttaatgctaaaacaaaattagttctctaaaaccagaagaaaatcttctttagagctagtgcaaagacagcttgaatcctacagcaagtactccaaactagaatataataattacaaaaaaatatatataaatcgaccacgggcgttggcatcttcatgatgagctcgaagcacttttggatgaactggaggctgacagacgggaggggggcacgtccactgtcgctctcttgcggggacctctttttggtgtgggtttactgagacagttctcaatgctgccgtttttaccagacactttgccgcagatctgattgaccagactgataatctgttcctgtttgggggtgaaaggaagacacagttaacataccgtattaacaagagctctgtccctgagagccatgcaggggcaagtttagggcagagggcagcggtccccttcaccacaccaaccaacaggttttaaaataaccccgagaggctcagatgcagtgagtctccctttcccagctcctcctgatgccacatagcaggcatggccgtttcatcctcatcaacaccctggtccaccatgctttgcctgctcataagggcagggctggcaggggagcccagagcactgcctctaccacggagcactcagcaaagagacccaggggctttgttacatcctggatggtgacacaaatacccaagctacttgactcactttagctaccggccactgaacctggccatgcaagtaaatgcaaacacttctcaacctatacatatccttgtaattcactcaagagaatcatttatctgtcggcaccaaaaactgtgtttgtaactttcacacagtacatcctataatcatatcatttttaaaaacaacatggggaggagtagcaaacgtgcatcttatgagcatctctctgggccacgggtggctgggaaccatgctgaccctggcaggagaggaagccagccatggaatgaaacatctgagggcctgatctctagtcctctgaaaagccctcaagatgagggtgagaaagtgacagctggctcccatcacaagttaaaggtgccttcggaaggcggggcggtccacacgtatctgtaataacaccatagtcatggctgcttgaggtactgatgataaacactgataaaggataagtggatgagctgccataaaacccatttaggcggctactgctaccttaccataaggacaagtgaggaggagcggcagtgtgcggttacaggaggacaccgttccctcccctgcgtgcagctcgacaggtgggcagcacctgccccagaccagtgctctcacactaggctcggcggcaggcggcccaacaccctgctcagccagcctgcaagggccagagacacaaatggctccaaactccccagagagcttcaccatccatgagaacccaagccatgaattcagggatttgcaatctaggtgcaccccccaccccagcaagggtgggtgtttaaagcagactgtcccgggtcagcaggcccagacatgggtgatttgtgtactgggcacactgggaggttgagaagattttgcaatggtctctgtttacaaggtagaaatttcctatttaaaagaatgggccaggtgtggtggctcacgcctgtaatcccagcactttgggaggctgaagcaagctgatcacctgaggtcaggagtttgagaccagcctgaccaacatggtaaaaccctgtctctactaaaaagaaaaattagccgggtgcgtagtggcgggcacctgtaatcccagctactccagaaactgaagcaggagaatggcgtgaacctgggaggcggagcttgcagtgggccgagatcacgccactgcactccagcctggcgacagagcgagactccgtcttaaaaacaaaaaaatgcacagctcaacaggggacagaggcacagacatgcttactgaactactcagccactacagagtatgcagtttccaaatacctttgctcctaattcatcaaaaccaaccattaggtctcagacagcccctgaatgccattcttttcccaggatctggtcacgtcacacatccgactacagaaacaggctgctggtgagaggtacaacccatgattcacagagcgctttccaggcagccagaggaagcctccccgtgccgccgcctgcacccccacaaggtgccagagccatgctcgtgctcagccgcaaaggcttcgttatttgcaactgtgcctggacatttgctgctaaggtgaaggagggacacagcaggtgcttactgccttcacccagcatgctctttgaaacaaaacagatgcaaagagttcttcttccagctctccgatcatttagctcaaggcttatccagtgagacccaccacttggccccactgcctgggcccccagacacaccaggcccctcacagtcatacccgcagcacccaccccactcagtggcctcaaatgtgcaatgaccacaatgtggcgaccttcctcgtaaccagcctcatcagagtctgtgggaagcacacgtggggaaggcgggcagagcaggggagaggcactgctgccaggagttccgccactcagagcggcccccagctgcacaggctgtgtgttgttatgacccccctctccagaagagcgtggcacctgcaggaaggcaccgggatttcacatcatggggcccgtcctgccccagtgtccgcagacacttccagctctctcagcctgaaggggctggtgtcaagttagtgcagattggagaggccactgccaaccatcccactgtgcctgggacaggtcacaaaaaagggtctgggtctaaaccacagtggtgcagcccttgggaaagccgggggggcggctgcaggaagagcctcagccctgttaagagcccattgctcaaatccaaatgcccgtgcaggaaccccgctccccctgggatcctaacatggggcctgaatgggtttagggcctaagaacagggcacctcaggcctgcagagccctgactacccgccaggcacagaactgccaggccggagtgcctacatccagccgggagcagggaaggcgccacgctgccgccctgccctaccccgcgggcagggactgacctcatcgtagcggtacatcaacttcagccctcggcaggacttctgtttctccacgtggcgcagagcacactccagacagaacacgacgttttcgttctcttgtaccacctgcaagcaagagcaggacacccgaaggtcaggaggcagctccacagcgccctgggagggtaaggtaggagcacgcccggccgggcagccaccacacccactgcccgcgccagagtagccccagcacccaccacccgggccaagggctttgaggactggaaatgctggaaatggactaaaacgaaaactgaccaaacacctggaacatggtcttcaactaggaaggtgagtaactgaccacctctgagttagacctgggagtggccctcaagtcccctccagatttctgctggagtttcctgggagaggttcagtcaccaccaggctgctaaagacagtgaggggtgcgtatttctcatctcttgagttctgagggctcctgagatcctgtgtttgaaaccaccctagtgctggaatagatgtggaacatggaggactccaacttaggcggccacccggggaacgcacccttgactttccagcagcaaaacaggttctcatggtggtccatgagtggctcacagtcaacagagcaagcggcgtccaacgaccccatgcaaactcccccaaaaccctcaacatcacagattcctgaccgctgtgacgccgatgacctcacccaccagccccggcccccttgggcgggctgtccacaaagcccacagctgtcccgccagtggacaccctgctgcctgaggccacaggagagtgctgggacagagaccctcactgggggcctgtctagggttgagaggggccggatgaaaggaaacagccacctggcttctgccggagggctcccatacttcacgctgactccaagtcctattctaattctgagtttgaaaataaggaaaaattcagtcttaacactcaagaggagaagagtcataggcctttctcagaaagcttgaggggaaggacttgttttcgtctgcggtgtttctaagcaaggaacagagaacacgttgtaggagtgtgggaatgccacctactgacagaaacaagaccttggagagacacggggccaaggacaggaagaacaggaaacacatcaaatttaaattcacaaatgtattagtaatccaagcaatgcaaactgtcaacgtataagtcaaaccccaatttttgcctatggatttataacgggttttttttttttttttgagatggagtctcgcactgtcacctgggcgatggcgcgatctcggctcactgcaacctccacctcccgagtagctgggactacaggcgctcaacatcatgcacggctaattttttctatttttagtagagatggtgtttcaccatgttggccaggctgtgattggcccgcctcagcctcccaaagtgctgggattacaagcataagccaccgtgcctggtttttgtttttgttttttttttttaaagagacaggttgtcactctgtcacccaggctggagtacagtggtgtgatcatggctcactgtagccttgaacttctgggctcaagtgatacccccgccaccacacccagttaattttttgtattttttgtagagattagtctccctctgtcacccaggctggtctcgcactcctggcctcgagtgatctgcccaccattgcctcccgaagcactgggattggcctaccatgcccggcctcacaatacattcttcttaaaataactttcaggctgacaggaaatgccaggtgacaactctgaagtttctgaaggatggcttgaaaatgaggccacctggtgccacctcacagggacagaccagcttcacccccaggtgtaactaccatacagccctcagtgcatggaaatgaatagcgtgttccagcaagaggatggacagctgggcgcagtggcccatgcctataatcctggggctctgggaggctgaagtaggcagcctatgggtaacagcaaaaccccatctctaccacaaaaaaaaaaaaagttaaccaggcgtggtggtacacctgctgtcccagctactcaggaggctgaggtgggaggatgaccaggaggttgaggctacagtgagacaggatcacagcacgcattccatcctaggcaacagagcaagactgtctcaaacaaacaaaaaaaaaaaagaacagagagagagcacaccaagctatgcagcttttatcagtgatgtttataagatactttgaagatctgggaaaatgcttatcatcattttcttttaagaaccaaatggctctaggtaatacattttgagaagtctgggggaaaaaaccagacagaaggaaatctacaggacaggaggcagggcggtcacggactgcatttgtcccccatcaaatgcaaacgttgaacctccaggatctcagctgtgactgcagttgggggtagggcctctaaagaggtaaatcagctcaaatgaggccatgagggtgggcctatctgatacaatgtgatttgcgtccttaggtaaggaggagatgaggacacaccgagtttttagctctttcaaatgttacaaagccctgatctgacgatctgacgatctgactcatccgggagaggctgtgtcctccctcttctacagggcacgccaggactcggggtgagacggcatgacacagtcacactgggaggccaaggagagtcgacccgggtctcagtcctggcccaccatggacaagcagagggacgcagaggcactggcctctcagcgagtgtgcagccgaagggggcacctgtgggacacaggcaccacacagcatatggggtgggcacctcctaagctaggcttctgtactggagatgtgaggcactgtggaaagggacgaggcccggggaggcaggtcaggcccttcgggcatgctctctgttccaggctaaggtgtgtagtgctgtggagccatctgcagtgccagctgggcgtccctacccagagtgtgtcagggcagctctctggtgagaggtcaaggggagactggaagaagcatggcgaggccacagccatccagtcgccatggaagggcttttctgagcccacctctgggctggaacaggggtgagcagggggaggaggtgtttggtattaaccccaaagctgaggcaggcaggtgggcacgaggaagccagcagggcacagtcgagaaggcaagaggaatgcagcctgctgtggcctggagtggctgtgccagaaaagcatctctgatcccagatgggacaggaggaacatcagctttcaccaaggatagattctgaagtcctcgggggctgaggcagatcatgtagctgagcaggaccaggaaaccaagaacagagccaaagggcagaggccatgggcccaggtgcaccaggcacaggccacagggaatggcagacgctgcccagtactggaaacccgcccctcactgcctcagaaagaatgggtaagagcagagtgcgtgggggctggagtgacaaagtagggcggagagggaggccacctgctccccagggaggaaggacgcactgcaggaccgagggagggccacgcgtgggcagaacagagggacagcctctgtgtggcctggtcactgtgggtgaggcagccacctccggcggccagaagctccgccgaggtcccacagccggctccagagatgggagcacagcaggtctcctgggcagagagcgccctccctcttctgggggcaaccccggagctctcaggccaagcactacatgcgagggcgccggcagggccaggcgggctcaccatggacaggtagcacaggtgctggcagatctgacacctcctctctgacgtctccaactgcagccactttcgaggctttttcttcccgtccgccaccgtgctgctgccatcgtggctgccatagcgtgcggaggagtggaggccagcctcgaacagctgcctgcgctgccgcagctctgtatccctgccagacacgggagacggcccgcacctttagtgacggcctgccatgctcaccagcagaggggacacacgcaccccacaccggcctccctgcagacacaccctcctgtcaggaagtgaggcctgctcggggggtgagcccccgaagggcagccgggtccagctctctggcgtgggctctgggggtctgttacctgagctcatccaggagggctgagatggtactgagagtgggaccgttttctttttttgcttctgcttgtgcaatctggtagagtaacttctccatggagaatggcttagctatatggcgacgcttcatttcctgaaagaggagtcacatccctttagggtggattttcattactaggcagctgtcaaggttcttcttggtggagggggcaggcaggctgtctgaatttctaaatcttgaattgcatttagattaaaaactcttcaaaactttgcctccctgtgagaaaggcaccacataccaggaaaagtcatagcacttcgccgctacccagaggcagctgccactccctcacgatgggtggaggttctctgtccattctaagcaattaccttgagcatcttcaacagttttccaatactggaggggtctgtcagtaacggtctgatcaaaactctttgtgatacaaacaaatccctaacaacttttcattcctagaagacctttcaaccacgtcttaagaatttcaaagacatattccaaaaggaactattgacaaatagacacgcacacgcagggatgcttctgtgtgcgctcacgcacggcactcacagggatgcgggggcagcaagcgggaggaggccggctctgctcaccttggcggtctcaaagcccatacttgtccactgggtggtagcaaagtgcacggtttcagacacgctgtacccacagcacactttggacacaaaggatcccgggaagcagacgacaaactggccactctgctgcacggtcctgtgcaccttgatcccctctttgcacagcacctccggggagatctggggagacagggccaggctgaggcacccctccctgtgcgcagggacacctgcagtcttcaggtgacgtatgcgcaccctaagaggcctgctctcaaggagataagattgttttatgtggaaaataaaaagacgtcattcataacacaagaaggagcttctaaactgcactggtccaagagtgatgacaggttcatgcacagctgaggacatgatgaccacacaggcccctctgtccccacgtggcaatgccagggctggaaacaggacaaggttacacaaccaggaggctgccgggctcatctccagagccaagtaggccacaggcccacaggctgggcttacaaaggagtcccccgtccatctcttctctaagatggacaggcgggaccggcagggtcagcagaggccagagaagctggtcagaactcagctcaaagcagcacttcccaggaactcaccagccccatgacttcctgaaaacaggtgaagaagcctttgtgctcattcctctcacatgcccagaaggtaggagcggcgggcacaagaaatcccagggcccacagcagcccacaacacaaacaagccccaaaacagatgcaaaggccgtgcaaaaccccagcgccctgtgcaatctgatggaaggtcagtttggcttttgtgtcagaggacctttccctttgcaccctggggatttgttttgctgtgtcctcattgcctttgaaaggcgggttcatgggaaaccatgttcaagtgcctaggaggtcctacagctcctgctggaggcggtggctgagtggacgcaccatgacgttgctttccagcatctgcagccctggggtgccattggcttgcagcagggtgtggaccacatcttccagcttgttctcctcctcagcaggaatgcaatacctgggtcattgagagacacaagagacaagcagagacttgacaagggcctcctgcatgtactgggccacccccgtcaccctcagggacccgagcacacgagaggctctgctccacgccggcagggatggcgcactggcctggctgggtgcctggtcactgctggctcccatttcccatggcagcagtgccacgtccacctagcacacagccaaaccacagtgcatccgcgttgcgagatgctcatcttttatggagatctgacccacctggtgagccaaaaagccttcaaaccacaaacagatgttcacaaacccctagaaatcagaaccagacacactgcggcctccacgagcctcttctgaggctccagcactgcaccctccttctgttaacagaggccactgcaggagcagcacctgataatgtcctcacaaggaatacgtggctccctcggccctccagacaggaacagtaaaccctgccctctacaaatgcacagagagttggggaaggagccaggctcatgcacatgtgccacctcaaggccaactccttggcagatgctgtggtgaagtaggggtcaggggatagctaggggcccccagctctgctccccactggagagttttacgtgttaggacccagcctacccggcatcaggcacatacagcaagacacacaggaggatcaagggctcataggcctctgtcagagggtggcctggggaagtggtggctcacagaccctccagggtataaccatggcaggggtcctcaagtgtaagaaaaggtgggaggtacaggtagaaagtaacctacacggcctcctcacggcaatcacagggaggggaggaggttttgcccatgtccttggagcccaccagggccacacttccactcacaacgtgtgacgcccctggtgtcaggctcacagcatgaatgagggggatgtgaggggaggccccccgcaaggcaggggtgcagggatggctgccctgcccctgggtgtctcaggctgtctgaggggctcctccccaggcaagaggaggacatcagtgtggagaggggcctgacaggtcttcaggatgctaagccagtgaagccatcaaccaccattaaacacaaagatgtgggccagcagctcagggcaacaccgccagcccctccccacagcccccgccccccaggtccaggcgggcagcaactctgcagcccctatgtgtctgtgatgaaagcatttctctctgaggccaaatcctggtttcagttgctcagtgaaggaagtattttttttaatgctcatgttattttcaatgccaacatattctgttactgattggtaatttaaatacagggtttctaacctaaatcacatgttttaagaaaaactacacaccatcatgttctctgatcctatccctgccttttctttctctcctgtcaatgaggttccaggagtgagtcttcaaaaagcccacacagggtatcacattttgctatctgtgactcaacgtcaagccataagcaaacccacacggaagaaactcgggcctgaggtcactggcctggggatgaccccagaacacaggccatgccacagccagtgtaactcctccacaggaaatggccacgctcttcttccggaggcaaaggcacctctcggaatagtcctggctgtcccctccccagctggtggcctggcccggctaagccccaaggctcctgtcagtccccgctccacaggcaacagcctgggcttcccgggcccatcactctggacccactgcaggacaccatgatcaccgtccatggcacacagacccatgtgggaagggagggctccctcatgtccacagcaccactcaccagaacagccaaaatgaggaggctgcagccgacgctggctccaaagagggagaacacgagtcctaagactttgtttattttaataaagaatgtttaatcaccccattagggcaataaacacagtcagcatggcatgaacagcatgccggtaaacgatcagacgacaagacatctgattatttgtagtcatttcccatctgccgccgtaaacaaagacaccaaagagtccagcctcgatcagggatgggtgcagtgagagtcaggattacaggcggggacccagcctcaatcagggatggctacagtgagagtcagattacaggcggggacccagaacacctcgccaggcaacagactccacagggtacataacgcgcgtgtctccacatggcaggaacgagattcccaagtcaactctactccccacagccaccgatagatgaggaaacactggctctacagagaggctgaaaataaccaatcatgaaataccacggtttatattcagttactagagggctgatgacacggtcactactactggttagctttgtgtggcacttttactactgttccttaaccctaaggtgaaaataactcttggaaatccacaagaaaaagtgactaatccataacaaaacaaaacgaaacaaaacaaaacaaaaacagacgtaagtaggtaattcttaagggaacttaaggaactaaggggaacttaaatggccactaagcatatgaaaagatttgctcatcatcagacagtgttacaacattctccagcaccccaactcttccaacagaggtaggtgatcccaggcccaggcttcggcagggaacgcaggacaggcctgaacacagagaagcaagttctcaagcacgtggaaccacctggacaagaagttacccacaggccccacttcatgtggtaatagtagtttctgcagtccctcccttcccgcctggggccagtactcaccaaatgcagtcagcaccagtgtgtaagtagtcaatgtatggaaggtgattttggtctcgagaccagcatgaggtagaaaagaccatgccaatatttagccagggaatagtcactcctaaaacagaaagagtgaaaagggcatttttaaaagctaggcaacaaggtctcaaaggaacagtaagtaaaaatctctttcttccgctaaaacaagaaggaaaagaaatgggactcaaagccagacaaaagacagtgagcagaaggtacctactctttcctgcttgctctacagaagtgggagaatatgaacaccgcttcaaaacatcaggagcacgtcggcctcatgagggaggtggccgcaggaacctgacctggtgaggaatgccgaggaaccggccgcccacgggccgaagcccccaagcctcaaggctgaggaccagaggcgccaaacccaaaaacccccatcagggccagaggcagaaagcaagaaagcccctttgttggtaaggcctctgagcagggtgagtagggcacagggctccttggctcagctcagaaatgagtcaggttccaggacccggacaggttcctagccactttcgccaaggcctgggccttcacattcatggtgaccacaacctccatgaccccttggctttccctgaagtttgcaaagcatccatccgtcccttacgagcctactgaccatcctgagaattcatgatttcaagcctgcagtagccttaaggaattgtgacttcagctttgaaagcagcaatttcaaggttcaaagttggcccctaagcttctcccagctccagactctgccatgcggttcacctttccaccttttctactgacttcaccaatcattatgttactcctttcttttctaaaaatcaattttcactgtatgtcctgtaagcctgaagacgccatccctccccggcagtgcttagaagggatttcccagccctggttctcagcaagtaggactcatggacacagctgccacaggcaggcggccacagtcaggcttaccaggcacagcaccgaggtgacgcaggatggaccctgtgttattggggaggacggtgaggttccatccatgcctgcaaaggggaagacgagggacgttacaaactggcggggaaaggatgcagtcacatccccaagaacctggacgagagaatcccaggttacctcgaaaagggttctgattttcctactgggaatccactgccgtgagtgttggtgtccaccttgccgcagtgcactgccacgtggcagtccttctcttccactagcctccagtactcttgctgcagggaacaggaaagggctggtcagcacccctaaggtgctgcagccacagagcacagttcaacccaacaaaactgggacacgaatgcctggtgcacacacccctcagaacagacgctctctttgcagagtgtctccagcaggacgctaatgcagaaagcaatgacaggtcacctccaggcatatcctcagaatgccagaaagcagggtctcacccatgttatgcagtgttattcccaacagccaaaaggtgaagccaccaaagtatcccatccacagatggatgaacaaaatctactccgtccataccatggcctattactcaacttgtaaaaggatgtcagttctgacacatgctacaacatagatgaacctggaggacattatgctaagcacggtaaccgccaattatataaagcttccgaagtgacttttaatatgtcccatctaaacaaatatgggggcaaagaatgggtcagaacatgctttgactacaggcaagcagcggtgcccaggctcccttgagacaagcctccccacgcagtcaccttccactttgttctcagtgatcactccagaagcactaagtcctcttccctcgtctcacaagccttggtaaagctggaaccacatttagggaagaagcctaactcataagcccccagcatcatagggtccagttaagctccacaaagcgctactagcaacaccaaaaccactttcctcaatgctgtgtgacttccacaaagagggggccgacctggcggagtcaagctccacaaatcaagaacgaattccacattaaatgactggattccctcaacagactccctgagtgcccaagcctgctgcgtatttgctgaaactgagggcaaccagcgtctggtgcgcctgtaaagacatgggaagggaagcaagggactgctcccaggtggtggccaactccaggggctgtccaccagccttttttggaatacagagcacaagaagctaggcaatccaggcctgaagtttaaattctagcaaatctcccctttgtgtttaaatatttacacaactgctagagcaaaatccagactttcagagggaattaattcctgaataagaggctgtaaaatgagctaagttttcttgcgcatcatggataataaacttctgcacctctggggagatgcccacaggacacgtgttgtttggcaataaaggcctcttcccaggtccaacgctcagccccagaaagccaagtgtcctccgcctgacatctctaccacaaacgcaacgcgtgctctggaagcagctgcggaagccacacgtgtcctagaccacggttcagctgacatcgtggctggtggtgggtgaggcagtggcggctgcagcacggtaatcatgaccacaggccgggtgtcaggccactgcgtggcattcaacagccgcacccagggtacacagtgtaggcagcccctgcacgtaagcagagacctaggtcctaagacgatgaaaatggcgtgaaaggtaaacctctattccccacactaggaagggaggggtgggccacagggctggacatcctaagctctgacaattgctatcaggaggtggggcaccaaacgccacccagggagggtgaccagctgtcctggtttgagcaggtttgaaggtcacaggtctaaaacctgggcaaaacaagatacctgaacccccagtggtcagcatgtatacacggggcaaaccgaccttggattttatttgaaacaggtggcattaaggggaaaaaaaaaaaaaaaaaacacagcaaaagcctgtcacacactaaaagatgaggctgtggtcagcaaatacctcctgttccccggccggcagctgccctgaaccagcagtccgggtttggtttctttccctttccacgaccaagcgctgctgagagcccaccgacgtcagcagctggaagttcacacggactcagctgggcactggccgaggggaggtaaataaacagatccggtctctgtcctgcagcgccgcacacaaaaactccccctaattggtctgggcacagaagtgctcactgtctttccaacctcatactaactcaaagaagagagttggcagaagcacaaaaatggcaatctgccaatcccattaaataaaaaatagaagagaagaaaaagcacaactgtggtttcaagggattccaaacattctcttgcataacagacacacagaggatggggtgagaaacagccgggtgagcaagcaggaggagacagtgacggggagcaggggacgtgcccagaacccgtcccctgcactcggcagctccccaccttcattatagtgtttttggcttgtgaacaagtttagatcaacctaagttaaaacatttggctgccctggtgcacgctcaacacagaggacgaactcagccccatctgagtcctttccgttcaccgagctgcaggggtcagggcaggacaggatgtcctccagctcgccgaggggttcccacaccatgagaggcagcgtgaggggccccttctctcacctcgatttcggctggggcaggctccttgctgaaacacatgctcatgatattcctcgctgttcgataaaaagttgttagagaaacagaccttccctgaaacaaaacaaaaaacagtaaagcttcagaagcaaagctgaaccctactgcaaatgaggccagacacctgtcatgggccgctgccccttggcgtccctgcggctgtgggccaccttgtattctgagttaatgacaggcagagaaggaagaaatatattctctaagaacccgcagtgccaagaggagtgggaagactccaccaaggatcaaccccatgagggccaaattgttctgccaggaacagaggctgccgcccagaggccctgagcggacgcacagcagaagcgcggaaggcccctccaaggctctgctgaaaaagcagcttgtgctggaggcagaatccctcagctgacaaaggctgctgcgggccagcggagaagctatcagcagctatgacctgatggaactcgtgaccagggatcccacaggagagaagctggagagacagaaactggtgcgacatctacaccctgagagtccttgccatattaacacctgccagggcagcagccttcactgaggttgcgacctggtcgccttctctccacagaaccacctgctgtcccctctgcgcctcttcttcgatgcccctctgttgccctgttcccaataacttccagaatgatttgcttgctttgataaaacagctgagtcagtttgggaatccggagtcagcaccttcttttacctaccacacgaaatgtggtgcgtttttcagagggaatccatctaagacccttgctatttctttcttacttgaccgggcacatttgttgcttgagtccagaaatatctcctgagcacctatggtgtactaggtcaaatcctaggggctggagacagagcagtgcatgaaacacacaaaacctcgaggagcttccattcagtctggggaagacacaggcctcaaacacacaaatatgggatgggaggaggtgccaggtgtcatgtagagtgggggagggtggtcagggaaggcttccctgcggagcactggacaccgcagcgtccccctagaagtgatagggccacaacagggagcagcagatgctttctgccattgggtccacagtcgtagtcggcatggagacattggcttgtgcctttctctcctgcagcaaaggaactagatggggttctaactacaggaacgtacttccatgcaaattccaagccgctcctgatagtctgtttcttgtaaatataaaaaaggagggactgaattctgcaccaaggcagagtgcaatgagtggaggtgaggatgacaccagcagaccaaagtcagcagccaggacaccggtgccacagagagttgcgtgctcacggtccctacccgtgggcacacggctgctgggggcttcgccatggccaccacgcagagctccactatatttccgtgatgaaatctagaaatacccttgacggggtggatttaaacaaatccaaacctcttatttgaatcaaacatacgctcacagaattggcctccttcagtaaaaagtaaaaacgttgacagtttctcatttcaccagttggctattcagtcacaggattcactgagtggctttacttgacaaaggcttctcagtaaaacattcaggaaacaccaaataaagttcctcagagcttacagtctctgggtcacacttggcaggctgcatccagcaacccccacaccgcatccccaccaggcagccttgggcaatgggagagcagactcagataaaagggagccaaaccctctcagggtctcaggccagaaaaactgggtacctctttccagagaagtgtgcaaggacatgagatgcagcctgaggcgggtctgcagggcctggacttaaagtgaagcagcaacgccaggagtcaagtcaacccttcctccgtatttctaagatgtgtgatggtatcagaagcccgcattgcctcaactacaaggccaggccagagcctgcagtcaggcagccgtgggcacctgagggtatggtggtgtttagtgataaccaacagccaattcccaatgctgccgaaacccactagccacacactcccaccaggctcacgagggctggagcagagaacgcttcccttccagtgaatccagaactgggaccacagaggacaagtctgtgccgggaaactcagcagagacttcaacttagctgagctcggccagctgggccccgggtgccccgctacccactggcaggctggagaagggaggaaaccccaagccttgcttcagagccaggacagctgggagagctgccaagaggagagccacggactctgcctcccctgcttcttggaggggcgagtctcctcaggatgagtgtgctgccgggagacctggcggagacagggaaacgctgcatgtttcagtttgctggtttctccccagctcttccctccacagcgtgtgaatggtgagattcattttgatggctttatcagggatagctctccacagagaggacctggcaacgctgggctggcagtgaggtgagcggatagaaaacagagaaaacaagcgcacagagtccactgacggtccagccagtgagaagttcagctggatctgggcagctgtcgagcaccaggatgaaacggaactggagaagcaggggaaacgaagcatgcagcccagttacttatccctggcatatggagatgtgtgcacgtgcatgcaacacgcacacgcaagccagttaatgaaaaggaaacccgaggccctaggcaggcggaatggactcgtggtatcttcgtggagtggacttcccctccctcactgggtctcctgctgccccatcaacgcacccacaaggccctcactaggttcctcgatattggacttcccaggctccacaaccaggagccagtacatttctgtttattatgaattccccagtctgtagtatttcagcaacacgagaggactaatacagcgctatcacccagcacagtggcccgccccctcatcaccccagggaatcagagaacacaccgtccagtgcatagcacgctccacttcctctctcattcctcccgcactcctgcagctgggagtggctgctctgcggaggcccctaccttatagatgcacttgtggaagtcattgaggacgcctttgtcctcctcctcttccttgaccacttctttttcctgagcgaagagtcgccgccggccagtcttcaactgggcctggcccacctccttgagcttgctgcggaagccgttcctgggggccacgccgtggatgagcccattcttgggctcgaagcggggcagagggtggaacttgtggtggtcgttctctgtgtggccttccagcggccccttgcgcttctccaggatctccttctccatcagcacctccttctccagccgccggtgctcctctggggacagggagtcgtaggagagtaggtactggcagtaggcctcctgcagcttggccagccggtcctgggcagttctggggatgcgcagcatgtctgctagtttgttccattttttgaggtcagtcacttgctgcatgccgcccatctcattaatcagccggaaaaagcaggccaggtcgagctcacagccccctgggacagcgaaggggaaaaaaacgggacagttagtgaaagagacacgaacaagatgttcctcattcaacctgtacttcttgaactcctactatgagccaggactctgacaggctctggggtgagagtggtgaacagcagactcccggtccacagagagaagggcgttacaaaatgatgggtcatgaccacttgctacgaagagcaggtggaacgagggactaccattttaggtggggagcgtctgaggaggcagcatttaagctggggcttggctggaaaaggatgcgagctggccagacagacatacagggaggaacatcccagtgtaccatgtactggtacatgtgttgtcacatggaggcgggtgtcatgagaagactagctccctggtgaggagtgggtaggggtcctggctgcacccacggcccagcgtcacctagaatagctttgacacatgcttgttaccaactcccaattccccttctataattcccaatgcccacccactcactcactcaacttcacccatccacccactcactcacacaaaggaagtctattttccatcctgctggatttccagagcaaagagcaacacctgcgtgaggacacagggcagcacatctatgcctcgtccctcgcccatccagacagcgggctgcttctcagtgcataagctggtgctcagtgcccctcctgatcaggccacagagcagcgcaaatgcacatcaaacctgggcaggttttaacgcgcgcccagtggcttttctagatgggaatggagaaagcaacctccctcgggccaaataaaggaaggggggtaggggagattttccaaaataaccatcaacaaaatactaaacaaagtacaaattaacaacgttttaaatctttagagtgtggggatatattgtttttaagtaataaaaggtaaagtgtgcacggatccagtccaggcagggtcgctgcacataccaagcatgacaggacccactaggtgaagcgtctgaaccacctcggcagacacagcacacacagagagcgagttcccagcacaccagcaagaccagggatggggacacagcagcctgaattccactcacactaaatggcaggacagtggactgatgtggttgtggagaacaggggagttggggtaacatccatgagggaactgtccccagcctcgacaggagggacctaagaactgagactccacaacaaactccaggtctcacagactcccagagtcacaggtgggactcacggtggctctggctgacaatcgggagttcttcctccgagggcaggtgggtactgtctcaacttacagaggtaggcaccaaaacgagtcccccaaccaaaacaagtcctccaccgtccgagtgactcagaacacaggtcacagaagggaggaaatccacactttcatatttcactctaagtagattataacgcaagagcacctgaaaatcacacagcgcttgcaagaattcttcatggaatcctcatccgctgcgatcactcccactcagggccttgaggctgctacgtggccgagccccttccccacccaactcccgccagcggcacggcggctccctgggacctgcggtggaagtgaacctacacagaggcagaaggcacatctgctggggtggattttaggctattacttcaaagttattaagtttctaccactgtcagatggctgagctcagaccccagccctgaggccttgctgggtcacagacaggtcagtacccctgggacagaatgtcagacgccttagacttctgggtgacggcaacaagcataagcacaccacagggaggcacagtatggcttttgtcccagggtaagggagtcgagggtaaagaaaaacctactctaaacaaaaggcgctgtcactacgatgtcaagtgtgctctcgaggctccatcatccacctagcagaggagggaaacttggaatgtttccctcctgtctgcaggtctccaaaggcaggaggacttggtgcggttccatcactgactcagtcatcctgtgtcccaagtagtcatggggcgtggtcagcgggcgtgggtgcacgcgtgtgcagagcctgctccctgcactgcttcctatcacgtgctattcccaacagcagagcacaaaccaagaactcttgcaagttaaggtgactgtcactcaggcatcagtcctggcaggcacctgctgaggggaaccacgaaacctccatcctgcctggaagcctatcttgctgccaaatccctgacacttaaatgatggctacacgtctccatgcctttgaaaattgaggatctccaaaatggaggtgtggcctgtttcctcccatgggtctagactgatggggttgcaaccttacctggatgcacctcactccacagaatccacttagccttaacaaggcaagttcatcctcaccctgtgtccccagtggcaggactgaagagaggatgacagggaaggagggctacaggggaacccaagaggaggatctgcctgcaacccaccctgaggagcaagggtctgcatgacagcccagatatgcattcactaaggatccactgtgacaagtttccaacagccccagccagagctcagaaaaaaggtctcagaaaaaacctggtctcagaaaaaaggtcaacagatcccttgacctgtggccttgacaaaatcgccagagaaactgaagctcagaggaagaagagacaaggctgagcaggataaaaaatggcctacaggaccctagagggctatgggctgcatggtgatccctccaaattcatatgttgaagccctgacctccagtacctcaggacatgaatgaatttggagacagggtcttcaaaagggtaattatgttagaaagaggtcagtaggatgggccctaatccaatgtccttctaaggagaggagatgaagacacagacacacatagaggtaggaccctgtgaggacacagggagaaaacagccatgcacaagccaaggagggaggtcttgttggtttcgggagaaaccaaccctgctggcccctagaccttgggcttccagcctctataatccagtgtggaatccagaggggcagcgctccccactggccccccggcccctgctttaactccagcagttgtgggtaggaggtgacagcccaggggaagcaaggggcccagacccagagtgggggctcaccccagatccaagctcaatactttttttttttttttgagacggaatctcactctgtcacccaggctggagtgcagtggtgtgatctcggctcactgcaagctccgcctcctgggttcacgccattctcctgcctcagcctctccaagtagctgggactacaggcccccgccaccacgcccggctaatttttttgtatttttagtagagacggggtttcaccgtgatctcgatctcctgacctcatgatctgcccgcctcagcctcccaaagtgctgggattacaagcgtgagccaccgcgcccggcagctcaataccattcttatcctgccaccaacgcccaggacctgggaagaagggctgcagggggaatgagctgagaagcccactactcccgagacagggaagcggaactggagctttcgcaagggaagagaacgtgaagactgtgagggaactgcagggatctgggggcaggagggcaggcaccaccccctgaccccccgcccagacctacctatgagcgggagctcgtccatggtgatgccctgagatttgaggtgcttcttgatgcaggccagccgctgcacgttggggccccagcgccggcccagcttgtggatgtgctgaatctgcgtgacaaaccgcatctcatcgttgagcttgcactcgggccgccagtccggaggggggatcaccctgcacatcccgaacttctccacctgagcgcggaccgactcgatgtagatgagcggatcgtggaactccttggcggagggcctgaggacggggatctcgtccatggccgcccacccggccttgccgccgcccttctcggccttgcccgagtcctgcggcttgtgcacggactccggttgcgaggtagaacgattttcacaggaggcgctgtccgccttgccatgtgcttgtctgcctggcgtgctcttcccggccgtggcccgcttcggccgattcctctccagactgcgctccggcacttccttcttcacgtgtccgttcagcagacctctctcggccggggccttcttgccagggccttcggcggggccagccgcccctttcatcttcttggggggcgactgcggcttctccgcctggtgtgcctcttccagtctcctcttggagttccgcagcccctcccgcagctgcaggccctcccgcagctgccgcccccccacctccttagtgcatgactttgggttcaacctgccactgaccttgaggccattgacggcgggcccagtggacttggacgcccccccgagggatagcacctgtttgcgggtttttgcattgctactttcagttttccctgagattgtgtggttgacagcggaactgggcttgtggtgattgggtttggtgtccttgaccagttctctcttggctttggtgtatgtgacagcccccttcgtcaccgtggcagtgtacttcacagttttggatggtgaaggtctgacctcgcgcatctttttggcactggttacacctgcacccagagatgacattcgagtgactccgtttaccttagaaacctgtggagcagcagaagcagaggtggaaaaaaacgcagaattagtacctgccactaaaatgaccggcccacccgtgagaaaggaccctggatgctggggatgaacagagccagcagcctgtagtgtgataagaagagatgtggaaataccagcaaagagaagcaaaatacacatccaagaattaagcagcgatgtccactttcagaatccactatatacctatccttcgtcacagaagtatgcaaactgccccaggcgcttcctagcggggtttcctgggtgcattttcacgttcccattgctcttccaggaaatttggtgtttcacaatgaagacctccccacgtgccatgcaatcacctgtcctgagcttctcagagttgatgacagcaagatcctgcttccttgggggaagtggagacagacacacacacatatccctgttccaagaaaagtcatgtctgctatttctgtgctccacatagcagcatgacctgcccacaggatttagaaatctatggctaaaaaaagaaggaaaacaaaaatactatggaagcaaaagaacagcagtgctcatgtggtttggctccgggtggcaggccaggcccagaggtgtggctgcaaactgtcagcagctgctgtctgctttccttgtggagacgagccctggacagggccaggctggatggaagagggatgccccgacctcactgttgaagcaacacatgccaaccctcgtctgcacacgcgcttcctatattttcccaccgtttacaaactgtcccatgtatcttccaccctggacaaactttcccatcaggttctatgggacctgggcaaacagagacagtcttacagcttggacgccgtggtaatcttgggacacacaaacgtcagcgaaaatggggagcgacaatggcagacactagaaatgcacaagcttcaaacaagaataatgaagggaccccaatgggctgctgccagacatgctggtttcgagaagatgtcttctctgcgtcacaatgtggccactgccccatcacttaacaccttgggcattacttttcgtctatgatatgaggttaaagtcagggacttcagggttttataaccaccaccatctccaaaggaagaagcctaaaaatcacaaaattactgagaaacacagaatactagccccctcttctccccaacagcccgagaggaaggtgccagggtcgggggagcctgcacttcctggtcaggagagctggccacatgcagtgatggcccagagggtactgaaacaccagtgccaccacaaggctgtgcaggctgctgtcacatggggacgaaggtccccagatggcgggtaatgagtcttagtgacctttgtactaaacctaggcctggcccaggaccccccttaagtgggggtggggcatggaatgaaacttcccaaaggcgcctgtaatcccagcactttgggaggccgaggcgggtggatcacaaggtcaggagattgacaccatactggctaacacggtgaaaccccgtctctactaaaaatacaaaaaattagctgggtgtggcggtgtgcgcctgtagtcccagctacttgggaggctgaggcagaagaacggcgtgaacccaggaggtggagtttgcagtgaaccgagatcatgccactgcactccagcctgggcgagactcttgtctcaaaaaaaaaaaaaaaaaaaagacttgccaaaaacatccaaaccagtggctctcagcatcccctagagggctgatgtaaacacatcactgggccctaccggcagagtgtccaagtcagagggtctgggatgggactgagaatgtgcatttctaaccaagtcccaggtgatgctgtgtgctgacctggggaccgcgcttggaaccactgaatgaagtatcagtgaagtttataaaaatcaaaaaggaaagaagccactgagacctgtatttctctatatgccaccaattaagtgcagtccaatcaaagccacaaattcttggtaggacatcatctcttaggagccaggcccatggaggcctcattcctagagccagatctcaggccccatgaagaggcagaagcgaagacccaggaatcacactctggctcttaaaccatgagtcacccataaaaaaagtgggactgacagacggtctggaataaataatgcgaaacccttttggagaggaaaaaaagcacctggcaatgataaatttaaaacagatttataaaaccaggggtaaggacaaacagaaatattccgtggtaagtactgttaatctgcaagaggaggtatagtgaggaatgcaaatctcttagttttaattgttctttcaaatgcttccactaaaaccaaaacaagacaaaacatttagaaaaacaaaagcaaacagtaaactccagctggggctgatctttatttccagcaacaaaggctggtggggctgggtgggggtgggggaatgggcctcagggaatccaggaccttggggaagggctctatctcaggttcagacagcaaaagacaacacctctacagttggctcaatctccttttaacctgtaggggtgcaatctgtttcagccctactcccagcacaagagtctccttaaggagacggacacagtgcggcttcgtatatcgctaatcaaaatggcaaactccagatggtgccggacataacccaactcctgtgaggttcaggcatcagccaccactacttgctgaggtttagttcagtgttttccaaacctggcacccctaaaacccttaggggagcttcaaaataatgtaaatcccttccctctagattctgtgctaattggtgaggatcaagaaagggaatcagtgtttaaaagcctcagatgtctcagtgttcccacaaatccgtggaccctacccttccctaacaccgctgtccaaataccagagtgctatgtctctcatattctatctcaaataagagtgtaaggcctttggttccatccattctggcttctcgggggcacctgagttcatggctagcaatgctacagggaagtaaattttcaacacagctgaattctatatatcactatcttcaatggcaaaaggaacaccttgtttacatctttctgaaaacctaaatactgaattattggcaaggtatacattcaaataacttgctttatgagagaaatgagttgcaatattttccttcttattataggagttatcttcaacagtatccacccagatatcacacacgcatgcccatataacaagctcaaagactagatggatctcacccacaacacagaccagcgaagttcaaacaattacgaagactgaaaaaggcaagtgtcactggccatcttcctcctcgaaacccagagggtccgtgttctatgcccaccacgagaggccacaggggagctgaaaagctaacataggaagccccttaagctgctccatgtgtcctaaaagggagaaataaaacagaaccaacaacccagccagcaccaccattgtggggaaacctgggacccaccaatctaacaaaaggacaccccttttcctggcctggacttgtctataaggagccaacacttaatcagtacaaaaggaaacagaagaatggaggaaggcattgtcttaccttgttaccgaaggtctccctcaacccacctctgtatcaattaaaaccacacagccccagttatgcagccagtgcactacaaggaaggccaccgctgcacgtcctgagggattccacagaagagcacacacaggaagtcatctgaactcactgaagaattagcgccgacgtgggctacagcaggaccctccattgaatgacaatacatttcagctgagcagctttatacataagtgcttgaagttactccttctctcagctctgttgtggatttctggcttctcagcccattgcccccagcccccaacccagctctgcagaaagtgaggtgtctgcagcgtgtgctccttggcccacagccatccgtcacctgtatctcaggtgatcccaggcacacggccatgagatattaaagcaatccctcctagtcataagagaatggtttcaatttaacaggcaaggttgagagcattttcaagttacgttcggccagatgagtactggcaacaatacctcattcttcttgcagaagggatataaggtgagagatatgaaagtccaggacatcaaacgttcctacctgactttgttcttaataacagaaattccatcttaaaaactgtacccaatccacactctgtgtgcttgctttaagaatataaaatctctcccctccatccttatgggtttttctccaccccaccaccgacacacacaatatttaaatcaactcagtatgatgacagatgaaaaggagaaacatgcacttccaaggcagagcagaagatgagaaatgactctgatgtttttggttaactaagcaaaaatgttttagtcgttcaagattatgacgctgtcctcagttcaacctcagattcactggcaagttcttcttctccacgagagggagccgttgagccgaggcctctgccagcctttcaaaacagaaccagaggcccagagagagaaacagttggtggctgggggtagtccatttgcactttaaaacttgaatcaaaaacaaagagcctaaacagaagcgaaatgcactggacagacagtgagttatggaaggggaggagcagcctgctcaaacactgaccgcagcagcagatgggcaggagcctcctagccaaggccaaggccaaggcaaatgtgctctaaaagagatgcctgggttccactgggcaatctagatgtacctataacctctcctcccactgaaggcaatgtaactgagtcacaaataccccaccaccagcaagtgcaattcaaatgacaaaataatgtcatgagaagaaaacctttaacttttttaaaaactaatatgattttctatgtttccttctcaatagccgtattttccagaactttaaaagaatattctcaattccttggccctctctgaatcttactagggcaggatttttctgcaaggcttgtacattttcatatgaaaacctcttcagtgacagtagcctatagctcaatggaaggtcctgcaaaaccagtgggattagccagttgatcattttcttctcacactcagcctcagcgtaagaaatgagaatcacatgtggccacatctggttcaatatcctggcttacaaaccacacaaatttctacacaagtacaaaacctgctcatgactctcttggaaaactaatacttcaaaacccttgctagaaataaagctcgtctgttggactatcctaaacttgttactttctgtcactgcatgtaagcagaagtactactgcaggaaagcaacagaaaaacaccatttgctccttggtgagacccttaccatacaaccaaattattacccaggggcactcccagccccatgacaatgcaatgttatacaggcatgtgcattccatgacaaagacagctcatttggtataatcgagagtaaacggccggggccagagccctctcaccaagaaaaaggcttaggtgaagtacgcactggtgtgttctaactctcgggttctagggactccataaatcgcacacactatcaaatggcattgcccagttcgcacgaggggaagtggttttagacttggaagacaggtgcatgcacccacacagttcattatagcaagcagagcaaaggcacttctcggcagcaccccctaaaaattacattcctccacatttcaatacagtcacatttatgcttttaagctgaacaataacaaaaaaaaatccacatatcatatttgaaatgaaagatcagagtatcctctgggcccatatctttcatgcagttgaaaagatgaaaggtcacagtctaatcacttgtatcaagcagtcacaagggaatctacaatttgcttttactgaccttattttcagagtacttaactaataggatctgagggtttgaaaattttccttttatttctcacaatgtccctggtataaggagttggccagactggctccaaaggaataatagggcccaggaaggttaaatatcacatctcaagtctcattgaaggtcagagtcagagccaaattagaatctggagccatgggtcaacccatctgggctggttagactggaacagggaaggaggaggagagggaagagggagaaagtggggaaagggtgacaggagaggatccccgtcaacacctgcaggatgccctgcatgagcacatggcgctccctgcaaggactctaccctgagccccggaagcagctgaaactcctgcactaactcagaggacagaggccggctgtgtgaggggcaccccaggacctctttcctgcacctaagatcctgcacagggaacaggtcacacgaacacgccatggagcatgggggcaggcagggccatcccaggctaaggcagtactttctgttcctcctcagctctttcctctgtccaactgtactaattcctctcatccccttacaaatgaaaaccttgaactgaatgaaggccaagtgctgagagtgagctctgaccagctgagatgacaggcgtatcccacgcatccctattcgtgaccgtgcaagaggatgtgcgcacccgtgtctgtccgtgcatgagaacatgaacagtcacatgtacatgactcaggtcctctgccacccttcattcctgcctcgccatcccaaggatgggttctcagggcagaaaggcaagatctggaagctcacctggatatggcctccagttctgatgtggcccatgagaattttaccacaagtaaactaaaaaaactcaaaaaagcatagtgggatgaatagaagataaacaaaaacaacttaaccctactctaggattctgggaaaggagacaggatgcagtcacatggtgtaatcactgtctttctgtctttctccctgggttgcttctaattctgttctctttcatgagcaaaaaccttacacattggagagttctgtacaattctccatcagaccaacagcattgggaacagcgggggagtgaagaatcacagacccaggaccaaagctcggtgcctccctgggctttgtgcctccagtgctgacaatccggggcccaatggttaagagacgccaggtgagcacatggtgtggcccaattccacaccgtggctgttgtctctgggaaaactgaggtctgttttggccaacagtggccagtgtttaatatgtgctaggtgtgtgtggactgtggaaatgtaaatgtggtgattcttgccatgcccacccccccaactgcatactatttgctaggtaaaggttcacatgtgcatgcatacatacctgtctgcctatgtgtgactatagtcacatgttcacgttcagagagaaatatccacaacgtcaccaagaatgagaaaggccacctctaccgcaagacgaaatcgagtattttcacaccacaataaccatgtaagtcactctgcaacactgccagccaggaaatctcttccgtcccctctacaacttcctctgaagctacctttaaggatcatagcctccagtctcttctagggaagattttaaccctctatttttaactctgtgaggaaagctcatcaatgatcccatgacttagcggatgttaaaatggaggggggaacaggagcacgaggcatcagtgaaatgccacctgtccggggacaagccctcagctgtgtgcctgcaggaacctgcccttatccccactactcatccctagggttgtgagaaatcaatgtccaggaatgggaacatctggacagcaataatggccaagccctgagggattcttcaaaactgcctcaccagaaccggcattatctgtggccctgttgggggatagcgggtggggggacagcgcaggacaggcaggggcaggaggtggtcagggtggcagccacctacactctgtggatgctacagcctgggactcaaatgccttcagtggaagaggtgccacccagccacacccagttccacagactgctcggcagtgcacacagcatgcacatattctgcttcaaaggccaggtggtgaaatgttaacttgtcacatcaaaaagaacagaaaagtagaccaggatcatccattaacagaactatcccatttgcaggtgtgtttcaaaacctaccctgagaaaaacatgttccctgccactctaccgctcatctggagcccagggtgggtgggtgggagaaggcttaagtaaaaaagtgagttcactttcttggtgaatgcagtggcacccagggatgaatgcaaatccaactgatggatcttcgcaggacaaaaggtgcaggcgcctgcagctcatgcaaaggtgcgctctgtctgtccctgtcttgcttctgggcatcacctcctgcttcttgagccctctgaagatgaatttttagcttggtgaagtgaagtgggaaactggggtctggcacacatgtaggcacccctgctggactttacctgtttccgtaagtcctgagccgaccgatgcagaggggggtggtgatgggtggcagcaagccccttggccgaggaacccgtggagggggccgctgcggggtggttagctgaagcctgctcccggcggctgtcagcccggtgatcgctgtgcttctcctttgcgggagtggcctctttgcttttgtgtttttgaacaggttccttctcccgtgttgacctgctggaaccattgaaaactagaaaggaaggagaaaacaagaatgaaatcactaccttgaccactaccacgcaaactactgatatggtttggctctgtgtccccacccaaatctcatgtccaactgtaatccccatgtgttagcgagggaactggtgggaggtgactggatcatggaggcagtttcccctatgctgttctcgtgataacaagtgcgttctcatgagatctgatggtttaaaagtgtttcccacctcacgctctacctttcctgctgccatataagaagtgctttgcttccccttcgacttccacaatgattgtaagtttcctgaggcctccccagccatgcggacctgtgagtccacttaacctcttttctttataaattacccagtctcaggtagtatctttatagcagtgtgagaatggactaatacacctctactccctgaagtcagaaagaatcaaccatcaaatgtcagagcgagactctgtctcaaaaaaaaaaaaaaaaaagtctattctcagatttaaaagagatgcattttgaggccagagagctactgacatgcatgagttcggggcgcagctgctttatctgacctatcagtgacaacagagatgaagaaagggatgatggaactttgagccagacccattttctgttcctaaattcaaaaacagcaatagctaatagctagtatttcttaagtgcttcctataagccaggggaactatgctaaagtcctgaagtacattgagcctctgaatcctcagaacaaccctactggacaggacacttacagatggagggggtacgtgcctggcacaggccatgccacctatccctggcacatgaagtcagcctgcctcccaagcccaccccatccaccccaaaccccaggtggctacaagtgagaatttccagtgagcatggtgcttcctacccatgaggcagagacttcaaaagagaacagggatgcttggggtttctacagaaaaccagaaacaccaacgttatgggtttatccttctgctttacagtccctccccatggaataaacgagactttcacatccatttctctggaacccacaggccttgtctccccacaaacagtccaaacagggcctgtttcttcagggaaggaggaagcacaccctgttcctgggttgcctttaggcagatcagcaaggggaagctatagtgatcttttagccatcatcctgccagagggagttttcaaaaggttactgtgtccactcatgcatctggcacttgagcagctccaggccatccccaccccaaccaggactggcagaacttcaggtagaattccctcacccccacagcagcagatgaaagtgaaaattattcctcctttgagttgtaaatctcttcctattggcttgcagaaggggaaatcaaatctttcctcctctaaacatcttacctgtctgtcctttctgaaaactcccttttccccaacattcaatctcacatggaattttaagagtcctttaaattatattaatgtcttataaattgcaaatactgtcctcttttgccgtttactttttcatttgctgtggtgccaaatctgctaacaaatttctttgtttcttgctttcgtgcttaacctacccttccgtatatcttctcccagttttatgaaagtataacaattaaaatggtacgtttacagtatgacatgttttaatacatgtataaagtgattaatcaagctaattaccacacccaatccccttatatacttttgtgctaagaatatgtaagataagcaacttgagtatacactacattattagtgactagtcacaaggctgtccagtagatctccagattttctctctcccttcaaaccaactttgcatgcaccctttcatcaacatttctccattccaccacccatgctttcaaacggtaaaataatcttctaagtttccttctaattgttttctaattaaactgcttggatttaattctttagtccaattgtcatggtataagatggagatctccattatccccatctggattatcggttgtgagcctttatctcaaagttccttccaacaccagtgattaatagattttaaaatactgaaggaaagaccaggccacgtcaaaatatgggatacaatccgacgttgcacaagattctactggatactctcagttaacacagaaaatggagagtttcaaatggctggcatttattctaagtaactacccattgtcagaaaccatcaatcatgcccaagctggcagtatctgtgctagctttcaagacaaattaaaagcaacatccgtaagaagtcatacttcaatgtgattaaaaatcaagccaagggaacatgaatctaggcaattcttgactgttcaccaattttctaaagcagtgaacacagcttattaaaacataggaagtagttgctttttttttaatctccaatactcctccaaacttctctgtgctttttcctgccattaagacatgtctcatggtgaggcctgctacaaagaagcaccagttctataattacttctctttattcacttaacaaaatattactatatgggtttcccgcccttcaaaacattatctgcagctcattcccagctctgttgtttgcagctgggcaagttatttaatcatcagttttcccatctatagactggggaatagcagatgttccggtaggtagaacatctaccacaatgtctggggttcagtaggtacacagtatttgggagacactatcactgcatgtttaaaagggccatctcaggttactgcacaatcagattgtgggcaaatctctttttgcctcatatccctccctgcagacagagtataaagaagggcttcaatgcagacaaacactggtctcagcaagacccaatacaacctcctactcctctgggtcattaatttgtccacactgaccatgcctgttacgtctcctactcatgccagaccatgactgagagtctgtggacaaagtccagcagagccaggtgcctcctaacacttgccagtatcactttcatgggaaaaagaggagtagctaatcacctgcctgagcaaaaagaaatacaacactgaaaacacatcccaattttccactagcgacgtatggtcagatcagtggatctcaaaggagatttacagacccttcaaggacctagaaacccttgcaggagatgtgctagggtcgaaactatttcataataatacaaagacattatttgcctttacaatggatagacatctgcactgatggcacgaaaaatggtaggttaactataagggaaatgcaaatcaaaaccataatgagatacaccactttacatcgactaggatgtaaagtcatatcataaagatggataatgatgactgattgcaaggatgtggagaaactgtaaccctcacacactactggcggaaatgcaaaatggtttctccttttcagatagctcctcaaaaggagaaacgtaggagttcccatatgacccaccaattccatttccaggaatgtacacaagggaaataaaaaatatgtccacataaaaacttgcacacaaatattcacagcagaattattactaatcgttaaaaattgggggaaatcaccgaagatccaactgatatttatttagataaagtggtatatccatacaatgaagtattagccataaaaaggaaatcaagtattgatacatgctacagtacatttaatgggtatattctataatgtgtgaattttatctcaacaaaatatatttttaaaatatgggtgaaatcacgggtactttagcataaacaaaggcaatggcaccaaactactatacactagtctaatatgcatttcatccctaccatggattagtagcagttaaaaaaaaaaaacagccagtttcacttaagaatgaccttgataaagtcatacaaacagtgagtatgactgaatcatggcccctgagcacacatactttgtgtgacaagatgctattacacataaagcacttctcctatatacagaaatacaatgatcatctctagggaaaagcacttgtgtgattgtgcaagttttgggctagcccctttttcataggatgttgtttttatttcaagaaggaccaacacactatagttcttcggacttagttatttgtagtttttacttagttactagatttttttcaaaaatgaacaaagcaagcctgtctattcaaggaaagtaactaatagtcgttgctgccaatgacagaattcatgctttcaggcaaaaattagaatttcagaaaaccagtatctgccatcatgagttcgacagaaattctttgatgatgtacccttgttcattaccaaaggtgctaacaagaactcactgaaccattattttcaaatgaacaacataggatgctacaaaacagtgcatgggttaaaggtccattcaaagaaaaagacaaaccaatggatattaatgtaacagtatgaaaagttcactgatacaggtacaggttcccagagcaactgacctgtaggaaactaccagtagagcctactatcctatcaagtactgaaatcatctacaaagaccgtttcccatgtacatacatatttatccaaagctgattttcttcatatacatcaaccaaactatgtactgcaacactcaagagatgaatacagaagcaatcataatatggctgtatcctacttagtaagacattaacgggattaacaaaaaggtcaaataatgtaactcttaataagtttttggttttggactatgattatttttcattaaaaaatgctatatgtgtttaacacgtaactggtttgtgtcattttttaaatgaataaatatcttaaagtgtcttaacttttaattctaatatggtagatatgagaattaaagctgatattaataaatataatccacattaataaaagccttttggggtccctcaataacttctaaaagtagaaaggggtctggaattcaaaatgcctgaaaccctggggccagatcatctgttccattactccttacatgatgatttcaagaagcttgatgtgtcacataaaaactgacaggagtcacctgttcggtgataaatcacttggcagggcaaggccagttgctaagctgggactttcacagacacttgaagagtgtgactgtggttagtcagcagtatctttcttatctgaaaaaaacagatccttcattgcagtatccgtacctgaaaccagatgcacaactctttgattgtattttgaggtcacaaaacctactgctcaggaaaatactatggacagcaaagcggtgagtaccaggattataggaaaggggaaacggagacgagagggaggcaggtgaaattaacatagtgaaccataaactggctgccctgaagacttcagcaaggtactctactaaagaatattttgatgagatatctggaaatggaagagttttcaaacatacggaaattaaaaactgaatcaaattaactttcatttgcaaacaaagagaaggtttccaaccaaacccactttttgtaaccatcatgctgttttagagcagcgatatacccaaatggcaaacatagccagaaagtcaaatcatgtgttaaacgggaagtaaagggggcagggggaggactgggcaacaccgacagagccaaagacaaggtatattttgtactcaacagctcattaattttaagtgtcgtgggaacctgccagttttactcctccaagtaattatcttttgtcttaatttgtaagatttgagaaagggagagaagaggaaaggaaaaaaaatattcactctcacagggaaagattaaaccctgtgaacataagagagagaaagacagaaagttcaatgtatagaagtcctccacacactgtccccaattaaaagaaataattggactagtttctttaaggagagaaaaaaagcattcatcactgtgaaccatattaggaaattgtattgtactcagatacaaatagctttacattaacgaacagagacaaatatattgatttgtatacacatactctgaaagttaaacggcctatagaaaagtgttttcacaccacggcaggcaaaatctttaaatccaaaggctattattttgatttagggtcacctcatccctgagaaggtaagatttgctcccaatgagggatgaaaaagatatgggcaaaagaagttactttagaaacatatttaatagcaatcctgtaacaatttgaaaggcagagagatacactttcctaggggaattcacaactatacctccagggagcttgtcctaaacaatgttccccaaaagctttgttcgcatatttagatgctgacacaagtttcctggaagagaccctcaaggaaggcagccctatgagaaactgatcgcaaggtttttaataccctcactccatgcacagactcttgattttgatgtctagttctgctcaccaaccccgtttgggcctcaattccctgaactacagaccagctggctgcttcctcttatccgccctccaggacttgctgaagtattttgaataaagtatataagtgctttgcgttcttcagagaaaggagttgcgcaaatataagaagaatgatcttttcgaaagctcttgctgcaatggcaaagatccacatgtgaaaaatataatttttagagaaagctgacaaagctggccttctacttttacctgtctccaagcgcctcccagaaccagacgcccctatcttgccaattacccatgctaataaaggcacctcatccaaacacaagagggaatcctgatgtgtattattagattattagatgtgtatgaaacaggagtccttacttggcatccagcaaaagttataagatatcctggaattatgcagtgtatgacctgaaataatacagttcagaaggcctaacctccttgaaagagaaaaatccagacaaggaccattacagaaagtcagccgaaacatctgctagcaaggcaacaaaggaaaagaagaccctgaagatgggaccgaactaacccccaaattaaaataccttcttcctgtccacaccccaaaacaaacgaaaggggcaaaaaaaagaatcactgtaaataaagaagaaatgtgttaagcaagggaaaagagatccaccgcaagtttctgatctcaagccagatatttaaatgtacgcttcatgtcattacaaggcatcccttccttgggcaagacacagactccgtcaattggctggcattaaatccctgttactgtacaaaagccacacttgctccctggagccagttcaactttgagtcactattgtctgaaaacaatggaatgtctgccaacctgtgccaacagttcaaatggattttaatgtagcatgtgtgagtgctgtaacccggtttgccctgggccaaaacagctccaccatccacgtgtaaaactagggaaagctgcaagaacacagcttaggtgagcaaaacccccattatcaccttgcatccagccagcagctcactcgcacagggaacaaacgtcaacctgggatgctgcctctgtactccgaaactccagtatcataagcaaattctactggtttacaggctttgtaaaacgcttctggaactttcacacaatgaaatctctttcactttgatcacaattataacagatatctggaaatagaatgtttaaagccaatcacatcttcttccttttctatagaagaacttaaattctgtaatatttttcccaccaattaccacttggttgccactctcatcatgatctccaagtgtgaatgcattatgtgcaatgataaaataacagacttggatatatctgccctttacacaaatttcttacatatattcctgctaacatacgacactaaaattaaaagacttttatgagaatataaaggtcaggacaacagaaagaccataaatcaggatgaatggtttttgtcattgaaaaatggcttcttggccctcttggcccccaaaagtgctgaggaaaggatggcagacctgatgattactagccccgcggcctgtgtgggcatcagtcactctaaaatgtttgcgttaatggtaagggaggaacagctggacaaatggccttacggggcaacaggcagttggtctgcaaggctctcgtgctttatcactggcaagaatcaaggcaagagcacagaactgcaggttacactcagaaaaggatggcgttaactcgtaaagaacacacgaataaaatgtttctgcagttttgggtttcataaaaccctaaatccggccgggcacggtggctcacacctgtaatctcaacactttgggaagccgaggcaggcggatcacctgagctcgggagagcatcctggccaacacagtaaaaaccccatctctactaaaagtagaaaaattagccgggcatggtggcgggcacctgtaatcccagctactcaggaggctgaggcaggagaatcgcttgaacccgggaggtggagactgcagtgagccgagatcgcgccattgcactccagcctaggtgacaagagtgagactccatctcaaaacaaaacaaaaaacctaaattccaaaaataatgatttaaaacaggccaaccacatctgaagtcagtgataagagttctggctcacctttggatttgagtaaggaatttgtaaactgtttactacacaccgagagagaaacacccttaaatatgcacatgcgagttagaccagaacgcatcccattgacacaattgactatacaagttataggcaacttggtcattttcaaagtaaaaacattagcacgaaaaaactaaatacagtcggccctctctatctgtgggttctgcatccatacctgagagtagtgaccccaccctcacatatcctcccccacaaccccaagcagcattgcgagtcaggtattagtaatataattttacaaaggaggaaaactaaagcttaaagaggctaaataatctttttagccctgacaccaggctaaaaagagggatcagagccaggagcttctcttccaccaccagatacaccatcttctagctgcctgtcacagaaagagttacgaaggtaacaacaccaaactcatggggcatgggccaactatcccgaagtgtgtgcctatatcccccactaaggccctacgaggccagtggaacaaataaatactttagcaaagcaagaagaaacagggaaaggatgataatcctgacacaggaattaccaagaccttctaccacactgaaacagcccacaacatagttctggcgaggctgatgatgtcacaacactcaagggtaatggctgactctttgacagtcctcatcgtgccccaggcatttgagatacataaactttctcgagttttcctagcaattataaggttgttccaggcaccagatcttttcaatcacattatgttaatgataatatgcaacacagcagtttctaacattaactgttgtaacatgtatcaattcatttagttattgccaaaacctatgatctcttcttcagagataagaaaactaaaacagaaaaatcctaaggttgcagccataagtgtgtcagtgctgtaatcatgatgctctgaaccatcctacccaacggcctctaaggaacaccgccccaaatgcgtaaagggggtggttagaaacatacattgtataactggtctctctacatgtattacagctcttaaaaaaaaaaaaaaaaaaaaaccaacactcccatcccatattccaactttttggaatagtcacttgtctcaacaggaaaaatggagctaccagaggttaaaaagaggtaaagagaatatcacatgttctctcgggggcggggaggcggcatttgtctgttacagagtgtctgtccccactgaacatagcagggctatggcaagctcctgaccctgatgcatgaccgacaccccaacaccccaccgcccagacaaagagagggctcaatgcccctcaaaggcaaccacagagcagaaatgtgataaactcgtccaaatgattgctttttggcccttacacaacatgcccccggtatgaatctaaaagcaattaagtcattccagctgggagtccaatgacatgctgtttaaaaagtcttctgagaaacatccctcttcagaaaacgatatgcacaaaagaaacaacagccactcttcttccttccgtttttaagttataaaaagcatttaaaagatacacatgcagctgacctagcaacaagccttcaccaaggtctcctcctcaaagcactcaaaaagccaaggtaaactcattccaaaggcatttattaattcctctagtctacctcacttaccccctggaaaaaataaccaattatgagagcttaagaaaaatctaggcatctcaaatatcaacttgtaatataaatacccatgaagcagtgttctgattgtgttatttggtttccaaatagtcattacctaagggctccatttttagaatcatttgagattctgtatatggaagagtattttggaaactctgatgtgctattgaaatagaagttgctggaagcattgttattgtaacccttgagtgctaacccaaggttaaaagctcatgtgatgctgtccaaatcatttcagattatatattttaataaatccatttccattaggatgttcagtggattacaaatgagcacattagagtcctgtgtaatgtttgcaaaacaaaacatctgcctggggacagcaggctcttgcaggaaactactggcatcaggactcctgctcggaggaagaagggtacagtctcaggcccatgtggaagctgatggcaggacactgtggatggtgtgtgtgtcctctcctgccacctctgccatgaggccagaggtcccggctccatgaccagagccactctgctcttttgtggagaaacaagatgaaacaggacacccctggcagtctgggttctaggttcttcagctagctgctgaaataaagctgttctccttgaaatgtggcctaattaaaatattggccaaacccaccccagtggtaaagcatcagttttccatacttttgttttctgtgtgtttatctccccacatttcagcaggggtgatccctctggggaggatacagatgttgctagatttcctgacacgcctcaacagctcgagcatacaaaatagggaaaagcacaaatctgataagagaaataccctgtaatggaaaagtcacaaaacaaccagcttgctctcccctttcgcttgtgaaagattaacaattctgagcagttgcttgaatacacaatcgtgatgccctcacccaggttctccctgcaagaaaacctattttaagacctgtgccttcttcacccaagtcagaaaccaaaaggacacgaagatcatctgcctctatatttgaatgttttcaaaaaatgagggagtaaaactgaggtgtgaggagggaagactgagctctcaccttcttaactaactatatccaaaccgttctttccatgcagccagagaacttattttcatctaaaagcacagctcgtgttttgcttctattcaccaaggcactccaaaatcagggaacaggggtaagggcagagcatcacagcttcctgaggtcgcaggtgcagcacggcctggctcaggtgccttgtctcatggcacaatgtggggctagtgggtttatgttgaagaacaggtggtaggcgattatgcaagagaaaatgctagttgcacggcgaagcgaggacctgggcctccctggcagttccacagcacctgatgtggcctgagatgtggtgctctccaggactctttcctctgtctgcagttcagaagaggccttcttcaggttcagaaaattgctaacctcttttctgacagcacctgcacctgcagagctccaagcttcattagatttgcaaggcactggtgcctgattgcctttttattgcaaggaaccctctataggaagatctgtttcattttatattatgtcacatttaaataaatactccctttgatgactgatggatactcataatgaaatcccattataagaaatttctaggaattccgctctaaacttacagagaaatggacctcagtgaaattttgcaggaaagaacttttagctgccatgggaactgttgccaacatttgatctgtatttattacacatgaaaacaaagctctaggtgatcccagcagtctgaccacttggaggattcttgtgtaaacgactggtgtcaaccgggattattactgactttcagcaactcagcctttgcttggaggatgcaacagtacaccagttttcctaagggttataaaagaatgaagaaaacaaagtatagatagcaatgtaaatggggttgaagacacggtgggatataaaagttttaatctggacaagtcactattatctcagggaaagaagaatggattacagggacaaaattttagttgggaaccttcacccagctgaatagtgatcttggaaatgtcattttccttgaacatataacaatggctggcatccaccattagagatctgaatggctctactgctgcccatgatacagcctcattgtttccttatgctgggatataaatgaatcaatgactggacaaattaatgctaatctactctatcatgctgatttcacagaagtagaaattaagaatcagagaagctaagtaaataccttgcccaagaacacacaagctaacgagtagctaaaaaaaaaaaaaaaaaggcatgcaactaagttcctgatgactgttcgatggtggcaaagacattcctaagaaatgaacagacaaaaatgacaacaaatatgcatattgagcaacatggcattacagtgtaattttaatcatctagaaatggttgaggaagtagcaatgttgggcatgagaatattccacagctgagaatatttaattttgaaagactgctacacttaggtttttatcaattttggatgagatgatcaataatttccttctctactgttgaaaatagtaacttcagaaatactcttaggttcaattagcacctcttgcctgagggattactcccaatatcacaagtgtttcctttaataaactgacgtcagtttgtttccttgtcatctgccttgatataaaagcggatgtgaaatagactggggaaggcagcacagctagccagctactgagagctcagtgttcttctacagtactgcctgaacctgaggctgacattagctttcttcaaagctgactttggtttcacgaaaccaccatgttcccccgggtcatttgaaatcggaggagcattccaagtggcctgtatattactaagctggctttattccattccctccactggcgtcataaggaagcactgacatcctgtggattgttactctttggcttccaaggccattcaagccatgtggcaacagcaggaaggactctgcagagacctatatcccaggtagtggcttgtggggattttttcttttcatatgacttcacaaaagacttggtactcggatgcctacaaagggacaacaaatacataaaacccataaatatacacaaaaactacaaaatgtcttaatggagccccaacgatcacaccacccccctcttaaggaccttggtatatgggtgtgaggtgggtggcaggacacaaagcggggggggggggggggcacgcacatcagaagacaagggagacaagtcacccaggtagcatcaccaagtgacagggaatgacaaagatgaatgagacactgaaacctgtttcatcaggagaaacacacgtaaagacctgaatgtcttctgacgtttctgacagatgtgccaggagacatcatctcccattagctccttgtgggtagatcctattgccgtgttcatctgtgctatctttcagagcgcttacgtcagcacaggggcttacatttttctcatttatacagaagttaatcttatttgatttaggagagaaaaggtaactccataaatggttaatatcattcaccactgttaacatggcaaagattctatgattatgtttcagcacttatcacaataaaatgagtttgagctctctccaaatcctccacaaatacagcaatttcgggaacatgtaaatatgaaatctttcctaacacgggtattcacatttgctaaaaactcacaaattctgtaggaaaaattctagtggagttggtttcgtgcttgtctctttgacttgcacaggaaatggaatttttctgaccaggttaagatctaaaaaatgcccaggcatagcaatagaaagaaaacctcagactaaataagattcaaacttccctatgacgctgctgaagagcaatgaattaaattgcagagggacatgcccaggaagtgagtgcctgctcaggaacgggcaggcctaacacagactgaacagggaaatggctggtgactctggacaacagaatgggacagcaagaaggactgcagtctggacagatctaaatacaggtctcttgggcctgcaacaatccccccaccaaacttcccctgaagttcaggtgcaggcaaacagactgcacagccccatggcttctcccaagatggtagttctgggactctgctgggttgaaatcaaagaaaacccattcacaattcaaatacgacataatcaaaatggtagacacttggaggttgggggcaggcctaatcacagatgacatcaatctaattaaaattataagccagctgctcagggatgtgagaaaggcctttcagtttggttatctacaagtctcagaaaaggaagcacagaaaggtttgtacatttcagtgaagttagtccccttactaagctcagctggtttgggtatgcttcctgcagctcctctatctgatgctgtgactctattgtaaaagaaaggatgacagaagagacagggcggaagagggacagcaaggagggcaagggcacaactcagaaacagcagtaggaggtgggtgtgtcggtgcttacccaagaccactcattccacctagtcttcccagcctggagccaggattcacactatcctaccagcccctcaccgagagacatcaaaattcatgaggggacaaaaaaatcccaacactgttcctggaaatatctgaattaacaggcattaaatttttaattttaaaattaaaaaaatttttaaataaaattttaaattttaaacaataaaaaatgaaaaagtagaatctcctaagatttttgaaactcagaagttcatctgtgtaaatgcacagagatatgtatctatagatagttacactttccttgactcctagtggcaatgacagtggtcaatgtagaatcattatgccctcctttaggtgagagctcagcctatcccttcaccctcattccatccccttctttcatatgctccatgtaacatgctgccagatagtcactgcccctgcacatacctaagatccatgcagatgatgattcttaacattaaaaactgaatccatgagaaaaatcagcatgtgaatccaatgtctctaaatcaagctcaaacactctggaaaacaaaggagttagcaaccccagtacaactgcactagtatacatgggattaactcaactgatcaagacgtcagataaattcacctgcccaatcagcataaaagggtgaaaaacaacttatgaaaaggacccaatccgatactacactgatgaaacagatttctatcatacagccatgcagaagacaacagatgagggtaattccatgttttgttcatatttcttcactcttcaatctctattaaaccaaaaagaaacctagaaaattaaattccttcacaagaaaaagttctccagaggtttcctttctatccatattatatttcaaaaactttacttattcaggaggcttcaagcagcagctccaaaatgataaattcctggtgtattctcaataattcggttgtctctcaccatcaacacaaactcaaaagattataaagttattacctttccacaaatcaacccattcctaattcctattcaattaccttcacccccgcctctgcaggcccctgggaaaagctatgccactgtagcttctcaagttcaggttcacatcagctgttgcctggatggaactctctgaatacaataattttttcctttatttcagactagtctgctaccaaaggaatcgttcagaacttgacgcatttcctcttactcccacatctaaaatcatcaacaggttcctattctgttattagaattctttctcgtgcccaggtctttccaggtcaccaaacagtagacctccacactggtggaacaacaggcaacagtcccaaaaacaggcattattccgcatcgctctgtttgcgatgttcttcctccttagaaattacatccgtacactaatacctgcattccaattcacatatgcagctctcttccaaccacccagatgccctgatgaccacagctgcaggtaacaaccttttcccgaaaggttaaaatgtagttacattttgtatttaccccatctccccaattaaaccacaagaacctaaaaagagattgcaccctctactatgcagatgtgtcacctaaacacaatcaaaagcaagaggcaagccagatgaacaattattaagtggacagagcagaaatgcccaacaacaatgaaagctagacagagatttcaatcatgtctaagctatgcttgtcctgagcctctatttcccggtgaatccagaaaggcaaatggtagctcagtgcataggcaccaaggagaaaaatgagcagctctcctttgcctcaatcacttacagacagcactgattttccgccatttgtagacaaggcttctttatcttacagggtctcagtgggtcctaagtaaagtatgtctagtggagtagctgataggaggacaacagaaaacagccatatctcctgactcccattctctttgcttccctcctctttctttcctactttttttttttttttgagacagagtctcgctctgtcgcccaagctggagtgcagtggcacgatctctgctcactgcaacctccgcctcccgggttcacgccattctcctgcctcagcctctcgagtagctgggactacagcagcacaccaccatgcccggctaatttatgtatttttagtagagacggggtttcaccatgttggccaggatggtcttgatctcttgacctcgtgatctgcccacctcagcctcccaaagtcctgggattacaggtgtgagccacctcgcccagcctctttcctcttttcttactctcattcccccactcagtgcaattccaattggttcaggactacctctgtgctgcctctgaaatcactcctttttatacctattctacatcttccaatgtctactggacaaccttcggtcagggaattgcctacaattacaacctcgctgtgcatttccccttcaagttatttccctttaagaagtcctcatcatcgatgccggcttcatgttttcagggcacaactccatttaagtcacttctctattgaaaaaccactaggcggctgggcgtggtggctcatgtctgtaatacgtgggggcctgtagtcccagctactcaggaggatgaggcaggataatggcgtgaacccgggaggtagagctggcagtgagccgagatcgcgccactgcactccagcctgggcgacagagcgagactccgtcacaaaagaaagaaaggaaagaaaggaaaagcggagaagcggagagggggagagggggaaagggggagagggggagagggggagaaggggaggagagagagagagagagagagacaggagagagagagagagagacagagagagagagacagagacagagagacagagacagagagacagagagacagagagaaaagaccactaggcactttctatagccaacttatccacataagatgagtttctttgctgtgatactcaagctattgttcctgccttttatcctcctcctccacactatacacgcaaggggaaaatcagtccacttcagaatgtatgtgcaattccataggaggaatgataattttcttcctataccatatccacctgctaaaatcacattagtaattaaaggggggcacagatgttgtttcaccaaatcttcttgaccatccccatgtagatctggtcttttcctgttctgatgcctgtttatctacagctcttatagaatttaccatcatctccacatcatcagagtatctgcactcacctagaacaccctggactacactaagctacactaataatccctttgcccatgaagtgtctggccctggagaagtacccagaacgagctttgccttcatctcatctcttctcagcagaggctctcttccagctctcacccaaagctttagattttttcttatccaagttcaacggtggacctaccatgcccgttgtgaacatgtttgtgggtttttcctttcctgggggtcgactggcatgaagatgaagcattgttggtggctgttttgacgtcttctgtctcatcatcttcctcctcgacttcctcctcatcctgagagcttccaaaatacaccatgctgttgggcagcgcaggagaacctggtggaataagaaaaacagctcataaacacaggccttgaccctcaccctttccagaaggaacaccacaatgaaacaaaaccgaggagaaaaaacaaagcaactgatctctactgccattttaaatttatttttcaaatgctcccaagatcatctgtgccttttgaacgtatttcaagcaaaatcccccagcaggaagaagatgcaaaatagaacaaataaggatttttaaaatctcatctgaatatctcttgagaaaaaaaacaaacacctccaaggatggaacaaaaaaataataaaataaaaacacctacccactgctgaggaagagagattactctaaattaatagacttaaaaaaaaaaaaaaaaagacagagaagacagaagtaaaaacagaatataacatttcattatataaaatcactgtgttgtattcataaggaatattcattccttatggtggatatgaattccccaaattccaatagttttggaagttactttgatgtcctgattaggttaactggatgcaaaaatcacccaaataaattcccacgctgcactaagtaaaagtgctgaatttgaaataaaaaataaagaaataaacctcccaacgggggaaccgatctcctcacctttacccttttacatcttaacctctcatcctcaaaggttctcattccggattttaaagtaacaaaaaaataagctcaatatcattatttttctagaaagggtctcactctgttgcccaagctgagtgcagtggcgcgatcacagctcactgcaccctttactgggccaagcaatcctgtagctggagctacaggtgcgcaccaccacacccagctaattttttgtggggagatggagtcttgctatgttgcccaggttggtctgaaatttctggactcaagcaatcctcctgccttggcctcccaaagtgctgggactgcaggcatgagcccccatgcccacccttaggctcaatattcttaaaaaaaaaaaaaaaagcacaatatagttcctctttatcaaacaaaggcaattcaggaaatacaatcaagtcatttgtacgttgtttggaaccagaggcttctaaaacacaaacaaaatccccttcagtctaatagtaaaagaactagtaaatacaaaattcatgtcttctcttgcctgcctatgaatgagctaaaaacactccagtaacatcaccgaagagatagatcaccaattcactctcctacctaaatagagatctcaaagatctcaaggtttaaacacacagttaaaaccatttctgtccagcttcggaactatatatgctcagtgacaaggaaatggaaaatgagcagtatcaggagctgagatggcaaaccaagcacccatctccccaaaatgcaaagactatgtgggaccttcaaccccttccttttcctacaggcatcttcatgacctatcaatgttcaaaaaccccccaaattatgtgaaccacattactgagtggatatgcaactgcaaagggatacagtcggcaaaaagaccctctgtagacagaagatttcaacttggtcttacaaaagccattttgatgttttgttcccctccccttgattgtctccatttagaagtagattctggacagaaagaaggttcttaaacctgacacagactttggggaaaatcaaatagaagagggagtaaaataaacagtcaggagttaaaagagaaagagaaaaaaatatctatccacatttccactggaccaaaatatatactcaatctaaatggttttacaattggtacaagactgacaaggaaaacaggaggctaattagcatagttttcagtacagtatcaccattcatgggtacagacaggttatctaatcaaatacaacaatgttgttgatccctcttccctaaatctacctttataagtatttatgaaaaaacaagagtaactacagcactcaaaaaatattcaaattattttactatcgatctaacacatgctgtcagtcataccattaggagagaacttgtaagttttagactctgccattaaatttccctcttctaaaaggagatgggataggttaaatagttcctcccagataaaaatatccatgcttaatttcttttaaagaacaaccttcctatactgtatcttggaggcaatgactagcagctgaaatccaaacgatggattggtataaaaacagcaggttcttgtgtagatctttctaatagaaacttctgcagccaattcaaccatttttcagaaggaaacaggagaagcaggagggaaagctgttacaggcatgtatttcaagaggagggccatcacccctccagccttcctctctcccctctgttgcaaaggaaataaactccacaaatgaggccatgtgagagcaatataaaaatacagcaataaggctgggcgtggtggctcacgcctgtaatcccagcactttgggaagccaaggcgggtggtgcacctgaggtcaggagttcgagaccagcctggccaatatggtgaaaccccgtctctactaaaaatacaaaaactagctgggcatggtgatgcatgtctgtaatcccagctactcgggaggctgagacaggagaatcacttgaacccgggaggcgaaggttgcagtgagccgagatcatgccactgcactccaggctgggcgacagaacaagactccgtctcaaaaaaacaaacaaacaaacaaacaaacaaacagcaacaaaaaaaatacagcagtaagatccaataaaaatattctaagattcaaagagaatcaggtaaaaatccatgtgaagcacattagaaataaggaattaacttccacttaacaggatctgttgaggatttttttaaaaactcaaacattagagaagcagcatgaagcaaatatcacattccttgcactcaagatgttgagagaaagggtgaggattgagtttatgttagggtgaggattgagtttatgttgcaaagaactaaaatggagaaaatatctagacgctcagttcagcatccagactttgttgatatctacaaaggataagatattgtttgagacaagaaatcactctgtcgcccaggctggaatgcagtggtgtgatcatgactcactacagcctcgacctcctggccacaagtgatcctcccacctcagcctcctgtagctgggactacaggtgcacaccaccaaacccagataattttttcattttttgtaggaacgggatctcgctacattgccgaggcttgtctcaaactcctgacctcaagtgatcttcccacctgatctcccatagcactgggattacaggagtgagccaccatgcccggcccatagacgataattttttaacaaaagcagaaaacaaccaacattatgaatggatttgttttaatggctcctcggcaaatacgaatatgtgatgtgacctgctgggtgctgggaaagaaagtgaggggctaaaatggaagaaagattagaaatagaagaccagtgaggaataagggcaattctgaggaacttgctctcaaagtaaaaccttataatagtagtaagtccctctgatggaactggccctgaagtcagaggtaagaaagaacacaatttcttctacatatggggacacaggaaaaaaggattgttttcaacctagaagatgattctgcttctattcaggtaattggcatgttggtctggatctaaaggtaaagaatcaacaaagaaaaatgggtaatgaaggattcgtaaatcagatggggaatcaggaggtaatatgttgaatggaaggaagactgggaaaagggaaagtgtaggaaagggattgaagcagaataaaaatgaactccaggggaggaggtcagttaaccaccaccagagtacccttagttcagaggttaagcttgtaccccttcttctcactggggggtaccccacaaggacaacactgtctccccaagcctggatatggcctgactgtcctccttggcatcatcctccaagggccacggccaatccatcacccatccaccagggggagcactcatgaacaactggcatctcccctagaaggaacagacctccagaatttggtcgggcaccctcatacctgtccatctcatcaacgtcatagacaaacagaagtaggtacaaaagaataaagccaacagagtctaacgctgcacatgccattgctctgtcaccacgtggttgctgtaaatccctctaagaattctgctggaatgtccacttgtaaaatcacagaggggtcaaactggcattccagacccagagaagccacagaattggtaaaaatgaagccaaagtaggttctttttttctcctcgagacaaatgcagtaagatcatctcttatttcatgccaaagtaaaaatggtcacagcgatagaaaaggactaatatctagaaaatagctaaataacaacctcaaatgcataagacacaaagcatctaagaaactaaaattaattaagacatttatataaagagcatttatttcctctttacctacataccagcttgattatctcatttagaaataaatgcagaggaggaagaatctgctcaatacaaacaggatgaaagaaaggatatttcaaacccctcaagtcagatagcagcccagggtgtttatcactggagaaaactattgcatatttctcagtatgaaatgggtgaatggatgcattacgtaattatattgtgctgagtcggtagaaacttcgtatctagcagacgtatttgaaaacagaacaggctgggcagggtggctcacacctgtaatcccagcactttgggaggtcaaggcagaaggatcacctgaggtcaggagttcgagactagccaggcccacgtggcgaaactccatctctactaaaaaatataaaaattagctgggcatggtgacagatgcctgtaatcccagctactagggaggctgaagcaggagaatcacttgaacccagcaggcagaggttgcaatgagctgaaactgtgccattgccctccagcttgggcaacaagagggcaactccacctcggaaaaaaaaaaaaaaaaaaaaggaaagggctccacaaccccacatgaccttgcgttctcaggggtggactctgcatggcaaaaacacaagctctgttcacattatttagcaagtgagagaggctgactcctcacatggaacaccacatcatatcactcctttacaaactctcattttagaaaagtaaccaacaaaagctgtatgttttagaggtttgggaattgtgtgggatttttttcagggggagcaggggaagactttatgggtggtcattataaaagtatagtcaatatagacagtttcctattaaaattacaggcagattttctctcccgattattcaagtgcattagcaaatgtaaaaaaaatctgaacttggatcagataagagcaatcagagtacggaatgcatctgctctttgccaaagccgtatttcattacttttcagaattagctggcaatgtctccacaatatttactgaagtgcaaaccaaatgttttcatctggacaaaaatcaaactgtggtatgttacaacaacaacagagatcattttaatccaaaagcttgctttctctaatttaggctgtggtttctataaaattggattcttctctatgaatcatgtacacagacaagccctcctgcccattatcttccctccctcgatcagttcttgatcttaagcagcgaaacatcgcttggctgtattttggaaagaccctagagggattccctgtgcactgtcatttagctgcagagtcaaattctattgcttgacccaattaccatggggctggcccactgagtttgtgtttcatcttcgggatacataaacagaatgaaaagtaatcaaccccgactatcaaattaagaaacaaaacttcaaagtgagctggcagggacttgggcaacggatagaagatgaaagaagtcacagaagaaagcagttgcacccaaataccctagtgcatcaatctacgtatgtatgtatcagcactgttcaaagcaccagagactcaaacagggcagctgtctacattcatctcacatgttcatgcatgcacaacatgtaaacacaaacttccctaaaagactttgggacaaatataacatgtccagtgccaatctctgcccattcctggtctgactttacaacttattagggaagaaattaaaacagaatttcccaattcgcattcatttgcctaccatcctaaaagtatttgccagatccagatgctccatgtgctattattatctgtaaggtgacttgcattcatgtcttaaataatttatctccattgtatcaagacaaaattactatcaattgccctaaaggaaaggtaatggttaaaattaaaatgaatgtaaaacgttcacttaatgtcctttctggtatgaagagggatttgtgtagcagagatagggaagcagccctcaatagcatgagcaaaacacaaagggaatccctattccttactgaatacggaggtgcctatccaatcatgctcatcttgggaatgtacttctttttaaataggtatttccaaaaaaaaaaaaagataccatcactgaagggactctacatgggatccaagactccaggatgaggccatggctctgggagatgcttacttgccatgagactcgaggttactcaactgtatacagagcataatgtcttcagtcgaaacatttttatggctccaaacataggcaaaagcaagctgagtgactcacagtaaggtgatattattatgctcataggtataaaatcatactgtcattctttccataggtgacagcatatcttctttcccaaataggaaagtaactagattggttggtgaccagaatctgggagacaggggatgaaaatgcaaaatgaactcaatggttagaataagctgaacctttggtctttgttaaggaacaaggagggatgacgcaatgacctcctagatgcatggccagtctttccttcagcaaccctccctcctcctcctggattacagctctcaagaactagtgcaaacaagcacccaggtgtgcctatctaatcccacaaataggaaattcccgacattagggtagtattctatctgcaagtgcaattaacatgtgggacttcacaaggagaatacaatggttatcataccaccttccctcccaatctcctattcccacgctaatctagcatctttgtcattgaaaactgtaacgttccccttacaacccttcctatattgttgtctgcactggcaatttaaaacacattcaaatacacacccagtcaaatgccacaaggtctatctatggttcgcttcatctcactgaatatagaaatcataccacatagcagcagccatgatggtgctcaagccatcacggtattatctcaagtggagaagaagaaaccagtaagaaagtgaacattctggctgggtgcagtggctcacgcctgtaatcccagcactttgggaggccaaggtgggcagataccctgaggtcaggagttcaagaccagtctggtcaacatggtgaaaccccgtctctactaaaaatacaaaaattagctgggtgtggtggggcacgtctgtattcccaactactcaggatgctgagacaggagaataccttgaacatgggaggcggaggttgcagtgagccgagatcacgccactgcactccagcctgggtgacacagggtgggagacttcgtctcaaaaaacaaaacaacaacaacaacaacaacaacaacaaaatgagcattctaacagccactacagacaacagtctttgtgcgaatcatgtgaggccttcctcagttcccaatggagaagctgaatactcaacttccctgcgggacacagacaccagggactttagtgctataaatgaaaccccttcagtcagcaaggtgcttggccaacaaaacagcactgccatacttaaagtcttatttccatgttctctaagtggatttcagaaagactcaaggactctctagaaagtaaggagaaggccagagatgactctgagaagtactactgaatctgtgccagtactcactggcagcaaaaaggaagcctgccttatcttcagggagggcacaacatggtcagaggccagctggcctgtagcagggagaatcctcacagcaaaatgacctacagtcttattaataacatctgatcaacgtcacagggccaataaaagtgatccatccttcccctcctcagacctcaaaaatttcagggtttcagatttcttcattattaactgataaactatcccaacaaatgaaacaggtaactgactctaggagaaaaccaagcatatgcagaacgttaaggccactgaaagcccctaggcagtgatgacaccgttctcaaacatacactttcactactgctgctctcaaaaactaagatgcaacaactcccagagaccctcaaaaaaagttgtgtaccactggagacagtgtgatttcctccccaaagagtttacataatgtaaagtattcccattttgctcaaggaagctcattattagcaccatagtgttccttgcaattgggggattacttaattgctttctggcaggttaatcccctttcattctgtgacctctaaatcaccccaggcttttgcatttgccctacttagaaatcctagtcctcaatactcaaggctaggaccacatcaaaatatgtgttccttgccaatgaggccagcaacgctctttagaaaaaacaccacaggttggctgtctcttctattacctgtggccgattcagctggtcttttagacagttccacctaaatccaaaatctaataatcttcctctccactacctctgcctcaattcactggaaaaaatggtaaataaatgtacagttggacctctgtatcagacacttctgcacccatggaatcaaccaactgtcgatcaaaaacattcaggtaaaaaaagggacggttgcatctctactgaacacatacagactctttttttccttgtaattattctctaaacaatattatctaacaaatttacacagcatttacattgtattaggtattataagtaatcaagagatgatttaaagtatacaggaggatgtgcatacatgcaaataccatgtgccatgttacataatggacttgagtatccatgaattttggtatcaaaaggaggtccataaatcagtcctctgagttatcaaaggatgcctatatgtggatgatcgcctcaggtatcaattctgggctatttcatacccattagctctgcaacaactatgtgctatagactctagaatatccatttcgcagatgaggaagctcaggctgagaaatatttaaatcatctgcccaagacatgccagccttctgccaatgcccctagaaagaactccctgcagcctcaatcgattttctgcagagctgccagtaacatcttcctaacctcataggtgtattatgatgtcacccctgacttgaagaacgccaagggatactccagtaactagcccagggcatgcagaatctgaggcttatcctaactttcttgctttaactccaggacctccaacatcaatccatgccttggcagttgcttctgcagaaccccttcccagcactatcctctttctgcaaagattcctaatgcactgtaacgcggagacccgcagcaaatgtcagcattcctttgcagccatcccagggcctctcccttcctgctttaatgggtacacacttctatcccagcattttcacgcatttattgttatatcctcaatttcacccaccaccaatactgctttcctgtgtctaatctgttttctaggtgtctagcatacaaaaagagtttaataaaggtttgctgaattaattagcaactgaatgacagctgatcactaaagattctgtaagacagaagaaacaaaaggcaggcagttccaaaacaagacagcattgcttcacaacggctgacagtaaggatatttacgaggaactccccataataacactctcttcactgtgccgagccgtgacgctgaactgtgatgcccacggtcataggaatgaactgtgtatgtaggtttgcatgcttcaggagtcccctttgggaatccccttgtttgcagtgccccgtaaagaggaaaatgtaaataagagaatcatttaacctgccagtgctctgctacattaagctctttttaatctgttaataatcatagtcagaacaaagaggagacgacagaactcattaagaataaccagagtggtgacagggaatacggcgatggtacgaatcactgcatgcagcaagcgcaaaaccctcttccccgcgtgtgccagtgaaagatactaattatgcctctggcaagagacatgtggaccccttcaaagcagctatttaaagataaatacactgcgggcaaatacctcgggccggctgcactattcatcccatcctcctttcctgtagaaattttaggtcacaatattaaataggaaatgaaagagccttgcagacttagctggtagtgtcttaaaacaaatttgttttagatttctaaagcttttaacctcagaatgactagctgggtgtttacatatctatactaatcccagtattaatagtatagggtttttcctccccatctcaaagatttctcactgtcattaacagataacaaacaaggtttaaagaactccactcgctgtctttcccttggcctcacgatttattctcttccaaatcccaaagaagtgccgagaatattaaaggtaataattgaggactggagaagggaaaaaaaaaaaaaaaaaagacctggatccttagcaacaaacatcacttccaggtgtttgatttgcttccttcattatttctgcagccagactttcttccctataaataatgagcatattaaagactgccttctttacccctcacagtgctcgctgtcacccaagggtgatgggctgactgagctctttatggtgaacactagaggcttggggatgtgacaagctatgtttgctttggaatcagcacgaaaaaagaacagaattaggatgcaggtgtaagaaggttaatcgcattcccaactgtcaactttgcctgaaagggcttcaacaaggtgaagatttaactaaggatatgcgtcattagcagtggatatcaaaaaggtggaaatctctctaaatgtgcatcaggaattagataaattatgagacattcaccaaatggaacataagctattaaaatgaaatgacaggcatttttgtgacagtgttaagtaggaaaatcagactgcaaaaacgaaagtataatgcaatatcatttcaggaaaaatatgtattatacatgcacacagaatgctcagtaaaatagtcacaaacaaggtaattaacagcggtcgtctctgggagatggtggagatgctattttgaatgcattcttttgcctacttctttacctttcttctgccaatattcccaagatgaacaggaactacttttatgattgtaaaaaaaaaaaaaaaaaaaagcttaacatcctgtttttcttaaattaaaatggaaataaaattattaaagtaccacaacaacagggatcactatgtaacctttgtacacactgaaatacaggttttaattagctcaagaaactacctatcttgatgctatctagatatcctagatagaaaagatgctatctaaggccaccaaatccatcagattttcagggtcatgaagctataataagcatcatctgtcatttggggtttgtagagtcagatcaggtaaacacacttatcctcccgggaaaaaaaaatggtattttaaagctaggatgactcatttttaatacctcagatctaaaaaaagtataaaagaaatagcaaaacagtacaatattgtatacgaacagaaaaacaaataacaaagcctatttttattgcctagctcatatatgaaattcatttccaaaggttcagagcatttttttaaatttgttttaaacatctcctaggctttaattatttaagccttttttgtatttgacatctaaaagaagtaaattttatctatgaaaagatgattctcttctgtctggaatcctgaaacttcaaagccaggtacttacttggtaatgttttctctagatggcatttatttgaacaataaataagcatgcctccgcaactaaaagactctccaggtttcccagaacctcagaaaatataatgttataagatagtgcacgcacaagtacatgtagcacaaacacacatattcctctctacacagaatcactgagacattccctgatgggtttctctccttctctacctttgagaactaaacacaacagtcacaattgcgccatagtaaagacctgcataactaaattccataatcaacagagcaatcttcagacatcctaatgaaacgggattggtggactggtggaggcagaaactattatttcattatttactaagcaaaatgccgacagcaattttagacatcaaaattcctttcccaaaagtagccaaactagttaagtcatagttactctttaaagaacctggcttcgccgggcatggtgactcatgcctgtaatcccagcactttgggaggccgaggcaggcagatcacctgaggtcaggagttcgagatcagcctaacatggtgaaaccccgtctctactaaaaatacaaaaattagccaggcgtagtggtgggcgcctgtaatcccagctactcgggaggctgaggcaggagaatcacttgaactcaggatgcagaggttgcagtgagccaagatcgcgctgttgcactccagcctgggcgacagagtgagactctgtctcaaaaaacacacctggctccaattacgtttaaaagccatgcatatttagaaaaggataccaaattatggttagataggaggaataagttctagtgttatatcccactgtaggatgcctacagttagcaacacccagaaggaggatgttgaatgttcccaacactaagaaattataaatgtttgagatgagatatgctgattaccctcatctgatcacttacatgtatcacaaaatcatcatgtgacccataaatatgtacaattattatttgtcatttaaaaaaaaaaattttaagccacgcaagaccaaagtcacaaattaagagtcccatatcaccattgttttttttttttttttgagacaaagtgccacttaattgccaaggcagcagtgctgaggcacaatcatgtctcactgcagcctcaaactccaggtgtcaaggattccaccgtgtcagcctccacagagatggactatagacggcacaaccaagcgcggctagatatacctgaatcacattgctgctgatccttcaaagattcctttagggcaaatacatccttctgagtacacatcccactcgttctccattcctgatcatcacaccacactctaccagcctcacagtctagtggccatgttcttctctctatatacagccaatccagcacaagattctgtcatatttagttctcacagcttcctttccatcttcatactcaacatgcaagatcaggagaatctttcagccaaaatctatgtaaaaactaaggcatgttggctcatgcctgtcatcccagcactttgggaggccaagatggcatgagaattgcatgagcccaggacttcaagaccagcctggggaacacagcaagactccttctctaccaaaaaaaaaaaaaaaaattgctgggtgtggttgcctgcgcctgtaggtctagctattggagaggttgaggcagaaggatggcttgagcccaggaggtcgaggctgcttagagccatgactgtgccactgcactccagaagtggacaacttcttattttgatatgagacaagaccctgtctccaaaaacaaacaaaaaagctaatggagataaactggtgggaaccccacctacctcgtatctccctgttttcaaggctcaacaaccgacaagggctacaaaatttctaacaaatacattaataactctcctttcttatgtgttaagaatcaccaagaactatcctataatgtcaaaatttcccccccaacaattcagtcccaaagccaattagtaaggcagggcaattgggcaaggagagggggtgaggagcaaccatatggggtgtcagggctgagtttcccatcgtgggggcagcagagaagcagagatgggaggtggattacactgaaaagacagagcaagtaagtatattaaggattacaggagccaagttcctcagggatgaatgcacatgaacctcccttagtgttaaattgaaattggaggtatggctgctaactcacggattttaatatacacagaacttcggatagacccttataaacatgcaacctcagtctactaagagcacctgggagaaatgacattcccatagttcccagcatccctagtgcccagatcttggctcctcaacagcacttatccctataagaaagcagtgctccttgaagacatggccaattccaggactgagggcgggaaagtacaccatgagcctggaacattttgttgtgccagaagcaaggctggaaggatgacagggacatgtcaaatggaataaaaagccagcctgatgaggatccacggatgaggcggtgatctgggacaatctgaacatcagaatacataataggagtaacagattataaccctttgaataaaataggaagcccatacgcatacaattatgataaagatgatgagaagtatgtactagtttcaaagaatatcctctcttaacacttatacactgcaaaggctgagacgggcaactttactcctaacaggcccaccacagtcgaatgatcagcatgaacacgagtgtggaaagggaaggactgaactgtgtatccccacagaggacccaacaacaaggaggaggaatcacttcccttgtggcattcctgccaagaacacaaaccagaatgtaatcatgaggaaacaccaggcacccaaattaagggacattctaaaaaataattgacctgtaattttcaagtgttgaggtcaaagacaaacaatgaggaactcttccagattaagcagactacagacaattaatggcatcgcctaattctgaactgggtccttttgctctaaacttggacattacaaagcaccttcagaacaaatgtgaaacagaggtttgaggactgcatgggggccacgtatcactgtgaacttcttaactttgacagttataggaaaatgtacttatttgaaggaaagacacactaatgtattgagtgagggatgatgggtggaaactttttaaggttaacttaaaatctgtctgtaataataaattatcaaaatatttatcaaataaaagtgactatgaacctcaaggttttcccacagatgtccaatagcaaaggccctctccttctgctcattttctctcaaataacctcacccaaggaactctctgcattcaggacttcctaaattttctatcattcctccagaaatgactccttattctctcaatcttctgtgttctttcctcacagctattagaaaacttagtaataaggaaactgcaacaaacactttcacaaataactctattcagcagatcccaaatccacctggcctccgttaactggtccgagttgaaacatggaccagtatttgcactgtcaattagactctgaaagtaccagtactgttttccttaacgtaatatagggctgagagaaccgtaagtccctcatcaccatggcttattgacaggccttaggaagcacaaagaaaggggccttcacagccccaaagtcctgcatcaaaaaaaaactgccttacaaaacaagtcagcaatgtgtgtgtgtcaaggtggtggtatggtgcagagaaatcaaattagaagtcaaagttagaaactgcataattgtgcattgagaagccaggaagtagggtgttaagagtcatattaaaaaggaaataaaacttaactgatggttcaaaagccacacccagcacacactctctcggtgggatttctcactttcaattccccctcaacccaggttggggacagaaaaatgaacatggcagagagtaaagctaaggttactccacgtagacctcaggcttacatgtagattccacgtagacctccgccgatggttgcaaagtcttacctcgaaggcagagaaaggtaagaaaatcttctgtcttaggcttccttttagagaggtctgatatctgagtagctggagggggtagcaatggctccactatctttactggagttgtgctgggactattcggctgagactgagcaaacttcctttgtgcttgcagcctgggcctgcaaaagcaaaagaaaattaaaaataaattaagcagagactggaggatataggcctacgtgcggcaataaaatcatgacacataaggggaaaaaagatcctatttcaagcaaactcttcctaattaaggttctatatctctcacactctcataaaccacaggcctactttcaagcgcaataaatttggttaaaggactatgttttgtacatggatataaaatgtgtgtcatggacatgtgtatacatgtgtgtagaaatacatgcctatgtacacactatgtttgcctgagtatttaaaaactacacacggtatctgacatcatcagcttaatggtgttcatttatttccactgacagtaaagaagaaaacactacattatcctgctgtatttatatacatcctatacgtccatctaacggggtcacaaatccatacccacatctcttctgtgtcattacatccaggtcacctttgcctatttagccatcagtgtccctgtcgccacttctaaattcggccacgaaaagttcactacaacaattcaagtttgtactacagaaaaaaaggtatgtctctagtctatctacgccccctccaatcccaaattctgggttaccctctgccaacaaggtcaaattgcaactatttggtagacattaaaacagaaaatagccctaatctactcttcaggcttctttcccattacaatcctatgctaactccctaacttaccatttgttaactacagagtacatttcaattcctttcacctgaatatcttacgtagaaattcctttctatcaaaacaaatcctaatagatcttggaacagtgttttgtttgtttctttgtttgtttgtttgagatggagtcttgctgtgttgccacctcagctcactgcaacctccacctcccaggttcaagcgattctcctacctcagcctcctgagtagctgggattacaggcgtgcaccaccacgcccagctaattttggtattttttgtagaggtgaggtttcactatgttggccaggctagtcttgaactcctgacctcaggtgatccacccgccttagcctccccagtcttgaccttccaaagtgttgggattacaggcgtgagccaccacacccagcccagtttgttcttttttaacacagtagccaataagaaatttccctttctctccaccaataaatacacgaacatatttttgctttacatacaatcaacttgatatgtatcgtcaattgcctaatagtccctcctcctctaatcgtaaaggtctccactcacgcaatagtgagcacttgcaaggatgagaaactgggccctactttaaactgttcacctagacctgctcagagaggtatttgaaaaacattctttgagggcaggaaaacaacaacaaaaagaaccaagaaacagccacacagtacagggattgaaatagacctcatcagaatcccaaacactacgtaggatggataatgcaatgccactcaagacaattaactaataaaactaaataagtgccgggcgcagtggttcatccctgtaatcctagcactttgggaggccgatgtgggtggatcatctgaggtcaggagttccagaccagcctggccaaggtggtgaaaccccgtctctactaaaaatacaaaaattagcctggtgtggtgacacgtgcctgtaatcccagctactcaggaggctgaggcaggagaatcgctggaacccgggaggtgaagattgcagtgagccaagatcacgccactgcactccagcctgggcaacaagagcgaaactccgtctcaaaaataataacgaataaaaaaaactaagtaagtaaaagagagcagatgtattcccttaaagacatggttgggagtggattatataaaatagtaagcatttatcttaaactgttgatgctcaaaatgctgtaacatttaaaaaaaaattatactatttaacaaattcctacaagaaaatacacaatgattgcctacttcatcaaaactaatacctttaaatttaacctcataaatcctccacactcccgaaatataaagtactacaatgttatgaggaatttccaatctcattttaaccttaaattcccttgtatgtcctaagcagtgtctactcttgtctcccctatgaccatcgaaaacaccaccgtctaataatattcctgatacaaactgacaatccaccaaaacggacaaagtgtgactccaactacttagtgggtaatctatagtccttaaaaaaaatctacaaacaatgtaggtcattcagagcactttttttttttatttttaacctttttactgaaactgggtctcactgcacccaggctggagtgcagtgacgctatcatagctcactacagcctcaaattcctgggctcaggagatcttcccacctcagccttgctaaatgctgggactactggtatgtgccaccacacccagctgtttttggcttgttgctgttgctgggtttttttttttgataaagacagggtctccccatgttgcccaggctggtcttgaactcctggcctcaagcctatctcctgccttggcctcccaaagtgttgggattacatgcatgagccatgatgcctgtcccaaaaagcactttagaacccaggaataactgatatgaaacagtcacattaacaaggcaacagcaggaagtgaatcaagtttaacagaaattccctagtgttattttttaaaaaataagggggagggtgggatcaggcaatgccactatctctatgtcatggggaacaaagagagcttttttgcaaccaactgcctgcctctatataagtcatgacagaccagaagcccagaggcaggatcttcacatgggacaatgaagtggggggcagttagggtgacggggatattccgacaatcacagagcttcatctatcacagatgaggagcagttttctgcttggttgtttttccccttttaaattttccatctgttacaaatgtctttttttttttaattacataaaaaaatagaacaagggggcaaaaagcaatttaaaaagacaaaacacaagcctaatttattgggactcaacagacacaaaatcattccatcaaactgcagaggtttctcaaggctggctctcaatttctgtatcaattcacaggcacctggtgatggccaggtctcgagcacacagtgtcagaggagggaaggctacagaacccttggtccacattccaaccagctgccaggtagactgacccaacacaactgccctgcttttcccatgaggctttccttcccaccaacctcccagactgttttaaaacaaaggaaatgttgtgccatatttagaaaaattgctggtttttaattctactgaaaagtatttttaattggcaattacataatatatacatcttcatttgaatggacgcaaatcgcactctgagtattgcaggaattttatagaaatattgcctgcatgttaacaggatgttaagggtttacagcttttttagaagtcagggaaaacaaaccctatacacgatgagaagattgtgcagcgacaatgagaaacaaacaagtaaacacagacgaagcacagacaacggagcgagacactgtgagatattttacaatttcaggacctcaaagataaactgctcctaccaatgctcaaataaaaggtgcttggtgcctaatgactttcccagtgaggctatgaaaaataaggcaataacacattaaaaagtggcagtaaaataaattaccccttagaggaagaagccaagctcccaagtgattaaacatttgtgagacccagatgaaaccaggaactaaagaacaagacaaaccaatatcttttataaagaggccagaagaacctgtattgtctaaaaagggtaggtctgcagtgtggcttttcaacctgcagagtcccgtggggattaagagccccatacaaccaaagagcttgaatggcacagccaaatcctgagtaagccctctaaacagtacagacaggcttcagggacaggagtttccttctagaatgctggatataggaaaatggaagaaagtgatttggatgtgctgaaaactcacaatatttgcacctagagatgctaatggcaggagcagcagaagcctggggtaaaggaggaggtcacctggcaagcacgaggagaaaggtgaggctgcacccagcctgtggggcctcagccctccaggggaggcggcatacccgcccaccacaccatttatttcctcactccctgccatcagctgactggcattttcaacagaatactacctgccattccattattacagcaaaaatgaaaagaactgggataaaagaggttcagaatcactgtggggttggggtggagagagcacggggttcctggggttgaagaggtaaaaacataaatgtttgagagaaaaataaaatacgtgccctcccaagccttgggccttgcatgtagtcaggatgggccttcctgccctgggtaacacagccccagagaaggtgtgtgtccttcacacgcaccacggaagtagcaatcatggtgtaatttactttcatgtgttttttttattaattcttcaaggagatcccttacagaagacaccttcattccaggaactccacatgtaccctttatgtcaatgaaaccaattaaatcaagccctccagcaagccaaggtgaaaagatcaaatcaagtaaatgtaaaccagcagaggaagaagtatgttgatatattcagaggataacattttatttacaatatggtacaacatagggttggcgcagtgggggtgagggaatagatgtttcagatcagatcatcactggggcgtgtatgtgaattaaaagactacaaagttcaaataagttcagaagaagacggatacgagctgctgtttggggaaataagaaaggctggtcactttgttatgttcaaggatcttaataagatccccttcactgtacacatgagtaactaggagaagggtgagacccaccctgggtcacatagcttggatggcaaaacaaataggagcagcagacgaacctatgggtccctatgtgagagctgtctctgtcatgccacgccacctccacgtggcaggttaggcaaagccttgtgagcacagccttctggtgtgcactccctcactaaaacctgccaggccaaggagctccatggtccctcattcataaccaaaatcagccccgctgagtgaacaccatttaagctgtctcaaaataaaaggtgttaaaatgaatgaccatttacggatttgatcccatagagtatatgggagtgtatgggagtgtatgggatcccatagagtgtattttatgtggcaacaaatggcctaagacaaaggtagggattgcaggaatggtccaaggggatcttgcttactccaaacagctccttccatctggaatactctttctcttgccatgcctggcggcttctcatcctctaggccagataagagaagcaaacaatccaggcctgttactctgtaatagaggccacttcccgcacagaagcctctgcacagaagtcacctcctcggagagaggtgaccatcctaaagcagtacctcatgcataaccagccacctaaccccaaagccattgctctgcccttctgttggtatacacaagactctctactgcagtctcctctttctggtccacttctatatacaggccttaccaagtctagaggacaaggcctccatagatgctggaaaggaggaggggaggaacactatactgctatagttgctgagaattatacaacccatcactcatgatttaggaatcacagaatacagtacacacatggtatctgagcagaggggcagactgaatggcaactcagaggaaaagggagattggtgcatgtttgtgaaacagatccaatagcaacaggagaggaggagccttggtattgttgtgctccaggtaaagttagtagccatcccagcagaagtctacctgaaggtagacaggaattcagtttcgttaagaataaaactgtgtcttgaatatagaggctgatatttgaaaacgaaaacaaaaaaataccaactaggcaccagcctacatggccctcccttaagaatttaccatgccacttgcccattctcaccatcatctcgcagaagccaaataaggtctgcctccggctgacagtcaccctgtggcacaaggcgcttttctaacccttggcatttcattgtattccacatggcctcacacagcacaactgttcccaggccacagtcgctgggcccaagaggcggctcctgacacacctcatgcaacaagaccaccacatacatcagagagtatttgtacttcctgatcaagctgcatgagctcgaagggggaaagatccctattgtcctttccccatccatccactccctaagctacatggaaggtgactttctttttctgctaagcctcccacagccacctctcacttgctgttaggtatcaccgcttaaaaatttaccaaaatcaatcttcattgtttgttgttaaaataaaatatatagcacctttatgagaacgaaggagcacagcaagatacacactaacattatttggaaagttaaccaataaatcacgagaccatgcttgtaaagaaaccccagggatgaactaacagtcctatgccaaatacttttttcttttgtaataccctccctgtgccccttcctccccaaatgattgatttagaagcttcctgggcatcctgccattagaagcttcacacaagggtggcactgtttctccaggtttcctctggggtcatcaacagtgtagagttaaccagcttattgctatctgtgcactcaatctctagggtagccctgactgcggcacaacagcaatttccaggttaattaaatcctatttctgtccaggatttctgatagcctgcaaacccaagaagggcatggcgtgacacacaaatcagctggatcaagcaggagcaagggggaccaggcggcttaaagtgaatgcacagctgttcccttgctgagggaagtacatgccaaaacatcattttattaactcaattttccaatattaaaaacgtaagctggtaaatccaattatttagattacatcccaattctaaacaaagggcaaggaaagggtgggagggagggtctgttcattcaaaaaaaaaaaaaaaaaaaaaatcagacagttcgtgtctggcaaatgcaaaatgaccggcatggctgcgctctttgtgccggtgtgggagctggccctgaagctttgccaacttgctgaaaggcctattcaaaaaaaaaaaaaatttcctgtgtttccatccccaaaataattacccactccattcgccccccagacacacacactacaaacctggcagccactcaaagaaacaagagtgtgcccgtgtgtgtgcgcactggaggttgtggggggtcgggcaagggataccctctacccagggcaagctgcccaccaaattcaaatgcaagtgcggttgcgagcaaaccacacagaatggttgtaaacatcctgaacagtaaagagaaaataaacacatcctcaagtgaacccagaggctagcagagaccaattcatagcaaactctgtaatgagaggcactagcatagaccatatccttctaagcgcaaggtccacccagttcccacagttttaaacggtcagggtttgatttaccagaatgggagggcatcacacaatgacaaaacgggaggtcagctggctctgtaagcagagttatcctacgcagaatgcctgctttatggtacttctggagatggagccctagtggtccacagcctcatttcttgctttacacataaactgatggaacactttgtttatgcaaaaaaccgcaggatattaaatatttgcagcacttgtcttaattaagttacataggaagctatttagaataaacatttgccatagccggaatttgcgtaaagaaatcttttgttagttgaattcccctcaagatgaaacattatgatgttttgcttggtcagtggtacaagcaaaagagtagtggtgtcacaaaacctgagtttagttcacctaacttgtcacctagggcaagctgggtctttttttcttaggtggtttttttaaggactattttaaaaagggaagctaaggctctctctagctccaagcttctgtgatctttgacctcctcttaaaaaaacaagtggtacctgaatgtagtaatttctgtaataaatcttttggatctatcatttcgtaagagtagatgaaaagtcctgattattttggagaagtaaaatctaaatctccaaactgtcagtattgctaaagatttctagcgccaactttctaactgccagtaaaacagcaaaatatactgacttttaaagtgctagtactaccacctagcactttagaaggtggaggggaaggtgaaaaattcattcatatatattttagaaagatatcacaattccaaaaatccactcccctactcccttaaagattaaatagtagcaatacaatctgtaatctgcatttccttccacttagcccttccaatgaggagtaactcatttaggcaacacgttaacttacttcagaactgtgagtcacccttaggaacgctgacataactacttaaaaatatattcatcagctctatccatgaagaagccagcccaaggacaaggcaagccttgcaaatccaaacatcaccaccacatcaggaagacaccattcttgctcgcagacacttcactcccttggaatactaaagtggaaaacaggcatcagagagaaaggtgaatcttttttttttttaattccagggaaggattaggggggtaggaaagaggaggaaaaaaattaaaaaatcgaagataatagcactaaatatctacaagatatgaactttttcccaaataaaacatgacttggtgcatataaatctcaggtagctggtgacatcctgcacaaacagtatgaaaagtaatatgcagtacagttttttattcaattaataaaattattcaattatgtttcttgaaatcttctatggcatcctgaaatgtcagagaaccaagactgcctgaaaatcatgactgtcatgatcaaggaaacatctgacattgacttcttttgtgttctagaaagcaaccgtgtcaaatttgagagggatcatcattaatcaacaattaaagtggcaacaaagcccttttgttctgtcagtcacaaatgacacagttatagtttaccacctatggaaggctgtctgcgccgccatccccacacggcataaccccgttgttatgagggatacaactccaagcccaggagggaagagccacaaatactcttctcgtcaaagactgctggtctcaggacagtctcaagcaaaaagcagatagatcttaaggcagaagggactacataaagacagtaagagtcagagtaacacatgcaagtagctacagaatccagccaggatctggccaaaataatttctaataggctgttgtagttacaaggagtgaacaaattatctaagtacattcagttttaaaagcctagaagagcgagttaaaatgttaatttgcctttctactatctctcgatgggattccctatttagtttttaaaatatcatttcaacaaaaaccctagcagtctctcaattttagattactcaacacccaactgcaaattgccagaactctcctggcaatgggcatgtttggaaaggcaaagggaatgaccctgtgaggcgagaatcctgttttacttccttttttttttttcaaaatgcaagagaaatataagaagaaattgtattctacaatgctatacagcttattaaaaaataaaaatccaggccaggcgtgggggatcacctgaggtcaggagtttgagaccagcctgactaacatggtctctactaaaaatataaaaattagctgggcgtggtagcaggcgcctgtaatcccagatactcaggaggctgaggcaggagaatcacttgaacccaggaggtggaggttgcagtgagccgagaccgtgccattgcactccaggctgggcaacaagagcaaaactccatctcaaaaataaaataaaataaaataaaaataaataaataaagaaaatccagtggaatgcttctaagatagctgcagaaacttcccaccagaaatatcataccagatggagttgtgcggtaggtgaggtcctaaccatccattcagcacacgacagaccaaagcacaaaggcggcactcagagtgtcctctaagtcccagaaggaccagagtgggctctggcatcttacatgtcctccctctcatgcagtaagttcactaacagaaattttcttcatttaaagggtaacaaatagaaaagggatcccaggcaatttccccacccactgcaaatcttatgaagtagccagcatgcaccaatagatggcaatagcgagtctttacactccagctgtgggatcacccctaaggggaaaaaaaggaatgctaaattatgacaagcactagtattagccaatttttaggacctgcactaaaatctggtgccagttaagaacccagccactatttacagaaagtaggtctatcaacgctattagtaataccatctcacccctccaactcattacaccccaaagttcttgtatggaaaacatctaggaatatacaatccagctattttagatcccaagaaacatggctagagataaaacacacagcatctagccttttttggtgagtatcagaaaacctacattttctgattatcacattttctgagtatcagaaaacccacaacatctagccttttttgataagtatcagaaaacccacattttggggctctgacagaaatttatttagttgcctggaccttaatcatttgtgattttcaaagtatggggcattacttaaactatcaccaacaaaaatgcggagtgaagtctgctctgtaagaaaaggattcactataactgacacattgtctctgacaacatttgttaaaaatgcctaagataaggaaacacaatcataatttaaaaaatctgctaatagctaatgaactttaggaaaactaattctcctccaccttctgactgtttgagctctctgatgctgaaacaacggcacattctcccacttaaaaaccggagctattacagacacagtgtctgagcatctatgtcactggctgtagtaacagttctagaagacacattagtggaataaaaatttaaatacaacccaaagaaactgtgccaatggaaagtgggcaacagggcaaggtgagcaaatcaacttcctttctaacaatacccagaatatcccttaagcagccttaaatttttcccaacattcaacactgcacatggtaccatatttcaggccacaaaacagaaaccaaatggcatcactgaatcaaaccaaagggagggacctgaggggctgggaggcaggatgcaaaggggtcagcccaaaccttccaactcacaatattctacctcgattacaatcttaataaccattccatgacctcagacacctcgcctcagtacaacatgaaagtcctcccagtttttatcagccaaggaccagtccgctgttgcaagctgtgaatccacctgatgtcaagaatgtgcactaaattgaaagaggtcacatatgtagacagcggcagtggacaacagatgagcagtgagtatctgcaggacatacatgttcatctaattgcgtacggcttaaatgaaccctcaaagggtcggacgagaatatcttctgactacatctcaagtcaaaacgtttccaagaaggtaaagtcattctctctgattcacaaggggtcttgatgtcaagtatgttatctgtgtttcaggcacggaaccaacaacactctgctaaaggtacagcattgctggtttaacacatgtgcctcagagttcctttccagagacaacatgcttgcatttgctgtgacattataaaagtactctatgggtttttaaggctttgagccaagccagtagcagaaactcccaggggtgagactgggaagaatgaggaaatcaaaacaagcccttctcctcatccaatgaagctggcttgttacccctcttctttagcattttaactccatgacaatttctgatccccactcagtttccggaaacatcctgagaaaagaagtccaatctcttaaacaggactcaagataaaaacacccaagctgtgtgtaattctgaagggctaaaagacaaagacttcctgttcaattaagtccttcattaatccctcctgcttaagcccattttccttgtctgtagacaggaaatgataaagccacaaggtcagcctccttcagtgcagcttaaaccctccaaagaaggctgcagccacatatccatcgtaggttcctcacaaagcctcactatctgttcattttttctggatggcattacaaaacagagggaagggtgatcaaaagtataaccaggagtgaaagaaacgggagaataaattgcacgacatcctaataaaacataacagcaggggtgcaagtacaggaggaggatagagatccatgcaacaggcttataaacctccaacaatgaaagcagccaatgataagatttttcagctaaaaacttcttaaatgagcaatgtccaaaatcttatcttttaccccaacctcaaacctagcttcactgagtcctcttgcaccaggagtaattaatggttgtgatgcttcctatgagaggcactgtagctgggtttgcctcattctcccctgttccactgcctgaaccagaaaaagcaccccccacacctttttttttttttttttgagacagagtcttgctctgtcacccaggctggagtgcagtggcgtgatctcagctcactaaaacctcccccttccgggttgaagcgattctcttgcctcagcctcctgagtagctggaattacaggtacccaacaccatgcctggctaatttttctatttttactagaggcagggtttcaccatgttacccaggctggtggtctcttactcctgacctcaggcaatccgcctgctttggcctcccaaagtgctgggattacaggtgtgagccaccgagcatggccacagtaagggatttcaatggagcagatagaaggatactgtggagggaaactgcttcctagctcttttcaagctatgctgcccccaccacaggaaggcaagccaccattgaagagaaaggataacatttgcctaaaggatctttaaagcgggggctgccaggaggaaccacaataacaaagaagttggaattgtcagaaaaatactcacattttgtccacattggtcagaaacaatgacgtgcagaggaatcatggaaatgaactacatccttctacgctctgcaattcacagatgaaaaaagctacgtacgtacatctccctcactgctgacttcagcagaatgttatgccagccaactgggcaaatgcagaatcatgttcataaagatgtgggtgacaggcactgggaggggggatgcataactaccctctttataatgcaactttccgattccgccagcctcaacatgccctaatggtctccctttgatcaaagaggcatccatctttaactgtgtcaatccactgccaaactccacactcccagccatatatcagtcctgggaagggttgctgaggcttctcctccagcaatttgtaaatgagaacatttccagctggatacttcaagtttcctccccatcccaccaccccacaacccatttccaaaataccatcaaaaagcagccatagtaacttcatacccagaacaggccccaagacattaaacctgtgtgggtttggaaaacaatactaacagacactgacaaaaatattctatcttctatctattctgctaagggcccacttacctttccaaaaattcacttgttcttcttaagtggcctttctccaccctcttctaagaatttatttgtcctcccagaatcgcccttttgccccccacatcccattaggatggtaaattctttctttttttttttgagacagagtctcactctgttgccaggctggagtccagtggcgtgatctcagctcactgcaacctccgcctcccgggttcaagcgattctaggatggtaaattctaacctcctcttagagtcacatttctttgtgaactcaactaaatctgttttttttttccctgttgctaatctgtctttcatccatttaattagcaggctccccaaaactgaacttaagagggtagagaaaaagttcctctttttaaaatacgtttcttctatttttttatgtcatacaactttaaaagcagagaatgttacacaaactagcactgcagatagacaaccctagtaactaactaggttaagggaggacttccacaatgtaagcgtaaaggacagtgcataaggagctgaggccaagggttcatggtgtgattcagctggacataaaaggggacagaccttagggaatggataatgaaggagacacagtttctgcctttcaggtctgaacaggaagccttaggtttcatgaagtgcgacataatccagtcacagcctcacaacataaagtatgacctagactacaccatggagtcagtggagactgccattcccaaccagtccctgaaacaacctccctctgggacagaaattggcttgggaactcaatcattcaccaaaagggacctttccaggaagaaaagatgaccacacacccctgtgcttccaggtagaatctatgctgaagctgaacagtaaaaccgtaaaatcacacggctgaaggacagggtggcctgcagtcgggctctaagaaggacctggatatgctgggagggttccatttagagctccagaagtgcaagacctatgtgaccaggagagcactcaattgctctctcagggaagcacagtccacttgaacctcattctcccctgaactgaactcattataactgaataggaaaacacagaatataaacattatgggggaaaaaaaaaatcacaagaaaagccttccaagcaggagtccacaccactagaaacagaaaagattgctgggatttttctaatcatgcttctcaaacagggcatcgcaggtggtaggcaacaagtgatacaggagtgctgggaatagaagagcatggtccctttaaatgatagggaaggtggggagggaaaagctgggtagaggaagggcgtggcccctggctagggctctactcccaagacctaagtgaggaaggcacttctgccttcttgcccaaatgttgcattttccaagaccaccctgatctgccacgcccccatcctgggcctatgaaaacctataaaaacccaagaccctagcaagacatagacacaagctgctggacgtcctgaggaacacatcagcggaagacgacacaagcggctggttgtggagagcacggccgcagaagagcactggcaggccagtaagccatcgaccagcgtgcagcccgcctccaggggaaaaccatctcccttctggctctcccatctgctgagaggtacttctatgcaataaaaccttgcgatcattctccaagcccacgtgtgatccgattcttctgatacaccaagggtaggatcatgggttacagaaatccctctgtcctcaaggaagggagtctaattgagctaacacaagccgcctatagacagcaaactaaaggagcaccctgtaacacatgcacactgggacttcagctgtaaacattcacccctagagactgctgtggggttgcagccctacaacctgcccgtctgtatgctcccctagaggtatgagcagcggggcactgaagaagtgagccactcctccatcgcacgccctgagagggggacaagaaaaccttccccatttcaatagaaaccataaaatgcagcaaagcttttctgtgttttctgctagctttgggattggtttgctctgtactcctgaagttcaaagtttaaaaaaaaaaaaaatttggaattcatcctcaaggcactgaaactccaatgtgccaaacagcttatactattaatctactcgatttcaaattagtaaaatgtatttatttaaaattaaaaaaataaaatgtagcaaagcatggcatcatgagtcatttccaggaatacagcaggccaagatattcaagcaagtcattaaagccatcaatgaggtaataaacaaacaagaaattactgatggaaattctaagaacaaaagctagaacccagacctacccaaggagaaatgaccccacttttgtgcttctgacacaaacaaacctgaacttgatttccctagcactggcactgggaggaaggtggcatcctaccaccctccaagccctaaaatggggctctaacaggagacaactttcttacattcagctaggattcccaaaggctggatatctttcctgagaagttgtaaaacttaagcggccctcacgaggatttggaatataaaaatcatctctcaagccctgaatttagtttaaataatgttggactgatgataccctaaggtatgtagcaaaaacatacatgaaccctctgtaagaagagttttttcatctcaggcctcaatgaattccccctcaaacaacttttcacattcaggggaaataaagcaccatgaggaaaacccagcagatgtccaactgggaaaatgtcagtcagtaatttgaatcatcagactatgttaaaacaaataaaagccaagtttgaaaaacaggaaactaacacctgaaacagtgaacactgaaactaccactgaacaaacattgaaactaacatttgagtgtaacctaacatttgaaaagaaccaaacagagcttctagaaatcaaaaataaactagccagaattaaggctctcacttggcagtaacaaaccatttttctattgaaggaaacccaaacctacttgagaagtagaaagcaaaaatttcatgagttatatagactgcaaaacttcaaagtcctcttccagcagaggttaaggcccaagatacggaaagctgagaaacactgtcctatagatgaaaatcttatctccttctgatagatgaggaaacagcagatcaagaagggtatttagtgacttgagtaggattaggcaactattaaatactgctggagaatacacaataacattctatcaaaatacttgaattaacactccatggaattcacataatgggattctgagactcacacttggataaatgaatgggttcatttcctgttgtgcccaggggtgtgaagagcctctgttgtcatgacaatgaaaaaccaatgcattctcttccacatttcacagtggttaaaataaacaaagatgacagctgaccctatttgcccttctaagaattttctgaaaatctctctccccatcagctcctctagggaactggctcctcgtaatctatctatgtgcaacactctctgaaagataccaccaccctaaacaaccccacaggctaaaaatacaacaaattccattttaaaagataagtcactgattgaggagtatatggaattgtccatcacagaagcatgaattctgtgcatcaagggacagctacagtattatttaatgtcatctctcattctctgatctacaacaaaacttcgtttaaaaaataaaaataaaaaaaaaaactgttaggaacacagtgaagggtggagacagacttacggaggtacctgtgttttacgggcagattcccccactgggtataaactgtctcatgccaagctgaaacatgtgaaaccagggaaagtaaagtacactggcacatacatattctcaaccctattctactcctgacacacacacacacacacacacacacacacacacacacacacacacacaccctggagagtgagggctactggaaaaactcttagggcctaaaagaatttaaaaaacaggggtatgatggatattgcattattgtcagccacagtatcatccattaatgctaattataagagaaaagaactatcagggagaaagcactgtcaaattttccccccatatccccaaaagaatggagaaaaacatccccagtcctgtatgatgcaattgatgtgggtgggcagtagtgggtgcatcgacctggccaagggaagcaccatgtattgcaacccacaggaagctgggaatcatcttatgaatataaaattaaagccagcatatgaccgcctaatacaaaggaaatccaagattaaatcacattgtttgctctaataagttgcttacatcaggaaaagactttcacttggatgacatgcccttaggtaggatgcacgccacctaagcgactgcctaaactgaaattatacacacacacacacacacacacacacacacacacacacacagagagacatgggggttggggaggaggcatgcagccaacaactagactataaataatttcaaataaaccgcaagggaaggaaagacattattacttttctttctctgcacaaggcagatgaacaagctgaggaaggaaacatttggggacacacaaaggaaaaggtccctataaggaaatggggctacctggccctaaaaattcttaaccacagacataatcactgttcacttacccagcaactatatatagaatgggtgcttattatttaagggtaataatataatacgtgctttaaatcacatagagccctcggagtggtgcttatcaaagtgtgattcttcaaccagcaacaaaagaatcacttgggagcatactagaaatgcaaattctcaggcaccacctcagacttaactgaatcaaaaaccctcagggcaggacctagccagtctgtgttttaaccagtcctccagatgattctgatgcacgcttacatgtgagaaatactgggttatagccaatgctataaggtgtaatggttgcatttatcagacaaggaaacagagaggctcagacacttttaagtagcttttaacagcttagatacaaaccaaacatctaactttattcaaaaacctgtgcttctgcagcaggagaacagggtctggagggaaggagcctaaggacttcctagaactaaatcaaacggaaaaactgccaaccttctagcccaagtaaataactttgtaacattccaaactttccagctatggcaggaaacttcacttcatcctcttcattcacatggggcatacaccaagtaaccaatgggaaacctctagagggtatttgaaccccagaaaattctgcaaccagtgctactgagacactggcttcgagcccactcccagtctgtggagcgtacttttcttgttgttgttgttgttgttgttgttgttgtttttgaaggtgagagtagctggaggatgacagagtcccaagtctgcccaggctgaggtgcagtggcgcaatctcagctcactgccacctctgcctcttaagttgaagtgatgcctcagcctcagcctaccgagtagctgggattataggcgtgagccaccatgcctgactaattttgtatttttagtagagacagggtttcaccatgttggccaagctggtcttgaatccctgacctcaagagatccacccgccttagcctcccaaagtgctgggattgcaaacgggagccaccacacccggcctgtagagtgtactttcgtttcaataaatctgtgttttttttttttcattgctttgtgtgttttgtccaattctttgttcaaaacgccaagaacctggacaccctccaccggtaacacactggtaccagctgaactgtgggtctcagtggcttagcaaaagtgcaggagcactactgagcacagtgagcctgtgtacctaaccaggcattcctgagaacaggcttcctactggatttatttcacaagagataagagtcctttccagtggcatacctttagtgacttggcttaagaggatttcaacagaaaccacaaaacagactgcttcacagctctgattcaatgtccctgaataaagggacaacactggagacagaacctctctggaaaaaaatctatggggtcattatccaaactgccatctgtaaatttcttacagtgcttaaattgcttcattgaaagggaaaaagataagagtcttcaacactttctttagaaacttaatttcaattaactaattgcaatttaaaattatatcctggtcttctgaggcttgaaccaagaaatgtgaataatatgtaaagagcttgtttacactaaaagtagtggaggcagtggtaacagcaacacagaaggcacaagccgtcactgtcttcaaggtgtttgtcagaattattcctcatgaccttcagaagggtaaagctgaaggagccataccctcctctccttggcctcaaacaattcccaaaacccaaacagcaggaaggcatcgtttatgagacatacggatcgcagctgatggaaaacatcagcgtgcatttgggttcctaaatcatttcaaaacattaatcaggaagactcacagcacccagtcctatctaagccatagattcctcatttagggaatgggatgatctcacattcacatgatctgtaagggctctatttatcccagcacagttcaattaggctgaattgcaggaggcataagaaatgataatcaggagagaaattatggcaaaggcagttcaactccctacaaaggggaaaaactacaagctccagaaaggccaagtgccagtccacattacacaatggtatttgccggaacaacaagcagattacagccctgcacggtaccaatagtctacaggctgtcacagtgaatgcaaacatatttcttgggggctgagtaacaggctgaacaaatttgtaactatgttccagaaaaagaatggctctgaaaacaacatatatttagaaactgctagaatcccatcctacacagttccaagttgacagaataataaagtaccccaagactggtctggatcatgtgcagttactcaaagcagcccctacagaccattcattcccccaagagttagcagaagcttaagtgggcttggactggaaagcatgccccacaagtcccacaacccccaggtaagtaggcactgacaaaagcgatttcatcaccagattatcaataagcccttcacagatggacatctcactacacccgacccaatgcttgcttagtgcactttttaaatcatattagaaaacaatttacttaattcaataaagcacctggcctattatactgttatatactcaacagaacagtatttcatataagagaagcaacatctcaaaaggcctcatgtatttcaacatataattggcaaccacatataaacagcaggaaaataactcagtatcaagcatggttcttgttttctgtttaaatgttttccttcttcccacattttgtatatagtaaacgaaatgaattaacattgaggtcaattgtacatacttgaaatattctataaagtggtcatacatggtattttaatgtcacagaaattgtcttgataactaaactccaggaagataaagaagcaaaagtacatcttgtacctaaggaaaaaacaaaatcttagcaagaacgtcagatatatttaatggcatccttataagacattattttattatcatggacatagatgcagaggttaaatgtttttatatttgaaagagtccagaaagctggagttaaccctaagttggcaccaagggaagaaccagagaatcttcatgcaagaagatggaattttgccttctcttggcatgactaattagagagggctgctagcaattcagcaatattataatgacgtctgaggactcacaagcctgctgtgaggctagaaatacacacttccttattactaatcagatgtaccaaggagtaaaatttacacggtacattttggcttccctgtggtcagatgtggagtttctgtacccagggaaaagaatgtagaaacgtgtgtgtacatttctctctctcgcagggccggagacaaaacggtatgtatcactaccaaaaacgtgtactcggttctttcctaacacttcaaaaaaacaaatccaatgggtttttacttcagacacacacacgtgtgcatacaccccctccaagatgatagtgtgcaaaagaccagaacaattctaaataggagtatttgcctctgaaatgtgatgacccctttagaaatgtttccttttcagtggagtgcggtggctcaggtctgtaatctcagcactttgggaggctgaagtgcaaagatcaattgaggccaccaggagttcgcaaccagcccaggcaacacactgagacccaacctctacaaaatatgaaaatgtatgccaggcatggtggcatgtgcctgtggtcccagatactcaggaggctgaggcgagatgactgcttgagcccaggaatccaaggttgtagttagcctatgatgacaccattgcattccagcctgggtgacagagtgagaccacaactacctcaaaaaaaaaaaagaacaagaaaaagattccttttcctaatagttggtttagctactcttagaatttgtttacacactcaaaaacatgcaaattgttattccacagcagatactctgccaccattggggatacaaagataaacaaggacccatccctactcaagtggacatagcctagaaagcaaagactacctattcctcgccccacccaaacacaggcaagacaatcacatatggatgatgttgctttcaaccaattctgtgaatagctttaagtatgaggatggagctatcaagacaattaatgaggactatactctagaagttttttttttttttggggggggggtttgttttttttttgttgtttttttgagacagagtctcgctgtgtcccccaggttggagtgcagtggtgctatctcaactcactgcggcctctacctcccgggttccagcgattctcctgcctcagcttcccaggtagctgggattacacgtgtgtgccaccaggcccagctaatttttgtattttaagtacagacaaggtttcaccatgttggccaggctggtctcgaactcttgacctcaggtgattcgccagtcttggcctctcaaagtgctaggattacaggcattagccaccatgcctggcactagaagattctatcattgcatgagttcatgtcctttgtagggacatggatgaagctggaaaccattattctcagcaaactaccgcaaggacaaaaaaccaaatatggcatgttctcactcataagtgggaattgaacaatgagaacacttggacacaggaagggcaacatcacacaccagggcctgttgtggggtggcgggagggtggagggatagcattaggagacatacctaatgctaaatgatgagttaatgggtgcagcacaccaacatggcacatgtatacattacgtaacaaacctgcacattgtgcacatgtaccctagaacttaaagtataacaaaaatatatatctaacaaaaaaagaagattctatcattgcaaattaaagccattgagcctaaaggaaaaaatattcttgcatgatatttaccttattgtgtagaaaaaaacccacttaccataaaaacccctccttaaaatttccaaaagcagaaatgaacccaattttcttctaaaacaagtcactttggttgctgcctttcatcacccgccagactcccatcttacaataaaataggagggaggcagtgagggaacaggaagtatacggcgacagtagtaagaagaaacattcaattctcatcttagttaaagcactgtgcactacttgcaattgcactaggcagtcaagtgaggtattaacatcaagcagcactctgcattaaaaaaaaaaaaggtatgtctaacaaccccatataagcactcacatgtgaaccacaagtgacattaatggctgtcacctccttcacaaaccaggtgactccaagccctcacaattccagcatctagtgcctttcacgtaagatgccaggaaccagtgtctacacattcacactaaggaagattcaggaactgatcaaatgttcccaggagggtcagaaactgctgaaaaagatcagggtggtgtttagacttgtcctttgggggtgtgaaaaggcaaggagggcaaagggatgagacaaaaatgttactgtttaaaagcctagcaagagcttagaggaggaaggaaagaaacttgtatccagcagtttccatggcaaccacaaagcatactagaccataatttacatggggggtggaagtgatatccctgcaatctgatctccgaggtaacagaaaaaggaaatggccactgcagtaataaaaatgaagttccagccttttttgttttctagaaaataaacaaatgcggaagaagctagtatgtttgccaggagcctgaagcaaataatgggggtgaatatgaagtcccaacaagtgttcgccaacatctaaacctgcagaggatgcaaatattctgcggcaggtccaggctttgcgattccttccatcacactacaactcacatgctctgaactcttaggacagagtgtggtgcaggtttatgcagaagaattgagtatctaataagacctctctagagacagacccaagtctagcaggaacaggaacttgttaaagaaagaagacccaggtttcaaactcataaaacacaatttcaggaagataagcataaatggcaaggttaaaaataaattgcacacagccacaaagggttgccagacacagccctcctttacattcctgcaaagtgctactccaaatatatcaaggtgctgatgtaccccccattactcaggccagttatgtaattctttaacaaacacatacacttaaacaatgtaaatgtatactataaataagccttttgatcaaaaccataaaatggcactgatggctttcaaatggtaaaatctcctgacctccttgtaattatccaagaatctattaggcttaagtcacctcatcctctgggggttggaaaaacagcaagcaagcaagattggggtttgtttttcatttactaaggtgaagacaggaaaccctcttggagctcttccactccctactataactgaaggaagctagtgctgtcagtccacatccattcaacaaatattgattcagtgcctctgagcacatcttggcttagactgatttgggagccaacacttaagcatagtaacctcctacatagtgtggagacaggttatttcatttaattctacaaactacctgggttcttggtcatttccagtctgcctagctgggcctgtccaatgtgcagcctgcccaacatccacgtgcgtccttttgaatatcaactaaccatcttgcctccagctcaccatcttggtaaagaaaagtttataattcaatcctgccttctctctcagccagcttgtgaagtccatcggtaaagagaatgccctgaagcacacaaagccttctagaagcagcctgttaagaagcacaaagaacccttcacttgtcaaacctcggccccactcgaggattattaagagtcacaatctcgaaaactctggcccttcctgagtggcaggtctcaagtagctgctgtcccctcccaaggcaaactgcccagtactcaagaagctcatcatgttattactataactgcactgcacccagctaccatgttcacagaaacaggtacaggcctgtttccctgcattagattggctgagaaacccacagctggcagctcacatcatgctattaggacgtcaaagaggactgacttacccagaaaagcacaatactaaaagggtctcctccttttctcgctcttattacatctcccagatatgggaaaatgaagtgcacacatgaccatattgaagctgccgcaatttccctagtcactctgcttgtgttccacaaacttcacgcatctttcttttgcagcacacttgcgctcttagtccatttgaggcttctattacagaatgcttaacactgcgtaacatataaagaacagaaatttatttctcaccattttaaagactgatggacaggcatatggtgatggccttcatgccattacctaacatagtagagtagaaggcaacatatggcaagagagacaaaagggggcctatcttgtccttctataaggaatccactcccatgataaaggtatgaatccactcccacgataaaggtattaatccactcaagagggtgcagccctcatgaccccaacacctctacattggggaacaagtttctaacacatgaaatttggggggcacattcataccacagtacaccgcaacaaaaattatttacttctctactttccctgggatgcagatttctgtggctcaaaacaggcttaaatcaatcatatgtagctgcatctcagcacctgagaaaactattagcatgcgttttcatttacaaattagcacctatgcatatgtgctccttggaggtcacaatcctctgaaggttaaaatggaatcactttgccacaccccagaattctcaggccactccaaaaattttgaaggtacaactatactattctctgtttgtcatcagtacattatgatggctcttcattgacttatttaaggtgagcagacatcatttactgagtctgtattacataccgggagccttgtctcccagacaagtatagtcttctgtgcctcagtgttctcatcggtaggatggggatgataataaaataacgtatcttaatgattttgctatgagaataaaatgggctaacatatgtaaggaatgtaaaacagtggaagtggacagcacatcataaatgctatgtaagtgtttgctggtttgttgttgttgttgttgttttgttttgtttgagacagagttttgctcttgttgcccaggctggagtgcaatggcacgatctcagctcaccgcaacctccgcctccttggttcaagcgattctcctgcctcagcctcctgagtagctgggattacaaggatgcgccaccacaccaagctaattttgtatttttttagtggaggcaggggttctccatgttggtcacactggtctcgaactcccgacctcaggtgatccgcccaactcagccccccaaagtgctgggattacaggcgtgagccaccacgcctggccaagtgtttgctgttattaacatcaacagagccactctgcaaaattgctcttctttcagataactgactcccccagggacagagtattactttagattcaagcccagtctatatgaatctataatcataaattttgctcttttctcctaatttctaatcaaagggttaattataagactgggctagaaaaacatgtttgacactaagccacaacatttggaggattgtggagggagaactcctcctggtgtaaatcaattccaaatcaaaataagccaagaagggcttgaagatcaagagacagtcaatggccaggcacagtggctcatgactgtaattccagaaatttgggaggccgaggcaggaggatcacttgaggctgggagtttgagactaatgtgggcaacaaagcaagaccccatctcttaaaaaaaaaaaaaaaagaggcagccagggatgaatacatacaggtctatccacgtctgtgtgcctcccagaaagagtttaggaatgcgggctcagatgtctaagcagtgaaagtagtaagtactggccaaacaacgcagaccaacgaggggatgaagcctgaccactagagaaagggaccagaggttaacaaaaagaccctccgggagaggaggtgtcttggggaaaacaaaaacggagctccacccaaagacagggcacctgcaaaggcacagcagcaccataaaggtattcacagttgcaggaacccaaaacactggtcaccagacacatgttcacacctcttccctatcacggccccaagggaagcagaggccagcaaggagtggagatgagaagtgacaagcttctccagcatcctgcaaacagatatcccataccaaggataaaacgtacgtgctcagcccagggtgaggtcaagcatacagaggtacctctcagacttaattatcctgatctaggtagtaacaatttgaaatggaacctgcagtccatcctgccacgtaagccacacaaatctacccacacatgacccataaaagtgaacttaaaataccagcctgtctttgtcccatgactcaggaacaacttgccccacagtgttacaccaacaaaccacattccccatccaaactcttccttctgtgatgttgaactctacctcctatattaatccttctgaatttagtagttgcacaattcttcccaaaagccaaaaccactatcctgtccccaacctcaaaaaacgagctggacctcagctttctttccaatgacagatgactgggatgcaggccaggcatagtggctcacacctgtaatcccaacaatgggaggctgagtcaggcagatcaaccaagcccaggagttcgagaccagcctgagcaacatggtgaaaacctacttctacaaaaaatgaaaataattagctggacgtggtggcacatacctgtagtcccacctacttggaggctgagacaggaggatcacttgcacccaggacgcggaggttacagtgtgccgatatcgtaacactgcactccagcctgggcaacagagccaggccctgtctcaaataaatgtttaaaaaaaaaaaaaaaaaaaagactaggctacacctgtaagccttgatagcatagtcaagtaggcctaacccatgagaagacaagatggactcaacaacaggcgtcattaatgagaaaaaaggagctgcttcctgtaaactggagcaatacaaaagattgttttataatcccaaaacagagtcacataagcagtattctgccaagcacttaaaattctgagagagggagggggagcggggaagcccacacaaaaccagtcagatttcgtgtttatttgaccagcttcatctattgtgtagacacccatggtggggctctatttcctgatggggaagcagaagtggggagacacagccaccatcttgggtacccctagagcagaggtgagaaattgtgagttaaatgaggtctgaaccaagggtttttgctgcagggaaagaacctgaccacgaatgtcgatgagcagcatgtgcagcctccaggaaacagagcatgcacagcccagcgagaattgctggcacactcagaaaacgcttccttagctctgtgctatccaacctcagacactgaaacccaggaactcaggttcaccttgctgatcaaggtgaaggcacagtgcgtgaaatacaaacttccctcccacacttggaagatttccatgggaaaggtgaatatgcacaagcaagcactgtgatgtgagccaccccaaacctaccaactccagctcactgcaggaaaagtaaagaaaaagagtattcgtccagaaggacagagaaccacccactaaaatcaacaagtaatcacagatctacttgcagcagctacctgaaacaacagtcagctgagctgggccctctcctggacgcgcttctctccagggtccttaaacaaaaggacctctaacattggaggacccaagagaggatttcgggagctgtaggttctgctcaagataagctaaaacttttcccctttctatccatcgctcagtttataatgaagcaaggcatttcatgtacttcagaaaagaaggaatacatcccttggcagaagagattatttactagaagaggtcagctgaagagtaacactaggcatgacagcaagaggtgcccctcagcacagttgtggaccaggccagaccccagttcaaactgcacccccacccccagtacagctcaccaagccaactgctgtccagatgcacacacctgaaaattcagacctacatttgctacaacttatggaaggtgacatggtacagtggcaaagtccaggcattatagatgtgaaagcttagatccaaatcctattaactcagctgccaagtgagggtggtaaaaccttaaaaacaggtatttcaaaagaattaaggtaaaaatttttagcacaatattatctaggctaaggtcagttcttcctaacggaagagacagattacatagcttcaaagaaggacttctaatagtcacaggctttattatggaatggagtttactatttttattataggccgaatgcttatgtttattaattttgaattttttttcttggagtcagggcttacttacgctgttcacctttttttttttttaaagactaacaaaactaaatgaaaagctatgaccgtggctagttccatttcctgatggtacgtgtctctctcacactctcattcaacattcaaagaacagaaagaacttccgcttttagtgaagctagacaggatttatacctcttgcctgtctgaaagaactaaaaatccacacaaaacaacggccaccatatagcaacatactgtgatccctgacggatggaaaacaaatgatccctccagctcactgccctgagagaatgtccaggctgcagcagttacggaaagggcaagcagagccggggttgagaaacacaaggggaggccaaggtgatataatgtgtaaggcagagcacagcagaggccagagccacacagacaacaatggaatctgccaaaggcgctcctcatgtcttccgctgagtactaacaagcacatttgtgttaggaagctacccaagagaaagtatttccagaaaggattagcaggaacagtatccaaattgtaaaagcaccaggaatagtgcccattcttactagcctacatggtaaacataatccataggacatcaagtaaaatactcgtaagggtttttgcctgagtagcagggaaacaatgcctcacagtaaacactgctttggccctacctaaccatgcttgaaaccaagatccaaacagatcaaactgttccctaataatcagatctcagaacaatgctcaagaatatgtagagaaatacgaacatttcccacagccagagaaaaatttagtgtctgtcaagtaataaaaagctaccagacatgcaaagatgcaggaaaatatgactgatgaggaggaagattaatcaatcaaaactgttttgtaaataatggaagacaaaaatagcacatatactcaaatatctcttgtaactgtactccacatgttcaagaaacaccaaagaataagcatattactagagacactgaagattatggaaagaccaaaatctaacttcttttttttttttttatggagtcttgctctgtcacccaggctgtagtgcagtggtgtgatcttggctcactgcaacctccgcctcctgggttcaagcaattctcctgcctcagcctcctgagtagctgggattacagatgcgcaccaccacgcccagctaatttttgtatttttagtagagacagggtttcaccatgttggccaggaaggtcttgaactcctgacctggtgatccacccgcctcggcctcccgaagtgctaggattacaggcgtgcccagctgtaacttctaaaatataataacaatgtctgagataaaagatatattcaatagtcttaccagcagatttagggtataaactatctaaaatgcaacatacagatcaaaaaaggaacaaaacacatgagctatgggacaacttcagagtaatatatatgaaaattaggtccccaaaggggagacgaatgcacacgaaaatatttgaaataataatggctctaatttttccatagtaaatgaaatctacaaacctaatacactcaatgaatctcaaactctggaaataaaaactgccaaggcacatcgtatcaaattgcctaaaaccagtaagggattcaaaagaaaattgtggtaaatgattgctcctacaaagctatgaaaataacaacaggattctcatcagaaatgatgcacatcgggacagtggggcagtgtcactgaagtactgatggtgaatgactattaacctaaaattttatacccagcaaaaatatctataagaaatgaaggtgtattttgtataactgcatgtaattctacaattatcataaaagtatttttttaatgtgggtgaaatgagatcttcccagacatacaaaagctgaatgatcaacagcagacctaatgttagaaatgttaaaatccttcaagcaaaagcaaatgcaaatgatactagaaacaaaaatggcaactacgtagataacttgaaacagaagataggcgagatttacccatatttactttatatttacttccacatcttttgtgttcaaaactgccacatcataatctattactcaatttttctttactttctgtagtagagagtacatttcacccatgataactctaaagttgaaaattaaactagtacttctcttatttataaaatatatctccaggttgtaagaacaaaataaactccaaataacctgatcagtggaagcttctaaatataaatcaagggttaagagaaatgttaagccttttgctgattgttttgctttcacttttttgcatttaatagtaaattatactactaatttatttttgatacaggaatgagtaaaaactaggcacttatttaatataattccaattattaaggatgctcactttgaataatcccaattcatgcatgctatcaagaagattcgtatacatttgggcttatcttcctttcaaactcgaagtaaataaaagtattttataccatcaaagtaactcagaccaaaaagaataaggaacacagtcgtgcagacaatgtagctgtgaatatcatacctgttaaaagcctgagagaattctcaccactttcaacatgtcttcatatccagaggcatgtcatatctcagagtacactgagttatgaaatccatacacttccaatgattctttacattcaaaattcaatctaataggacaaacagtgtttaaactaagtcctattggatcgaaagcctaactaaaatacagcagctccttgtttaacaaaaaagttacatccctttagagacagagtcggtacttctgtactagttaaatagaaactcttaagagtttttattttaaagtctgttagtacacaaaaagcaatatacccttctaaagaatatagttgaccgggcacagtggctcatatgcctgtaatcccagaactctgggaggacgaggcgggcgatcacgaggttaggagatagagaccatcctggccaacatggtgaaaccgtctctactaaaaatacaaaaattagccaagtgtggtggcatgcacctgtagtcccagctactcaggaggctgaggcatggaatggcttgaactcgggagggcggagggtgcagtgagacgagatcatgccactgcactccagcctggcgacagagcaagactgtcttaccaaaaaaaaaaaaaaaaaaagaggaatatagttaacaagagatcccaacactaaacattagggttctgggtctctccctaaggtgaagcaatgactaatgcatgagcagccacgatggaatctcctcaccccaccactcttgcctgctccattcaggcaaatactaggtcgcaccaagctcggcagaggaaatttacaacatacaccacagggtccttcccgtgactcaataacttcaaaagagggagtacccatacatttccatctgcctacagatggctgtggtagggctgacagagaggaaagatataaatcatttgtgtaaattaaaaaccctctgaaacaagtcagagaagtctcgaaaggatgtgcatactcacatgtagcaattcatgtgtcacatatactgacaatggctactaacatctaacatacagagtaccatttatacatgagaattttttatttatttattcgcttatttagtttttttttgagacagagtctggatctgtcccccaggatggagtgtgatggcacgatcacagctaactgcaacctccatctcccagactcaaacgatcctctcatctcaccctcctgtaactgggactacaggctcatgtcaacaggcccagctaattttttttgtattttttggtagaaatggagtttcgccatattgcccacgcaggtctctccaactcctggattcaagtggccggccggcctcagcctcccaaagtgctggggttataggtgtgagccattgcacccaaccaatacaccaaaattctcttcaagaattaatttattcaggtcacaaaacaccatcaggcagttactactgtgattcacatctttcagatgagagaactaaggcccagacatattatataacctgcccaacaggtatgatacaatacctgttgcattatataacacaacaagtaaatgttcaagatataatgagaagtcacacagcctggccccagtctatactcttatgctgcaccacagtctccacaaaacccgcttaagaaccactgttctcgtgaaatttttctaccctcttccccctactcacccacagataaaaataaacagttaatcttgctctctattttagtcgccaactcagatgacctcttttgaatcgtacacttcagatctcgtatttacttgcatctaaaaatataccatcaccaaattaactgtacattatcgtttcattcctcaaacaaataatcctcacctccataaccatccttccaaagagtttctgaccacaagtccacacccaaatgaccaaaatccatccattctggtttctacacatactgagagactgatggggcaaatacacactttacaagaagaactgagtggaataaaagggcaaaatgagaaaggagataggcagggccaccttcacattcagaacaggatgaaagtctctgtaatggttccattctaaacaatataagttagcccctctccctctccctctcccccctctccctctccctctccccacggtctccctctccctctctttccacggtctcccactgatgccaagccgaagctggactgtactgctgccatctcggctcactgcagcctccctgcctgattctcctgcctcagcctgccgagtgcctgccattgcaggcgcgcgccaccacgcctgactggttttcgtatttttttggtggagacggggtttcgctgtgttggccgggctggtctccagctcctaaccgcgagtgatccgccagcctcggcctcccgaggtgccgggattgcagacggagtctggttcactcagtgctcaatggtgcccaggctggagtgcagtggcgtgatctcggctcgctacaaactccacctcccagccgcctgccttggcctcccaaagtgccgagattgcagcctctgcccggccgccaccccgtctgggaagtgagaagcgtctctgcctggccgcccatcgtctgggacatgaggagcccctcggcctggctacccagtctggaaagtgaggagcgtctctgcccggccgccatcccatctaggaagtgaggagcgcctcttcccggccgccatcccatctaggaagtgaggagagtctctgcccagccgcccatcgtctgagatgtggggagcgcctctgccccgccgccccgtctgggatgtgaggagcgcctctaccgggccatgaccccgtctgggaggtgaggagcgtctctgcccagccgccctgtctgagaagtgaggagaccctccgcccggcagccaccccgtctgggaagtgaggagcgtctctgcctggcaccaccccatccgggagggaggtgggggtcagcccccgcccagccagccgccccgtccgggagggaggtgggggggtcagccccccgcccggccagccgccccgtctgggaggtgaggggcgcctctgccaggccgcccctactgggaagcgaggagcccctccgcctggccagccgccccgtccgggaaggaggtgggggggtcagccccccgcccggccagccaccccgtccgggagggaggtggggggggtcagccccccgcccggccagccgccccgaccgggagggaggtggaggggtcagccccccgcccggccagcagccccgtccgggaggtgaggggcgcctctgcccgggaggtgaggggcgcctctgcccggcagcccctactgggaagtgaggagcccctctgcccggccagccgccccgtgcgggagggaggtgggggtgtcagccccccgcccggccagccgccccgtctgggaggtgaggggcgcctctgcccggccgcccctacagggaagtgaggagcccctctgcccggccaccgccccgtctgggaggtgtagccggcagctcattgggaacgggccatgatgacaatggcggttttgtggaatagaaaggggggaaaggtggggaagggattgagagatcggatggttgccatgtctgtgtagagggaggtagacacgggagacttttcattttgttccgtactgggaaaaattcttctgcctcgtgatcctgttgatcggtgaccttacccccaaccctgtgctctctgaaacatgtgctgtgtccactcagggttaaatggattaagggtggtgcaagatgtgctttgttaaacagatgcttgaaggcagcatgctcgttaagagtcatcaccactccctaatctcaagtacccagggacacaaacactgcggaaagccgcagggtcctctgcataggaaaaccagagacctttgttcacttgtttatctgctgaccctccctccactattgtcctatgaccctgccaaatccccctctgtgagaaacacccaagaatgatcaataaaaataaataaaaacaaacaaaaaaatatatgttataaactatgtaaatatatcatttaaaaaaaaaacaatctcacccaccacaatgatcaaaagaaaaagaaaaacaacatctagaactaaaaacaagactcagccttcagggtcccaccagcacagaatctccactcatcttttcttgggctgccctttccgtgaacacagcagacagattctgaagggggactggctttccttttgtaaagaggcatctcagatgacctttcaatggctaggtaaaaatataccggttttgagttttgttgttgttgtagttgcctccataaagaaaaactctgaggaagagaattagaaatttgaggaaactccaaaaccctcaagaactctggactccactggtttctatagctaaaaagatccctagtgtcaagtaaaggcactggcagtaaatacacacagcaaaatctgactcagggggttttctgcagaaaaacaacacttaagtaaacacatggatgttttaactgaagaattaaaacatgttattagcatcatcagaaaaatgtaattgcttcaacgtgcaggttggaaaagcagactagataaagttggaactgaggctggcatcagtctccaccatagatttttattttccataagaaggaagtcaagcacatacaatccctctcagtcttcccctttccccatcaccctactgtagacaaaaggcatatttttttgctgatgattctaaaatcatgcacataaaaggatgtgtagagtaggagtaattaaatctacaagtatagctaactagcaattcgtatcattctaaaaaataaagtgaaaatgctctttccaaagcacatacataaattatgaccctgcagtatgatctgaatgtggcccccaaagttcatgtgttggaaacctaatccctaatccaacagtgctgagagggtgagatcttaagaagtgattacatcatgagggatctgccctcgtgaacggaataatgtcactatctagggagtgggtttgttataaatgcaagcttagacaggcgtggaggcatgtgactgactgtagtcccagctactcaggagtctgaggcacaaggatccctttagcccaggctttagagaacacagtaagtcatgatcacaccactacattccagcctgggtaacaaagccagatcccatctctttaaaaactaaacttaaaaaagaaaaacaaacaacaaaaaccgagcttagcactttcttgtgctctcttgccaagttataatgcagcaagaaagctctcgccagatgcagtccctcaatctttgaataccaagcctccagaaatgtaagccaataaatttctgtatttctaaagttaccccgtctcagctattctgttacagcaacacgaaacaaactacaacaatatgaatttttaggaatcagtattttctcctacaaagtctaaagaccaaaagagaatgcaaatggtcagtcttaaaagctcttccctgccgggcacagtggctcatacctgtaatcccaacactttgggaggccgaggtgggcgggtcacctgaagtagggagaccagcctgaccaacatggagaaaccctgtctccactaaaactacaaaattagccgggcatagtggcgcatgcctgtaatcccagctactcggaaggctgaggcagaagaatcccttgagcccgggaggcagaggttgcggtgagccgagatcgcaccattgcactgcagcctgggcaacaaaggcgaaactcagtctcaaaaaaaaaaaaacaaaaaaaaaaaaaacaaaaacacaagctcttcccatgtataatgtttcagaaatttaaaactcgcaagtaaaaaaaccagcatctgtttaacaatccactaaagatattttaaaattaaccattataggtagttactttaggctcaacttctcatcttcagagtcagcacattccattaccctattagaaaaggcattctgtatgtgcgttgaagacaggttacatattacagtttcaacagtatactaccgaagctctggaaattcaggtcccaagtcatttactctgcttttgaaggcagggttcatacccaacccactaaatactgacgaaggatcaaaacaaaggagttcttaagactttaagttatcattttatgcttgctacataccctgcaacaccccaagaaatgcatgccctgctgggtgtggtgactcacgcctataaccccagcactttcggaggtgggtgggtcacttgaggctgggagttcaaggccagcttggccaacatggcaaaaccccatctctactaaaaatacaagaattagccaggtatggtggtgtgtgcctgtaatcccagctactcaggaggctgaggcatgagaatcgcttgaacccaagaggcaaagattgcagtgagctgagattgcaccaccacactccagcccgggtgacagagcgagactcttgtctccctcaacccccccaaaaaaagaaatgcataccctaatgacactacacatttgaaggctacaaaatcttcctcctataatcaagagtgccccagcccatccccaaaatctacccaagcctatcaaaccttaatccacataaaaccttgatgagaccagaaccaagttagtaggctgtaatgaatccttaattcagtaagatacttgacacattaataattaaaaacgatttgccaaggctaagttttccttcagctaactctgaaaaagagttcctcttttctactaccttaaagaattccagttaaatgactgctttgcactcaggtgccacatgacactgtggtcccatacaaagagaaagctagcaacactatcttctgagagaatcacagtgagttagggacaaagagtccctcctccttaagaatgaagcctacaacacacatcactgcacccggatgctgaccagctctcagccagaagtgagggtgatggccagccacatagctaaaggagtgggtgcccagactcagagaattctgctccccaaatggagatgaaagttgatgccagatgcatgccagatgcccatgttggaggcatggataatattatcacacattccaatatatttactgacacaattttttacacatccttaaaatcactctcttgtgataattcatgctttaaactggaacaggggaatgtttgttatggaatatctgtaatataacaggttcatcactgagacactctttttaaaggagtgacatacaaagctcagtacacgggaagatcctaactatactaataacgaatcttatgacatcttctaagacaaagtgctgaggatgaagagaaaatgagagaagaatacagattcaatgtatttaaaaggctatttaaaagacgacaccctcatgatggagaaaataaagactttgagctatgcatctcaactttcagtcctgaaaacaggaatcttaaatatctacacatggctaatcttgtccttttctcttaatttttcactctattctgttcttctttagatagatacatgtagattgcttctaaaaagtaaattctccagaatgagtaaacagagatgaactgacaagggggattttttttttcttttccttcaatcccggaaacgaacaaattctaagaaaaagtcaggaagctggtcctccaggtaaacataaagagaacaaagggaaatataaattctaacagggaaaaaaaggaagtaacatatcaggtatgaagtagggtagatactaggcaaagggtttcaaaaacacccaagtaaaatcattattataaaatgtcactgccactgtttgaccatgaaaccacaaactgttatcaaactactaaagccaacttccttaccaaactatctgaagcttatttaggaaagccacataaaaataactgctgttctaagttttaagcaccaattccacagctactaacttggaacttggtaaaacagcaagggattaaaaatacacagtgtaatttcagctttcctgacaaggaaaaaacgtctcagaaacaccacatttacttcttcaaatttttagaaagatctcttttcagaaatggcaaaacatcacctaatatatatattcctcaagatggctgctgctgagaatcaatttaaatgaacagttaagacaggcattacaagctggcaactctttggctaactgttccagcaggaacatgtgctgtcagtccagagcacttttttttcccgtttttaattataattattagacaatacttagaaagcagggcatttgatacgaaacctcatgattctggctcctctatgaaaatcaagagattgggtgaatgggctcacgttatcatgtggtgaaaactggcacctgagtttgcagtccctggttgaaggtaccaatattttcagccttgggtactaaccttttcctcgacggcccttcttcaaaatctgaagaactaacatcgttgctagtggaggacacttgggatgcatcgtccttttcattctctgactgttctgatgctggtcctaatcccttagactggtcattaccaaggagccctacaggtgagaaaaggggacaaacacttaaatacatcacatcaggaggcagcactttaccacagttaaccctacacaacgctgatgaagacagacaagaatgtggatagaagagaatttaaaagcacacatcccttttgaatgggtggagaaaagcaaaacctcattctatgagacctttaaagagagtgaaatgcctaagagggaaacaatttcaacagtaagaaatttgagcagaaatttggaactgtaacactatacttcaggattcgtttttaaagagtacataaacatcttttgcagctaaagggttgaaaggaagaaaggagtatctgttatcaaactagtcactcttgaagaggtaaatattgactctacagatactgaaatcctttctggaattgcctgcaggaaccagtacctgccacacaagaaaaggcatccttatctttgcagctacatcttagatattaactagaaatcctactccacttgtttttcttcatagccatctacaagattagattgtaaccggatttgcctttgatcatctcaaaggataaggattctctatgatagcagatgataagcaggggagtcttggtgctcatggatgtgcttttagtaaccaaaatatggaaagaagctgcaggcccttgggggctctaaaaagcagctgtgtactaactgatatggaagtattctaaccagcagtaaggtcacactatagggaaacgggtgaataacaaagcctcagagtcccttacatcaatgtaggttctgccaacaagaagcttccactgataagacatgtccacagcaactagacccgctgtccactatctagtcacaaccctcgaaggcaaccagaactgggcaggagcagcactgctagcacagcatctgcagttttacggtgcttgatcttgaagccaaaaatacggagtggccccttgatttttgctcttctagtccttccaccaattttatgcacacttcatttctctgtattaagtctttgtgactgaagtatctcagaaagtgacttctgttagttgtactaaacactatgtagaacacagtgttctatgtatttgattaaaaaatacataaacattctgaatgaacatagtacacatcaacaaagccctgggacctggcttgtttctgcttgcatttccccagttacctatttttacatcatttcagagtatgagtgataacatgaggttgaaaataaaacacacggttattcacttcgactaatgaggctttaagagttgtgactacaatacagaaatagaaacatacaaaaacccccaaagaaaatgctgggagtctgcactgtgagggcaaaagaagacaactgtatggaaatctaagaatccaaggataaaagcgtggccagtgtttcagagattgaagccatgttctccattacagtagccactagtcatgtgcagctactgatcacctgaaatatgcccagtgtggataagaaaataaattttaattttacttaattgtaatttaatatcagaatgtaacatgtcattgacaatgttgtattaattgtggaaatgttttggagtagattaaatcaaatatattaacattgatttcacctacttcttttgagtgtgactgcagaaactaaaattacgtatgtagtttaaataatatctttactgatcagcactcagatcacattagtagtgtcactatgcgagtgggggatccctcttcccacccaattaggatacagacgacatttaactgagattagagttggccaaggaacataatatttatcttatctgtaaaaagagaagatggataaattaccatagagaaaactgaaaataaaaatgctggttaaagaaccagatgtaaaactgaaaaggaaaaaaagaggatgcacatcgtaaatatgtatcgtcttggtggagttcaaatttttctttttgcttttgagatagggtctcgctctgttgcccaggctggagggcagtggcgcaaccatagcttattgcagccttgacctcctgggctggagaaatcctcctgcctcagctgagaccgcagacacatgccaccatgcccagctaatccttgtattttttgtagagatggggtttcgccatgttgcccaggctgatctcaaactcctgggctcaagggatccagtcacctcagcctcccaaagtgctgggattacaggcatgagttactgcacctgacctgaagtttccttttttcaatagcacaaggtgggaataacataatggagaataaagcacagaaggcaaaaaagggatcaattctgaatttatccattaatttacttaacaaatactatatgccagggcactggggatacaggttaatcaaaatctaaaattaggagagacagacaaacacagacatatgcatcactcagtagtaagtgaagaaaagaatgtgatggagaggataatgagtgagccaatggagccagccggcaagcttgcaataccaaaacaagaacaagaaagttgggatttgcagtaagcctaaaaacacgaagtggtgatggacgaagaggacaaggaggaagaagagctatattggtataaaaaacgaactaaataaggactaggagcagctcaggaagactgggaagggttcctataccctttggtacataacagcagctgaagtcttagctgaataagaggtgaatgcatgaaagaatgaacaaatgatttagcaagtaagtaagaaagttaagctttttgatgacagctttgcttctgtcctcctgacaaaatgaatctgggtgactgtaaagagaagtgactctcaaacttgagcatgcatgcgaatcaccccccaagtgtcccccgttctaacacattcccaggtgacactaatgctgctttggctgctctggggacttgttttttggggggtgggggtgcagagggacaaggtcttgctctgtcacccatgctagagtgcggtgacatgctcacaacagcctcagcctcctgggctcaagcagtcctcctaggctcaagccagcctcccgaatggctgggactacaagtgtgcaccaccatgccccactaatttttttcttttttttttatacatggggtcttgctttgttgccaagctggtctcaaactcctgggttcaagtaatcctcgcccatttcgacctcccaaagcactggaattacaggcgtgaaaaccgcacatggcctcatgtaccttttatcaataattttgcagaaaaaaaaagacacttgcctgcaaaatgtcacaaagttacaagaatcagccaacgtgacaaatagagacaaaaaagttaacaggttggaaaaaatgtgcatgtctaagaagcataaatgtaaagagatgtgtaatgttctccccaaccaccctctcaccctgcaaatcaattgcttaagtataaattaggggtaattttatgaagagattttacacatgaaaaatacctaggaatattaaacgattttatgtaagcaaaatgcaaaacagataaggctactctgataaggcatgactgagcaaaaagaaatcaaagtactgactccattgttccaggcccttatctaactaaatcttccaagaactccaagttttccaccattctgaggattgcaatgagtacctgaactagaagagaatcacattcatgttccagattcataaaatggggcccatacataaggaactgcctttatacaaattaaagggccataggctcccctctcccccgaccttgagacagagtctcgctctgtcatgaggctggagcgcagtggcacaatcttggctcactgcaacctccgcctcccaggttcaagcagtgctcctgcctcagcctcctgagtagctgggactataggcgttcgctaccacgctcagctaatttttgtaattttagtagagacggggtttcaccatgttggccagtacggtcttgatctcttgaccttgtgatacacctgtctcagcctcccaaagtgctaggattacagacgtgagccaccgcgcctggccaggaccatagattttactggcccttacgaaggcgcaagactgactttattctgcacgtgatcaactttttcaatgtgagtacttccattctgtatatatcagcccagaaaacatttacatttattaatagtcagacagcctacatggttaaataaacctgggctttttctttatctaacccccccgctggcgaccaatctccactgtactggctaccacatttcattttgaatgttttaagcccaatcatacagcctgcccaatccaggagggccaggtcagcaagatggaatatgacgccacagggcaacagagccattattataacattagccaagctaatgtactgccttttctctcccctaacaaagccctgccaccaattgttaaaattattatttttagtcaacgagaaataatgaaatggcatcccctccttcacacactcaaaccgtttttatttttccaaccccctcccccaccccgaccaacacaaacctttgttggggagaggaggttaaacagaggaaattgaatgaatggcccaaagagtcagtctatcccattagcatttgttctcctctattaatattcagtaggttgaacttaaattaaaccatgtctattgtctttcacaaaagcaataaatatgagctgaaaattgtaaatcattgcagtaaaggcagcttggttactgtgcctgcaacctcagctagtcaccatcagctgacgggagaagtgcgtctgggatccaagaccatttagccacaaggcagtgtccatttgtgcagccgagaactctaaagaaattgaacacaacagaaccctgccatcagcagctctgcacattcaggagcttttcaccgcatctcccaaattagcaagaaatgaaaagaccgcacaaaacaatacaacaaaacaggcttctgagtctggaacagcagcatcaaaatggaataggaattcctgttgttcttggtaactggagacactagtgtatggctatctccctcttgccttatatgatgggcgttgggaaaattgaaacacaaattaggccaaagattcctttagctgaaggaacttctaaagcaaccaatgagaacgacagatttcagaacacaaatgtatggacagaagacaactcttttctaatatctggaaaaaaaaagggactagagcatgtagtctgtatcattttatgatgttttagacacaaagaagttttaccagtcctctctcattagctacacatacatgacaatagaaaactaaaggaaaagccaatggctctattccacaaaagcagtgccccaaaacaagggttaaaaagaaaggaaaaacaaggagggctttgaggctgttccagggcttctaaaacatctggagcacaccaaagtcattagcatattagggtgactcaatgtatttagctttgttgtagaaaagatgcacaaaaggtaattctgtattatagagccaatgccgtctgtcaccctgtcactgtgagacaaggttatcacattacatatcaaacagtcaagcatccaaagacagctttcattttcagcagcaatttctgtgtgtgtgtgtgtgtgtgtgtgtgtgtgtgtgtgtgtgtgtgtgtgtgtgtgcactttaagatgatagaaaaattataaaagcagcccccatggctgaggtagggccctctctgaggtcatcagaatgcatggtttgctgccattgatagtgaaaaataaatgttatgttcactcaagttttgcaaagagaaaaaaaaatgaattgctttttaagcagggtaggcattccgatgccagggcagatttggctttgggcctgcttggcatggtcaatatgaacatggagtttgcccatcactgtacacatgcaggtcagcatgtgaagcttccaatggagcacagagctccagggagaggggcgagcagggcacagggtctgcagagcacagcccaggcttgtccactgacttgctcaccagatcaacacactggtgtgactgagaacaaatgccaagtcatgaggcaggatgtcggtggcacacttgtggtcaacgaggcacaaatgaaagtggtttcatacctcggcttatggaaaataattatccctttcccttatgagaccagcccctgagccgactagggctcccctttgtctactgtcaaatcagctatggagatttcccattccggtcaagaaaagacaatccaaaaacacccccacccatcactacttaaaacagtcccaagatttggaggcaggaatggggaggatgaataggtggacgcgggggacatatttttgttatatttaacccctgcaaaaacagatgtaaatactgatttgtaaatcaacaatctcacaagagctctctcaccaccaccagaatccgcccccacgacacaccttcaacaatctacacctcttttgcatgcacaattttttgagaaagcgttagatactaagacctgacacagtgttcattattaacatggaaaagttgggtcactgggtagataaggaaaatgtctgactctatcctttttttcctatttcagaaacaagtaaatgactctttgagaaagataggaccctgggccccagaaggcaataaacgccttgagctacaaaggaacaaacccagcagatatctcctatttcctcagaggaagaggtaagcagaacactgctactactagaatgggccccattctggctctctagaccccaaatgagtaagaaccaccaaaagacaaaagatctccccttcgtacatcctaaccaacaatcccagggggacagaaaacactgctcactgaaaggctccaacaaaaataaataaaaatagacaacaaggctgacagtttaactttattcaacacaaaacctctcacaaaaacaaagagccgtgatcttcatgaaagatttcccaaacagaccagaagctatttaaactctgatgatcaccactgtgaacataaatgtactgctcattttggcacaactccctgttacttctttggggcaagggctcatcctccccactctcttcccctcttcactccttcttcatccttaatatgacctttataacaatcagaacaagtacagtacctagaataataataatgactgaattataaacacccacgatgctctacaatcggcagttctagttttgtgtccaatcccatgactactctatcccaggccgtaactgctctgggtccacacttcatttcaacacccttttaattttacactgacaacccagtcaaacacacacccaccagacaacccagttataaatacgcaccaaaatataaatccctggaatcccctaggatatgcaactcgagcttctatcagctcatgaaaagaattccacaccacagagggcccagaactgaccacctccaaggtcaaaagccgcctacagaagaaaactgactcaaggcgacagtgggcttaggctgatgtgtaaccatgagcggcagaacaatggcatcactgcagagcaagggaactcagtcacatgaaggagacggaaacacaagggcatttttttttgagattttttctaagacagataaatgggcccaacatgtggaaagtcttgtgttcagataaactaacaggcccaaatttgatttctcatctcacagaatttgcacttctcaaagggagatgtccatgaacacagcatgttcacagatagctaatgatattcttctaccttcaagtaattacaagtgtgtatgtacttaggtctctaaagcttcctatcatctttaccccacaaatgtaaggtaccaaaagaaaccaggtatccaatttgagccaggctctccaaagataagcaaagctgctgctttaactcgatcgacaagtgccataaagttatcggtttgtgtactaatctgtaatgataaatgggcaaagctccacaaactttgtgtcctgactgacaccataatttgtagataaataaacagccacaccctttgccctgaaacctctctgggctgccttcattccctaggataaaaggaatctcttggaagttctaagttctgttttctttgtagcatgactaggagggacagtagttcccctgtttccttattacctcactcacatatcaagaaatcaactgccctcctacttttcaaatgaatatattcagagaggattaagtagtccattcaaagtaaaaaaaaaaaaaaaaaaaaaactgctgacaacaaataacttcagaaaggcctactgcctcccagagcagcattctttccactactgaaatataatgaatggaagcagtacagaaagcagcactataggaatgtggccatggaatctgctaagatttgaggcaccaaacattgaaggttcctgaaattcatctgtgtttacagacagtaatacagacatgaattaatgcacgaaattcgggagaagaatcaagagcactcgaagtttaaaggtctcaatccagaaccacttcaggtctcaggatctatttgcatgcctcagtttcctccatctttcaaggaaagatgatggaggaagaaaaagaaaggattaatggaaatgaaagcaaacatgctgtttatgaaggaaaccagagctatggtgaggatgaactaattaactttaatcaaacatttatttttaaatgctgggaaatgatcagataaattggtaataaaataaaagggaccagctatagctggatggcattcagtctccagagaaatgtctaaagtcatacaagcctgattgaaactgcagctttggccaaaatggtcaacagagcttaatgctttaagagcgacattaattctctcttgtaaatttccacagtgcctttgcaggagccaccattgcccctagggaggatatcaaagctaaaagaatattaatattaagcaaattgcaacactttttacatagtctctcatatatatatatatatatagcaccttgccatccacaatggatttaatcaggaccccagcagggaaacccacaaaggcctatttctccaacaaaagccataccagcctgaaacaaatctagagctatttggtttgtcttttatttataggaacagaccttctatcccaggttcctcaagataagccaccaaaaactgcacctgacagacccgtggagcagccatcctcagagccggatcattgcagagagacagagaggaagaaggacagagggagggagggaggaagagcgcagtgaggcaggctccggagcacttgtcaacaatcctcccctgtacgtaataagcaagcggcagtgcagattccgcgcggcaataggacggccagaacagcaatggggccgagggggaggggaggcagccaggagagaaggttatttatgtgcaagggagggaatcgaacaccaaagaggaggggtctccggctggctccccccaccctgataaattaaaatgagaaaaaggaaaagagtcactagcttttcatcctgccatttccccaacctgcaatgcagacaaatccgaagtatagaatttctgacatatggggggagggggacattcacagtttaattgtgcacacttttgtgtccccagccggtcagatgcccccaccccattgccaagcacaccccacccccacagacagcggactccagggcgcagtttcaatggcatccctttttaatatcataatctgtgtcattcagcacttgccttttatttatttttatttgtttttttggctgggaaacctgggcagctctccagacagactgcagaaatctctttccacatgctcctcctccagcccgccctcccccttactctgattccagcttccacggagcctcattacttatgaagtgaccgcatgggccaccgctgcccccaccaacaacagaggggcacccctccccctgccctgcgcaggcccctccccgaggcacataaattgatctaatctaatcaaacagaagctgttttctctcattgtttcttgaggatctttcacagaactggctctgtggtctggcagctgctgggaggggtgaaaaaggcaggagtccaactgagggctggccagctccctggcctcagacaactggagtacacatctcctttcatatgttatagctttttgatttttaaagtcaattttcttgaagcctttctttgaacttcaaccagcaatgataatgtccaaaacacatgctctcaacactaccacatgcttctcttcatgcccttccaatgggaggaagatggtggccaagtccacatggcactggaagttttcctcagatgcatccagaggaaatggaaacatgccttactaatactttcagtttcttctttcctagttgtggaaccatctaacgaggaccttctgggttctaatacttcacacacagtaacttatttatacctcacaaaaaccctgaaggtagatgtcaactttgctcaggagtgaagtcacccaggctagcgggtattctctccacaatggccaactcttgtttcctaaataattaaagctcatgaacatgccacaacttcttacatcaaaaatatataaacataaatatatatatacatgtacataaacacacacacacacacagacatcacgaaggtagatgatggtcctccttagtgtctagttgatatccaccactttaaaatcataattatacatagggcctcagagatactctactacaattcccccacttcatagatgatgaaactgtggctaaaaacaagtttgtctcttagcaaaggtcacagaggtagctcctatgtctcaacagacaggaggctatccgagaacccagtggcactggggaagaaggggtggggtaacctcaatatacaattccctacagaacatagaaggctggagaagaggtgctctccaatggctgccagggtgagcccccagagcagacccttatttagtgctctacagtgcagcacgttcctgttaacagtgaacaagtgtttggaatgcaccccactacagcgtaagtcatacagagtcaattaaaggacattcgggggatgactatttggcctttttcctcttccttctactgggacatgtcttttggctgcttcaatgatcaacagcacccaaagcagagaattggaaaggagacctgaggcagatattctgattatgctaattctcagcaaggttggtaagaaaagtagaaacgccgagacataaacagttggccagaaatgaagtttcagaatcacgtatgattagtggttttcctgaacacccccagttctgtcactcaaacactcagagtgcacacaggcatcagcactaataaaacactatctgcccctttcctatctccactgcttcctcctattctagtcaattaaagagaaacgggtatttaaattttaagaaataagaaaagcctgaccatcgtcattacttcctgatcatgcaggcaatatttcctaaaacacagtacatgcgagtcagtcctgtgtctgtcaggccaggaaggagacttaacaaaactctccgttgtaaatagccataagttttagactgtttacatgaaatgttggtcccctactaaagaagaaacatgcaaactaccctattagactcacagcatcctctggaagaccaagaataacactaagaaatggattcaatttaggaataacaacacaacttacaatatttaaagacaagaaagagcagagggcggaaagactggggaagaacttttctttgctccatccatgttcattaataggctgaaggcaccaccatctaagtttcaacagtgaaatatcagagcaagtcataaatcttaaaccaaagtcctctgaataatcaatccactttaatttttaaggatataaagaatatctgtgaacccgctgccaaaccaaactactcaaacataacctaaagccttgcctatgtgctaactttttaatattataacataaacatatataaatagcattttgtttcactgcatttgattataaactttacaaaacaggttccaatgggaattgggttttttccaactcaacatcaagttactaagatccatccgtggccttgcttattatatcgcttgcctatccattttcattattacacaatggagtatttataatactacacaactgatgaatggtaggtattccaccatgattctcatgtccaagggcatctaaggcgcttctagtttattgctatcatgaaccatgttgcaattcctctctgcaagtctcctggaaatcatgcactagagtttctcttagataatatttgggactggaagtggtagatatccttggatatgcaaatgttcaaatttacaagttgaatggcaaatcagtttccaaagcaggtgtcaacttttgattttgcaccagtaatgttaccactggaatctcaaaatgtttaaagaccttctataacatgtcacaagagagaccaaggaactctactaactctaattcaggagaagtcagaattttcagatgggatctcatattcacagtaattctatgcagacacccaggttcatggctgccatccacctaattatcacctcaaccccaagaccaaccccagttggtgccttggtatttcagtaccacgctattaataatttccccaaaactactaatcgcaaaggaggggtagggtggtgtggattgtcgtatgatagaagagagtacaaggttatggtgccagagaatttcacataatacagaattgtaatgatcatacagcatcagccatgtatttgtaatgatatttctgtgttatatggatgaaattacgtagtattgaccatatcacatagggtgtgataaaaattaatgcagaaaggggatctactgtgctaatatttgactttcaaaaacatcattaaagtgtgggcactctgtgacagcagtatagtaataataaatgttacctgttggaattttatttaaataaaagttaatacactggcactataccaaccagaattaggtacacacacagtctggcttgaatgctttccaagaaggcttggtaattcctgaaacaccaacagtgctgaactttgtaatgcatgtggctggcccgatagctaacatgtcaacaaggccacactgtacaattataaaataataccaataattacaagaacatagtagggtgacccggactgggtgatggtatgcaaactcgtgaaactaactgggttgttaaggctacaattaaagtagttgttccaattcagaagctatcaaaaaagacaacactgtagccctccttatccggattttagatttccaaggtttcagtcagccatggtcaaccaaggtctgagaatattaaatttaaaaatccccaaaataaacaattcataacttttaaattgcacaccattttgtgtagcatgctgaaaccttgaactatcctgcccaggacgtgaatgctctgcactgtacagtatttatgtataagcaaaaaacacagtatatacagggtttggtaatagcgacagtttcaggcatacacggagggtattgaaatgtatcacccatggatatgggcggactactgtattctacatgaattttttaaattaaaaaatactgacttatttgataaacaccttgcactaaaaaccttagtggatcatagtacacatagctatgattaagaatgattaagaaaaatcataagacttctgcctcagtttcctcacctgttaaacggaaataaggacaacactggtgttggaggcattaattacacaagtaaaagggtttgtgctacactgtaaacatacagggctacctacatgtattcatggtaataaaacactcaaattttggttcaatatatattgttggctttttggctggaaaaagaaacacataataaaatgtacttaacatatttgaaggtgatccggttaatgaattttaaaaggtgaacacagaaataatgccaagtcaaacaacatgatcaacctttttcagaatattttgaaaacattactcaatagtataaagtaaaattgaaccagaatcacaaaaaagctgtttacctacttaggaatagtgaagaaaggaaaactgtatattaaaagcactgaggccacctgcggtggctcaagcctgtaatcccagcacttagggaggccaaggcgggcaggtcacaaggtcaggagattaagaccatcctggccaacatgatgaaaccctgtctctactaaagtacaacaaattagccaggcatggtggtgcacacctgtagtcccagctactcgggaggctgaggcaggggaagcacttgcacccaagagacaaacactgcagtgagctgagatctcgccactgcactccagcctggtgacagagctgggagcggtggctcatgcctgtaatcacagcactttgggaggccgatgtgggcagattacctgaggtcaggagttcgagaccagtctgaccaacacgaagaaatcccatctctactaaaaacacaaaattaggccaagcatggtggctcacacctgtaatcccagcactttgagaggctgaggcaggtggatcacaaggtcaggagatcgagaccatcctggctaacacgatgaaatcccatctctgctaaaaatacaaaaacttagccgggcacagtggtgcacgcctgtagtcccaactactcaggactcccggaggttgcggtgagctgagatcataccactgcactccagcctgggcgacaagagcaaaaactccgtgcccccaccaccccccaaaaaagcattgaaacaaagggctgataggtcaaaactgaagagtgagtaatcaccttttcgaatttctgactctgacaaaagtagtactctcatatgctgctagtgtgattaactgataaaatctttcaaaagagcaacctggaaatggaggttaacaaatctgtaatccagtaatttctagaaattaatactaacaaaccaataacagaagcaacgatttgcttctaataattagtttgttggttaatacaacaaattaatgacagaagcaaaaatttctatgtagcttgttttaattattttgtcgcttctttgactggtttaaattctatgtccatttccaaaaaaaaaaaaaaaggaattattctacgtcggtttcctgggccatgcaatagaccgattagcaatgctttggttctgaattactgcatgaagccgctggggtagctgggttgagtcctgcatgtgtggcagctgacacattctctccactacttgacccttggagctttgaggcctttgcacatgctgttcccttttctgactattctctcctctgcctagagagcacctgctcctctttccatttgacaggtgttattccagtacaatttcaaaacatacaaaggtaacatttaccaaactgtcaggtttcttcaagaagaagatttagtcttgttcatcttttgttttgctttgagacagggtcttgctctgtgtcccacgctgcagtcaagtagcgcaatctaggttcactacagcgtcgaccttccgggctcaaccaatcctcccacctcaacctcccaagtagctgtactacaggtaggcgccaccacacccagctaattttttatattttttgtgaagatggtgtttcgccaagctgcccaggcctgaagcgatcctcccgaggcaccccagccgcacaaagtgctgggattatgagcatgagccactgcattcgccttgctcatctcaataaccctccaatgctgcattgcatttatgctgtcaaagagtaagctgtgtctcaaggccaatccagggctgcgtaagcctgaggtgctcttatctgggaagtcccaccctacatacaaagcacctaacattcaacattctctgggaaaggcaaatgtgtcaaagaactctctttatgtttgaaattattagactagacatagctcatatactttacaataaattatgagatctcagcactcactgattaaaatgagaaattcctcggaagtagaagacctcatcttcagattttcagatgaaatataatttcacgagcactgaatttaacaagcagaaatctagacatacgatgttttctagatacttgggcctttattaattacaattttacagtttttgtttttttgtttggaggctgattttgtttctgtaactaaagcagttttgcgtctttctcaaaatatgtgccttttatatcctgctaacgtaacctcattctgttactaaacatttaaataaatgtcaaaactacctagaatcctcctcctcttatttacgcagtgaaatcatccaagtcccaatataccagtaatcactgttaacaatttcgtgtatattcttcctggcattttccttaaaagcttcatacatcatggagaagaccagaaataacccaagtgctgcaacgataaatatggaacatcatttatggtattctctccagtggcaatcttttacagttttctgaaatcttgaatttttccacaattcagatgactttctttagtaatatggtgaaaggcaattttaaaatttacatggtatcacagggaaactggctgtgtcaacagcacagaagtagagtcaatcacaagagaattactcaatgatggaaatgagatggagctaccaacattatttacgtggagctaagggaaaacctacataaggtaaatgacaaaggtagacaaagataattttgaactcagcaataaattgctaggctgtagtttattatcttctcattatagtggcacagataccatgggcaaacatattctaacattgcccaaaagactaaaaggcatttgagtaaaatatcaatttttttaactttgtcagaattgtctacataacacaccatgaggatagctgaaagaatacccagaaagacttcctgccaaaagcaagaacagagcatagggatacacaggaagaatttcaccaccatttcatgcgtatcctgcctctatggctgcactgatagcctctatccacgcatggctttttaattttacattaactaaatcaaacacaaaattcagtctcttggccaggcatggtggctcacgcctacaatcccagcactttgggaggcagaggttggcagatcacttgaggtcaggagttcgagaccagtctggccaacatggtgaaaccccatctctactaaaaatacaaaaattagccagtcatgatggtgggcgcctgtaacccccgctacctgggaggatgaggcatgagaattacttgaacctgggaggtggaggttacaatgagcgaagaccgcaccactacactccagcagcctgggcaacaaagcgaaaccctgactcaaaaaaaaaaaaaaaaaaagtctcttaatcacaacagcaaagctccaaaagttcaagcatcacaggtagctagtggctactatataggacagcacagacacagaacgtttccaacatcacacacagttctaatgggtagcaatgacctatactgctgaccatgctgaccaacatgtctgcagcagtccctcatccctctgtcgtcccctgttacaagcttagaaccccctcctcaccacctcccccataaacagggcaagtcggacagaaggtgaatccttttcagggggcaaatgcagcagcaggctgacaaatcaccttaaatttagcagcagatggctcgaggtggtaatcagtctagcttgtaggggaggggagaaggggaaatagagattggaactgttaaagagccccaggcttattcagaaaactaaaaactgtaaggaaaacttcgtatacaaacgaatatcccaaagggtgatttttattagaaatggttttaggccaccttaacgtggcttgacagtaaaggaaggacagcaatcatcaactaatactctggacaaagtggcactaaaacctaggccaagttggactcacattttgccacctccagacacgcacacacacacacacacacacacacacacacacacacaccactctgggatcactgcactggtgccttcacacaccaaaggacagggtcagtagccatgaagggcacatttcctccagaatacttctcattcgcttccctccacattctgcaaaagcatccaaatgcttccctgacccaaaagcatgatagagccaccaaagtgggagagcaggagcatgccttcaacaccccaaagccactcaccactgaaacaaaaccaaatgagacaaagagatctagtgttttgttttacataaggaggatgccagtgaaggcatgccttgctcctagacacccagttactggtagaacaagaattacgatccaatgtcagtgcccattccaacatatcaaatttttgatgcattcaatattgcttgagatggctacagtccaggaattctggtttaatatgatttgacagattgcaaagtgaatggttgcataacacagcctttatcatttctaaaaagctgcctaaaatagataggccttaagaattttcttttgttgaccctaacttagagcttgttcccatcggatgctctcccacagtcactttctcccctctgtctgtctcaggcctccccactgacccagctggcacagatctagcctccattacatgccacatgctggctctgaaactctctgctagggctcctcagagacttcagaacccaatagtctgtggggtacccctcctatacaaacctaacaccgactacgcctacagggcagctttcaccaacaccactgaggatgccttgctggggaaaactagagaggcaatccttccttccatgcttgtcagggccgcagcagtctcagctcgccaagccctagggtgaggcctgattacaagacattggcattcagaacctagaagggggcaaaccaacttgaaaaccgtcccttaggtgtcctgcttcatgacaaagctacagcacaaataggaagtcacggggtactgtatatctacaacctcaataatgatcgcccttttaaatgtttacattcttccaggcactaagaacctgaaataaatcaactgcattcatcgtaagaataccacctctgaggaaaaaaaattagtatcccattttctgagacggaaaacaacaaaccaaacagatggtggtatcaagtttgtcggttttctgaacccttggtgggaccctgggacatacttacagggatgacagtgtgatccttcaacaatttccactagcagagctggaggactgcggcctactggacctgagctggcaggagggtagatgcccagccattctctccaggaaatctctgatggtctgtattcatggatccaaggacaacccagtcttccttcagttttacagagcacacatgagaaggcccagcttgcgttcccagagatgacctgagctctgtcaacaactgcctacccccacaaaaggacaggcaatcccttgcacagagtttctcacagaggggctaagaaatcggccagcagggatgtcaacatccactaccaagaacagccacttgatggcaatcttaacctattcccttggaattcgtccataaagggagaccccagaaggctagaagcaccaagcatgggctgcacaacgtggacagagctaagaaggacgtccctgcttgacctgagtgtgcggcagtgcggcgatgaacggatagagaaccccacaccaacaagcactgttgggttcttctccatatctaggcttctctggggactaggcagaagtggctataggctctgcagtcagacagctcaggagcatggaaacctctcgagctccatggcgcactcacattgggtttctcatcagactgaaatgcaagtggacagatgacaacaaatatgagaataaatcaaaggcaagttcctcctccttactgtggaaacttgttctctgaaacagggaagggcaggaggcagggggtgaaaaaagtggactttccttagaaggtgggacacctgttgaataaagcactcaagcaccgccctcctcatttaagttgtcaaagaaggaaactaaaagccatgtgcatctctaggaaaaaagtctctccagttaaaaatagaaatacactgtaaattgctgcactacacacttctatttttggtagcaggaagatgaactgaagggctctctgaaacatcaaaacatcaaagggtgggagggggtccataccatcatattaccataaaatagtccactgtcttagctaggataatgacacgtttccacagagggttcgacctcactttgtgtggtagtttcccaactcctggcttctccatttataaaaagagttcaggcagagtgaagagtttgccaacattttcctcagagggattcagaaagtgccagctgagagccttccagctcaccctttaaaactctgtaacactttccaactgagcaaactggaaggccctttcaaatgacactaggaacaaagtcatctcatggagggtacactgctgggggagcccctagggaacagatcactctagatgcattcttctaaattcactctcaaaggaggcaagatgctatttttcaaataagcattcaaaagcatgggtcccttggtgaaaaccccaatcacatgggatggaagcagactatcaaaaataacagtgttccagcctgggcaatacagtgacaccccatctctaccaaaacatttaaaaatcatccaggcggtgacacgtgcctatagtcccatccactcaggcggctgaggtgggagggttgctgggggcggtgcacgcaagctgcagtgagctgagatcgtgtcactgcactacagcctgggcaacagaaaaaataaaaacaaacagttaaataaattgattaaatataaaagacagttaaatgattgcaaaatggagaccttggactgccttcatgtaacacatggcagcataactttgagagccatggaaagctaaaagcagactaccacttcagagaccaccagaagctagcctgggagcctccacacgtggccttccccgtcaccaagatggcagtaccaagcatgaacaggcacccacctaactgcagaaagaaaacagggactcagttaaggattacccagatgacaagggcagggcagatcacacaggaagacaacctttctgtgtatacacagaaagagctgaaccagccattagctccaaagcataaatgaagcaagaacactagtaacaggtcagggagagaagctacggggtctgaaagcatgcggggcataagttaccatgaaacacaagagacagctctccttggatgtcaatggcagggtacaggtttggccttgccggtttataatcaagaatgggatgtcactggcgaatataaaatattataaaatatttatatattttatattatagtttgttgtagaaaaattatatatatatattttataatatattataaaatagctcatgtttctctcctcatccccacacctccttgaacgatagacttgtactgtttttatcatccttgggaaagaaattatgaagaagctaaatctgggactctacagaaacattttaaagcctatagaggaagctaaaaggatagatgagatttggcagcaggtgagcttaaaaatcaaattgtaaattaagggatttatgaactgtagggtaatttcccagaagcatatctagtaatcactcttctggcttttaaagatataccatacaggactctaaacatttaaagtggctcaagtaataacaggttatttccaaaagctaagtaaagggccctctaaatttgagggaaatcagatctaagacattcacaagcacagcaaaactaccctagtccattacaataaatctgatagtaattaaagctacttaaatacacatatcacagaattcgaagatttagaaaacacatgaagcctttctctagcagggaacaatatcactctataagaaagaacgtcaataaatcctattcacaaacaagtcacctctggctgtaggaagccctatctggtgaccctgcagggtctttctattctattacacgtcaagaataaaaaatggctgggagtcacaaaaggtagataagatgaattactgttaaacagataggattccctcgacctcagaagtcctcaaataattccacaatgcttccccaaataatctatgacaacagaaacatcctcccaggaccatcacaactgccatccccctgtcaaaagcagttactccatccaggcttctcaaaggtcaaacagctctaagggtttcctgacttaccaggaaaatgttctagtatcacacaagcaagaaagaaaacatgctgcagattaacatggagtttaatttaatctacagttagactggaataaaattgtcaccatgtccaaggcctgcagagactgtaatgtactccccacaaagtcttctgttgaagctctaacccctaaggtccatgagaaggtgatcgagggtaaataaggtcataggggcacagggctctgacctgagagggctggagtcctcgcatgaggaggaagactcagaggaaccagccaagaagagggcactcaacaggaacccagctggcctgcaccttgatcttggacttacagacaccagaactgtgagaaatggaaatttctattatatcagcagcccagtctaaggtaatttattatggcagcctgagctgactaatatacagactttcaccacagccgcaagaatatgattagcaatcctatcccaccacaggcacacgcacactgtcttggcatcctcaagggcgacaaggagatcatgggctcctcacaggattcagtctaactaaagacaccgcactagcaaaagacatgacctacagatgtctctatagagtgcctctggggaaaaaagccaagtctgggaccctagctccagaatttttaattattaacattaatacacacccaggctgagtattccgaatactcacagattaaaaacagtggtggctaatgtgctatacgagaaaggtgacactgaagacagtcagaatgaagcctcctccaaagcccatctgctctgagtttacacaacagttcagaacaaaaaccatgatgccagtttaagagacagtctgactctgagaatgtcatcatctttccaatcgcagggttcttattccaacactgtgcctacataagccacttctggagctgctaaggggatgcacatgggcctctggccttgaggcactttcagtccccaacactctcagacattcggcacattctggacaaacatcataaacccatcgataagcataacagctcttaaaaatacaggcagtggtgttgaggaactccacaatgagcaaatacatttaaagaactcaaccggccaggcgaagtggctcacgcctgtaatgccagtaggaggggggatcacctgaggccagatcttgaggttataacgccctccagcctgggtggcagaccaagactctgtctctaaacaaacaaacaaacaaacatgtcaactgtactgaagggagaaggaggaaccttttcagcgtgataggaaggtattttatctacactggagtgttgctcacttggttatatgtgtacacttgtcacaacaagacatactggagatatgtggtttcacaggctttccttagtttaaacacacacatacacacacacccacacagaagtagagagagggagagagagggggaaaggaagggggagaagaacagggagagggagaggggtgggggagagggagagatagctatctggagtcagaagacctgggctcaaaccctgatttgaccacttctctgctaggtggccttgtacaagctgcttaacacctaaggcccattaaattaaccccaaaaatattagtaaaagtacaaaaatcatcaattgagaattaagagacataatttttttactttttcttaaaagcccaattgtaatttaaaccaccaagcaacataccttgtacctaaacagggatgcgatgaatgtggttcagaaagaaaggacacaaggctgaccctattccaagaatctctatgatagtgagacatatcacacaattatgaatgcacattccctctggcaatggggaaaataagatgagctgacatctgggggcctagggtgtcacggtgtgagcatttctaaaatgaaatctggagtcccagttggcagactctcagtcccctgaacagagagtggcacatccacagcatggcaacaagaggtgctggaaagggggcggcagagacgtgggtggcatgcaggtgggccactgagccgtctgcatgctcattcacacaacacagacttcggagatcccaggcacagggaaaagcagcagtcaacacaaatgaattttcctctcaaagcgcttacaatctaatgtggctagacacattagataattatctatataaataataaatatctataaaataatatctataaaaaactatatcttaaaaaatctattaaaaaatctatataaataaataaattagaataaacgcacgcacatgtccctccctcacagtactacaatgtcaggcagtgagaaatgctgtgcagacagacttcataaggtaaagcgctaaggagtaacagaggcaggtaccctttttactagaatgttcaaggaacattccagggtatgggggcacttaaaggggaacctgaaacatacagagagatcaagtcacatagataccagaagggagagaattctcaatagaaggatcagctagagctaaacagagtatgctttgtgtatttaaaataccaggaagagggacagagacaatgagaacagagtgatacgggggcccaatcaagtggccagccatgaggatatttcgctttcacattaagagcataggcagatatgccagaatcagaacagagcatagcacagcctcatttgcatttttaaaggtttatgctggctgctgccaggaggaatacaaaggcagaagctgagcgagcacagggaggctgcaacataacctaagctagaaagtatgacaacgtggaacaggagcagtagtacaagttcagaatcaaaaggtactgtgagtttcaaacaggttcactaaggactagtgaagtggctcacacctgtaattctaacactctgggaggccaaggcaggaaagaggatcacttaagcccggcagttcgagaccagcatgggcaacactgtgtctatttgctggacatgatggcacatgcctgaagtcccagcaacttgagttcggggggttggggcgggatgttaaatggggaaggagcccaggctgcagtgagatgtgatagcccccactgcactccagcctaggcaacatagcaagacactgtctctaaataaataaataaatagtaaaacaggttagctaaagctaaatgcaaaaatctgaaaaaagaagtaacagatgactccaaggttttggccaccaaaactagaacaaaggaactgccacttattgaaaaagggaagaaggggcaagcggacaacagaagcagatgagagacctcacagatagttggctttgggacatcttaacttcatgaggcctatccaaaaaaaaaaaaaaaaatcaaagtgggccaggcacagtggcttaaacttgactttcgaaggaacagctaagcccaggagttcaagatcaccctggacaacacagggagaccccatctctacaaataatttaaaaattagccgggcgtggtggcacccacctgtggtccaagctactcaggaggctaaggtatgagcctgagagtcgaggctgcaatgagctgtggtcgacccagtgcacttgggcctggcccacagaagaaaatcctatctctaaaaaataaaaataaaaaaataggttgggcacggtggctcacgcctataatcccagcactttgggaggcagaggcaagcagattacctggggtcaggagttcgagaccagcctgaccaacacggagaaactccatctctactaaaaatacaaaattagccgggcgtcttggcgcatgcctgtaatcccagctactcaggaggctgaggcaggagaattgcttgaacctgagaggcggagggtgcagtgagccaaggtcgtgccattgcactccagcctggacaagagcgaaactccatctcaaaaaataaaataataaaatcaaaatgcagcagtcaagcaggcaggtggtgttcaggagatgttcaatcacggtaaatgctgctaaatgggcaattacaccccagaataatggaaatgtggcttgggcaatcattactgaccttgataagtggcccaacgtgaggggtttaaaggtgaatggcaaaggaaggctgggggatattaatatgaatataaatagaagggcatggagacaaaccttttagacattttcttatgggggattttgctataaactaagagaaagatacagcaggcaggagatgcaagaacaagggaggctttactttattatgggaaaaataagaacatgtttctacaatggtgggaatgaaccagtaaagagaggtaaatgatgaaggagggataatttccagtgtgatgtcatggagggggagttattaatttcatccgcaaagaaactagagagacccttatagaaagagcttcagcttaaaaaaaaaaaaaaatcccaacctgggcatgatgatacatgccagtagtcccagtgtctcagaaggtgaggtgggaagactgcttaagcccaggggtttgaggccagcctgggcaacatgcaagaccctgtttcaaagaaaaaaaaaaaaattctagactacaacaaatttccatccatttgccttccccacttctttgaaactgaactcctataaaaactggcaaaagcaaataggctgtagcaaacaggcccaactagagctcagactgctctccctcccttctgtctccctacacagaccacctcctccgccctatagccctacacatacagactccactacccaggtgacactacctgagtgctgtgtccctcctaaagtcgtccaggattggatgggaatgatgatgtaatcagggaaacagagcccagctcacagaactgacaaaggaggcgggcagagagaaagagaggggcagtgggtgtcaagcacaaagtgacccgaaagaggagcacattaacctcctcaggcacctccattcttaacgctccaggaaatgcgtgcaagcagccatgcctactaggaagcgtggcgcctcactgtcacttaaattggatttctggttccaatcaggcttcagcatgatccattccttccagttaagtttctcatcaaggctcaaaattcctcatctgtaaaatgatgagtttgacctatatacctctaaaaagactcttcctgctctagcagtccttaattttgcacaccactcctttggcatcagaccagtacaagtgacttggccacggaaaccggccattgcagccatttgtcccactagattatgacaccaacagaccagtcaaatatttgctgacccctgccaccccaaggtcttgctcagaaatctctcgcatctttcaagacccctttgcaaggctcatggatatacaacgtttcctgtatcttaggactgggtctctgacatcatctgcctccctgctagcctcctgcactcacccatacactcgtttggggtttttggttctgttttttgagaaagtctcactctgttgcctaggctggagtgcagtggtgcgatcttggctcaccacaacctctgcctcctgggttccagcaattctcctgcttcaacctcctgagtagctgggagtacaggcgtgcgccaccatgactggctaatttttgtatttttagtggagacggggtttcactatgttggccaggctcatgatccgcccgcctcggcctcccaaagtgctgggattacaggcgtgagccacagtacccagccccatttggttgttaaagcatttatcctacagtattttatcctgcttcacagattttaagttgcatctatttttctcatgttaaaacatgcatctcataattaagctgtcccacattcatcattggaagcactgttttgttcttgcttactgatacataacataatggtgcatcactcaatgacatcttagaagggatgaaataaggtattaggacttgaccaaagtaagcaacttgatctcagtttttatacccacaatgcctcccacataataaaaactccaacacttacaaaatgaaaatctgagaaatgccccacctacatcactacatcaaaaaagcagctgaaagacaaagagcccaagccttctcgcctttccacaacaaatgtagcttcctttgtaaacaaaaaataagttgttttcaacaacattgaagcccttcatttcacccagctttctttcatgcagagtgtgtcctcacatcaggggaaacaggagagggaaagaaaaaagtctggaggccaggacacaggagtgttagagaaaactcaagctgcaactggtctccctacagcttgcagaggaggagactagcacacagacatcaacacttcggtaaagctgaagcataagccacttttttttttttttttttttttgagacaggagtctccctctgtcgccccagctggattgcagtggcacgatctggctcactgcaagctccgcatcccaggttcacgccattctcctgcctcagcctacaggcacccgccaccacgcccggctaattttttttttttgtatttttagtagagacagggtttcaccatgttagccaggatggtctcaatctcctgacctcgtgatccacccgcctcggccccccaaagtgctgggattacaggtgtgagccaccgcgcccggcccataagccactgtcttcagaagaaaataataataataaataataataaatgataatgataaagtaggcaccatctctagtacagctagacctgaaagtttccagcaaaaacagaagggacaggtgttccccttcgtagaggaaggtcactttataccccagacattcatttcaaatatggcccacaaataaacttacgtaaatcagaccatgtgacctgacatttttttattttgattcacaaatacgtttttatgacttgtgtgaacatattttgttaacaatgaattcacagtcgggcccacatttcattccacacacatcaagaatctttggaaatgactgaaagattctgaaaggagttcaaaattatatttcttaaagggggcttggggggtgttggctacacaatgtcccacatctgcgcttccaatactggtccttggctacaaattggcagctgttgccaaaacatccatgcaccatccgtccagtgagttccagccagccagaacgacaacagcattaaaaacacaaaactctaagtgaggaaatggaaactaacggatgcatctgtgtgtctgactgaagagaggaggaaaccaattcacagtctacatttttgataccctctatcaattcaattacaaatcataaataaagcccagaaacacagtcaataaatacttaccatgccttccaaggttctttttcccaataaaaaattcacttactgacggccaggcacggtggctcacgcttgtaatctcagcacttggggaagccgacgtgggcagatcacctcaggtcaggagtttgagaccagcctggccaacatggtgaaaccctctctctactaaaatataaaagttagccaggcatggtggcacatgcctgtaatcccagctactcgggagactgaggtgggagaatcacttgaacccaggaggctgaggttgcagtgggcagagattgcgccattacactccagcctgggcaacagagcaagcaagactccatcccctcacccccggcccccgaccaaaaaaaaaaaaaatccacttacctccttccaaataaatacctacttaaaaaaagtaaagtcttcctacaaattcttatttttggaatgctatctttatgaaaggctccaaaattacctctccttatctaagtggtggctacaagcttgggagctctaatccagaaagcatgggaggtctgatccaaaaggcctggtcttatatcctcatgcttccacttaatagctgggtaggcaaattgctaatccactcttagtatatagtttcctcacctataaaattgcttgttctgaagattaaatgagttaaatacagctaaagtactagaacaataactggcaaatagtgagaactcaaggtaggctagccatcacaactactgcccggggtaagtttaaggaaatgaatccagggtcccttaaatctcatcaagagtgttttgctggccaaaggacttgatctaagatgacatttataggaagcaaatgaaattcaaatacagttaatagcttccctctctgactgtgtaattctgtgtactcattatttgtgtagcatgttattatttaaatgtccctaattttagcctcagcaggccaagggccctcaaagagtggccaaggtctcagcctctgccagtcctttccaaagcttttgtcaatttattacatccatgaaaagtggcattatctacaacaaaaagtagacagaaggctcacaatcagcaaatcttaccacttcacgcttaagcccagcaataaccaacaagctgtaacgatggcatcagttgctacacagacaactcatgaggctgttcaaaactcacatatcctaccaatagtagggccaaaaaaaaaaaaattcattccttgtcactgtaaaaccacaaaaacaagactgatagcaaacatggattttatgacatgaaaaacgacgtgtctccactatcttatgtctgcttaggttattactactcacagacctacagaaccagggcagctgagctcactgctcagatacaagctgcagtgtccacacactgttcccaggcatcagatacccgacccccttcacacagatgaagggcaaagggctgcttgttcatcacaccaggatgccaatgattcaggagatgtcacatgtattttattttcaaattagataaaaattctgtaaaatccattctgctgttatttttaaatattatggtaaaaacaaatgatttttcccaggaaagcctccaatcatccatttatattttccaataatcaaagatccagaaacaacgctggaaatgggaaaaaacaaaacatcttcttttcaatattcctattgcaaagatccaatgtagttttcatgcattctgtcttgcaaaaaagtactggattcaaagttacaggacttgagctgcaattccaattctgctactgtgaattaaatacctgtttgactttaagaaagtcactaccacatctaacagtcataaaggccccatagttagatgggtctttcagtttacagatctctgagagtctctgagtgccagggctctcagaggcatgtcactgtccccaacctcgaaggcatgaaagaggacacagaggcagaagctccaccaccacccacccttctctggggttaaggcacatgttctcatccttgcttgcacagcatatgtcacctcctagcaatggctctggactggacaatcttacaactctaccaccagacaaatttctgtgacaattaaaaattaatgaaccagtggaaacattttgacatttgaaaaggaatcttttgggttgggaactaaccaaaaaaaaaaaaaaaattaaaaattgagggccgggtggggtggctcacccctgtaatcccagcactttgggaggctgaggtgggcggatcacaaggtcaagggatggagaccttcctggtcaacatggtgaaaccccgcctctactaaaaatacacaaaaaaattagctgggtgtggtggcgcgtgtctgtaatcccagctactctgggggctgaggcaggacaatcacttgaacccggaggcagaggctgcagtgagcagagatagcgccactgtactccagccaggcaacagagggaaactccatctcaaagaaaaaaaaaaaagaagaagaaaaaaaattgaaaaaaaaacatacatcttgcatggacttatccatcctggctcgggacaggtggctcacacccataatcccagcactttgggaggccgaagcaggtagatcacaacgtcaggagtttcagaccagcatggccaacatggtgaaaccccatccctactaaagataaaaaaaaaaagtgccaccatgcctggctaatttattattattactataatttgtaaagacagggtctcaatttgttgcccaggtgtggtggtgcatgcctgtaatcgcagctacttgggaggctgagacaggataatcgcttgaacccgggaggtgggggttgcagtgagccaagatcatgccattacactccagcctgggtgacaggctcacaaaaaaccaccaccattatagtcaatccgctgtgatatggtttggctgtgtccccacccaaatctcaacttgaattgtatctcccagcattcccacatgttgtgggagggacccaggaggaggtaattgaatcatgggggctggcctttcccgtgctattcttgtgatagtgagtaagtctcacgaaatctcattttctcttgccactgccatataacaggtgcttttcacctccctccatgactctgaggcctccccaggcatgaggaactgtaagtccaattaaaccactttttcttcccagtctccaatatgcctttatcagcagtatgaaaacaaactaatacaccctgcttccactcccactaacctatcttctgatttcatttgacatttaggaagtgtttctatgagataggacatgagtgatggctgactataaagtatccactcaaactaaagggatttttcagcaaagcatgcatatacatacacgcatatatacacaaagacacacagacacgtccacatatatatgcacaacacagcttgcagttacaacaacccctactcctagcctcaccagccctaaagtcttggttgctccctactgtgtgagctttctctggatcatgctccgaaaacacctacagaagaggagctcttcccatgataccaattctgttttccagtgattccaagtagctccccaaaataagaaagtacactttgtttaagatggtagctgccttgaaaataatgattttttaaagagagagtctcgctctgttgcccaagctggaatacagtggtgtgaacatagctcaatgcagccttgacctcctgggttcaagtgatcctcctgtctcagcctcttgactagctgggaccagaggcatgtgccaccatgcctggctaatttattattattactattatttggaaagacagggttgtagtttgttgcccaagctggtctcgaactcctgggctccagcaatcctccctcctcggcctttcaaggtgctgggattacaggcatgaaccaccgcaccaagcaaaataatgattcttaaagcacactcaagtcctgaaacaaggagatctgtttactcagaactgctatagaaatcccacatacagaataacaaaaaggtaaccttggaacgctgccttcataaaaaccaacacaaactagaaaatggcatattcacagcaatttcacaacccaaagagaagccgaggtgtctctgtattttttaaaagacttaaaagtctttatctggatgaaaagcaaactaccatgacaaaaactaaccttcccttatgaaggtagtgccagaataaataaaaagacttcagtgatcccaatgtgggcatctttgccaactgagatttttctcctcagtatcatcaatcccttgactctgccagagctaaacctacatttggccaactggctgacagcactggttgcttctggaatgacaaactttagtttttgttcatttactcaaattctacctttattaaatcctgaacatctggctaacttcttgttctaaaagctggtgtttcccagttaagaaaatatgggtgtttttgtttccactgttggcaatgccaagaaacactaaggcattacaccattcctgaacagtacagtgagagcatcacaaccatacaatctaacagtacagcagtcactgctccactctaaactctaggattaagtgatattctccttcatacccaaccccccacatttaatcaagcaagatgctacgttcaacgtgaatcaatgacaataaacacgatctatatcacatcaaatgttctccaactacacacaaggtttttagtttactgtattacaagcaacgaatggctagggtccctctctgctggagacccacagaacaaggcagagtgccttttaggaaagcagctatgagggtctaaattggattctatggcaatagattccacaacttattttgttttctgcaaatgttaagactcaaaatgggcctttcccatacatgttggctgagatttgttgagagacgcacacatgactgagccactatggccttaatggttgacctccaaaggcaagtcacccataagaaagaaaacccgggagggtggacagaggctcttctttcaagtcacgcaacagtggaaggagacagcacaactagggtgaatggtgaagttcagagaggtcatctcaggaaactctgccattgccccatagaaacagagcagcaacaggtactgctgtgcactagtgcctgtgaacactagttccaacaggaggctgccagacaactcaccatacaactaaggtggtgggaaacaaattggaagccatggtgaacctgtcctttggcaccctaacaaactgtcaagtaccccatatgtggtgactctcctaagaccagagccatagctctcaaaaaagaacagaacctgctctttctcatctccttgccccaaggaagcataaacaaaaacatggtcaattcattcactttaactgtaatcctgataagtacacaggggattatagaatgtcactgcattcccctgaaataaaatagtaaactacaagcaaatgtttgtcctcagatactttctgttggatgacttcatctgcaccatatgaaccctgttcaaaacagacatgagaacaaactcatataggaacaagtttctttccaggcatcaaggagccaagtgataatcatccaggaagaagcacacttctagaggtatgcaaagctgtcccactgcaggaacctgcccagcaaggaaggaaggagagatgagaaagccgctgagccagagagcaggaaaagcagtagacagaaagatttaggctatttcctatacaacccggggacaagaactaaagactccacatttcagcaagatcatcaaagagttctgctcacataccagtgtggaaagacatacatatagaaaaaccagcaagacaggacctacagaacagactaatgtattttgtccactatataacgcggtacataaaggaacacaaaaacaaccctataaacccaacaggatgtctgcagtgcagattcacctagcctacagactgcctttaggtgcctagaccaggaagcacaagctgccagaatacatccaattcaggaacaagtccacgcccagagatattgtacattccaatgagatattccaagagtcaactcaccattcacagttttcaggctcccagcaatgccttccgcatgctgcctcttctgggaattcttgaactccttcagagacaaataaaggactttacgtaccacccgttcttctgaccacggaatcccatcactgtcatcctgaagaaacataagaaaagagaggagttactgaatagaaagcaaggcaatattcagagtcaaaataaactttattttaaaggaatttccgaacacgtactgtgtgaccacgacccagttctcaatgtcagaattacacccataaggtaaaggggcaatgacctttctgaacaggcctcaaagaaaagtgaatccacaggctgttaaaaagaatgaaagcaacacacaaccatctcacttctttatacgccccaaaatcaaatacgttcatcaactagtaatagttttatattcctgacaaagttcagaaaaaggtgttgttatacccacaaccagaaggataatggatcattttacttgagttttataaagtgagcaatgccagaatgtacactgcaacagaaatatgtacggagctcttaaaaatgttgctgcctcccttgggagctcaaaggatacagcagatatgggtgctgtgcattcaaggaatttacaatccagtcagaagacatggaattggatccgcattggccacttaagtaaaagaatcacaaataaaaggagagagtactgcagaaggaggcaactgatcttggcggcatacaactggcatgatttttgttttaatgtacacattaatgatggatcttgaaggtctcatttcaaactggcaacctcatgtctgttgctccagaacgaatacaagttcttaagaattaacaaaatgaatgcagagatgaccaaaaacaaacagccagcccagagactattccagcaattccagtcataaagatataaagaaagactcaaattttaaaagcactaaagagggaagaaaaaattatacagagacttgagacagagcaagaggtgggaagacagacatggttgacaacagtcactaaagcaaggtaaataggaagagatacatgtttaaagaatcagcaagattaagtcactatagtttttattaatagatgatgattcacatggccaaggatattgagaggttctcttctgtagctgttaatctaagaaggacttatgttcacacacctacatcagacttaattaagcattttataaaagttcattttagaaatggaagcaggcctggcatggtgcctcacgcctgtaatcccagcacttttgggggccaagatgggcagatcacgaggtcaggagttcaagactagcctgaataacatggtgaaatcccatctctactaaaaatacaaaaactagccaggcgtggtggcacgcgactgtaatcccagctattcaggaggctgaggcacgagaattgcttgaacctagagggaaaggtggcagtgagctgagatcgtgccacttcactccagcctgggagacagagtgagactcagtctcaaaaaaaaaaataaataaataaataagaaatggaagcatacagatactttgggccttaaaagaataagaagaacggcttggcgcagtggctcatgcctgtaatcccagcactttgagaggacaaggcggacggatcacaagggattgagaccaacctggccaacatgttgaaaccctgtctctactaaaaaactacaaaaattagctgagcgtggtggtgcacgcctgtagtcccagctactggggaggctgaggcatgagaatcacttgaacctggggaggcggaggttgcagtgagccaagatcacgccactgcactcccacctgggagacagagcaaaactctgtctaaaaataataataataataacattaatatcccaggtaaaatcatgatttggggtattttggatattcaggttccctttgttcaaggagaaggcagaaaatctcatgggcagtctggtgctgttttactggtttatacaaaagaattggtttttcctccctaacactgaaggatcacagaaaacttccatgggactcaatgagaagtctagatgatctgacgtctcctccagcacttacgttcctatactctgcataaatacaaacttcattttagaaatccaacatcatagagactctaagccctaaataacttaagctgcactttcgttaagcttcacagatttcctagaatgagagtaattctccatcttctacagcaagaggaagaaagtcctgagagaactaggatttccaccttctccttcacatccttcactcacagaagcctgccaggctgagatttccgactgctgggcagtgcctctagaagaaggaggtacatccagtcttcctgtccgctctcccaagacagccaaaacatccacagaccacggtacggggtcagggttcggacatgaaggctaagagaagccagcaaaccttgccccaacctaacaagagaaacacaatttctaacctgctactgcgtgtaggtcactggagaccttcccaatcaaatgattaaaaaccagaaaaatggaggaacccaaataccaacctgagtaaaatgcaactgacttgacaccacaacacatgaaaagcatgatatagctgaattaatctttacagcaactcccctgggtttgcaagaaagctctcctaatatactagctgcaactgaatgatagtgttaactgcaggaggagttaatgcttattaggctgaaatccacctcttcagcagcctcagtctattcataaaggctgtcagacagaattctcttcatcaccaccaggttcctattctcactgttcgaatctccacaacaaacaatgacgtgagattataaactattatttcctacatgtacacagtttataaattataaggccccaaaatagctttcaatgtaaaattcccatgacgatttattgcatcctgtgcaggctggtgccttcatcctgacttcaggctccagttgagagaattattcccctacaactaatgtctaattaaaacataaaccatgtgagatgaaaactacaagaaaggaagcgcatttaaggttcagttactgacacaagcagcttcattacacctatgaagtactttaaatacaggagaagcaaatccatgacccagattatggggtttcaaatgctacacattaaaattcaaacttaaaacacacacaacacacaagtgttttgtaatctacagtgctggttgagacttgtcacctgctccctcaatgctgatgcaagacacaaatctagtagatgagttgactcagtgctgttcacaagagatagaccagtaggtaataattccaaatagtcccaattaagctgcctttctcaactgtagggtcatggtgaatcatccttaccttataatcctctagcagaatcccagatgcagacagcaaaggtgtgcctgcactcaacctatccaagatgggggagaggaaggccagaagaaatatccttccagtttaatgctaactctgctgtggctatatcattcttcattcaggatcaaccagtactgaacgctctaaaaaacagcccagatatggccgggcgcggtggctcacacctgtaatcccagcactttgggagaccgaggcaggcagatcacaaggtcaggagatcgagaccatcctggctaacacggtgaaaccctgtctctactaaaagaaaatacaaaatattagccgggcgtggtggcgggcgcctgtagtaccagctactctggaggctgaggcaggagaatggcatgaacctgggaggcagagcttgcagtgatcgtgtgcagagatcgtgccactgcacactacagcctgggtgacagagcaagtctttaaaaaaaaaaaaaaaaaaaaaacagcccagatacaactctatcattagaggtcaagcaaactcaaaatacatacacccaatacagaccttcctttccattttctcaatagctgtcttatttaattaggcatttaaccacggggcaaggaaatcactactcttgttcaccactgtatcccagctcctaaaacatgcctgatatagcaagagctgaataaatacttctggaatcaattacaaactcaacgaagctcagtctcactgttcccactgacatttatttacccctactcgccctgccagtgtctaacatccagtgccagaagtcacactgctatcctcataaaacactccccacagagactaatcccaaggggctcagccacacctctgattctcagcagaggctggtgtcctaggggagacatccttcctccacagtggctgctaccactcgttcctcagccactttgcagtgttctctgtaagaaaaagtgccagtccagatgtccacatggtcttacacatgtaacaactctgtcacactcccatttgctaaatgttgaccaatgattccagctactcttcccctaccccacttacatctgttcagactctttctcctgtatttccagcaatctctcatgatgctcctgcccgaccctctagatccaataattcattctcaatcatatgttcaagtcaactaatagcccattagcacctcactgtctgaaaatccaaattatcccctttgtcctctgtaaaccacttcaggccccttggtagaatcagtcagggtttgacagtgcagacctcttcttggcccactctggaatggcccacaaaaccaagcaccccatgcattctggtttactggtcagcttaatatagaggacacaggaatacgccctttagaggagaagtgatggctccttttaaactgcaggattactgccacttttgaaaataatagaatttcttatcaaaaagagcaattggtcaggaatcaaacttgtatatggtcataattttttttacaaaatttactaaaattagtaaaaaacactgtgccaagtggttaaggtacaggtggtctgtgggccacaacttggcattgcaagttatctctaacccggactgtgagtctttttactaaaagacaaaaaggagaacagaaccactcactgttccaagttctataatacacacataaaataccagagctcagaaagtaagcacatgataacatcacatgccttttatcagacaacaccatgtaacaactctccacagctgacggtccgggctagagattcaacatatccttccatagtgttgcaactccaagacagaccacctgtaccttaaccactcggcagcctgttagaaaagcagaatcctgggtcccatccagatctaggggctcagaatctgcactgatgcccagatgattctggtacacggtcaagtttcagaagctctgctctgcaaaataggactccatcctgtgcctatatacatcagaaagaaaagatgaaacctccaagacgaatgcttcaaacatccatcccatgcggccagtattactgtcagaattcagatgtctatataaatataccctgagaaatcttcctttgactcctcttcagtgatcaaagagcacagcggaaaacacccaaaaaggtatggcactaagtaatgctagttcctttaatcattccttacgtgacacggtctctcaaacccttctcttttggttactcaacttgggatgacttctctttaaaacccaacaaccagaattaaatatacattcaaattacatgtgaataatcctccagaacagatccaacacatacaagaagataattctatttccatgcacagtctcatgacactgcaggatctcatgagtttgcagttaactatatcctccatggtgactgtttctttgcagggatggggaggaagtaagtaaaagtattgcatcaccatgaaacaagaaccaaatgaaggatccaatccaaccaaaagcacagctcccagtgatacaattttattttcctgtgatgctctcctctactcattttaaagacaaaaaaacaaaaaacatcaaaattaaaaccttgtacaggccactgacagaaagctatgtgtgcataatataaccaagttgtattcagaccaggttaatgaactgctttacaagacaaaaaggtacatgatccacacttttaaaaaccagattgttttgatatagtttctaactacaccaagagttcttataatttgtctcaaggttggttggatcacccaccaagaaaaagcctttacaggatggtgttctgcagtgacagccaactcttcaataatatgggccctcaaaaatctctgaaaaggactcaagtacattagtgcaagaaaacagagacatccaggtcagtaaagctcgcagaatgggtgccacccagaggatgatacttggagtcgactggaaagacttgaaaactccatcatgattgtactaacagcaaacctctcctggggaagcaggagttgggcagtgagctcagcaccacctgcatttaataatcatgatttctctgctcagccttcctttagtataaggtccacaccactgctttctccctttagagtcaaaggtatgggggaaacgaagtaatcgtgaaacttttagttatttctagagatgaattccagagtcttgacgcaaatgtggcattggtagtcagtccatggcagatatcagatcaggaagtaaaatttcaaaactcagaaatgtgttagtagccagagatgttaaatatgtaactcacactgactcctaggtaaaagcaaaattaaaattattggtttgcagaggcttcatgtaaacaatatatgaaaaaaaactattattagtagtggggatagaagtgggagtaggggaaggaattttctattactagcctacaattggcaaaccatcgttatgcaatttgttcataccttggtttttattatggtttcaaattcaggccatcttgatttgggagaaggaaacaaagatgaaaaagcatgggttaaaggaaaacacatttctgatcaattaaaaatcaattttctgacaattacatctatttaaaaatggaagacagttaatttcctatcacttgcaggcaaactaccttagacactcatgcttcacaggtagagtggtcaagtcatttattacccaaatcaagggcactggtagtaacgacagggaaatacctcgtggaaactgggtcatgggtcaaccaactctaccaggccccttccaggaaatctgaatcaattaaaaacaaaccaaaaaaagcctacaatgacacaaagactttttttttaaccatatctccaaaaagaaataaagccactacaataaatattataaaacaaatataacatagacatagcaggattgtaagtgtgacacacatctgttctaaagttggaattcagaccccccaccaatgttttaaataacaacctggtgataaagaggcagaaggtggcaacctaggtgcacttacggaaggtgctgcaaaaaaacaatcctgcttccactgggcaggggcacaggacatcaaaggctcttcacaacccctagtacctaaaaccaactgaaatgcagaaatcgccttcgaattgatggggccataggagaccaaggaaaggagcactcaggatcacaggcaggaagatctcctaacacagagcctctttattaaaattcacagaaatgctaagacatggcaattggagttgccaaccccaccccccaccccccccgccccccccgccccccacccacatatagagatcgctagagctctacaggtggagggatgtggctactttcaaaaagaaaaagaagtgcttttcctgactccaatgcccaaaggaccaacatgcaatgtcatatcatgggattaaggatggtggatctgaacaacagccgtacagagctgaatagcaaatgaaaaaaaacattctaaaaaactaggcccatggacaaggaaaggattgattgctatttcctcctcccaaggataaatgactggaatcctgtacatgaatgccttttattttcagaacgtgtttctcatatacctgctgttaaatcaccctacttgaaacaacttgtggctgcctgatatgccaaacctgttccagcaacactttgagagaaaaacgaaagcaccaaataaaaaattgggagggaatgttgattcttcccacagattaagtgtaaacaaaaatggggttgggggtgatgaaggaaaatgagaaaggtacaacttcaactttgtctaaaataaccttttcttcccttttaacaaagtaacagtagtactaataatttccaattgatttaattccaaaaaaaaaaagtagtctgtcaatattcaaataaagtgaagcctgagtaacattcacaactggaaataaggggccaggaaacatcttgagagaagaaacttacttactgaacttgtgaatgatgttcccttgcctagggtttaaattaaaagcacttcaaagcagcaaatttcttcagacagacatgcttcccaggttagggtaaacggcctgaaaatgcttctgcaaggagagttttacttcttccaaactcccattaaataatgtgtacttatctttgattactgcctatttaaaaaaaaaaaaagctgcagctgaaattggattaagaacttctgctgaaaacgatttattgcataacacaactctgacaggctgaatctccggccaccaactgagcctttataaaaatctgctgggcagctgccaagtcagctcttttgcgtctgagcatgtcagacatccgccgtcgtcaaggcagcagcatggcagcaagacgtccgcacgctcatggttaaagggtgcagtcagggaacagagcagccagaaccacgcaacacggcattaaaacctcctgcagtgctggatctgacggttcgctttttcaatgtaatcaaaaaagacccaagatctacagcaggattatcttccagcatctaacagacacctggattgtcaatgtaccttcactgatggagtggtggcgaggaaatcaaattacaaataaattattggccagtgtcttcaaaaatcaaatcaaataaatagttcaatatcaccaatgccagtgtgcaactatatatgacttcactttgggaatttatgttactagaatttccttgggaatttatgttaatttatttacaaagaaattctaatatttggatcttttaatcactaatgcctttttatgttcattatgatatacccccaaaaaatccccaaatgccacattctaatctgcaccgtctaatacagtagccactagtcacatgtaagtacttataattaactcaattaaaatttaaaattaaggtccttgagtcatgctggtcacatttcagttactcaatggccacaatccgaccacctgtcaatggacaacacagctacagaacggttctgtcatcacaagaagttcttttggacagcactgacatatctgcattaaattggatagggtttcaattgacattgcgtgttacgtgatagtgcattttactacgtccctgagagtcttatgtgccttatgtgttactccatttaccaagaaaactgtgggagataagaaatcttttacaagaaaattagagtctaaagcaggcaagaactattcaaagtgcagacatccactcatacaactctccaggttggaagtggttccagtcctgtggggcacatctggcctctaggggttttgcaggaaacccctcttgcaggaaacatcctgaagatgaagtaaagtctgtctgcaaagccttgaagacacactgctttcctacaccttcaaatccttttctaaggaaatcactacaaaataaagcctccgggattgaggccagacaaaaaccagtcctatccaccagccagtctccaagtacccacagggtggccaaaacaggcttgatttgattcatggttgccccttactgacagggctggttagaattacggccctgtgggtgatggaaaggagttagtgctgctgtttcttccaccaggacccaggacactgctgggggatcattttatgagatcaatcaatgcctgactgactcgctggcttttttggttgaacaataactaccccacccgaaccccagcaaggaaataaacagaagtatacgtatattgtcacaagactggttatctctggtcatgttatattacaaaccaccagtttatttttgtctatctcatgcaaatttccacactaacagaaagtctacaaataaactctgtccttggacttaacataaactgacatattgccttattttttccagaaacagataaagttgtctcatatgccttaaccccttcctgtgtcctccagccctcccaataattaataaccaccctgggattggcaccctttcattacaggtatgggcctccagaaaccattctgatgcacattttccctccaaaaagcatttcccactaataacgtgtgtccaccaagcgacagggcacacacatttcctgtacatattctcttccacatttttcaactagcatacttatcacacaaacatttttaaatgctgaaactgaggttcagaggtgtgaagtagtacagatcacattctgactagtctgtgtcttactcgccttttatgttcctgagacatagcaatgagtccagcacgtagcaggcacttgaaggccattccaagacacaacacagggaaacaggtggcaggtggaaagagtgagaggtacaaagaagcctggattccaattctggaattctgtgaatcttacagtggctcatgtgtaaaacaaataattatctaaggcaatggtggcaaacttgagcagacatcaggaacactcccagggcttgtgaacacacactgtgcacagcctcctttcgctgagattctctcaggtgatgctaatgctgctggttcagggattacacgtgagaagtgctggtgtttgaacagcagacatgcagcctattcaactttcatcctagtcttccaggaaaactgttctcactgccatgagaaacactctaattgccaaatttaacgcaaactttttatcggcaactggactctcccctggttttcctgccacactaaaataccttttctgctgtttcatcacctccaccaccttcaagtttgattcttctgccgtccccttatctccaatcataatctaaatactgataactactaaatcatcttcttgacaatctcctccctccccaccacaaccctctccacaccaccttcctggctactctggtctagaaaccgaaactggacttggcactttttttctcattgttgacatttgctttcaaaatccaggtaatcctgtctgtctctcaattccttggatacctatttaaaccagaaatctcatctctttccaaagacaagaaatctcctaaaatgtctctaccaccaactaatcccaattccaaccatctaccccacgttctttctctacaaacacagccacgctgcaatttgacaccatccatgtcaccacttcccctactgaagcctttccatggctccccagaatctcagaagaaaactccaaatttccttgcagagcccataaagacctatcatcagcctaacttcccttacaggctttaatttctacacaactaccaacacccctaattgataaggtatgagcatctcataggggcaaaagctctcatcgtcagaccccgtgtccaaacaaatgccagtgtttactaactgcatactgatcatgacttcaacagtaatgctacggtaaatagagttgcctttctcaagagacaagaataaaaagtccattctcaattctttttcataccaatgtgttggcacctagaaataaacaagtagtcttaatttaccagctatgtctgtttcacttactgacctaaggctggctgttcgttctgtattgcaaagaatgcatgatcctatgtaaccctgagagaagacctcaataacacttaaactgatatattttcgacaaattaaatgactcctcttccaggcctggtggggcagctcatgtctgtaattccagcactttgggaggcggggggggcgcagatcacctgaggtcaagagttcaagaccagcctgaccaacatggcggaacccactaaaaatacaaaaactagtggggcatgctggtacatgtgtagtcccacctactctggaggctaagacatgagaatcacttgaacccagaaggcagagtttgcagtgagctgagatcacaccactgcactccagcctgggagatcaagactccatctcagggaaaaaaaaaaaaaaaaaaaaagggggctcccaatccaaagacaagatttaactctacctctaacaatactttacaacaatcaccattgtttcagctacctaaacaaaactgaacctcttctttggtccgtgcatcccagccagttccaacatttcttcctttatgcagaatgaggtttcttgcagttgtttagctctatgacgctggaataatgtggcagttgggggtttaatgaagaaattcacacttacccaaagccatgaggactgaccccaccctcccgccaaaaaaaaaggtggtatggcatacatacaacttcattttaagttaaagctgctagggaaagcaaatatggctatcaagaagcaaagttacgattcttcctatccttacagtttgcaatcatacaagaaacaaaaggtgtgttataagcaaagtggatgtatgtagaaatttaccatttacacttcggtgatgtgtgtgaaaggacagaggaggaagtgggggagataagaaatttgctctaaatgggaaaccactggagacttcggagcaaagaagtagcagactttgagcactgactgcagtgttgagggtaaatcatgggggacagtggtgtggaaaaacaagggaggctgaggcagttacctgtacaagagatgaggaccagggtggtgccaaagactgacaactggttaaattctggaacatttacaacactgggccaagagaaggctgacagactagatgtggcgtgtgtgaaaaaagggagtcgaatacatccaaaggttttcaactcagtaaatggagtcacctccactgaatttttcaatgtgctgttacctgttacagaccttagagaaaataccaaagttcagtccagagacatgaatgtagttgggtggttttaatcgaaactcagaatataaatttaggtgccctaatttactgaagagcaaaataacaaaaaataaacaaaagcctttatgtattgatttaaaagtcaggagtgaagtcaagtcaaggttggcggaccttgctgtgcctttttttggctaacaaggttttcagagcctttgggaaaacaatgctttaaaaaagaaagactaggttgggcgcagtggctcatgtctgtaattctcacacactgggaggctaaggtaggaggattgcttgagcccaggagtccaagacagccctggccaatatagcaagagaccctcatctctacaacaacaaaaatttaaaattagttaaaaacttaaaattaggcatgacggcacactcctgtggtccaagctactcaagaggctgaggtgagaagatcgcttgaacacaggcattctgaggttacagtgagctatgattgagccactatactccagtttgggcaactgagtgtgaccctgtctcataaaaataagataaataggccgggcacagtggctcactcctgtaatcccaggactttcggaggccgaggcgggcagatcacgaggtcaggagttgaagaccagccaggccaacacggtgaaactccgtctctacaaaaaatacaaaaattagctgggcatggtggcacatgcctgtaattccagctatttgggaggctgaggcaagaaaactgcttgaaccaggacccaggaggcattgccgtgaactgagatcatgccactgcacttcagcctgggctacacagtgagactcagtctcaaaaaaaattaattaattaaatattataaaggaataaaatagaaataaataaaatataaagaatgactaacacagaagagtcttggatagaaagagaaattactcaagagccattctctgaaaatctacatttgacatcacaagccctaactcataagagatgaggttttggttttgctaatgtaacagtggaggacttagaaattcatcagtcggccagacgtggtggctcacgcctgtaatcccaaaactttggaaggccgaggaagatagatcacctgaggtcaggggttcaagaccaacctgaccaggacagtgaaatgccatctctactaagaacacaaaaattagcaaggcatggtggcgggtgcctgtggtcccagctactcaggacgccgagacaggagaattgctcgaacccaggaggcagagattgtgccactgcaatccagcctgggagactccatctcaaataaaaaaaaaaaaggaaaaagaaatccatctgtcactgctggtggggaaattctaatacccgctgaggttataatcaaccctacccacctctctctaacacacaccccccaccgctacccacagatagccttatttatacttaggctttcaatgcaaataagaaaaatgaggggccgagtgagtgaagtgacactgcctagggcctgcccacgcgggtagctaaaaatatagtcatgagatactctctgagcaacaccaagactattcaggtttcaggcggccgcaaatcaaaaatatgtgtgtggcagtgaaatgaactttctctccagtcaatgaatccaggaagaatccagaagagcaacctctggatgccacatcaggggcaggacataccgtcagaaaagctgttgggacagtaaagtatacagcagcgcaacatccaaaggagtaaaccctacgacttgcagggagactgcagaaaatcattcccactcagaaaagtttttatttaccaacctgcgagtcacaccatgctgctatacctacacactgtggtttgaatttcttcttccataatccttgagctcctgaagcaaagattctccctaaaacattcttcactgcatttcctagaaagctacattcctacctttctaacaagtcttcttatcaccactgctggtggtttgtgttcaagcttctgcagcactcactgggagcactctcctagaatactagtggtcaggcatggccgccctggaaaccacttaatgacttcctcaccctcacattgacttaactggttggggtatggcctgtgccagagatcttataaactcagaatggctgctctagaattcagtcccgccatctcccaaatcagcctcctggcatgaaaaaatctatattctgacaactccttaacatcaagactggtacgcgttaaaagcttagtaactaactgtagagagaaagaagggaaacctttgtaactaaggaaaccaggtaactgtttaaacagagcacacggaatggcttgatacatgtttttcttgacagtaattctctgaaaatgagaattcactattctcagaaaaagcaaaaaggttacagtggacacaagttttcattcactgaaacataaaacgagcacctactggcttcaagaaacagaatcaatctgctatcatccattcaaagcttcggttgccccaactcaatgatgaaaatctcattaaccctgaatctctgagtcagaggtaattcagtcctaatccaccaacaacacaaaaacagtgtgttagtaccagtatcgggaaactctgttgtgattcttcatttatttaataatagcagaaaggagatattggaaaaaccagaccatctttgattcaatatatctcatcaccagaaactaatcactaattaaagtcaatatatgaagatgagaaagtttttcttcctactaacattaaagttgatgatagaaacgcttataagcagaaatagtaaacaggttatattacacaaacaaaaaattttttaaagctagttggggtttgacaaacttcttagaacaccttacaaaagccctgacctcaaagaaaacactttccaattttaacatacatgcccacacaaagaaacacagcagacacgccccagaggccaaaataaaatgctctctagtaattaccgtaaatagaaaaaggagatgggcttcctgagtcagaatgcagagcacaataaaaaccaccagcacaaaaacatcataaacaaaattacatggacaacagtaaactcagaagacggtggaattgcttgtcagtgtgatacaaagaaacacatctggaagatgtttaaacaagagaagggggtgtccgtgggtctgcagagggctgctgcaaggatatacagcatgccagtgtcgtcctaaaagacacaacatagcatccggaaacagctcactttctgcaggagaaacagaagagtttctttaaaatcccaccatctacagtttaaagatttgagaaaagatttcttatttttctatattttgattatctcccctaaatttgatacagaatttctcgaccaagggtctttcaacttggcgaattaaaaaaaaaatcaataaataacatttgcttagagagacttttcccttttacaaacagcttcagtctccaaatacctcttaaatgaacatgtaagacagttgtccatctagacccacactagacccattttgagtatcagtttgaagttataatttatgttcactgacatgtaatgtttaaatcacatccataatgaacctgtgattaaagactaagaatgaattcagagcataaaaataagggcacatttgcctcagaaaccaagcccgtgtaaattgtactgtattttatttgatccaaagttgcactgttgtaaaaattgttaacttcattactgcaaaatcccatgtgatgtatgcttatggctgcacttattcagcgtacttcatgaagactttacatactcaatgaaaaaacgcatgactttcctaggccatgaaggacatctggctgcagcagcccctagtcttgccagtaaggcttcgttccctagagatggtctttcactctgcactgagcaaaaggtacttagaacacatagccaagtaactgtgaaacgaacaaagttttttgttgttgttttttgtttgtttttgagacagtctcaatctgttgtccaggctggagtgcagtggtgcactctcagctcactgcaacctctgcctcccgggctcaagtgatactcctgactcagcctcctaagtagctgggactacaggcacgtgccaccaagaccaggtaatgttgtatttttaatagagatggggtttcaccatgttggccaggctggtcttgaactcctgacctcaagtgatccgcctgcctcggcctcccagaacactgggattacaggcataagccactgcgcccagcccaaaaacaaactttttaacataaataacaagaatccaaaatatgagataatgaaaacaactcagtcgcttgtctctactttgttcctgtatttacattaggaaaatgtgcacattaataaaactataatacatttcttcccacttcaagcttatatttatgaatttgcctaaaaaaaaaatgctctcccttacatatgaaacacaatgtactacgtgacaaataggaagttaaaatatatgtacttgttaaagattccatagacgtgaacttaagacaaatccactagaatgactataataaaaacaaaaagaaaaacagcagacgttggtgaagatgaagaaacgggaaacctcatacagcaattgtgggaaagctacttaggccaagtgtgggttcctcaaaaagttaaacatagaattattcaattctattcctgggcactcatgtaaaacgtgaacacaaatgttcacagcagcattatacataatatccaaaaagtataaacaacccaactgtccatcaaatgatgaataaatgaacgaaatatggcatatacttacaataggatattcagccgtaaaaaagatttcatggggcagcgtggatgaaccttgaaaacatagctagggaaacagggaggcagagaggccacatattgcaggattccattgctacgaagtctccagaataggccaacccacaaagacagaaaatacattgctggctgccagaggttgctgggaaaggaggggggactactgctaatggatatcgggtttctctttgagagtgatgaaaaagttccagaaatgtactaagtggccgggcacactggctcacgcctgtaatcccagcacttggggaagtcaaggtgggcagatcacatgaagtcaggagtttgagaccagcctggccaacatggcaaaacccgtctctactaaaaatacagaaattagccaggcgtggtggcacgcacctgtggtcccacctcctctggagaccgaggcacgagaatcgtttcagcctaggaggcagaggttgcagtgagccgggatcacagcactgcacttcagcctgggtgacctagtgagacactgtctcaaaaaaaaaaaagcaagaggaaggaaggaaggaatgcactaaggactaaaagtctatgaactgtactctttacaatggttacaacagtgaatcttatgtgattttttacataagcaaaaataaatcaactaacctaaaatcaaattgtacttaaaattacttttgaaatactgtgtgtgaataattattagtattattagtattttatccccatatgaaagttctagaatgtattaacattagatataaaatcacctaataggcaaaacaaaatcataatcactttgagtaaaaattttaagatttctgcatatattgcagccttagtgatccaaaatatcagcttgcattttttgatgttatcaagttcattgacaatttctaacaaagtatcacttaaattaaattaaattaaaaagtagcttatcaatacaaagtacaggcagataattcctttataacttatactaactacttttgagacctcacacagggcagaatgggaatgtgtaaggttttctctcctcctaccctttgcatgacatccagtcagtgaccaaatccacacaatgggagggagggttcatatagtgctctcaatgaacattcttctggactttcaattatttctttcttgaactcttatcatggtcagcaatccgcagcctaatcaagttttttgtgcttgctccccacctgaaattcacctccccggcttttctaatattcagttctcaaatatcaccttcttcaaagccttctctgaccaacctataccccagtctaaggaactcctttaacattctttacagcatttatcaaccacacaattcttgcttgtaggggtaggtattctatggtttccaaactacattaccagctgaatttcaccagtcatgtggcctaacccagctaagtagcattcgatatactgtacacttttacagtccggtggtctgggttcaaatcccagctgtttactggctctatgatcttggggaatgttaagtacatgctcatttccttatctgtgcttgaatgtctgctgtgtatataatacactgaaagtttttagaagtgtgcctgacactgagtgttacttaagcagtaacatcaaatgtctaacccctgtgttaacaaaggacaaagaaagcattaaagtatgcagtaatttcctgttgctgctgttaacaaattatcacatttctgtcttaaaacacaaattttcttacagttctggaagtaagtagtccaaaatcagtttcactgtgctggtggtgttagcaaggctggatttttctgcaagctctgagagaatccaataccgtgcccttttcagcttctaacggctgctaatatgccatggcttgtggcccccttatccatcctcaaactgcatcactcccaccttcggtcctgtcttctcgtctcattttttgctctgacagtgagccacctacctctgtttaataaggacgcttgtgattacattgggctcacctggatactcttctcgtctgatgatccttgatcaatcccagctgcaaaatcccttttacttagatacacctgtgaacaagactgaacttgctgccattgaaatacacctcatgctgaactctgaaaaggctatacagggatgtgctggcacagaggggactgttatcttaaactgtacgctttaggaacataagtggcagatttttttccccatttgtttttattttactgtacataaaagatcagttccttgaatttcctactgacgaagtatgaacacctgagtgggtcaaaaataactggtggctccaactcatgcaaaactaccatctctgttacgtttccctagaaagagaaaagtaattgttttgattgaaaagaatttttttttttgcattgaaatcctgaagaggtagaaggagtagagtattggttgaaggggtttacaattgttctgagttctcaataaagagaaacatggaattcccaccaggaaaaggatcattctaatgtgacaggctcctaacttctgagccagcagcttattactagaacacttaattcaccacgatcaattggcattcgattttggaataaaattttgctgttgttgttcagaaagagaccttcctcgataatgatattttttcctaaataacataagcattcttgtctccaaactgctctttttaaaaccaccatttaagtagaaatttaagtaagatatgaatgaatcaaagctctctcagaataggtacaacgatatgaattaagctcaagatttctactgtaatgtatataagtgaacaataaacacatgaaaacatgctcaatatcattagtgggtaaatgcaaattaaaacagcaatgcgataccacttcacacctactacaataactatttttctaaaaagacaggcaacaagtattggaaaggatgcagagaaactggaacctcaaacagcagtgggagtgtaaaatgatacggtggctctgaaaaatactcaaaaggctattactcaaaaggttaaacagttgccatgtgacccagaaattcaattctctggcatacacccaaaagtgaaaaacagtccacaccaaaacttgcttacaaatgttcacagcaccattattcatcatgacgataacatggaaaccacccagccaagtgtccatcaactcatgaatgcataaaatgggacatatccatgcaacagagtattgttcaccaataaaagcaaaagatgtattgatgtctcaatagccctttgcagctgtaataagtaacctcgtggcgctatgctatgcgtatttatttacaaaacttattccactgtacacattatttacagtgaatttagacttacagtcatgtctgaggggggaaaagcagaggttgcaccctgcctttgaactgttctgcctgctggaagcacaccatcattgtctgctccctacatgacagccaagtgaactacttaatagacactcagacaacttcatgtttccaggacgttaagggagagtaaggtggaaaggactgaagcacaggaaaaggatctgcaaggaaaccccaagatgcagagcttcatttgtatccctgacttagacctcccaggccatgcttggagccttcccttcactattctgattcctggatcatgtggtcatgtggtcctctggggactttttacttagtaatctacatctgagctgggggaagaatagtcttcctctccaatgacaatgcacgttatcaggaaacagcttacagacagaggacaatgtaacattaatattaagaacggggtggagaggcggggggctacatagtttcttaacaagagagccttccttgttaaaattatagtctttcaggaatctcagctaagcatgatggctcagattttagcagcctttaatattttctgttataatgaataatatgtcaataaatttgggttcaagaaactaacaggatttcaggagggcaacggggaagataagcctgcaatgaagagctagctgtgttcctcccttacgtcggacagaaaagagggagaactattactgaaaaaaattaaaaaggaagaaatatcaacatcaattttaaatgcctcacagcctcagattcggcgcagtgattatccttttttaaaaggatatgtacagtagtaactgctctttaataccatctctcaagccaagtcaacactagtttgaagaatctcctggtatgtcatcagcagagggaagcggggagtggagagcacttggaagaaccaagagggtgagtgactcaggccattgctccctgccaagggaagcagctacagatgccaaaacatcccattttataaggctgcacaaaagtgtgtgcctctctggaccacacagcaactcatcagaagcccaggataacttcccagttgaatccatacattggtcacttccccaaggagagcaaattaaatccagtggtgaataggattggctcccagaacacaggtgcaagtcggtagccttgtgtgatataaatgcacctactcctagcatcagacgctacacatgcaccaacatttgccacccctccattttacatgaggaaagtgggacccagaaagatctgctcatttgaacccctctggagcagagcagggatgagacccaggcctcctgctccatgaggccagtgtctttccatgaggaccccagctagaaggaaggtttccagttttatttaatccagcaatccctacctggtagctattggtgggaacaaaaacaagaggttgaccggaatcctcccagcttttcccctcactcactcatattcacctttcagcatctctttacctcagagaagtttttaccagaccctattagagcattagttactgttggtattactcagaaatgcttggctcacctactaatctataggctccctggggtgacctctattttcctcatacctgatgagcacagtaggtcttcagcaacatcctcttcgttaaccaaaaaggcaccttcaaatatgaaatttgtattttattacataccactcaaattgaaaacatgactgctatttagtaacccttaatccaagatatctgctttttttttttttactttgaaatctctttcagtacaaggatgtggcagtttctcctgcctccagctaccctggaataagtaagcaatccttgaggacctaacataactttgaggaccgtcttcctgttactaggttgccaaaaatatttgggagttattttgcaatcaaaagtgaaattttggtcattcctcccacaccaaatatttcactaaaatcaaatgtacagcctgctgccactcagtttctatgcctttgttaattcaaaaaaaaaaaaaaaaaaaccttaaactatgatttggcattgaaatgaaatccatgtgaatcttgtttaaatagcaattaaatgcaatcagtgaaggcccaacgatgactataaggaagtgatgaggttatgaacaacctggaccaaattcactcatactcaggctatgagaacaaggtgactgatgcaaatgggttgtttgtcattttaggcattttaaaatgtgaataccgagcacatcttggaatcagctaagtcagtaacaccaaagttcttcccactagctatagagtctccgtgttactaatgaagacgaacacctgattagatgcacgttttgattaacatctccagctcaagacacggagaaactgagtgagccaggtgaggtctgccttcatcagaaatcctgcaaaacacagcttatttccttcatttcaggtgcttggtcaacatgcagcacaaaaataacagcatattggtttcccagtcccttagatcttattgatcatgattctgtgacttcacccttagacctttctgatcatgattctgtgacgttactgatgtatgcctcaggtcacagcctcaagcttgatggaaagggctgtctccccaaattccagccgcgtgttaaaacagatgctgggcttgcagagttcaacaaacaatacagcagacttatccaacattaagatccaggacatggtgggcccagctacttccactcaacccatctctgttaactttcctcatctaaccaataatacgggaccacaagaaccgagaatatccagatttgacatccttagcaaaagacgcagaatcatagcctgagaataaactctgtcattgtatatacatttcaacggtgtccgtctcatctccaaaaaagagtacctgcaaggattcaagctagaagagatgatgtattaagctgaaggccagaataaggcattgcttgcgggaaggaggtagcatccccagccttcatctttccttctgtcttttgatagaatgcagcactagcgtaaggggtggtgggggagaggaactgggaagctcggtgtttctgctctggtttttacttcccttcatggaatcccttccttttttcttcagcattcctgcaggagctcctcacgcgtgatgagtcaaaagccatcagtgatctttggccaaaactacaattatggagctgccaatgccaaaatccagtcccacttctaaaacagtgcactttaatttgtactgttcctccagactgaacaatcctggaaatagaagtgagaattttccaacctgcaaataattcttctgaaaacgtccaagtcattctcactggctactccagttaggcccacttcacacacgtaactaattagggcacacaatgttgttgtggttgtggatggagacactaaaaacttacctgcccacaaaattccatccagatggaacatttttctttagtatctcccacctccaacaaaaagtcaccatcttggattagaaaataaaacctaatatagcaattaggtccttcaaaactaaccaggacctatctaccacatcacccctaaatgagctatgacttcatagatgggatccacatttttcttttaatattgaaaagcagaccaacataagctgcaaggtcaagagggaaactcatgttgcaatatggtttcaggaatctcagtgaaaacatttttcccttcctaatacacacacagttaatgtgaaaacccttttcaacattgtccatggagttctttcatggtcttaattaacaagtcttaaacttccatcctattgcttcagatggtatgctactgaagtaagtatttcttttccaattaattggcttaattcatccgcctccacctctccattcacaaagaggtagaaaatagcaaccactaaacctaaacagcaaagcctactctggttagagctccccacgctagttctcctgttgcagctgcttctcatctagctgggagctgggtctgcaaaagcttgactgtgggctttttacctgtatggtttcagcgaagaataaagaacaatgtttgacatttttatactcgagaagaaagcaagagcaattctctctaccttttcaagtataactgaagagaagaggaaaagaaaacccacaagttaacttctagaaaaaaaaatttaattaagttcaaactttaaagcatttctatgagcttatgaagactctgaaccagtcccagcccatggaagtttataaaatataatttaaaaaatactgagaacccctccacacaaagattatctactgcaaagaatattcatagaaaaaaatagaattaaaagaaataattggccaggtgccgtggctcacgcctgtaatcccaacactttgggaggctgaggcagactgatcacgaggtcaggagttccagaccggactggccaacatggtgaaagcccatctctactaaaaatataaaaattagccgggtgtggtggcgggcggctgtaatcccagctattcgggaggctgaggcaggagaattgcttgaacccaggaggcggacattgcagtgagccgagatcacaccactgcactacagcttgggtgacagagctagactccatctcaaaaaaaaaacagaacaaaacaaaaataataataattataagaaaaataaaataactaaacttccttgcagctgggtgtggtggctcacacctgtaacccagcactttggatgcttcctcttgagcccaggagttcaagaccagcctgggcaaaataggaagacagcatcaatacaaaaacatttttaaaatcaactgggcatggtggcatgcacctgtgatcccagctatttgcaaggctgaggtggcaggaaggtagaggctattgtgagcctctacttgagcctccacttgaggcctggaggaagaggctattgtgagccatgatagcgccactgcactccagcttgcgtgacagagcgagatccgctctgaaaaataaatgaatatacttccttgtccagtaaaggatttttgagccatcaccaccaacatacacaaagtggaaatgtttaaaccccaacagaattctactttttaaaaagtcattggtgtaattggtgaagaatatctcattcttcatctcattttcttacacaagctcaacaataatacattagagagtatacccaggaatctaaacacatatcatggaaaataaaatatttttctcaaatgctcaccaaccacgtgaggaatcagggaaggcaaaatgaattctgatggtttaaaaggttaaaatactgagaagaatgcttgcttgcatgaaacaaaataatcatttctctcatcatcaagcatgtgcacttctcccatacttcccaccacctccccacacacattctcgttaagtcctgcatttcatcaacatacttcctttctaaatactttcaaaaggtttaggatagcatttcaccacctacctgggtccttcttttccccatatcctcattctgcccataaattatagctaaattctcaacccaactacttaaatatatagtagctgctgaatatttagttacttcacatgtgttctcatgttcttaaccacgaaatgtctcagggatgacaaatactgctttaagaaaacagtctacctatcttttcttctgatataaaatattacaattactgccagggaatggtggctcacacctgtaatcccggcactttgggaggctgaggcaggcagatcacaaggtcaggagttcgagagcagcctagccaacatggtgaaaccctgtctctactaaaaatacaaaaattagatgggtgtggtggcaagcacctgtattcctagctacttgggaggcagaggaaggagcactgcttgaacccaggaggtggaggttgcagtgaaccgagatcacaccactgcgctccagactgggtgacaaagcaagactgtctcaaaaaaaaaaaaaaaattacaattacttcaataggaataacttgaccactacaagctggtcactacaagcatccagacgttgttagagcagaacaaacaaaatcaagcaaggctcctggagatcaagacaaaacgatggctccacatcccctctcccagagaagtgggttaggtacacagatgcatcaaccaaacgcgtaaaggcagaaaggaagaaagaaaaaagccacaccaaagcctactaatctgccctgcaaacccagaaaatcataagcatgttaattgaaaccagaatctgagaaagccaagcaaacttaaaaggggtacaaacatttataacaagaggaggcgactcatggatttaattacttccactatatatgacaattaagaataaatggtggaaaaccacaaaacagcagacagtaaagaaaaaagttaaatgctgattgccattagtgttaactggagtttctaacacctgctataagctactgtgtaataaaaaatgaattactctcctaatgaataaatgaatatcttaatggaagccaggatctttgggaagcacatttaaactattttatgccacaaaagtaatgttcaccaaatagatgctttaatgcgcatttaactagatgaaagaccctgaacctctaagcgtccaatctacatctgacaacagacttttatcagacaggaaaaatcactgaataataattcattatttctaatacagacagctgaacgacaacaaaaccacgaacacttacggaatgtatgtttcatatatcaccactccatgaaagaaaagctaacttatcccaagttgcaaacctggataagcagcagagcagagattcaatcccaggcagttcccttcccaaggcttcatcagtgtgagccttctggtccacccaaggctcaatgacccagtaacagactcccagcaacccaagggctgtgctgaactacaatgttgcccatgtaactctaagaaaacgtaagaaaatggaattctttctcagaaaatttccatctaagaggaataaagtcaaaatcggtattttaaaggaagcaaacttataaaagctagaaaatgtataaaatgcacttatggtcttatttcggtcccagcaatgggaacgaataatattaaataaattaatatgtttaattatgaactgaattttagttgaaaattccaagaggttgaattacttttccatatactacttcctatcaaaagctctttctcaattacacaggaaaggatgggaatacagtaactagaccaagatcaatgagtaagctcgagctccagattttcaattagaggacaaataaattaacaacggttctctagctgaggtgcaactcgtaattgacagcagatcaccccaggtttccatatcagagttgggtagccggaggtaccaacttggtgaatttttgtacttccaaaagagattcaggtacacatccctgcttaacaatattaaactatgctgcgttcctaaatctgctccagcacctcttgaaaagaccttgaaagacaagaaacttatctacatatatagataagcagcatacaatcagtctcaaaagcttagaaatgaagaaactatactagaagcttctaacaaacatcacaggaaagcagtaggaaaatctgccaactatcattcctaagcctagaaaccagctgctgcattaaaaaaacaaattacactgataactgatatttaacatgcattatatgattttgcaatagcagcaaacttacttccctaattcaattgagcttgtcaaaaaattaaaatcttcaactatccacacaaaagaatgatcataatccaaaacggcaggtaatgcaatgccttcaaaacgttttttgatatttttattattattaatagcatttttacagaataagctattaataaaattacatttcagttgatgttcatagaattacaataattaagaaattattacagaaaacttcatacaagtaagagacaacctgggattaaaattttttcctgggtggaaatctataaagaaggtaaaataaaaagctgtgcatcaaataatctgcatactcatggtaagaaatagtcatagatcatttgtttctacaatcagagactgaggaatgggaatgttttggacttaaattgtgatgcttgcacaacctaacagttaaaaaaaaaaaaagaattgtacactttaaatgggtgaactgtatatggtaagtgagacatagcaatacagctgcgttggtttttttttaaaccagagagctcagactttagtaggactctcagtcacgttttttaattccatttttcattacatcagccgagtctgacaaagccacacacactccacatcccaaggtaagcaagtagggaaattcctatatgccagagtgtgctttatctaagttacatggaacatgacagaatgttagagaggaaattatacccactcaagcaccacccactgaataaaaataacagaattagtaaacatctccctctttcatctactttccaaaaacgcttcaagggtccaccactaccacgaaagtaagtttcacagccacccttggaaatttacaaaaaaaaaaaaaaaaaaaaaaaaaatcactacatactcccaagtaaaacagattatcatgtacttccttaaaattcaagagaattttgcattcaacgccctgtctgtctgaaagggtggctcccactaactctcaggtcggggtcctctccgcaggatcagcagcaccgagcttaatagtctggagctatttattaagtaaaaggtcctcccaggtaaatctaaaagtagcatacaacaaaaccaatgtcttgtaatgtaagtccagggcaccgaagttattctcaaaacaactgctttgtttttttaatctaacaactcaccaccagcacttgcttgtctagctggcttatagtcttgtgatcattatgccaagatcaatgtacattagtctaaacaatctgatcttaaccagaccctgcttctgtcaaagataactgaagagcaacattaactcagagaacatctgctcaatgttgggggacacagtgacaggataccggctgcccttcctctccctccaaatacaccaaaatggaaccacacttagcagaggcctctttgactgcacaatagcctaattttatagcaagagactatcatactttcaatacacatccaactctttaatgtaacttcaatgtgattaggggctagggaggagtttttaatgggatattcaccatcattgtattccaccagcaataataatacacactaaatttggttacatttgaagagaacttaatgacactcttccatctggaattaaatgggaaaaccccagaaatcacaaaaccaaaatttgaagagcatgctcatgagcttttttttttttttaaatccttaactaggactgtgaagtaaagcagctattccctttttttttttttttttttttttgacggagtttcgttcttgtcgcccaggctggagtgcaatggcacgatctcggctcactgcaacctccacctcccgagttcaagtgcttctcctgcctcagcctcccaagtagctgcgattacagatatgaacaccacacccggctaatttttgtatttttagtagagatggggtttcaccacactggccaggctggtctcaaactcctgacctcaggtaacccgcccaaaacactggataccacaaaatgtcttggcctcccaaaatgttgggattacaggcgtgagccactgctccaggcctaaccgtcactattttacttcccaaggactcagtaaaggcgtcttcaatcaaagcacctcagtaataatttcctaacttagtactagtactaaacacctaaattatgggtaagtaacgacacaaaataacgaggtgggaaaaggtcaagatgcataataatgttcactttgaagaagaagctagttgaataattttatggaaaattttgccagtataaaccacaaatttttctataattttaacaaactagaaaagttaatagaacttaatagaataccccccattaaaaatgtgtatattctgaataagcaattcactcctttttatcataaggagttaattatgaaggtgcactaagctcactactttgttactttcaacagcacagaattagatcaaactaattctaattagtttgaattagataccccaatgctaggtaggtgctaataaattctaggaggcaatgcaggacagtgactgggctgacaaacctggagcatccaaccaccctagttggacagtatttagtgtctgctctgccccaggtttccacccttgtgggggtagtcccagaggctaaatgggcacaatgggtggggagagggatcacactgcatactgcctgggagacaatagatgtttacagtaagtcgcacagaggccaagtggagagattgtggcgattcaactcagctgcccagtggaacattctccacccaattacaaggaaagatgcagaaaattatttaaaagccagactttgagagactgagcatgtgcaatgctgctccggggattgtttctgttttgtttctcgatgttttacccaacttggtgaagaaaaagaaaagaaaaatggataccacaaaatggtaataattatcactgtgtggtataaatgctgtcccccccctttttattttagcagaaagcccaaatgttctaagataaaaatatattgctcttgtaaatcaaatacaaaatagggtatggaactgtactcaacaggacttaaataggattgaaataatgaaagaatattcactcttctttctacagtttgagtcatgatcagtatcacacaccctcccataatattaaactatgtcatttcatttgtttaaacatttattgagtctatcaatgcagatactatgtcatcttgcccttaagcgggcactactctaaactctgcctttcatcgatttctctttgccatttactaacaataaagactaaacccacaataggtggcaaacttacttggcacctcttcagtcactgctagagtacagtattaccccccaccaagaaattttatatacaaatataaattattctgatgacaaaacagaaggtccagtcaatgaagtgtgggaagccttgttgaagcatgactcagtacctataatatggcagggtcatgacgggtaggcaaggttgctggcacatgcctatcttaccctggaggctggggcctgccctagaaactttgtctactttcctgtgtgttgcagagaagctgaaagcccctctgcttctagaccttacatttgctgtttccaagtaaaatcataagtatacataagaaaactttttaaatatcttccactcaaatgtggaagagtaaaaaagaacatatgggagggaaaaacatttatgtaaacagtaggtacatgaagcaagaaaaaatgggctgggcagcaggcattatttctgcatgaattttttatacttttccatcagctaggaaacatctcaaaactgcacagaagaacccatcaaaaaattttatgtaacagtgaaaataacactttttctaacatcacatgggcaggaaggagagcgtgggtataaaagaaaagacttccttttgaatacagtctcttttgtttcacttctttttaaaagagataactgtccttggatatagaaagtgtattagcaccgcttcctgcttcgaggtggtcaggtctttgaccaggtttaaattactatgcagagaaagactcatcccttcccaagacacagcttggaggcaaacatcgtaatcccatagctgacttcaggacttcagataggtcataaggccaactgagtgttatctaaaactatcttacattcacactcacatttttcccactaaagaggaacgagacacatttctgaccagcaaacgaccaagtaggattgaaataaagatcacggcctcagcttcataaatctaactctaccatcatggctataaatggggcacaatacagaacaccagcagggctcctaagtcctaggaatgaatgaataaaagtctgccccaatatattgtttcatatatatcacctcatgggtttctccaatatccatccactacaaagaccagccaaagcaagatgagagtagtctttataaacctgaaggttggcatatctagtcaaggaatcacaactacttttcattagcaccaaactggttgttcataactactcccaggtagtaaaatccacacccaactaatgacaaagtatcaaaagtacaatgatgtcgcacaagtcacagattgagaatcaggctcagaaatcagcccattattgtacctgctgtatgacctcactggacatcagcttccttcatttgtaaagtaagaatgaaagaaggtgcacacaaattggaaaggccatgctcagcacttcaaaggcaccccaaattacttggcccttgttctttaataactttatagacacagcccattagaacatggcatctgaggccgggtgcagtggacaaaaatacaaatgtcagtcgggcatggtggcatgcacctgtaatcccagctactgaggaggctgaggtgggagaattgcatgaacccgggagtcagaggttgcagtgagacaagatcacaccactgcactgcagcctgggcagcaaggcaagactccaattcaaaaaaaaaaaattaatgccaaagatcatagagataagaagtgaaatatactaacagcaacattgtcctctgagttttttctccctggtgaaagaaatgaaaccttgtatgggagcagataaactttagaagagagctaactgggccaggcatggtggctcacgcctgtaatcccaccactttgggaggccgacgagggcacatcacctgaggttgggagttcgagaccagcctgaccaacatggtgaaaccctgtctccactaaaaatacaaaattagctgggtgtggaggcacatgcctgtaatcccagctactcaggaggctgaggcaggagaatcgcttgaacccaggaggcagaggttgcggtgagccgagatcgcaccattgcactccggcctgggtaacaagagcgaaactctcttaaggaaaaaaaaaaaagcagggcgggtggggcgggagagataactgttcttgccctatctttagcagttaagaggtgcaccctgggaatacctgcatcttctctcttttttataagagactgaggtagccactttccagaggtcctctaatgtaatttctggtcccagggccagtttttgcaacttcctcctgatatcaggggctgcctgagtaatatatttatcctttaggattagctgtcccttggctgaatcaggagatagggaggtgtgctttactaaggcctctcttagcctttccagggaggcagtgggattttctccaaatccctggtcaatcatggacaacttagtataattgagaggcccggtcctagttctaggtaagccttccattatgcacacctgaaagtgtctccgcttcccgtcttccacctcgtcactgggatcccatttaaggtcatccattagtactgctcttccagttggataatgtttgcccccttccctgatgctgtatgtgacgtaaagctcatccccaaatctctctgctgcttgcagagcagcctgcttctcagtgttcgtcaaggtcttaattcaaaagtaacataacctctctccaggagagttcaaatattttagtgaaattctgaaaagcctctatatatcttatcagggtcatctgaaaacttgccaagatcctccttaatttgctttaagtcctgtagggagaagggtaactgggccttactgggcccaaattcaaagggcatctgctggaagggaaagagtgagactgggccttgttgagagcaagaatttttaggagggagcaagtgagaggctgaagctagatagggaagttggggtggaccataggggcagggctagagggagctggttcctctgctgggagtgcctctttactttcctgggcttgccccttgcagccttccctgagacagcaaacaggagggctggatcaatcctatattgtcggcaaaggtctggattgccttgcaaggtatacaaagcctgcacatatggggcctcagcccatctgtcctcaatgtctacagatttgccaaatggtatcaaaataaatggtttctttctgaagccaagccagtcctttctgtaaatcgtaatttggctaaacctttgtgcagagggctacgacgcatttttcctccagattctgagagtcaatgcagtcccaatggtttaggacacactccagaggagtataagctgggagtggtgaagagaactggttgcccattctgaaagacagggaatagaggcgtccctcattcccttccttctttcagcgaaaactcaggctgtgacagagaaagcgagtggcctcctttcactctccacttcttatccctgggccagccataggtaccactgcagtacatacccatgaagcaaagaaaacctggagaataggaattaactgccctcacctacgcctccatttctccctgctgtcggcaaactgagttccctgggcctgtttacaccatgaagcatggcgtccttccgtgaggtggaggatttggttggcaggacttggtccttcctatttacattgtgcctgttgcctggcctcggaaccctcagacctggtttttctttctagggcctctgcctgaagcttggaatcaagtttgggactgaaaaagcattttagaggctgtttgtatctgtgtagagtgtctcaaatgtgccctctcaaatctgcagttctcagccagcaggggccgttccttcgttaacttccctatcagaaacagagttgggagggggacccttctcactcagaaaaggaaaaaaagagagaaacagtttaagaggcaaaaaggggaaaattcaggggggtggggggagaaagccccttgcttagtgcaagtggaccccccctaatccttatgtcttttcccagttcagaccaggttgaattcctcgggcaggggttccattggtgtggcagacgagaagtgcccatccattggccctgtagggtctcagctaccaccatggctttctaccacccacctcccccatcgtggctgttgggctcagaccttgcctgctgcaggcatgcatagccacccaagctgggagaggaaaggataacaggaggtgccctgagccatgagtgcctgtgtctgtcgagctttagagacacatacatggcacctctaggaacatctggtctgatgtgcatctttggcagctgagcctaatgctcattttacttagtaatattgccaatgcctagaggaaaactcttaacattgtaaggaaagagataagagccattcaaacctctctcatgtaagagagagaagagacaaggtctgggggttttgatcggcagttagggtggtttaaaactgcatgaagggaagcagagcctctcagccgcaggaaagagatggcagggttttggaagagaggcaggaagagagacagtttcgcattcgtttacactcaccctgcgaggaggacaatggaacctttcccattacacatttaagtggagtgattacaaataacaaattgatttttatgtgtgacttactgaactacactctgaatactaaaaataagttaactcttctctggcgagagaacttgctaaccagatcactaagtctccaatcctgactgcgcaacagaattacagtaagagagtgaaaaaatacagtggctcgcacaggtaatcccagcaccttgggaggccaaggtgggaggatcacttgagcccagatggagaccagcctggggcagcatggtgagacctcatctcttaaattttaaaaacaaatgtaaaaataacatgaaacgtacagaactgtatactgccaaatctattaaaaaaaaaaaaaaaagaatcctgaattttactagtgaaccaatgctaaattagaacactgaagggggtatgtttttaacaagctccagacagtagtgttcaacattggggaacattctttccccagacaaaacggtttccctacaagacccttattatatgtcattgtacacaggcatttacaaatattgtcttaaatgtagaattaaaatctatactccagctctaactaagttagcaagcattactttttgagtttgaccaaagtagttcattccaaaacatgaaaagccacaaacatttaatcttaggttcctatttttaacaacaatatacagaaatcttcgcaatagcgaaatattactgaaccaccagtgttgttaaacacaaaaataaattagttaggcttgatatacttttccttccctccctcagattccccacctgtttttcagtttcaggaaaaggcagccactgatctccacagcactcaccggaattacctctcttctgggatgataaaggggccatgcctttatttatttatttattcattcattcattcattcattcattcattcacccttggagacgggtctctgtcacccagactggagtgcagtggcacaatctcagctcactgcaacctccaatcctcagctcaagcaatccttccaccttagcctcttgagtagctgggaccacgggtacataccaccacctctggctatttttttgtgtgttgtgtatagagatggggttttgcccagactggtctcaaattcctgggttcaagcaatccgtcccccagactcccaaagtgctgggattacaggggtaagccatcatgccaaaggggccatgctctggaggaggagatacagagcctgctccagctgttggtccacagaaacactgagcagcacataggaatgcttaaggcttgaggggcacagacagaaaatctgggagtctccagcacactcttgcagtgtggacagtggacactaggagaaaagacaccccccagggacacctcaatgtggacaggcaggcagagaaaggggaactgcaacaagaccatgttcacacagaagagaacaaagaatgaatgatggcatcccagatgtgaaggaagagcagagaacttctaaaacagtcaaacctgtcaaatgtgaagttctaaacagcactataggaggctgacctgccagaagcaaggtgactctgacatacctaacatggtcaagtgaaaaatgaggggtgtgggccaggagcagtggctcacaccagcaatcccagccctttgggtggccgaagtgggcagatcgcttgaggcctggagttcaagaccagcctggccaacacggtgaaaccctgtctctactaaaaatacaaaaattagccgggcatagtggcacatgcctgtaatcccagctacttgggaggctgaggcatgagaatcgcttgaagccacgagacggaggttgcagtgagccgaaatcaagccactgtactccagcctgggtgaaggagcaagactgtctctggaaagaagaaggaggaaaaaagaaaaaaaaagaggggtgtggactgaatatcccctgggggcccattccagttccacaaacctaaaatctatggactttcaattaccatttataaaatcaagagagaaagtaaggctggtgagtgtttaataatctgcatcatgaagaaattaaatataccccactggtttaataccactaatttttgaaaattaaaccaatgaaaatagcaatattcatgagtctaggtggtatgatatgcagttatattccagttctttaaatggcagtagtagttttgaacaggaactagaatctccccaggcccacagtaccccaagttttattgtgactttgtgtagaatttcaaaaggccttctgtatctagagttgtacactctctcaaatattacagtattgaagaaacaaacaacatgatggaagatgccctttggtaacaacagcctgtacctgacttggcccatctgtcagtcagaaagctggtaccccaaagcgcaatggaaaacagcaaaaggagcaagcacatggtaaaaggagtatgcaaaaactgctgtaaaaattatgtcaaatccagactagcttgaaatgaagagggggtgatcagaaaagtagtggcagggaatgaatggaaaaccttactccttcaaggtatataaaaagcatcctcacattaaaatacgtatcaatatagaaaaaacatttttatagaaacagaattataaggaagcattctaagatctgacttctgccaaagtaactctagggctcatgttcctattggtgacataagccactgttccataggaacccctgtgattacaaggtcaaattttattccattatgcagcacactgacaatgcttctttggagacatgatctgttaatgtatgatttattgtaattaagcaacacagtttaatgtcatcaagaggctttaattagagaaggctgctgtgtcttcacgctgtcagatcaattcctgtttgcacaaccgtacagacttatacatgctctgggaacacctctgcatgtactgagcaagccctcctttggggttatggacttccgcacgctaagatgtcatattttaaaggtttgcccactaaatatattttgtgtgttcatccaaaccagtctcggggcgggggaagcacccttctattctccagaacatcctgataggtggctcctttgaaaagattacctttaggtttccctggccccaagactccctagtcacttgtatgttatggcaccaactttgaatttcattcctgatcatgcataatgctattctctttcacccacgtatttactgaaccaatctggcactcaaatagctagaatatatgatggttagataaataagatgcagtgttcatacaatgtaatttttttcagcaataataaggaatacattctggaaatggatagtggtgatggttgcacaacactgcaaatgttgtcagtgccaccgaattgtacacacaaaaaatggttaaaatgataaatttggtgttatgtgtatttaaccaccattctaagaactgaaaaaggaggagattagaaatgaagtactgattcacggaacatggagaaacataatactaagtgaaagacgccatacacgtatggccacatagcatatgattccatttatatgaagtggccaaaataggaatatccagtgacagaaaggacattagtggttgctagggcctgggaagaaataataactgctgatcagtacaagatttccttttggattgatgaaaatagtccacaattacatagtagtaatggcttgcctaactgtgaatatactaaaaaacaccgagttgtatatactttaaaagggtaaatgtgccgggcacggtggctcatgcctgcaatcccagcactttgggaggccgaggcgggtggatcacgaggtcaggagatcaagaccatcctggctaacacagtgaaaccccgtctctactaaaaatacaaaaaattagccgggcctggtggtgggcgcctgtagtcccaagctactcgggaggctgaggcaggagaatggcgtgaacccgggaggcggagcctgcagttagcagagatggggccactgcactccagcctgggcgactccgtctccaaaaaaaaaaaaaaaaaaaaaaagaaaagaaaagaaaagaaagggtaaattttatggtgtgaggattacatttctataaagctgttattcttttaaaaataacagaagaatacgggaagaaccttaagaaacaaggagtagacagacaacgaatgtatgtattgaaaactattttggattatttcttaggacaaacacacacacaaaaaaattgttctctttccagctctgcaggatctagacaagtgaactgttcaggtcttgcaacaacttagaaggcctatcagactggcaggagctcaagggggacagctggacttacacaagtagcgcccaccacagctgcaagccaatttctttttctaaacactgtggtctcttctcctggagctgctgtacaggcttttgtcactataataaatattccttcagaaatacagggaagttaggagtaatttggaacagagctattaaatattgctccttctacataataaagctgttttgatacaatgctgctttcaaatacctgccaggttaatgaaatgaaaattaagatttggtgttaacactgggagtcttggatggtaacagtattacatgatatattctaattcattactaaaagaattgtctggcatgtttgagccccagttaatattcagatatatctaaaaattaaattcctgaggtagcttgctaatttggtttttctcacagaaccatttgacatgccctgtaaatattaataaattatcaatagttgtttctgcataaaattctaattctttgtcggaattttttcctagcacattctaatccccccacccttccttcctcactctgacatatggcgaagagcaactggtttcgagcttggcactgcgactattttcaagcagactttctgagggcatcagttcctgcatcaagcatgcagttctaatggactggcttagcaggtgtgctcacaaatatcaaacagaacaatacagtccggaaggagggacattaagtctaggattttttttttaacttatgaattagaattttctatttaatattttcagacacctgtttattttaagaaaccacagaaagcgaaactgcagaaagggggtcccaccgtactttttatgaaatggagtttcactcttgttgcccaggctggagtgcaatggcacaatctcggctcactgcaacctccacctcctgggttcaagcgattctcctgccaacatacccggctaatttttgtagagtcggggtttctccatgttggtcagactgatctcgaactcccgacctcaggtgatcagcctgcctcagcctcccaaagtgctgggattacagacgtgagccactgcacccggccccccaccgtactattaatggaagtcacagcttacattaggattcacttactctttgtgttctacattctacaggttttgacaaatgcaaaatgttgtgaattccccattcagtctggggtatttcttaaagtgttgctcaaaaagacagtttccagtattatacttctaagggcactctttctgttttccttcaccactcctggcctacaggttttttgttttttttgtttttgtttttgttttttttgaggcaggatctctctctctgccacccaggctggagtgcagtggtgcaatcatgactcattatagccttgacctcctaggctcaagcaatccacctacctcagacacccaactagttggggttagaggtgtgtgccaccatgcccagctaatttttgtatttttttgtagagacaggattttgccatatcacccaggctagtctcctgggctcaagtgatcgaactgcctcagcctcccaaagtgctaggattgcaggtgtgagctatcacatccagcctttttgctttattaaatgagtagttaattcctgaaataccgctcctttcacaagacaatgaagtctagtgagatgtccttgtacttaaggactatcttagggaacaattacttaattacaacacataacactctttcccaaaacctgaaagaagtcaccttttaaaaacagactactttgaagtattctgtctccccaagacaggaaagtgaagaatggaaggaggacttaaaatatatattttttgagaaagcttttgatgtgactttcccagtattaaacaatacctcttagcaatgattgcatcttttggctgattcaccaataataatgaccacgcagagaagtttctggctacactatttccattactcattctgtgaagtgttcaaaatgttaaatgttttgactgttttcctaatttacactctatgcttttaatatattagaactgatttttgaaatacattgtccctttaataaacaccaggcactaatctaagattgccaacctaagtcatatttctactggaagaaaaaatacactgaaacaattaacattattggaagaaaaaatgaaaaaagaagagggcaaaacccacacaccatacttcctccggtaatgtggtcgtgaccactgtgttgtatcaaactctggccacacaagtggatcaacttaaccattccaatgctggcgcaggatgtggattcggtggtattaatgagtgcgcaggcttataatgtaacctcaccagaccaaataacctcctggccacacaagtagaaaataattaaaacaagcacgattccaatttagctttgtataccagatggtgaatgaaaaagcagacaaagactcgttttgtgaataacctggggaacagcccctatagtttcttttaaagttacagcctgacttgtgaaatcaaagaggaaaggaaagaatacaaacgttctcaccagaattcactcctagagcacatatatatccttttccttaggtcatgaccagagaacatcacaactcattccttaaatgaatgtcaagtttaatcacagtaaaaacccagaaacccagtgaaaattaagtgggggcaagaatctgctgaacatctatttcaatgttgagctctgagctgtatgtaaagaaatatatgagatatgttttttaaatcatcaggactacaaaacaacaaaagtcactgcccagattctacaaagatcactcccaaaaaatagacaatatttgcaacctaacagagactcaggccttctttttcctcccctcaagaataagggcatgtcatggatgggcaaaggaagaaaacattttaaaacccaaagattcctaactttgcacaagaactctgtcagcagtctagaaatgggaagataaaatccgaatggctggctgaccttcacagactagacagagcgcatgcggtttaacccgcttattaaagataaaagctgcattcatgaaagggagacattaactaatctgtgcatcctccagtggggataaggacagcaaaagaggccatcatacagtccagtactccttgagatttacagtgagcttgccctgagtcaaacagcaaaattgtgagctagtttatttcagcacaataatcttcaaacttttctgttagatcccagcaggatgtcaactctccctataaaccctacccctgcttgctgctagcagcagctgacttccccaggcccatccctccccaactcactcattgcaggattaatcacaaccacaaagcagaagaatcccaggccagagtcccaagggatagtaagatgatgactaaggagggaattacaggcttggggtgataccaaaataatcccccaaaaaaaaaaaaccatattaaagagacatttgtttctgcctcattcaatttaagcatcaacaaagattatttctttgggttcctaaatcctgtttctgacctactttgtttccttgacacaatgggtttacaataggtgtacagatgctcatgtggccccaagggaaaaagaagaactagaaaaaaaaagcccattattaagatactacatttgaagatctctctggcttttactgctggtcactgttcacaggcttcttgaacaaggcaggtgcctccatgcccatccccacacaggtggggcctcagcagctagacatctaaggaagggtcctttgcactctacatacttgacaggtacccttcctgcagcaataatagcccatgccatattaacatgtgctgcacaggtgtaaatgaagtcatcgtgaatttgaaacagaggaaggtgtttcttgaccatctgaatctcttactttgaggccacagacacacattttgactgtatggatgttctgaagtctggagtaaacgaggctgtggtcctggctttaacacttactatattacactgggcaacctagataaacaattgtatacatcaaattctgcttctggaacaacaggattaagcagtcaataaaatttagcaatgttctaagcaccatacatctaatcacttaacgctcccaatgacactaaatgataataagtttttctattaccttcgattttcagcatttcaagtaactacaggtataaggcagcacagtaacttgcaacctgcaacagcaacctgcagacactggtgttattaggaattgcaagtaatacatgtaaagcatatcatcctgcccagtgcctggtacacagcgggtgcccagtaaatagcagctttactatgttttggagaatttggagatcctgttcacaagctctatcgctacctgaattccatacaggtgactttgtggggggtgatctttgcttcttcggacctcagaagaggtcctggaaagcccttccaggagtgttgcaagccactgacccttaaaattcacctcctggttcccttcatgaactctcacacagaggagagtcttccattgcaccaatatttattgaacagctacatgtcctgggcctgtaataaatattcactggcaatccactaagatgaatcaaaggtggctaggctggggatggtaggggttctctgaaaacaaacaagatactgtataatgtgtgtggagacaaatacaaacgaggtgcacaacacagctactccaacacggaaaatgcatctaagtgggggatgaaaaacgcttcacaaaagacataacattgagccttgaaggacaagaatgtgaaagtaaagacagcagagaccgcgttgcagtccaggtcacaaccaagcccattcatctgcttcttgaatttattctttttataaagactgtcctagaaccaaatttctatagttctgctgttttaccccagagattgctacgtgcccttctttccaaggcttcctgtgtcctttatgacctccctccctcattcttagtcctctctactcctccccaccacccactggcagcatgcggggatgcacgcacatgcacacgcacacacacgcgcacacacacacacacacacacactcttccagaatggaagggatggcagctgaatgcagtatcactcacatttatacctgccctagatgccatcatcagatctccccctcgtggcctcaccaagtatgctgaatgttacacatactgcagagttatgccctgagactgataagggactataatatgaaaatgtgcaggggtggggtggaggcgagtcaaaaggcacctatgcagccagctatgatagcaccactgcactccaacctgggtgacagggcaagaccgtctcttaaaaaagaaaacaaaaaaggaacctagaagttaccatttttatttgtctatttaaaaaacaaatttttaaaaaagaaacagcaccaaccccaaaaaagaaaaggaggaaggaggctaacagagtaagagaaaggggagaaaaaagatcccaaagcaaaacccatcagccgtgtttcaggtcgggcccaaatgttgctgccagattaaatgacccaccttcactctcaaaagctgtggcacttggaacaagtgacctcatttcctcaagaacaacaaattaaagggacagagagattaaaaacaaacatgttttatcaacccaaccagtatcaatgtatagaccttatttgaaaacatgagactgacagtaggggaaatctgaacacttgactcattatgttatcattatcatgggtatgttttctctaaatagaattcacagcttttaaaaattaatgctgtgctggacgtggtggctgacgcctattatcccagaactttcggaggccaaggtggactgatcactttaggccaggagtttgagaccagtaaggccaacatggtgaaaccatgtctctactaaaaatacaaaattatccatgtgcagtggcacatacctgtagtcccagctacctgggaggctgaggcatgagaactgtctgagtctgggaggtggaggtcgcagtgagcgaagatcgagccactgcactccagcctgggttacagagccagaatctgtctccaaagaaaataaaaacattaatactgacaggccaggcgtggtggctcactcctgtaacctcagcactttggaaggctaaggcatggggccaggacttcaaggacagcctgagcaacatagtgagaccccatctaccaaaaataaaaattagctgggtatggtggtgcacacatgcggtcctagctagtgagaaggctgaggcgagagtattgcataagcccaggtgtttgaggtcacagtgagctatgatggcaccaccactgaactccaccctgtctccaccttccaccccccaaaaaaatgtctgagatttgcttcacttagagtaaaggtgtaaatgaaacaaaattcaccatgggttgatacttctgcaattaggagaggctgcatagaagtgtactgcatattttcaggactcaaaaaagctactgtttacctgggtttcatatacacattgatatttaccatactagaaattaaaacaaatttcatattaattcatttagaaaattatacaatcattacatgttaacagaaataaaatttttatgaaaattgtattttacacattgaaaaaactgtgagaaaagtggcactgctttccacttctgcaaaagtctttaatatctggcttaacgggagtcaacacagttctcataactcaattcaatctgatgcaatatcacatatcatgtagtatctggaaagccccactgcacatttgtgagaaaatgaagacaataatgtctcagtttttaccatggtactacttttcgccttggaaactcccaggaagggactatgatctagggatccctagatgacagtttgagaaccgctgtgatggagcaaagtctatggcggtaaataagaatttccttgacttagcaagatttctacgatcctctttactctggtgaaatcaaagtcccaagttgacaaaaagaacatcatgtcacccctgaacaccctcctgcacaccacaccatcatgaagaaagggtctctgtagtatggactggtcaaagtacccttagacattcccacagctaaattcaggacaagctgtgaatgttcaagatgtacttctagaccgctgatccctaataggaaatcaatatgctgggtctcttgacaagcaattttcttttaaattaaatagggggaaaaaaaggatagattacaatataacacggagagtgaggctaagctgaaattgtttcagttgtgtgtgtgcacacacacaggtagccacaaatactgggtctcaattcgaaagttcttattgcaaataaaagtcaaaattaacaacaacacaattccctcaggtacaaggtacagattataaaagtctttataaagaaagaaaatgggaagaaaaaccatgtttgaagaggaagtaaaggtggtgactaaattaagttaaaaaaatcaagttttgaaattgtggtatggtcctcattaaagaaaaaaaaagaaattataaacacatacgaatacacagaaaaactctaaaagcatctcctccagcaagggatttaggcaggcttgagtgcaacttattactttattcctttcagggctgttgaaattctttgacaaagggcagggaatgctttcagagtttaaaacaacaacaacaaaagacattcttttcttttttttttttttaataacaaaaccacctctgacccgtactttgctccaaacaaatattaactcaaaaagcagttggcgggagcggtggctcacacttgcaatcccagcactgtgagaggccgaggcaggaggatcacacttgaactcaggagtttgcaaagtgcctggaaaataaagcaaggctacaaaactaccaaaaaaaaaaaaaaacacaaaaatcagccaggcgtggtggtgcacgcctgtagtaccagctacttgggaggccaagacaggagaactgcttgaacccagaaggcggaggcggagattgcagtgaacctccagcctggttcaaagactgtcttttaaaaaaaagaaaaagaagaagaaaaaggaggggggtcatagtgctcaccttggcagctcatatattaaaactggaacattacacagaagataacacggcccccgtataaagatgacatgcaaattcgtgaagcttttctttttaaagtgatc

SEQ ID NO: 166 - DNA, 652 bp, Homo sapiens
  misc_feature (560)..(560): n is a, c, g, or t
  misc_feature (576)..(576): n is a, c, g, or t
  misc_feature (596)..(596): n is a, c, g, or t
  misc_feature (610)..(610): n is a, c, g, or t
  misc_feature (624)..(624): n is a, c, g, or t
  misc_feature (639)..(639): n is a, c, g, or t
tgactttgctgatggtttattaccttaaggaaaagacttacacagagaaattgagcaatgaaaacccttcacattgagcaaacacattccacgctacacaaatcatgagaaaaatgagaactgttgtgaaacatgacagattgcccaagtgttatttttcctctattggaaaattctaagacgtttcctcatgtgtagtttttcagtcacaaaaatggcagtaggaatatttaaatattaaatcacagtttgaaaatagatacatacatacatatatatacacacacagagatacatagttgacttatgattcccagatatgcagggttatcattgtgactgcttggatcaagacaagtttgtaaaaagcagcgacatagttcaacataatagtcaggagctagattacttccctgtaattgctatgcacacacagtacaaggctagcgagattatagacaatctgtcttcgaatctactatcttgataattctgaatcttttcaagttaaaattgcagctattgtcagtaagcgcccctataaaggtcaggcctttgantgggggacgataactngcgtcaccaggagagaggcncggttcaacttccnggttccgtctggcngcggtcacagccggnaacctgggtcccg

SEQ ID NO: 167 - DNA, 368 bp, Homo sapiens
  misc_feature (368)..(368): n is a, c, g, or t
tctgtcacggggctggatgaggtcccgttcaaaggtgagaaagtgaagctggtgcggctgcggaatccgtggggccaggtggagtggaacggttcttggagtgatagatggaaggactggagctttgtggacaaagatgagaaggcccgtctgcagcaccaggtcactgaggatggagagttctggatgtcctatgaggatttcatctaccatttcacaaagttggagatctgcaacctcacggccgatgctctgcagtctgacaagcttcagacctggacagtgtctgtgaacgagggccgctgggtacggggttgctctgccggattggcccgcaacttcccagatacttttctggaccaaacccn

SEQ ID NO: 168 - DNA, 207 bp, Homo sapiens
tttttttttttttttttttttttttttttggtttttttttttaagggagaaccaagtttattaatgacagcctttattacaatcactctcaagtgtaaaaaataaagggggattaattaatatttaaaactcactcggacttgctgtttggcctttcaatggatgtgccaaagggcagggatcttgcctgattctgaatcaattggc

SEQ ID NO: 169 - DNA, 444 bp, Homo sapiens
  misc_feature (343)..(343): n is a, c, g, or t
cgcccggatgtctataaaaatgtgcccggcggcaaagctgccgaaggggcaccgctgagctgccgagaggaagctcgctctgcccggctgccctcttgtagtccgccggcgaggggcagttctcggtgaggaggaagagagcagcggacggcacagcacccgcgcgggccctcccacaacagctccagctggcagcatcacttcccgccaatttatccaacttctgccaaggctctgaaatgccaacaacgtcgaggcctgcacttgatgtcaagggtggcacctcacctgcgaaggaggatgccaaccaagagatgagctccgtggcctactccaaccttgncggtgaaagatcgcaaagcagtggccattctgcactaccctggggtagcctcaaatggaaccaaggccagtggggctcccactagttcctcgggatctcaa

SEQ ID NO: 170 - DNA, 511 bp, Homo sapiens
  misc_feature (399)..(399): n is a, c, g, or t
  misc_feature (447)..(447): n is a, c, g, or t
aagtaagaattataaatctatctcagttaaaagtaggatctttgtttttattcagatattttgaaagtttagaagcattttgtatgctactttggtatttcttaagtatagtcagcaggaaagggtaacctgttttatgcaaaatttttttaatttgtcaaatcgtttttagtgtgtctactttctgaaatagtctcaatatcctgtctgtatcctaggcagataactacacaagaacaaaacgctatatagaaaagaaaatatttgaggaaatcttaaattccataagaaagtaattcttgcaagaatgttggctacatatttttttttctgtcctgaataaattacatcattaggtctgttgaagcttttgaagctaccactattctttctgggatnaaggctaattactgatttatctgccctcaaaatcccagagttaattcnaattggagtactaaattaacagtaagtagttaacacagagaactaaaaatttaaccgcattata

SEQ ID NO: 171 - DNA, 514 bp, Homo sapiens
tttttttttttttccttcttagtcgtgtgtacatcatggggaagggagggaaataaatgacgggagggtcgctgctttttaggtttcaaatggacattccagaacaaggcggtgcctgagcccgtgcctgtcttcagaatcttcagcagcacagttccggggaaggtgggagccaccagcctctccctgaataactgggggagatgaaacaggaagctctatgacacactggatcgattatgacagacactgaaaatcacgatctcatccccctccagcacctctacctgtggcccgccgatcacagccggaatgcagctgaaagattcccgggggcctgggttccaactggcccactggtggactctgaggcctctgcattggcgggtgggtcttgcctgtgatatttgggtcatggggctgggtctgggtcggtttcccatttggtctgggccagtctcggtgtgtctataatccctggtccttcattaaaagcaaaacctaaagaaacaca

SEQ ID NO: 172 - DNA, 4490 bp, Homo sapiens
cacgcgtccgcgagtagcggagcgggacccgctgatgctcaccccatttagagaaagaaatccacctccccaaccccaatcaagaacctgctattgtatatcatcatagagccagattacctagggaatcatcatccagggacgtgccagaaaccacaagaaaacatggggagggttttcctcacgggagaaaaagccaattccatattaaaacgctacccaagagctaatgggttttttgaagaaataagacagggcaacattgagcgtgagtgcaaagaagaattctgtacatttgaagaagcaagagaagcttttgaaaataatgaaaaaactaaggagttttggagcacctacacaaaagcgcaacaaggggagagtaaccgaggaagtgactggtttcagttttaccttacctttccgttaatctttggcctcttcattatcctccttgtcattttcctaatctggagatgcttcctaagaaacaaaactcgtagacagacagtgactgaaggccacattcctttccctcagcaccttaatattatcaccccaccccccccaccagatgaagtgtttgacagcagtggattgtctccaggctttctgggatatgtagttgggcgctcagattccgtctctactcgcctgtccaattgtgatcccccgccaacctatgaggaagccactggccaagtgaacctgcagaggagtgaaacagaacctcatttagacccacccccagagtatgaggacatagtcaactccaactcagccagtgccattcctatggtgcctgtggtcaccaccatcaaatgaagctgcaaacttctttttactctaatcatttttaaaatactaatggaagaactttctagcactttaccactacataaatgttcattgacttattttattggactcttaccgcataccacttcacacttgttttattttctttagttttgtttcttgttatagaatcattatccatgctcatttttgctaggggaaatatatgaagagggaaaacatactaatgggggtctttctgtgatgtgatgagacatacatgtaagtgtatatatgtgtgtataggcatatatacgtgtgtatgcatcaacacagtatatgtaaaactgtcttaaaaatccattaacttctacctaaatcacctggaaggagagcattactcaccaaaattgcaaaacaagggtatcaagaatttgtgtaatagccagtgacatgctgtagatttttgcaaactggatgtacttagcatgttttctaattctgactggcttttgttaacttgataattcttcatctaccttaaaaagaaaaaaattacacatagtcattcttgatgttataaatagagaaaaagtgtgtgtgagcaataatgcataagctactgataacttgcttacagcagatagcaataaggtatttggtggcattcggcttgttttgtaatagggattttttttttggttgaccactcccccacacttccaaaattaaacagtgttttcttagcatcttgaatatctcctgcggtgtatattaacatcttgatgagacagatttccaggcaacaaaataatttctaaaatggatatatgtgtggattaatgacaggcagtaaatacccattactcctttactcatagctggtaaaattattcccactgttttattgccttttactgtacgttctacactctgtcctactcccacagaattttcaagcccttaagagtttagttaaaataaaatttttgaaattattgtcttaatatttttatataggctgatgtctttgcctcaagattgttaggaggtaattttccattgaattatcaactgtgatttttatattgccctccaagtggtagaagaagattgcaaagtccatgttatgctaggtgcacaataaatctagtaatagccccacacagatctcatcattgttgctacttccttttgtattttcatcaggtatttttttaactgtagggtttttacttttttcttggagcagagagaacaggctgtaaatgggttgccaacataagctggctgagaaataaaagaaaacaagacagttgttcataaagtttcattttgtatgcactgatggcaaattcattaggtcagttaagggaaatatttgtaccacttccaaacttttcagcgttggataaaatgattgatgaggcaggcagaaggaatgtaggtttcaggtgtgtcatttcctgctgcttccagctccatccctacagactcctccccgagtcctgccctggaaccaaaggaaggaggaacactgaggggaatcctgaagtaggagtcagatgacctgaactcagatctccctctatcacatgcttgccaccactgtaccttgagcaagaatcatatctgaccctcaacctcctcaactctaaaatggggataacatcatttgtcctgcacttctctaagggctttacaaggatcaaataagatggtgtgtatgtaagaaatttgtaaaatgtgaagagctatctacactaagttcgtaatgttattattattgtgcttcatggagaattttcccctctgttttcctaaattgtatgagagctttcacacagtgagaaatagagcaggctgccccataaatgggtaacatattcctaatctgagtgtgtgggctgttagagaacccctgccatgctctggtctgttctgaaactgtgccaactgaaagatgatagtccacacagcacaaacaggtttaagcaaatgatagaaagggaagtaaggcgtgtgtgctagttaataggtttagtagcttttatggactaaaaatgattgattgtatcttgaccctggtctcagaaatgacatttttacttttgccatgagtacacatcagatatctttggcttctatttaaagctaaaggtagaagtgtttgatccagtgaactgtgtatgtatgtgtggggtttttttctttatttttaaatgaaaattaagacaccttttgtgtggacatgtttttgtctttaatgtcaggctttagattagaccagcagttttcaaagtatggccaatggacccctgggttccttgagagcctttcaggggggactatgagatcaaaatatttttattataatgtgaagacattgtcttttcactctatctcaaaaaaagtgttgcaaatgtaaaacattgccatcttctcacaaatctctttttttgtttttgaaaatatggccatttttcataaaatgttatttgtgttagcatgtaatgggtttactatgtttaaataagttaatactttaaaaattttcaggtttttttagtatggtgaatattgatagatataaacctcatgaacaaaagtactttggcatccagattctcaataaatgttaagagcgtaagtgtaagggggtccagagaccaaaagttttagagctacaggattagacataggagcaggatattctgttagtgtgatttcttgcaactttattttatattttaaactgctgatattggatataatgctgctttttagagacacctaaattgcagtatcagaatgaatgttgatgtttgaagccaaaaagccaaatgcttaaactgatcaatgactgtagctttttagactgttggtcaaagaacattctacttcacagtaatagctctatcagccacagatctcatggtggctgttgcatgataatgataggataaacaaaataccactgtcttcaagaaacattatcttaggtttgtttgtttggtttgagtttgatttggcttttatattttttaaaatcccttttgctaccccatctggttttataaactgagtttcttagcattcgttaaaattaaggggtttgtttggaataatatatattttttatgcttttgtctttcttacctgattgatattacattcacctttgattgttttttaaaagtttatttttacagaatatatttagtacctttcttaaggagtaactgaattgaatcaaccagtttgcatttaaataaaagaacaggctcagtggtcttcctgtagaatggtttacatgcctgcatgtgcagtagttgtgtctggaatcctagaattggcactttctgcctccttgctctaaatgtcacaaaaaattatacttccttaaagtaaatgtaatgatttcttcttttcctattgaccagtacagatagatatgttgtgtttgcttcatttttaatgatgacttcaagattgatgatgtgatccaataactgtggaggtagctttaacttggttctgtgtaaatagtatgtattttattataatatttctcattttaagatgcttggtttacattaaattatggtatttaactatttttatgtttatactaggtagggtctttcttatgtttctgtgtttttggtatgctaaataaagctatttttaaaccc

SEQ ID NO: 173 - protein, 218 aa, Homo sapiens
MGRVFLTGEKANSILKRYPRANGFFEEIRQGNIERECKEEFCTFEEAREAFENNEKTKEFWSTYTKAQQGESNRGSDWFQFYLTFPLIFGLFIILLVIFLIWRCFLRNKTRRQTVTEGHIPFPQHLNIITPPPPPDEVFDSSGLSPGFLGYVVGRSDSVSTRLSNCDPPPTYEEATGQVNLQRSETEPHLDPPPEYEDIVNSNSASAIPMVPVVTTIK

SEQ ID NO: 174 - DNA, 216 bp, Homo sapiens
  misc_feature (53)..(53): n is a, c, g, or t
  misc_feature (114)..(114): n is a, c, g, or t
  misc_feature (122)..(122): n is a, c, g, or t
  misc_feature (149)..(149): n is a, c, g, or t
  misc_feature (152)..(152): n is a, c, g, or t
  misc_feature (190)..(190): n is a, c, g, or t
  misc_feature (208)..(208): n is a, c, g, or t
  misc_feature (214)..(214): n is a, c, g, or t
tttttttttttttttttttttttttttttttttttttttaaggtcttagttcnctttattagaattgtttctatttgccaaagtaactcaagcacttggaacaaattaaacaanacaggganagataaagagaaatgtagcatcagtcnccncccaggcctactcctcccccaagccaggtacccagggntgcccagtgcaggggcgntggcanag

SEQ ID NO: 175 - DNA, 517 bp, Homo sapiens
gctgttgttactttggaacttcttgcatgagaatatttgcgtatatgaatctccagtaccaagcatacaccaaaaatgtgtacatttcagatgaaggacataacagagccctaataaaatacagaattgagcttaatttaactgtcttgggcaaccatcatgcctggctaatatgccatattatttccgttgtacacagtacatgttttggtttactaaacattgatcaaaattgatcgaaatctctaagttttggttaccatgtacagagaacaattgctcagcatggcatttaaataaaacagtaatattttaaaaattcacaaatacaatgcacaatttattttaaaaaaataaaatttaaaaaccttgaggatggatgaggctttgggtaattaacctgaaaaacaaaactaacaaaaaactacaagaacagtatgttaccagatttatactttaaaacactattaaaagaggaactcactgacactgctagaaatatttctaaaattcagct

SEQ ID NO: 176 - DNA, 3138 bp, Homo sapiens
cgggtgccatgcagctttctctaatttgctctcagttcctggctatgaattgctaaactatcagtctcgcgctcaccgcccggctgaggaggtgaaagtttctccccaggaagataaaccgcaaaagacatatattgtgcatgatttgcgccttttctttggctttttctttctttcttcacccccccacccacttttttttttttttttttcaaaaagcagagagggaaaaacggagagtgaaggagcgaggaggcgagcgtgagagaaaggagagagagagaaaagaaagggcgaggggctagtggaggaaggaaggaggggcggctgcgcgaggcggagagagggcgaagcagtcgcggcactggcgctcacattcctctatgctacaaatccaggaggaagtttttttttagggggctgagatgctccatgcctttaaaagggcagccttgacgcgcggccctctcggcagagactgagcggcgagaaagtgcgagccgggccggcagaatctgcctggcgggcgctggagcctgcgttactcgcggcccgcagccgtccggctactttgcgtttggcccggccagcgccgcgcggcgcgcgcgcgccattgcctgcaggctaggacttcgcgaggtgggtcgactcaccctccctcctcctcttcttcctcctcttcctcctcctcttgttcctcctcctcctcccgattttccctcctcggctggcgagggtggggggggcgggggaggccggggctcgccccgagcagccacgatgctcctggacgccggcccccagtacccagcgatcggcgtgaccacctttggcgcgtcccgccaccactccgcgggcgacgtggccgaacgagacgtgggcctgggcatcaacccgttcgccgacggcatgggcgccttcaagctcaaccccagttcgcacgagctggcttcggccggccagacagccttcacgtcgcaggcgccaggctacgcggctgctgcggccctgggccatcaccatcacccgggccacgtcggctcctattccagcgcagccttcaactccacgcgggactttctgttccgcaaccggggttttggcgacgcggcggcggcagccagcgcacagcacagcctctttgctgcatcggccgggggcttcgggggcccacacggccacacggacgccgcgggccacctcctcttccccgggcttcacgagcaggctgccggccacgcgtcgcctaacgtggtcaacgggcagatgaggctcggcttctcgggggacatgtacccgcgaccggagcagtacggccaggtgaccagcccgcgttcggagcactatgctgcgccgcagctgcacggctacgggcccatgaacgtgaacatggccgcgcatcacggcgccggcgccttcttccgctacatgcgccaacccatcaagcaagagctcatctgcaagtggatcgagcccgagcagctggccaaccccaaaaagtcgtgcaacaaaactttcagcaccatgcacgagctagttacgcacgtcaccgtggagcacgtaggtggcccggagcagagtaatcacatctgcttctgggaggagtgtccgcgcgagggcaagcccttcaaagccaaatacaaactggttaaccacatccgcgtgcacacgggcgagaagccctttccctgccccttccctggctgtggcaaggtcttcgcgcgctccgagaatttaaagatccacaaaaggacgcacacaggggagaagcccttcaagtgcgagtttgagggctgtgaccggcgcttcgctaacagcagcgaccgcaagaagcacatgcacgtgcacacgagcgacaagccctatctttgcaagatgtgcgacaagtcctacacgcatcccagttccgtgcgcaaacacatgaaggtccacgaatcctcctcgcagggctcgcagccttcgccggccgccagctctggctacgaatcctccacgcctcccaccatcgtgtctccctccacagacaacccgaccacaagctccttatcgccctcctcctccgcagtccaccacacagccggccacagtgcgctctcttccaattttaacgaatggtacgtttaaaatcagaaacaaaacatcgaacaaaaccctatttaagagacttgatcacacacgtatacacaacattactgaaagaaccctgcgaatcaaaacaacccccacacagaccccgcaatcctcttttaaaaaatctgccaatagacccaggacgagtaagagaggaagcatcaaccttttaaaaatttcctttcgctttcattatttttctttttttggcaaaggcttggtacccaaggtgcggtagggggtcgagggggaggaggccacctgaccaaatgccgccaaccccgagggccagtttcttgtcgaattggtacgggctctctggggcttcggcttctttttttctttgttttcttgtaaatacagaattattagcttaaaactgtactgttgaattctgtaaatagttatatctcggttggagcgggtgggtgggattgtggcgttgtggtctttgcattgggggaggggggagggaccggatgggcggggggagggggagggggaggggtgggcggccgaaagccaactgtttgtactgaatggcaagaatgttctagtaaatgtgtaccaaaatgtgaattactttgtacgattacagtctccacgtcgacctaacccaatattattggtattaatgtgctttttttgtataaagtgcaaacatttcgtcccaaagtctaagtactttagtgcagtaaaatgttgtttcatgtcctgtcaagaattcgtatagtacgagcctggatctgcgtgtcaaactgttccatttgtttatgtaaagtgatattaaaaaagatataaactataactgtccgttacttttggcaaaagatacaaccacataatgtatataattcctagtttccatatttatccgcatgtaaagggccggtttatccatgttacagctcttcaatatttatggctagaagaactcgtatgtacactttagtttccagaactgtttggtaacctttcgtaccttattaaagattcttaaatctcaaa

SEQ ID NO: 177 - protein, 447 aa, Homo sapiens [sequence omitted]

SEQ ID NO: 178 - DNA, 244 bp, Homo sapiens
ttttttttttttttttttttttttttttttttggaataataaatacgttttctctgctacagtctcggcaaaggccacggccctagaacggggcgccgcctccgatgcagtctcagggccacagcctcagcgcagccacggcctccagggcccacccgggccctgcggcccccccctgggggcggcgggcagcgcccgggtcaaacccggcagcagcggcggcgcgagcaaagggaaggggccc

SEQ ID NO: 179 - DNA, 356 bp, Homo sapiens
ggcacgagcggcacgatccaccgacgacctcactcagctgcgttacgcgccgctccggctgccggccgcgcgccttgcccgccggctcccgcccgcaatcggcggctcagggcggacccgggtctctgcgttctcgcgagaagcgcggcgctgcggggccgtgggcgcctgagcccgcgcggccctcgagggccgaatatggggggatgcacggtgaagcctcagctgctgctcctggcgctcgtcctccacccctggaatccctgtctgggtgcggactcggagaagccctcgagcatccccacagataaattattagtcataactgtagcaacaaaagaaagtgatggattcca

SEQ ID NO: 180 - DNA, 162 bp, Homo sapiens
gctcgacgctctccctcgctcactcctcagtgtaggagtgatctgaagcaggacacgctcagcctgcagctgccgtgggtttgtgtggactggacgcagagcttgggagacgggggagggctattactccaattcactgtcaatggaattacagctatagcg

SEQ ID NO: 181 - DNA, 648 bp, Homo sapiens
  misc_feature (609)..(609): n is a, c, g, or t
caagttatttggataaatgggaacaaagaaaagaaaacagcctcagcctccagccttcccttttgggacctgcctcacaatgcaccctctcttccaggcacttcttgaattacagaggaaacaacagtgagtgagtccactatggagctactaccaggttggtttaatttgcatgggtcccagacgagtctcaagggcccaggagggtcacccacgctgtcgtctcttccgcccacgcagcttcagccgcctggctggcaggctgacgggctgcttcccaaacttctccatgatctctcggatcctggccatgttggttttgctaagtgtgaagtcacaccttgtggcccccatgtcatagccaaccatacagttcttggtggatgcagtgaaaccttcggcctttgctgtgaccacatactctccagggttcaggaggcgccagtaatcctcatcgttggctgttcggatgtcatggataatgccttctacggagataatggcgtatgggattccttttacatgtgaatctctcaccaagcctttaatgccacgatgaacctgctgcatgaacacgatcagagagtacctgttattatctcactcctncggcagctgcctctcatgtgggtatttatcacagcccac

SEQ ID NO: 182 - DNA, 205 bp, Homo sapiens
aagtacatcccttaggtgtataccttcccttttgcttagggcaacagttaagataaactaatacacgtatatgattttaagagttaaaaactcatcacccataatcaataaggatgctaaggaatggcaataccttgaagctttttttaaaattaaaaaccaaagctttagatggtaaactacacttacagaaacacaaaccaaa

SEQ ID NO: 183 - DNA, 349 bp, Homo sapiens
  misc_feature (178)..(178): n is a, c, g, or t
  misc_feature (204)..(204): n is a, c, g, or t
  misc_feature (206)..(210): n is a, c, g, or t
gcattccgtgctatgattcaggcctaattaagtgattgcgtctgggcacggctataaaccactagctgcttcaactggtaatccagtcagtaggcaactgcaggggctcgccactgactgaaggcagtggaaggttggcagaaggaggctgttcaaggctgtttttgccttcactatnggcaaaaatcattttgaggcacctcntnnnnnatatgcactgcctgggccaaccatcgtggacctgaggaaaaccagggcagcgcagtctcctccagtggactcagcggcagagacgcccaccccggagaaggcaaatccccacttttcagatcctgctggacgtggtcag

SEQ ID NO: 184 - DNA, 528 bp, Homo sapiens
  misc_feature (20)..(20): n is a, c, g, or t
  misc_feature (507)..(507): n is a, c, g, or t
cttttttttttttttttggnaatgaggacaaggagctttattttttgatgaggtcaggcacaagcactgccaatccttcacaggtacaggggtaagggaacatgtgacatcctggacatcagacaggaagtgccttctggggagagctcagaccttccacaggaaaacccctagctcagcctgtgaaagccagaagagggtatctgggaactcatgcatcaagatggggttttcctgggcccttgggattcttgtttcctccaaaatcgcttgtctcaacatcaggatccaggtcagcagcagcctccagagccatggccgcagccagagcccccgccttgctgaccactgcccctgtcacaggagttgggcctctggcgccggcatcggtggtggcgcctgtggtggttcaggaagcagccgccctcggagctagggccacagcccccagagcttggggcacagccagaggaagctggaggcagacactgtactgggctctttggnggacacttgggtgagggacac

SEQ ID NO: 185 - DNA, 611 bp, Homo sapiens
tttttttttttttcaaaaaaggggaagtgtaatgtgcatataggcataacctacacctcacttggcaagtgttaggccacagcacaaacccctctgtccaatcacaaatgtccacaaatttgcaaagtaactggacacgaacgatatgcttctcaaactcacacacatattcgtccatcacacacacactcaaatgataaagaaatacattgaaatcctctacaaaagagatctgaggacagtaatcagatgacctcatgtgcggacagcactttgcagtttacagtctaatccatttggtcctcacaatagccctgtgagataagcagcacagggattactattcacaccgttttgcagatgaggaaactgaggctcagggatgtgtaaacaccagcctaaggttttccagttggagactgggcctaggactcagggccgggatgcctaggccagctctctttcataactggctttctagtgaaaaatgaaatgagctgtgtaaaaaccaacatcattaagtataatagaactattattttccttgagcagatcagactagtgctatcaatcctaatgttaatgtcatgctgcatggcagctgagatgaa

SEQ ID NO: 186 - DNA, 261 bp, Homo sapiens
cacatttcaaaactacaaccattaatctcttatggtggttgtctaaagctttatctccctactttaaataatgactttgaaatccatctcacccccaggcacagatccaagcctaaggaaatcagaaatatacatacctgcatatttggaaaagaaagttcccctaccaggtaaggattctgcattttcattccttgtctttataagcaggaaaagccccactcgaggtcccaggccctaccccttttgggcgtacgggga

SEQ ID NO: 187 - DNA, 351 bp, Homo sapiens
ttttttttttttttttttttttttttggtttttcaaataatttattgttaaatgaaaacctcacaaagcaaaatggagtggggcaggtgtcaaaggtaaactgaaaacctcgtgtctgccaaaccctattctggtttcctaagggtagaaaccggaaaagtgtcaaatgaaaagggactcgctcaaattaagtttttttaaaagggctgtaatttgaaagggaaaacacttttcacctaaaaatttccctttttcatgaaagccctaatttaaaagaccgagaaaaaagctttttaattaacaaataaacagcatctctcagagacacttgggaatgtttggttttaatca

SEQ ID NO: 188 - DNA, 233 bp, Homo sapiens
  misc_feature (15)..(15): n is a, c, g, or t
  misc_feature (105)..(105): n is a, c, g, or t
ctctcctcgactgtnaagcgggccgggacctgccaggccagaccaaaccggacctcgggggcgatgcggctgctgcccctgctgcggactgtcctctgggccgcnttcctcggctcccctctgcgcgggggctccagcctccgccacgtagtctactggaactccagtaaccccaggttgcttcgaggagacgccgtggtggagctgggcctcaacgattacctagacattgt

SEQ ID NO: 189 - DNA, 803 bp, Homo sapiens
tgccgccgggctgccatccttgccctgccatgtctcgccggaagcctgcgtcgggcggcctcgctgcctccagctcagcccctgcgaggcaagcggttttgagccgattcttccagtctacgggaagcctgaaatccacctcctcctccacaggtgcagccgaccaggtggaccctggcgctgcagcggccgcagcgcccccagcgcccgccttcccgccccagctgccgccgcacgtagctacagaaattgacagaagaaagaagagaccattggaaaatgatgggcctgttaaaaagaaagtaaagaaagtccaacaaaaggaaggaggaagtgatctgggaatgtctggcaactctgagccaaagaaatgtctgaggaccaggaatgtttcaaagtctctggaaaaattgaaagaattctgctgcgattctgcccttcctcaaagtagagtccagacagaatctctgcaggagagatttgcagttctgccaaaatgtactgattttgatgatatcagtcttctacacgcaaagaatgcagtttcttctgaagattcgaaacgtcaaattaatcaaaaggacacaacactttttgatctcagtcagtttggatcatcaaatacaagtcatgaaaatttacagaaaactgcttccaaatcagctaacaaacggtccaaagcatctatacgccgctagaattacaatacatagaaatgagcagcagcacaaagatgcagcttgtgtgtgggatgtggatatagtatagatccttgggggagaagcaaattggcccgaagccaa

SEQ ID NO: 190 - DNA, 413 bp, Homo sapiens
ttgagatggagtcttgctctgttggccaggctggagtgcaatggtgcaatctcagctcaccgcaacctccacatcccgggttcaagcgattctcccgcctcagcctcctgagtagctgggactacaggcgcacgccaccacggccagctaattttgtgtgtgtgtatttttagtagagccggagtttcaccatgttggccaggcgggtctcaaactcctggcatccggccctctgggccttctgagaaagttcttccaaacattccctgctgtggacagtgaacagcccaccataatgcagagccagaattaggataatgctaacaatatggatggcagagcccagaaacagagagaaacagtccctaaccgtcttgagaagcggaacccaaccctcactgaggccaacacag

SEQ ID NO: 191 - DNA, 392 bp, Homo sapiens
tttttttttggaaatccaaaatacaactcatccactgaaatacctggcttagtgtcaaatgttttattctgcaatggtggcttaattcaaatgggttggttacatgctacctgctattaaaatggcctcatgcaaactgtcattctttgaaactgctggtatgtggagattgcacaacttcatgtacaaatgcacatggaaccagagaaaccacttagcagttacactggtgcaacaacaccatacaaatgaattacaaagcagccctcaagagatgttacacacgtgataacaagtagtcactgctggcctgtcattttagcaatttatagtttgcttgatatatgtgtctgtgtgtatgaatctaaagaatgagaaaaaattaattgtgt

SEQ ID NO: 192 - DNA, 198 bp, Homo sapiens
  misc_feature (7)..(7): n is a, c, g, or t
  misc_feature (9)..(10): n is a, c, g, or t
  misc_feature (17)..(17): n is a, c, g, or t
  misc_feature (28)..(28): n is a, c, g, or t
  misc_feature (42)..(42): n is a, c, g, or t
  misc_feature (92)..(93): n is a, c, g, or t
  misc_feature (116)..(116): n is a, c, g, or t
  misc_feature (142)..(142): n is a, c, g, or t
  misc_feature (144)..(144): n is a, c, g, or t
  misc_feature (154)..(154): n is a, c, g, or t
  misc_feature (163)..(163): n is a, c, g, or t
  misc_feature (179)..(179): n is a, c, g, or t
  misc_feature (184)..(185): n is a, c, g, or t
  misc_feature (189)..(189): n is a, c, g, or t
gcttggnannagggcangcaagaaaganggcagtcgcctganccgggcccgttggcggcgtcactaacgcttcgttccggtcctcggatccnnagcgcggggaggcagaccgactntaagctgcttgtccccatcctgcggncntcctgggganaaaaagccntccgtggtgcccgggnattgnntttnagcaaggac

SEQ ID NO: 193 - DNA, 487 bp, Homo sapiens
cactttgtacaagaaagctgggtacgcgtaagcttgggcccctcgagggatactctagagcggccgcctactacagcggagactacgagcgagcggtgcgcgacttggaagcggcgctgcgcagccaccggcgcctgcgggaaatccgcacgcgctgtgcccgccactgcgcggcgcgccacccgctcccgcccccgccccccggcgagggccccggcgctgagctgccccttttccgctccttgttggggcgggcgcgctgttatcgcagctgtgagacccagcgcctcgggggccccgcatcccgccaccgcgtcagcgaggatgtgcgcagcgacttccagcgcagagtgccctacaactacctgcagcgggcctacatcaagcttaaccagctcgaaaaagcagtggaggcagctcacacatttttcgtggctaaccctgagcacatggaaatgcagcagaacattgagaattacagggcgac

SEQ ID NO: 194 - DNA, 369 bp, Homo sapiens
  misc_feature (302)..(302): n is a, c, g, or t
  misc_feature (332)..(332): n is a, c, g, or t
ggcctgcgcctccacgtggatttggtagagaaaccccggactgggatcatggcagccgagactcggaacgtggccggagcagaggccccaccgccccagaagcgctactaccggcaacgtgctcactccaaccccatggcggaccacacgctgcgctaccctgtgaagccagaggagatggactggtctgagctatacccagagttcttcgctccactcactcaaaatcagagccacgatgacccaaaggataagaaagaaaagagagctcaggcccaagtggagtttgcagacataggctntggctatggtggcctgttaagtggaacttntcaaccggttgttcccagacaaaatttatttttgggt

SEQ ID NO: 195 - DNA, 485 bp, Homo sapiens
attcttgggccataccccagggttactgaatcagaaacttggttggggcctagcagtgttttcatgagccctccattgatcttgatgcagctgaagtgccgggcaccagtgaaagggaagggctgcggtagtgattccattgattcctgctttgatggaagttatggcctcacaggttagacgttgcaagttgagttggccctcttgcctaggtgtgcctccttgccttgggattctgacatgaacaggtgaagtctcttcatgattttttttgttgctgttgttaatggtatgcttgctattatggccaatatgtaaatgttactctgaatacatatttatataccatgttacttagtgacattattcaaacatttgtatgcgtatttgtgaaattgtttgcatcagtcatttaaaaaatatttcagcctaagttttctaagaggtatgttgaatacatttttaaaagccaacttaagggtaac

SEQ ID NO: 196 - DNA, 550 bp, Homo sapiens
  misc_feature (440)..(440): n is a, c, g, or t
  misc_feature (456)..(456): n is a, c, g, or t
  misc_feature (489)..(489): n is a, c, g, or t
  misc_feature (504)..(504): n is a, c, g, or t
  misc_feature (535)..(535): n is a, c, g, or t
tcaaagcagctatttataaccagccttcagaaagtattggtgaatattcttaaacagaatggaaatgacaaagcatggagtccataaattagatgatagtttggaaaaagatataaacttacaaaccaagaagctcagtgaaccacacaactggataaattaacaacaaaagtccaagcttagacacatcataaagaaacttctgaaaactaaagaccaagaaaaataagatcagccagagaaaaacgatacatttcattcaggtgaacaattctttgaaagactggatcttcaccagaaactatagaggccagaaagaagtggaacatttttagttttgaaataactgtcacccaagaattctatatccagtaaaaatttctattttactgggaataaaagaatggaaataaaataaagacattctccaatggaaggcnagctgaggggaattcntaaccaaggatccgctttaaaaaaatgtttaanccagttcttcagacngaagggattctggggggcattccaaactttnggggatgccggagga

SEQ ID NO: 197 - DNA, 4990 bp, Homo sapiens
aaaacagcggcagaacaaagttcaaaagaacgagtatcgatcgcctaatgaataccctggtgctctggatttttggattcctggtttgcatgggggtgatcctggccattggcaatgccatctgggagcacgaggtggggatgcgtttccaggtctacctgccgtgggatgaggcagtggacagtgccttcttctctggcttcctctccttctggtcctacatcatcatcctcaacaccgttgtgcccatttcactctatgtcagtgtggaggtcatccgtctgggccacagctacttcatcaactgggataagaagatgttctgcatgaagaagcggacgcctgcagaagcccgcaccaccaccctaaacgaggagctgggccaggtggagtacatcttctccgacaagacgggcaccctcacccagaacatcatggttttcaacaagtgctccatcaatggccacagctatggtgatgtgtttgacgtcctgggacacaaagctgaattgggagagaggcctgaacctgttgacttctccttcaatcctctggctgacaagaagttcttattttgggaccccagcctgctggaggctgtcaagatcggggacccccacacgcatgagttcttccgcctcctttccctgtgtcatactgtcatgtcagaagaaaagaacgaaggagagctgtactacaaagctcagtccccagatgagggggccctggtcaccgcagccaggaactttggttttgttttccgctctcgcacccccaaaacaatcaccgtccatgagatgggcacagccatcacctaccagctgctggccatcctggacttcaacaacatccgcaagcggatgtcggtcatagtgcggaatccagaggggaagatccgactctactgcaaaggggctgacactatcctactggacagactgcaccactccactcaagagctgctcaacaccaccatggaccaccttaatgagtacgcaggggaagggctgaggaccctggtgctggcctacaaggatctggatgaagagtactacgaggagtgggctgagcgacgcctccaggccagcctggcccaggacagccgggaggacaggctggctagcatctatgaggaggttgagaacaacatgatgctgctgggtgcaacggccattgaggacaaacttcagcaaggggttccagagaccattgccctcctgacactggccaacatcaagatttgggtgctaaccggagacaagcaagagacggctgtgaacatcggctattcctgcaagatgctgacggatgacatgactgaggttttcatagtcactggccatactgtcctggaggtgcgggaggagctcaggaaagcccgggagaagatgatggactcatcccgctctgtaggcaacggcttcacctatcaggacaagctttcttcttccaagctaacttctgtcctggaggccgttgctggggagtacgccctggtcataaatggtcacagcctggcccacgcactggaggcagacatggagctggagtttctggagacagcgtgtgcctgcaaagctgtcatctgctgccgggtgacccccttgcagaaggcacaggtggtagaactggtcaagaagtacaagaaggctgtgacgcttgccattggagacgaagccaatgatgtcagcatgatcaaaacggctcacattggtgtggggatcagtgggcaggaagggatccaggctgtcttggcctccgattactccttctcccagttcaagttcctgcagcgcctcctgctggtgcatgggcgctggtcctacctgcgaatgtgcaagtttctttgctatttcttctacaaaaactttgctttcaccatggtccacttctggtttggcttcttctgtggcttctcagcccagaccgtctatgaccagtatttcatcaccctgtataacatcgtgtacacctccctgccagtcctggctatgggggtctttgatcaggatgtccccgagcagcggagcatggagtaccctaagctgtatgagccgggccagctgaaccttctcttcaacaagcgggagttcttcatctgcatcgcccagggcatctacacctccgtgctcatgttcttcattccctatggggtgtttgctgatgccacccgggatgatggcactcagctggctgactaccagtcctttgcagtcactgtggccacatccttggtcattgtggttagcgtgcagattgggctcgacacaggctactggacggccatcaaccacttcttcatctggggaagccttgctgtttactttgccatcctctttgccatgcacagcaatgggctcttcgacatgtttcccaaccagttccggtttgtggggaatgcccagaacaccttggcccagcccacggtgtggctgaccattgtgctcaccacagtcgtctgcatcatgcccgtggttgccttccgattcctcaggctcaacctgaagccggatctctccgacacggtccgctacacacagctcgtgaggaagaagcagaaggcccagcaccgctgcatgcggcgggttggccgcactggctcccggcgctccggctatgccttctcccatcaggagggcttcggggagctcatcatgtctggcaagaacatgcggctgagctctctcgcgctctccagcttcaccacccgctccagctccagctggattgagagcctgcgcaggaagaagagtgacagtgccagtagccccagtggcggtgccgacaagcccctcaagggctgaaggccgaggatggatgccctgtgccagtgaccagagcacccagggctggccagtcactgagggaacagcgtctcggaactgctggtcctcattccttgcttcccgtccccccggtagactctgtcctgctggtcccaccacacatggctgggacatctgttcccagctgtaggcccttccaccagctggggagctagagggagcaggcccaagggcagagcagaggctgaggcacggggagccagccccactcggggaccagaagtggaaccaaaaacaagaaaaaactgtgagagattgtgtctgcccctgccctgcctgggacccacagggagactataatctccttatttttttactcctactccccagaggggccctagtgcctctgttcctgaattacataagaatgtaccatgccgggaagccagagacctgcaggggcctcggcccctcacatcgtgtatgtctctccttgatttgtgttgtgtccagtttggttttgtctttttttatttggcaagtggaggaggcttttatgtgacttttatgttgtggttggtgtcttaactctcctgggaaaaggaggctggcacacactgggatgccgcagcctggccggctgtggggtggtttgggaggatccatgtcggctctgcctgcagtgaccagtgctctgtggggcagaggagctgaccagggagggaggtacccatgagcagagggtagtgggagagtgtaaaggagggtttggtcctgtctgcttcctcaccttgagagtaaagtgctgccctctgcccccaacacacacacatatcaattcctggattccttagtcctgctggccttgggctggagcctaggaaagtggcccccaaatccttagtgagctaaagctgggtctgaaatttggtcagtggggaggggtagttttcttttcttttttctttttctttttttctttttttttttgagatggagtctcactcttgtcacctaggcaagagtgcaatggcacaatctcagctcactgcaacctccacctcctgggttcaagcgattctcctgcctcagcctcctgagtagctgggattacaggcacacaccaccacgcttggttaatttttgtatttttagtagagatgtttcaccatgttggccaggctagtcttgaattcctgacctcctgacctgcccacctcaacctcccaaagtgctgagattacaggcgtgagccaccacacccagctcagggaggcgtagttttctttaattttaaatttaaacccaagtttattggcagactcccttttgacctccctttgcctccccatctggtgctttcttgcatctacaccccagggccctgtggtggggctgcagggggaagctgtgcacctgagatgaggctggaacgggaattggcctctctgctcccttcttcagtaagcaaggagccccgcccctcaggcccagcctctggcaagaggtggtggaatccttgtgccgggtagtagaggaggataagggcaaaaccaggcccaggccagtgcctggcttggtctggatgggacactgtcagagtttggccacagcctgtcctttacttcatccacacctatgaagctattccctaaataaggcatttcccaagttagtcgctacctaatcagccttgagaagaatcctttcctcttctttgatagtgggtcgggggattcttcaggaatggtttggagctgggagtgggtagggggattttaaatgttccatatgggagccccaaaggaactggatgggctgcagtgaggtgggggcgggtgggcagggaatgggagaggggaagtcttggcagggaaatcccttttggccacacagtttacaaacccagtatcatgtctgtctgtgtgtctctcaaggtgagagtctgatttttataccaaagaggaaatgatttttttcatattttgtttgtctatattatataaatatatatatacagttatatatatatatattattttttggttctctctcgttttttagggagggaagaaagtaccaagttgcattgagctgtaattaaggaacattataatttatgacacatttctatacttgcaaaaattatatcattttatggatataagagaaaaatgcctttttataaaatttcaatttctgag

SEQ ID NO: 198 - protein, 933 aa, Homo sapiens
NSGRTKFKRTSIDRLMNTLVLWIFGFLVCMGVILAIGNAIWEHEVGMRFQVYLPWDEAVDSAFFSGFLSFWSYIIILNTVVPISLYVSVEVIRLGHSYFINWDKKMFCMKKRTPAEARTTTLNEELGQVEYIFSDKTGTLTQNIMVFNKCSINGHSYGDVFDVLGHKAELGERPEPVDFSFNPLADKKFLFWDPSLLEAVKIGDPHTHEFFRLLSLCHTVMSEEKNEGELYYKAQSPDEGALVTAARNFGFVFRSRTPKTITVHEMGTAITYQLLAILDFNNIRKRMSVIVRNPEGKIRLYCKGADTILLDRLHHSTQELLNTTMDHLNEYAGEGLRTLVLAYKDLDEEYYEEWAERRLQASLAQDSREDRLASIYEEVENNMMLLGATAIEDKLQQGVPETIALLTLANIKIWVLTGDKQETAVNIGYSCKMLTDDMTEVFIVTGHTVLEVREELRKAREKMMDSSRSVGNGFTYQDKLSSSKLTSVLEAVAGEYALVINGHSLAHALEADMELEFLETACACKAVICCRVTPLQKAQVVELVKKYKKAVTLAIGDEANDVSMIKTAHIGVGISGQEGIQAVLASDYSFSQFKFLQRLLLVHGRWSYLRMCKFLCYFFYKNFAFTMVHFWFGFFCGFSAQTVYDQYFITLYNIVYTSLPVLAMGVFDQDVPEQRSMEYPKLYEPGQLNLLFNKREFFICIAQGIYTSVLMFFIPYGVFADATRDDGTQLADYQSFAVTVATSLVIVVSVQIGLDTGYWTAINHFFIWGSLAVYFAILFAMHSNGLFDMFPNQFRFVGNAQNTLAQPTVWLTIVLTTVVCIMPVVAFRFLRLNLKPDLSDTVRYTQLVRKKQKAQHRCMRRVGRTGSRRSGYAFSHQEGFGELIMSGKNMRLSSLALSSFTTRSSSSWIESLRRKKSDSASSPSGGADKPLKG

SEQ ID NO: 199 - DNA, 153170 bp, Homo sapiens
gatccacctgcctcggcctcccaaagtgctaggattataggcatgagccaccacgcccagcctaagaatgtgttttttaactgtatatatttaaggtgtgcaacatgatgtgtgtatgtatatatatatatatatatatatatatatagagagagagagagagagagagagagagaaataatttctgtggtcatgcaaattaacatatccatcatctcacagctacaatttttgtgtatgtgtggcaagagcacctaaaatctactcttagcaaaaatcctgaatacaatacgatattattaactattgtacattagacctctagacttgtttctcttacatatctgcaactttgtgtcctttgacctacatttccccatttcctacccctccaccacaccccagtaataaccactttattctctatctctgcattcaactttgttttttctagtttttaaactctgcatataagtgagatcatgcagaatttctctttctgtgtctggtttatttcacttagtacaatgtcctccagattcactcacgttgccccatatggcagaatctccttcttttttaaggctgaaaaatattccattgtatatataccatagtttctttgcccatttatccttcaatgaatacttcagttgtttccacacctcggctattgtgaataatgctacaatgaacgtaggagtacagatattttatgaggtgatgatttcacttcctctaggtatatacccagaggaggaattgctgggtcctatggtagtgctatttttaatttatttaggaaccttcatactgttttccttaatggctccactaatctacattcccaccaaaagagtatacaggttccttaagggtgtatttttcaaaagggtcgccgagagatacctattaaaatatatacaagagaaatcttataatatcagggatttgcttcaaaggaggggaaatccaagaaggggaaagtaaattgggttatataagaaacaagattggccatgagttaatgttgaatttggatgatgaatacatgggggctcattatattattgcttgacttttacacacatttaaattgttcaatagtatgtattagtccattctcacactatataaagacatacctgaaattgggtactttataaaggaaagaggtttaattgtctcacagttctgcagggctgtagaggcctcaggaaacttacaatcatggtggaaggggaagcaaacacatccttcttcacatggtggcagcaagaaaaaatgcagcacaaaagggggaaaagccccttataaaaccatcagatcttgtgagaactcacacactatcacgagaacaggatggggaaaccactccgtgattcaattatctccacctggtccctcccacaaaacgtggggattatgggaactacaattcaagatgagatttcggtggtgacgcagcaaaatcatatcaagtaataagctgaaaataccctttatataaataatgataacactgcatggaaataaagaaaaatctttaggatgcagcctaactggtatttacgattttttaaaccctggattaaacgcatctttttataaatggaaataattaatgaagaactgagatggaatcaaaatagcaaatcatgcacacacacacacacacacaaattctgtttagagaactaaaacaatatgtcagaaacgttgaagagttcatgtgcatcagttagttcctgccatgtaacaaaccacaccaaaatttagtagcttaaagcaaaatcatttatgtatgtcataattctatgagttacaaattgaggctgggctcagctgagaggttcttctcttcacttttgggctcatgcatgtgaggattaatgggagctggcaggtctagggtggactccactggaatagtctgtctctgttccaaaaggttagctgaagcttgttttcctggcaacagagcagagttctgagagagcgtgagtatgcaaggcctcttgaggcccaagcctaggttcagaacaggaatcacttctgatatactctattggccaaagttagtcccaagtccagatccaggcttgctcaaaacagtggcccatctctctggccccaatctccatagttctggtaaacaaaaaaaaaagaaaaagaaaaagaaaaagaaagaaaggaaggaaggaaggaaggaaggaaggaaggaaggaaggaaggaaggaaggctgagataacattgggtttttccaatgataaaacctagaattaatgaagagctaaaattagtaaattttcaaaaatacaaaacacataaaatgtaaaactgctgaaaagataagaagaaatgaataaatctataattaagacggaaatctttaataggccataggcctcaggagtcctcaaagtaaacaaaaaatgcacaagcatgcttatcttaaaggattaaataggtatttttaaaatattgatttaatacacatgtagaactattaagtaacaaaatagatacatacaattttaaagcatagctaaaaaatggctaaaaattgattattataatacatgtgtatttcaaatattccaaaagaagtcagtccactcatataaactaaccacaatataacaacattagaacttccaaaaaaggtatgtgtatatgaggtggggttttttcaaccttctaaataattgtgggttaaaaaaacataaaaactacaagattttggaaatgaatcaaaatgagagttctacatataaaatcttcatgaaaatggttaaagtggaaattagatgaaagatttaaaggcatttactagaaaacaagaaattttacatttttaaattaaaagctaattaaactcaaagttaaatttagttaattaaactcaaaaagctaacagacctgaacttgctcagcagccttacctaagaatcatctattttaccgatcttttcaaagaaatgttttgtttttattgatcaatgcctccatatttttgaaatttttatagttttcatttattatattgacaaatttttttaaattattaatgtggcgctggcaatacacttgtgaagcatttagttatttatccttaaaatatattagtacttggcggagtgcagtggctcacgcctgtaatcccagcactttgggaggctgaggtgggcaggtcacaaggtcaagagatggagaccatcctggccaacatggcgaaaccccgcctctactaaaaatacaaaaaatagctgggcgtggtagtacacacctataatcccagctactcaggaggctgaagcaggagaatcacttgaacctgggaggcggaggttgtagtgagccaagattgggccactgcactccagcctggatgacagagcaagaccctgtctcaaaaaaaaaaaaaaattaatccatgtgcacaaagaggcataatcagaaataatcatttccaattttggctgggcgcagtggctcatgcctgtaatcccagcaatttgggaggctgaggcgggtgaatcacctgaggtcaggagttcgagaccagcctggccaacatggtgaaaccccgtctctacttaaaataccaaaactagcctggagtggtggtaggcacctgtaatcccagctactcggggggctaaggcaggagaattgcttgaacctgggaggtggaggttgcagtgagccgagatggtgctatcacactccagcctggggaacaagagtgagatgtcatctcaaaaaaaaaaaaatcatttttattttgtttttaaaaagaaaaaatgggccgggcgcggtggctcatgcctgtaatcccagcactttgggaggccaaggcgggtggattacctgaggtcaggagttcaagaccagcctggccaacatggtgaaaccacgcctctactaaaaatacaaaaattagccagaagtagtggcacgtgtctgtaatcccagctactcaggaggctgaagcaggagaatcgcttgaacctgggaagcagagtttccagtgagccgagattatgccattgcactccagcctgggtgacagagcaagactccatctcataaaaaaaaaaaaaggaaaaattggaaaaataaagtacatgcagtttatttgacagagggatgtttaactgaaccacactacatccatatatatgaagttatgcagcaatagaaaagaataatggacatttatatttttagatataaaaagagctgttgaacctatcattgaaattttaaaaggaagctgaagaacaagtacagtgtaataaattatttgttttttacaatttaattatagagtaaatgtgatctttcttggtatatagttctatagattttaataaatatttggattcatgtaaccaccaccacaaataggacacacaacagtttcatcaccctaagaaaagttcccggatgctcacccctctgtagccaaaccgtcaccccacccataatccctggcaaccactgatctattttccatcactataattttgccttttccaagaatgtgacataaatggaatcatgtagtatttaacgttttgagaccagcttctctcagcatgtgatatggtatgtacctgtgtctccacctaaatctcacgttgaattgtaatccccgatgttggaggtagagcctagtgagaggcgattggatcatggggacagatttctcatgaatggttcggtatcatccccttggtactgtcctaaggatagtgagtgagttctgcagagacctggtttaagcgtggagcacctccccactctcttgctcctgctctggctatgccatgtgcctgctcacccttaaccttccaccatgattgtaagtttcccgaagcctccccggaagccaagcagatgccagcatcatgcttcctatatagcctgctgaacagtgagacaactaaacctcttttttttttagcaaatgacccagtcccaggtatatctctataacaatgtgagaacgacctagtaacagcatgtctttgagattcatccaagtttctaccagtatcaataactcattcctttttactgctgagtatgattgtattctatggatgtggtacatctgtttatccattcattcattgaagggcatttgggttgttttcagcttttggctatcacaaataaagtttctaagatggccaggcatgatggctcacgtctctaaccccaacactttgggaggctgagatgggcgttgaggtcaagagtttgggaccagcctggccaacatggtgaaaccctgtctctactaaaaatacaaaaattagctaggtgtggtggcacacacctgtaatcccagctactcaggaggctgaggcaggagaatcacttgaacctgggaggtggaggttgcagtgagccaagattacaccactgcactccagcctaggcaatagagagagactctgtctcaaaaacaaataaataaataaataaagttgatatgagcagtttttacagatgtttgtgtgaccgtaagttttcgtttcactagggtaaataccaggttcaggattgctaggtcctgaggtacgtgtatgtttacctttcaaataaactgacaaaccattttctagagtgactgcaatttccagttgttctgcaacctcaccagcaattggtgttgtcagaaactttttattttcataattcttatcaatgtgcacaattgtttttaaaattcacagaattaaaggaaaatatattgtgcactatttgtgtaattaaagcaaaacacaaacacataaacggaagacaaaaataagaaactaattcaagaaactaaagaaagaaaaacaaaattaactttttaaaattagaataaaggcatatatatgtaatagggatagtttgaaacactcccaaacatctgctctgagccaacaacaatcggatagcgtgagggcagatacaaattaaatatgagacttaactctccccgttaaaaataaggaaagagacttacccaacacccctcccccccgcccttctctttctctgtctctttgaaatgtatgtaaatctttttaaaatgtaaataggcctctagccagttttacaacccaggaatatctttgtcaaatacctaggagccatctctttgaaatgtaagcatccagaaaggtagtgctcctatctctgaatttatatgagtgggtaggtctctaactttggcaagttccttgcttcaagttgcaaagccacttcctgtcacaaggatgtgagaattttgtttttcctttggttaaagccaaccagcgaacacagatggccactccaattatcaggtgaatctaggatgaactatgtgtatgtcaaatggtacttctaagttctcctatttgagaaccagttattgtttgtcttgagagcatatctgtaatgggttttatcttcttcaggatataaacaagtaggatttctttctgtctttgcaaactctttgtgaattgcctgtgatgtgtctcacattctggttcaatgcttattcaatggcaattgttttctttctcttctacctttgtggagaggttttctaggttgagagaagattttgtttttaattatatttcccccacaatagcaaacacatccccaaccacatacacacacacacacacacacacacacacacacacacacaacaggtaattagacaggcctgagcagggcaggagagggctcttcccccacccactacgaatgtcagtgatggttccaaaattatcacattgcctctctaaaagtgataaattgggcagcgcagtggctcatgcctgtaatcccagcactttgggaggctgaggtggacagatcacttgaggtctggagttcaaaaccagcctggccaacatggtgaaaccccatctctactaaaaatacaaaaaatagctgagcatggtagtggacacctgtaatcccagctactcaggaggctgaggcaggagaatcgcttgaacccagaaggttcaggtttcagcgagccaacattgccccactgcactccagcctgggcaacagagtgagactccatctcaaaataaataaataaataaaataagtgagaacatatggtacttatctttctgtgtctgacttgcttcacttaagataatggcctccagttatatccatgttgctgcaaaagacatgatttttgtggagggattgtattccattgtatatatagaccataatttctttatccaatcatctgttgatggacactcagttgattccatacctttgccatcatgaatcatgttgtaataaacatacaagtgcaggtatcttttgatgtgattatttcttttcctttgggtagatacctagtagtgggattgctggatcaaaatggcaggtgcctgtaatcccagctactccagagactgaggcaggggaatcgcttgaaactgggaggtggaggtttcagtgagccaagatcatcccactgcactccagcctgggtgacagagcaagactctgtctcaagaaaaaaaaaaaaatgctgtgtgattacccttatatgggtttcctggatgagccatttgttaaattaatttttgttggaaatttccccgcagagctgttgcacattgtggggggttaatccccagacactcccatgaggccccagtcacccaggggtgcctttggctgggaggagcaagtgccctttctcctaggagctgaaaaactcagtctcttatttatctatgaaaacaacagttcagtttctcacataaatgtgtacagataaaccgaatttagacagattttaggagaaaaagcaattgagaattccttttagaatgcatctcccaactagaattaggatccttaaacaaccacttcttaggagaaaaccagctcagaataaatcaaggaccatcaaccaaagggaggtctggggctcaggaggacttaccagttccaccagaggagaagctcgaagcttcaatgggcccctgctggcaccttagctctggttttgggcaactcctttagggtcctgagtcttccctgaggcctcacgtgtttgggcaccaaattattgttgacgaaaagagccaaactctgtaaaatattttaagagatttattctgagccaaatatgagtgaccatggcccgtgacacagccctcaggaagtcctgagaacatgtgcccaaggtggtcggggtgcagcttggttttgtgtattttaggaaggcatgaaacatcaatcaaatacatttaagaaacacactggttacttggaagtccccgcggggctgggggcgggtatcaatggaaaggaatgttcaggttaacataaaggattgtggagaccaagttttattgtgaaaagaaatctctcagatagcagacttcagagagagagcagattgtaaaatgtttcttatcagacctaaaagggtgcctggctcttagttgattatctcctggatctggaaaggaaggggaaaaagggggtgggtgggtgtgggggtatagaatgtggatctttttccaccaaagattttgtaaggcaatttcaaagtatggcaaggcaatatattttgtgataaaacattgtgattttttttttttttttgtgagacagagtctcactaggtcccccaggctggagtgcagtggcgccatctcagctcactgcaaccttcgcctcccgggttcacgccattcttctgcctcagcctcccgagtagctgggactacaggcgcccgccaccacgcccggctaactttttgtatttttactagagacagggttttactgtgttagccaggatggtctcgatctcctgacctcatggtccgcccgcctcagcctcccaaagtgctgggattacaggcgtgagccactgcacctggccaaaacattgtgattttcttccttgttatgccagagtcagattgaaaagtaagtcacaatatacagggtcaaataaaacccatcttgtaagaatttatggtttgtagggcataactccctagaccccttaggtaggaatttgggcaagataaaaaatcagagtttagtcctcaattccttaagataaatctctttctctatatatatctctctctatctcatatctccatcctattctctggaaaactctgactaatgcaagaaattaaagagacaaaacacataatacaatatcttaaacaacaaaatactattcagccataaaaaagaatgaaatcctgtcattcatggcaacatggatgagctagagcagtggtccccaacctttttggcaccaggcactggtatagtggaagacaatttttccatggtcggaagggggtgggaggatggttttgggaagaaactgttccatctcagaccatcaggcagtagttagattctcataaggagtgtgcaacctggatcccttgcatgcgcagttcataatagggtttgtgcttccatgagaatctaatgcttctgcacatctgacaggagatggagctccggggtaatgctcacctgccactcacctcttgctgtgctcccagttcctaacaggccatggtccccataccaatctatagcccaggggttggggacccctggcctagaggacattatgttaagtgaaataagtcaggcacagaaacataaatgctgcacattctcacttatatgtgggaactaaaaaagttgagcttacaggcccggctcggtggctcacacctgtaatcccaacattttgagaggccaaggcgggtggatcacctgaggccaggagtttgagaccagcctggccaacatggtgaaatcccatctctactaaaaatacaaaaattagccgggtgtggtggcgggtgcctgtaatcccagctgctcaggaggctgaggcaggagaatcgcttgaacctgggagacagagttgcagtgcaccaagattgcaccactgcactccagcctgggagacagggtgagactccatctcaaaaaaaaaaaaaaaagttgagctttcagaagtagagagtaaaataatgtagcaggtagaagaggatacggagaggttggttttaacaaatacaaaatcacagctagataggaggaataagttctagggttccatagctctgtagggtgactgtagccaacaatcacttattgcatattttcaaatagctagaagagaggattttgaatgttctcgcacaaagaaatgagaaatgtttgaggtaccctgatttgatcattacacattgtgtacacgtattgaaatatcactctgtatcccataaatatgtataattattatgtcaattaaaaataaaattttaatttaaaaatacattttaaaaatcaatacaatatctgacctgacactgcaatctcaactcaaggaggaaatgaatgctgtaaaaggcattattaggtcaattggcaaattggaatacagatatatatatatatatatatatatatatggatagatgatagactagataaaagtggtgtccatttaaatttatggagttagtaactatactgtcatacaggagaatatccctattcttaggaaatacacactgaattatttgggagtaaaaggccacgataatataaggccatgaacatataacttatgctcaatagattcaaagaagaaaatatacaaatatagagagactaatatagatatatatatatccatagatagagagaggtggggcaaatgctaaagcaagaaagataaaatgtcaacaataggcaaatctcaggggagctggggaaaaggtatcgtacaatttgtattttgcagccggtatgttttaaattatttttaaatgaaaagattttttaatgggttgaggaaattggagtgacttatatttatgacatccaatggactgtgcatgctgtatggaaacaaggagaaaataaatgtcatcattgcttaacaagtgaagggtaaaaagacaattaactcactgaagactacgcacagaaacacaaaagcctttgcttctgtggttataggtttaccaaaggcacaaagggatttgtatttattttaggattataatttacatcacttagttggaaaaattacagattttaagatatttttacaaatctgagtgactgtaaagactgctaaagtcttgggacatattcttaccaagtcccagatcttttgttttgttttgttttgtgcctgaaatcaaaccaggttttttagaccaggaaaacgtgagaagctagagctgctctactcagttggcccaaaccaggactccggagattattcccttatacagcaggcaccacattagagaaaggattctggaaaagtgagctggaacagaaaagaactgtctcaatgggaaacagactccaaaggacgctattggggggaggaaaacacaaaatatttcttgagaagaatgtggaaatggcaaagtctctagcctccagaaaccttaaactctagggaaagaaagcaaaaatttagaggtaagagtgttcatattaaaattcaaacaataagtagtttttctataaactctctttttttctaatcatgaaagtacacataatcattctctccaaactcagacattttagacagatagatagatagatgacagatagatagatagatagatagatagatagatagatagatagatacacatgcatacatactacatacatatatacctacatatgttggcacatagatgttcctttaccacagattaagttattctagatgcatatcttgtagcctacatttttatacattttcatcattttaataactgcatactgctctattatattctgtattttctatattagattagatccatgttttatcaccatttaggtagcttttggttttctgttactgtaatgttgagataaacgtctttatgtacttgttcaattattcccattaaacaaaagcccaaggtacaaagtttctgagtaaaaaaataggcacattttaaggcttctgatatatattgccaaattgtgctacaaaagaaaaactgtaccaattaacactcccagcaacaacgccaagagaatgctagtttccccacatctcaccaacactgtctagaacgcatagttttagagatgaacgctgggaaccgacgcactgtttgctctacctctccccctcctaacagtctagaacacaggcgctcaataaatcaatccaggctccagtccagtagacattctgatctaatctgactgctctgggtaacagaaaagtctcccttggttcactgcccagtatcctggcatcatgtggatcctataaaggcagtagctccaagcacattacagagggacccaactccattaaaccaccaccagctccccaagccaccccttcagccatgaagttcctgctcctggtcttggcagccctcggattcctgacccaggtgatcccaggtaaactggataaataggaggaaaggaaaactgggaacgaggaacactagcatatctggttgctctggtgatagatgagccaggttgggtggaggcagggctcaccccactgagttccagtctaaggtagagatctcctaacaaccaccactagccttgatatcccacacccaaacaccaccctatataacctttacaaaaatttgttttctattctaaaatgatagtcaccctcaacctaaaccaaaatatcttctttcactttatgtgagctccttatatctaacctcctaagacacactgaaggcttctgtcatcaccatgtgcatccattgagatcagcccgggttggagctcaaaggagattttgagcctagaaggaagagattgaggttcccatccctatgctcaacagacagctggcaggtgggggatggaagcagacctcttagagggctagttcccacaggatggtaagcaatgggttcagctcaaaccctggggctaggagataatgcagggtcagaaagagagagagacagacacacagagagcagggagagagagagatcagaggagggccaggcaacggatgtgaagaaagccaaagaggcttgagggtgctccgaagaggcccctgctgtgagccaatggcagacacagagcactgaggcaaacagatttcagcagatggtgaaatggtgcacagcactgggtgaatgcaaaaatgccctgtcactggcaaccgttattttctttttaatgattttggagaaagatttgactcctcccactttgccccaggttgactcatatttacagttttagagtctatgaaaacaagtaaggtagaaacaccttaaaagggagcctgtggggtgagtgagactagccccatttctcccttttgagtatccaagctcctccctgaccgtgaagaccaggctccccacccctgtttttacccatacatcctattctgtagtatcaaatttagcaaaaagcttcaaagatgcagatactggcaaagaagaagagctcgtcagacagagttccccaaggccatcaatccaggaagatttttgtctcctcatcactggctttcccaagtctcatttgcacaacatcctaaggatacacctcagaacaaaaagccaaacactcccatctggcgctgacgctttagtagccctgtgctgcttctaaccatgacttctctgtcttgtcctctcccatacagccagtgcaggtgggtcaaaatgtgtgagtaacaccccaggatactgcaggacatgttgccactggggggagacagcattgttcatgtgcaacgcttccagaaaatgctgcatcagctactccttcctgccgaagcctgacctaccacagctcatcggtaaccactggcaatcaaggagaagaaacacacaaaggaaagacaagaagcaacaaacgaccgtaacatcataataaccactgctatcgcctccaccaactcagagaaatatcatttccacagttccaattcctcctacattgctgagtactagccaaggctcctctttatggggcagatatctatagccaaccccaaaacttctgtcttctatcattctgtcattcatctagtaactaatttggagtttgtatctatcttacgagaacaatcatcatgcagattcgtccacaggggatctgtcagtttgggtcctccaaatgaaaaatgtcaagacagaattggacatgcaaaagattgactgggagaacacacctctgatggacaaaggtgagacagagcagccacaggcagggagagccttcagactgcaacgctggcctgatacgtgtcaaaggagagagggatagaggaggattgaatagaaggagactaagactgcagctctaagaaagtctcagccaaacagatggggaggcccaaagcaaggcttgcccctcagaggagctcacgcagggcaggaatagccaggttctcatatcccaggggttcagactttggctgagaacagcccctggagaacatggggtgactgctaccataggtctggaagtatgaggctgtccaccaactatccccttgaagcaagttctcttgaaaggaaatctaaacagtgcacccccatggctgccacggagtataaggagggagagaaaggagctgaaagtctaggtttggccagctaggtagactgacttgtgaggtatttatttattcatttgagtaacaaagcagacagaatacatagccaccattggtagtacaccccaaaagcaaggatggcatgatgctggtgactcaaacgtgcctactcatggtgtcaaattggcataatcctcttgggaagctgtgtggaaataagcacagagaagcagaactctaattgcttaatccactaaacattacttctgggaattggctcatcataaattatccaagagaagcacaaagttatgggcacaaaggttttccatataatattatttaaaatgctgagaaaatgaaaaaatctaaatggtgaaatatatactaatgccatctataaatacaaacaaatagaatgtttatagaataatggaacataataacattattcaaaattgcatttatgctatagttgtcaaaattgtctccttatatgatacaaaactcatgaaaattatgacttttttgtttggttggaaagcagaattatgcataaatttcctcttacagttcgatgcccattagttttatataacatttatttgacacgtactgacttctatctgagaagaacaaaccaaaacactcaggcctaaataattaaaaacggtcctaaaaactagcaaaccagataagaaaagatgttaatgcccattccctaacttatgtcttagaccaaaattaattctagatggttttaaaatgacagtgtaaaagtaaagtattaaaagattgtgtggtcaaatattcaatttaagagcaaggaaattcttataaatataacaatagaggcagaactcatgtaagaataaattgattaggtggtattaaatattaagttcttatgtatgtcaaaagatatcattttgaaattcatccatcttattgggtattgcaggagttcattcctttttgtttataaatactcttccgtcatatgaatagtattcatttgtatactggtttgttgatggacatttgggttgttcccagtttatggctattacaaataaagcttctatgaacatttatgtacaaatctttgtatggatgtatgctttcatttccctaaggtaaatacctaggagtagaacgtctgaatcatatggtaggtgaatgtttagcttttttgtttgtttgtttgtttgtttgtttgtttgtttgttttttgagatagagtttcgctcttgttgcccgggctggagtgcaatggtgcgatctcagctcactgcaacctccgcctcctgggttcaagcaattgtccttcctcggcctcctgagtagctgggattacaggcacgcaccaccccccgaccccggctaatttttgtatttttagtagagacggggtttctccatgttggtcaggctggcctcgaactcctgacctcaggtgatccgcccgccttggcctcccaaaatgctgagattacaggcatgagaatgtttagcttttaaaggaaatacaaaattgttttccaaaatggttgtgccagtggatgtgcccatcagcaggatgtgaaagttccagccgttcctcatcctcaccagcatgtgatatggtcagtcttttgcattttcatcattctaatagatgtgtagtggtatttcattatgctttcaatttgcatttttttaataactagttatcaaaaaagtatattctgtatgattctatttacataaagttctttaaattcttttaaaattgcatacaattatttaaaatagaaagtaagaatctaacgacagaaagcagatcactggttgtcaggggatgtgaaaggtgcatggagagggctgaaagaatgtaaagggacctgaggacactttgaggggtgatcagtcaagacacattcataggccgggcgcggtggctcatgcctgtaatcccagcactttgggaggccgaggcaggtggatcacgaggtcaggagatcaagaccatcctggctaacacggtgaaaccccgtctctactaaatatgcaaaaaattagccgggtgtggtggtgggcgcctgtattcctagctactcgggaggctgaggcaggagaatggcgtgaacccaggaggtggagcttgcagtgagccaagatcgcgccactgcactccagcctgggcgacagggcgagactgtctcaaaaaaaaaaaaaaaaaaagatacattcataatcttgattgaggtaatggcttaatgggggtgtacataagtcaaaaaattacaaaatggtaaactttaaatgtgttcagtttattgtatgtcaatttaaacttccaaaaaagctattattttaataaaataaataaatctcacagtgaaacagaaatattaaagtatcataaatagtttaaagacgtatgacaaactgagacatgtgatgaagtatcgataccaataaaatataacaagttaacatgaagcaacagggaaaacatgaaacccctagcagaaaatgaaaaagtaacatgaactagctttttaactctataaacggcctgaaaaatgggaaaaaatctgtgtgactgtgatcaaataaatgcagattaaaactacaatgagatcttgttttttacctatcggattgtcagagaattaacaaacccaagtctgacaaggcataaatagaaataagtctcatcatcagatgctccggtttataactaaatatgtccattctggaagacatttatctatacagctttcaaaacccttaaaaatgttcatgttctgtggctcagagactctacttttagggatatattctggggaaataattagagttcatatcaaaaagattaatgtatatacagcacaatcatagcagcatagtttaaagtagtgaagaggcagtggggtaagatggctgaacagaagcctccactgatcatcctccccactagaacaccaaatttgacaactatctacacaaaaaagcaccttcataagaataaaaaatgaggtgagtgatcacagtacctagctttaacttcatatcacctaaagaggcactgagaaggtaggaaagacagtcctgaattgctgacaccgcctctccccagtcctcaggcagcagctgtgtggtgtgcagagacaatatgtgtacttgcaggagggagagcacagtgattgtgggatttcacattggaactcagtgctgctagcaccaggcagaacccagcaggtgcctaaaagggatcatttagaccatccctagccagggggacatcacccatcccagaggtcggaactccagtttccgcaagcctcaccaccgtgggctaaagagctctggggtcctaaataaacttgaaaggccgtataggccacaagaactgcaattcctaggcaactgctagtgctgtgctgggctcagaggcagtagatttagggaccactcaacctagtgagacaccagctggggtgtgtgtgtgtgtgtgtgtgtgtgcgtgtgtgtgtgtgtgtgtgattctcgtgcctcagcctcccaagtagctggtgatggcagtggcagcccatctggagtggacgctgccatcaagccagctgcagcagggagggacagctggggctgcacattccacagagctgcagagctggggacaatgagagccccacaccttccaagctggtgcagcaggagctccccaggtgcaactgcagccactcaagtcacggctgtgaaccccggcctccctgtgttcttgtgggtgctgggagcaggcaggggtcctgcacttttgggtgcagctgcaggcgcccaaaccatggctgcggaaccagacatctctacactcttgagggtcagggaagtccccactgccctcacaagcttagaagtgcctgctcccacagcctggcgcctccctgctgtcggtgcccgctctaatcttggagcaaagttgaggccaagcccaggtgctgtcatagcctgttgggtgtgcacacgcttggggcagtgctgacataccagccccctgccgcctcggacccctacagacctcgggtgctgacgagcataggaggaaagccgaggtggggctgagggcagctcggcacctacagcctgggtgccatgaatggcagtaggagtcttctcagttctgtctccctcccttcagtgtggatgaaggggtagaaatgaggtacagcatcctgtctttcccaggggtcgtgttgcatcctttaatagtttaccactgacagcactaccaacgatttggggattgtgtctcgaggaagcaattgacctaaatttcatgtatcaatgaaactgtttttccttatggttttaattatttatttattttataaaataaaataaataggcttttaatatataatgaaagccttttaatgttaacatgcaaggactgaaagaatacctgttggactgcaagatggctgctccctctaccctcagcttcaactggcctgtcagccaagctttgatttcctaggcagaatataaaagaattcctctctgtggtggtccaggagaccaagggaatttggggaggtgatagaactgcaccctgatcatgctggtggtgaaaactcgtgcaaccgtacacccaaatgtcatcttttttactgtatgttaattttagaaatcagaaagtaaaagatgcaatcacaaaaatatcatttggtaggacaaacttattcagtatatgaagataatagagaacttttatacaaaagtggctcttacaaaatattaatataaaatattaaaatataaattctcaagagctataacttaaacttctatgttaatttaggtaagcaattctcctatgaaaagacttaacgaattctttccttttcttttcctcttgtcttttcattttgctgcaaggagcagccttaaagctgactgaaacagttattgtgaccagcatgtaatgcttgaaaagatgaaaatccagctttaaatatgctcaatctcaataacttttttggtttttttttttttttttttttttgagacggagtcttgccttgtcacccaggctggagtgcaatggcacgatctcggttcactgcaactttcgactcccagattcaaatgattctcctgcctcagcctcttgagtagctgggattacaggcaccggccaccatgcccagctattgtttgtatttttagtagagatggggtttcaccatgttggcaaggctggtctcgaactcctgacctcattatctgccgccttggcctcccaaagtactgggattacaggtgtgagccaccgcgcctggcctcaataactttttaataggtatatgcttagtttattcatgtttctttgctagttttttttccctgcaaagaagaagaagaaaaataattttaaatcttatttgaaggatgattgtacactgtgttattggccttggaaaggagagaaggaggaaaaggagtaggaaaagggaaaatatcttaagaggttgtactgttaatctacttccaggcagattttaaccactaaagctaaaatgctattatgaaattgaatatttcaattgaatattgaaaatggtataatgatgccgggtacggtggctcatgcctgtaatggtagcactttgggaggccaaggtgggtgcatcacttgaggtcaggagttcgagactagcctggccaacatggtgaaactctacctctactaaaaataccaaaaaaatagccggaaattgcttgaacctgagaggcagaggttgcaatgagctgagatcatgccactgcacttcagcctgggcaagagagcaagactccatcttaaataaataaataaataaatgaaaatggtatagtggcttgaagatgcaggggcccatgaggaagaacatggatggcccctagaagctgaaagcagcccccaggtggcagccagcaaggaagtggggtcttcaattctacacgtgcaaggaactgaattctatcaacaacctgaatgagcttggaagctgattcttccccagaagccgcagataagagctcagcctgctaggggcttgagaaaggggaaagtgactttaaaaatgtaactcgagggagttccaaaaggctaagcgattcggtgaatctaataaacatgttaaaatgcataaagttcgggtgtgggggaaagggaagggagagcattaggacaaataggttcttttctgagttctggccaggaggcttcttgatcagttcaaattgttacaaagttcagctggaggtttccttctccctgtggccgctctgggcctctggcagccctcctcaaggagcaatccgtttccttcagagggtctgtgggttctcctggcttccctaatgcgttcctgcagtccttctgaagcaaaacttaatgatgcgagcctccacacgctgctctgaccgtccgagtgggagctgcaatctagtcctgcctcccgtctgtcatgatccctggtggtttttgactacagctcaattgttttagattccatgtgtaagtgagaacatgaagtatttgtctttctgtgtttgactcatttcacctagcagaatgtgtaataaacattaacaaaatgaatgtgtaaaatcaggtagtgatcacagctacaaagaaaataaaacagagtgatagatggaaagtgatggggaggaagaacctggttagaaatggtggtcaggcaggacctctctaagaagggaaaagagctgtgactgcacgataagccggccacgtgaagaccttgaggacaacatgcaaagctgatgacccaccggccctgcaaagaccgggcgggagataagcttggctggcgcgaagaaagaaggctggagggagtagaaatggggacaggagctgaacgctgggagagggggctcaaagccagctcgcgtaggcagggactgggcactcgcaatgcgcgcagaacaaaggcctctctctctctttcgccacactaagggccaacatggtcatctccaggtgcggattctgccgtaaaatgcgcccctggcgactcacgaccaggacgcattccgcaccgctcccccacgccccgcagcccgccctcgaggctgattgatttgtgccagtctctaccgccatctgccggcagcactcggtacacccgcgccctggaggtcgcacgcgctggccaaacgggcgcaccagacacttttcagggccctgccaaagacctcccaatgtctactggcgtcccagacacaagagatccaggccaagactcacacttcacaagatacacagacacgggccttagggaacaggaaattccatgaaacttccatttacccaattagccggactcactgagccccagaatagggttttcaaccaactcctactaaaattaaaaagtaatgtgtggtatagattggaataatagacattggaggctacaaacgatgggaggcggagaggggtgagggttgaaaaattacctattgggtgcaacattcactatccgggtaatggggcactagaagcccactccaccactatgcaatatatgtatttgtaccccgtaaatctataaaaataaaaactacattaaaaataataataatgtctggtcatctaaatagtacctctacagcttattaagtgctctggagacgtcccagttgcctgtccttcccattaaaggtgatatccagtgctgatttccccttcaacctcgggttcccataaacctcttctttctcactcctgctgccctccggtactccaataaagaatgatagatgggccgggagcagtggctcacgcctgtaatcccagcactttgggaggccaaggcggatggatcacctgaggtcaggagttggagaccagcctggtcaacatggtgaaaccccgtttctactaaaatacaaaaattagctgggcatggtggcgggcctcagtaatcccagctactcaggaggctgaggcaggagaatcgcttgaacccgggggcagaagttgcagtgagcagagattgtgccactgcactccaacctgggcgacagagcaagactccgtctcaaaaaagaaaaaaagaaaagaaacagtcccagtatgcatccatgtgcatgtgcatgcaggtgtatctgcctgtgagagctgcgcacgcggctctgagtacctgggaagacacccatgtacagatgctgtacatgtgcggggtcactctctggcgcattcggaggcatgagggctacgtgcaatgcgagggaacctatgtccaggcttcctttcttggttttcctcctctgaactcatgcatcccttcacaaacagtccagctcctggctaaaaacctatgtgtgatttttcagcccaaacacaggcaatgacaggttttacctggcaggcctcacagctgagtcgtgcacagctgatgcgttgcagtctttaaagacagttgcagacacagactcaggcctcctggacagtcgacctctcacacacatctccgctcccaacccaagtcttcattcagacacgtcttcattgcagtggggtaggccttcggccaggacctccttatcttggggagtggagaatccttgaagacactttcctccatgctgactcagaagttttcccactctcccttccccaccccatccctggcccccaggtccgtacaacttcaggagcctttttgttggaagcttttctgcagtgagaccaaccccacacctgtgctcatccacccgaccccagttggcatcattctatgaggaaattagaacaggtggatctgtgttctacaaaataaaacaaaccaggttctctggtttagcctctttcttgtactgtaataataagagatttggggcttggctattacttgctttgactttttttgttttgagacagggtttcgctctgtcacccaggctggagtgcagtggtgcgatctcggctcactgcaacctccgcctcctgggctcaagcaatcctcccacctcagtctccctagtagctaggactacaggtgcacaccatcatgcccagctaatttttatattttttatagagatggggtttcaccatgttgtccagtctggtctcaaattcctgagatcaagcaacccactggcctcagcctcccaaagtgtgaggattacaggcctgagccaccatgccgggccatcattaatcagctactccagcacttagcagttcagctctctcctgctcagctgagctcctgattgtacagtggttaagagcaaactgcctctgccacttagtaacctggtgacttgaaaaatcactttgccttttcatcctttggtttcttcatctgtaaaatgaaaataacaataaacaatacctacttcacagggtggttgttgtgagggtgtagtgagttgatgtatgtaaagcataacgtaggttccattgaagtgtttgctattgtgttcaacagggtccatttctgcttggagatccacatggctctggggagtacctgttggctcagcctaggtcacgtgttccaccttaaccatcccttccctgctccaaggtagagcccgtgacctgaactaaaccagcaggcacgctccacctccaacaccggctcaaggtgggcgtgtaatataagctggttcaattagaatgaatcttttttttttttttttaaagacggagtctcatcccccatcacccagactggagagcagtggcacaatctcagctcactgcaacctctgcctcccaggttcaagcaattatcctgcttcagcctcctgagtagctgggattacaggtgcctgctgccacgcccagctcatttttgtatttttagtagacacagggtgttgccatgttggccaggatggtctcgaactcctgacctcaagtgatccacccacctcggcctcccaaagtgctaggattacaggcgtgaaccactgtgcccagcccaattacagtgaatcttaatacactggctgaaaattctgggacacagccagtctctctctttccaacaggacatgtacaaggacctgtacaaccctgggagatgctggcatattggggccacaagcagtgctgacctgaagaaaagggcaacacctcagaaaacaaagtagataaatagaaaccaagtccttggtgccatcacttgatttctggacaaagcctcacctaagctatttattgacctgagcccttcatagtttaggccaatgtgatttggttgttttgttacctgtaaccaagtatcttaacacaaagtggatctgtgagtgaccagagcctcttgggggttgtagcaatctagtagttggcccagaaaggccaactctgagatggagtgtagggtgcagaatgttgagtaatgagtgctcttggaatcaacaactgaggaagacagaaatatgcaggattgggcacagggagaagttcagctgcagtgcaggcccaagggtagttgcagctgagccttcaggaagttctggagccagagtagcccttctgagttgttccaagcactgaaggcctagcaagttccaggggtattaaaatcaataagcctgtcagccccgacaatgccctcaataggtctgggcacagattggagagaagctgggctcccactgcaccaggagggagtggcccagagccactgagccatggagactcaggcagggggttgctccagcacttcttctggagaagttttgagccccagatgcagttagcacagttgcccgccccttatcataagacgaagtccgttcccaccacatcttctgcaagacctagctggggaccccgagacactggcaaaaaagcaaatgtaaatccagctttattggtaaaaaaggaatagcagatttaatcagaaattcccacctggcccagcagcaccaaccagaaagaagggaagaagagaggaaaaaaccacaggaagaaagaaaggagggagggagggagaggaggaaggaaggaggagggaagggaaggggggaagaagggagggagggagggagggaaagaaagagggaggaagggcagagggagcagggagactgtagatcagggtctgaatggagatccggtcctggaagtaaatgatccaaggctccaggtgctgggaagagagcaggaggggagggcggcccatggcactgccatctagaagggtagtggctcttccacaggaatgttgaggatgacatccatgtctggggtgcacctggtgggaggcagcacagaaggccatgagagaccagaggtggcggtgtgggagcacccactcagaggagccctgctctttagaactctggtacgtacttgggttggggggcaatcccaaaatacaatctgtgatctatctgtgacctcaaagcccaactgtgcatacacaagcatacacacacacacacacacacacacacacacacacacatacacacacatcaaaaatggaaaagaaatgagtttggcaggacaaatgttcccctgacaagtctgaggtcaagagggagcaggaactcagctctgaaatgctgagggccctcaagatgatcactggctttggagtgaggatgacaggtttgataactttgacctgtgtcaccttgagcaagctatttctactctcccagcctcactccttcagttggcacttaagtgaaaagcactcattaagtcccagaccccaagtgagcctcagtttcctcatctgtcaaatgggtttaatattctaacctcagtcattggtggaaagattaaatgagaccatgccagcaggtaataagtgctcagtaaatgacaggcattattatttccatgaaagtagcaagagagatggattcccatcagcaatatattccccattgcagggaccagcacaaatatttaagaggctgaaggattacattctgtttcactctcttttctctcttccaaggagaccatcctctctcatggtttcaataatctgctgatacacatgaagtatttaggcaggaaatgtcaggatacttgcaatttacaaatactattaaaaaaatgaacatgaaaccaacatagaaaaaaaaaaaatttctaaatctagatgggcaaaactggctattcattatatcattctctcttctttatatttgaaatttttcataataatagtaaaaaaaaaaagttcatctctatgctggcaacacctaaatttctacttccagccaatatctgtcctctgaggtctacactcatcttgtcaattgcccacccaatgactccaccttggcacctcatataaatcaaacttactgtccaagtcaactgtatggtttttgttttgttttgttttgtttgagacatggtctcactcggtcacccaggctggaatgcagtggtgcaatcacagctcactgcagcctggaactcctcaatcgatcctcctgcctcccaaatagctgggaccacaggcacgtgccaccacatctggctaattttttaattttttgtagagatggaggtctcactatgttgtccccctggtctcgaactcccagcctcaagcgatccttcttcctcatcctcctaaagcactgggattacaggtgtgagccaccatgcctgcctccaaataaactttttgactgtgcctacatacacatccctcaccccgccccagccttcccaatctctgcatttgacatcaccaccaccccattataaaagtcaggaacccaggggttattcttgatacctccctttcctgtacttcccaagtcatgcaagtccttcttactttcctaaatatttctccaatctatctatttctcccatttcttctgccacactcttggccaggccacttcccatgttcccctggacaactgccctcacacccactagaattccagctgccattctggctccttgccaatctcatccccatgctcttttcttttcttttaagaaagagtcttgctctattaagcaggctggaaggcagtagcaccatcttggctcactacaacctctgtctctagggctcaagcaatcctcctgccttagccttcactgcagctgggactacaggcgcacgccaccacgcctggctaacttttgtattttttgtagagatggggtttcaccatgttgcccaagctggtcttgaactcctgggctcaagcaatcctcccaccttggcctcccaaaacgctgagattacaggcatgagccaccacacccagcccaccatgctcttttcaaactgacttttttggaatacaaatctgatcatgtggcttaagatcctttgcttctgggatcaggcagaacatctgggcctacagggcactgcatggaggtccctaggggctgagttgccctgctcccttcccgccactctccctgtcactctgcattccaaccactctggcctcactcagctccgtgtcaatgccaagttccttccaaccatagctccttcacagctcaaggctcaacatgtggttggttcatagagcagtaacataagcatcaccgggtagcttcttagaaatgcagaatcaggctgggcatggtggttcacacctgtaatcccagcactttgggaggccaaggcaggcagatcacttgaggtcaggagtttgagaccagcctggccaacatggcaaaaccccgtttctactaaaaaacataaaaattagccaggcatggtggtgcacacctgtaatcccagctactcgggaggctgagacaagagaatcacttgaacccaggaggcggaggttgcagtgagctgagatggtgccagtgcactccagcctgggagacagagctagactctgtctcaagaagaaggaaggaagaaaggaaggaagggagggagggagggagggagggagggagggaggggaaagaaagaaagaaggaagaaagaaaaagaaagaaaagagaaagacagagagagaaagaaagaaagaaaaagaaaagagagaaaggaaggaatgaaggaaggaaagaaagaaaagaaaagaaaaaagaaatgtagattcatgagccccactgagacctactgacttggaatctgctttttaacgcgatctccaggtgtttcctgggcatgttccagttggagaggctctgcttaacagtgtgccatttctactttttaggagggaaaatgtgcttccttgctcctggtgttcccttccacgtggaagggcatccatgagtgtattgctcctggcctctctctgcccccttaaattctgcttttggaaagggggtatgaccaccagaatggtgagtgtgaggagaggaaggggacacagggagcccagtccctttctctctcagcagcaagaaacccgaaaggactccactcttctctgccccaaggcctggctccacgtgggtccagctccaccatgatcgggtggttcaatttgcctaattctgggttcactattcagaggccaacacagtctctaaaatcagctttaccagaataaaggtgataacctggcccacatgcaccttacccctttcagtctcattcactgtgttcagagttcaggtaaagacaagtgactatttattacgtcccccggagaccctggcaccaccgcctagaattgctcttccttcagctcccccatcagtctctttcacctagtgaatttctatgcatccttcaagcctcagttcaaatgtcacatcctcaggaaaaccttccttgactgcccagacttgctgtcctaacagttgctttcttttttcttttttttttaattaaaaaaaaatttttttttagatggagtctcgctctgtcacccagactggaatgcagtggcacaatctcggctgaccgcaacctccgccttccaggttcaagcaattctctgcctcagcctcccgagtagctgggattacaggcacccgccaccatgcccagctagtttttgtatttttagtagagacagggtttcatcatcttggccaggctggtcttgaactcctgacctcgtgatccaccggccttggcctcccaaattgctgggattacaggcgtgagccactgcacccagctcctaagagtcacttttgcagtggcatgtactctactcagcagctctgggctctgctgcaactccacatttatttgtggctcattatcgactcatgtccagttccctctttagttccatgagggcgggaccaaggactgttctcattcacatggtgcctggcattcagaggcacttcataaatccaatagtattttgttttgggggcggggggcggtttagaaatagaagaaaaggaagaaatggcgataggagaggagaaggaaggaaaacgacaggagggagagacagatgaagaagaaaaattaaagaatttgcaaatgctaggctctgccacacatggtcctgtggtgtcatcaaggagaggtaagcctgggggacccccaacccaaccgcagagggcttgccccaaggaagggcaggcaaagaattggtttctggggcccagaaacctgccaagtgaacaggacagacttctctccttgtagagtgtcttccaggctattcttccctgaagccaaccaccccactcaactctgccttcctcaaaaacccagaagtggaaggctgtacccacttggttgacacatgggatctgggaactagaagggcccttagagattacaccacccagcctgctgtgtacagatgggaattggaggcctttgcagagatgggaaaggtcacatctgcccctggtcagtggcagatccaaggtggaaacccaggaccgcccctccctccctgtacagggttctgccatccacaccaggctgccttccccaagaacagagagcctccgtgagctcagagtgtgactggtttaagaggcagtggcaaaaagatcacatacttgggtctccgaagcagaacatcctcaaatatgacctctcggggttcccgggtctgggcttggagctcttccacctcggcccttaatacaggcatgttctcctcaaactggtcaataatctgagaggaaaggcacagcaggggagaagggagaggcaaatggcccccaaccaaagggagaaaggccaaaatgaacgaggagcaaagctatctggggaaatggtatgggttctgtcactgggacttgctggactccagggaggggacttccccatgcaaggtgcggctggcttccaagttagtgacaatattcagtggtgctgaaacaggtgagggatcatggagaatggagacaggttacaaagtggcggggaatgctcaatcatgggaatgaatggaggctggcagagatagtgaagggcatacacattaaaaaccagtgaagaggcaagataatgaaaattaattcaagaaggcagtgatggtgaagttcattaacactgataatgggtggtgggcagtaacaagaatcaaggggtaaagatgcacggtggttaatggctgaataggtgatgtttggtgatggttgtaaatgggtcattagccagcattgctggctaatgaggcaaggcctaggtcagtgccaatcgccttcccagatgaaagacaagtgacagtaatggcaccggcaaggagggaggccaacaccagagtcagagacctcctgagcgccagatcaggagaagcctgactcattcccacaggccgtggggactgcccatccactgcttccctacagggaccaccaccttccttgcccacgcacttctctgaacctttgcatgcatttcaggaagtcctggctttcccacatcttctgtaggagagcctcttcatagggacgctgggtttcctgtggaggaagaagaggtctggcccccaggtgcctcttcctgggcagcagaacatggtagagaccgatggggctgcagtgggcctggaggcagaggatggggaagagggcggggtgggggtgagacctggatccccgctcccacacagcaactggctactcaccgccaccacagaactcagaatttttttcttcttcttctgaatcttgtcagacaaggattccaggacctttctgcgcatctcaccgaggtcatccagctcatcctgggagccagcagaagggtgttggtcaccagtcctgcctcccacacagtctggtgggagaggggcaggggctcccctacctgctggctgtccttaacctgctgcagctggcgcataagagtggagatctggacagacttgatggaatactcatggtccatgtaagtgctcaggaagttcacttcctcctgggtcttctcaatcttggcattcagctgctctgcctgctgctcaagatctggggaggggttagggaggtcagcagggacaggaggcaagaccttccctcaagcacctgggccccaggaggcccaggaggcaaggtctccttggccagtaactggggtctgggctgaggtgagctcacacagggctgggaggtggttaaaagttaaggctctagacggttttccacccctgcaggagaagaggcaatgctgggtaggaaaaaggaagggaattggtgcatgatccctagactagtccccactctgccactgacttgccgggtggctctcgccaagactgtccctctccagacttcagtctcctcagagacacactcaaggaagtgagaccaggcagatggggtgacagtggctcccaagacacaacccatggcaggattaagacaaagtctatcctgtcttcctccagagagacccccaatgtctggggttgactgatccaccacccctctgctcagcaggtgtgtagtctgctcagggaaaaggaaccacaggccaggcaggatggaagccaggagacccaggttctagcccagccactgactcccagaaggaccttggcaggaaacagagccaggctaggattggattctggctcctagctatataaccttccacaagctactgcacctctcttagcctcggtttcctcatctgtaaaatgggaggacagcttccctgcctccaagtagttgcaatgactgagtgtgtgcctgtaacaatgcagacattggtagagacccagatacggggcctggaaagagctaagtgttgggtaactatgctattcgctctgtatcttagcattcccatctgccaagaagagagccaatggggctgagggtttctgaatggcaagtacaaggtgaatgctctgctgctgacctccccaaggtgccaggggggagggtcaaggaatttgccagggattcttacagctcatcttgcatttcttcttttcttcccactcctgaagctcagatttcaattgctgcagcctcttcttgtttgagtactccaagatgtcgatgatggtctgcgggaggggtggagtcaactcacccacaggctctgctggctctcagaggcggccacccagcacttcctcagaggagtccccagtcccaacctcactcccagaaacctgaccagaggctaatcgggacagtaacagtgtccacccatagggttgttgtaaggactatataaagacatacagatcgcttgctattacacgtagaggtgtttgcaaatgctgttggtggtagcagcgacctctgtcgcaccggtacagtatgtgcccggtgaaccccctctgggacgggtgctatggtgccgcatttcacagagctcggggaggcaaagttaactaaaagtctcccggccagtgagtgctggcgcgctgggatgaaacccatctcggtcctcttgcaaagcccaggtgaggggagtgaagggtgaagaaatgcgtcttccaggtggaggaagcaccacgtgcagtgggcggggaaaggcaggagagggcgcgcgagtgcgcggagggagggcgggacggagggagggagggcgggacggagggagggagggagggacggagggcgggacggcgggagggcgggacggagggacggagggagggcgggacggagggcgggagggcgggacggagggagggagggagggagggacggagggcgggacggagggacggagggagggagggagggacggaggttgggacggagggacggagggcgggcggatgccgcgggtctcaccgccagggtgtcctgctgctgcagcagggcccgcacgtgcagggtcgtgctgttctccatctcctggatggtctcgatcagctcccggttgagcttgctgaggaagttctcacggcttcggagctctcgcagagcggccctcccgctcctgagcgaggtctgcgggcggagggaagagcagagaggcggcgctgcgccctgcccggcctgagcccccgaaagcccgtggacccgccgccccggccccgccagacgcccgcccccgtgcggcctcctgctggtaaacgcggcccaagctgggcggttccccattgtctgcgccgcccgggagctccgggactctcatccgttcggaaacgcacgtgtacccatcatctcacatccctgaggtgcgggtgcatctacagttggtggcgtgtcaccaactaatcaacaaatatattattagtgggtaaataaagatgtgccttcatatcaatggcttctcagaatcaatgaaatatagaaataatagtaagggccgggcggggtggctcacgtctataatcccagcactttgggaggccaaggtgggccgatcacgaggtcaagagttcgagaccagcctgaccaacatggtgaaaccccgtctccactaaaaatacaaaaattagccgagcgtggtggcgcgtgcctgtaatgccagctactggggaggctgaggcaggagaatcgcttgaacctgggaggcggaggttgcagtgagcgagatggcgccactgctctccagcctgggcgacagaggaagattcctgtcccaataataataataataataaacgccccaggtaggttaagaaggtggcagagcgaccgccatgtctggaggagaagcaggggaggcaaaatggatgataaacgtcagcatttccgggcaggccgcggagtcaatgagtactctcatttcacacaacagcccccagtggaacaaggagggtctgagggttaagtgactcgcctaaggttacacccagcaggtgcataaaacctacagtaacaacaacaacaacaattgtacttccctaaggttacacccagcaggtgcataaaacctacagtaacaataacaacaacaattgtactcccctaaggttacacccagcaggtgcataaaacctacagtaacaataacaacaacaattgtactcccctaaggttacacccagcaggtgcataaaacctacagtaacaataacaacaacaattgctgagggccctctacatgccaggccaggtgctgtgccttgctctgcaggtggcacatggtatctgttcaccctccaacagctttatgtttactaactctattttgctgataaatggaggctcagagagtttaatgacttgcccagtgtcacacagtcaagaagtggcagggctggaactggaaagccagacttctgaatcccaatgtctgtctttccgttatgctaaaacaagaactgagtagccttaaaactgcaaggcatggctgaaccacgtagtgactaagacttggatgttgaacctagacacaccttggttcaaatcccagctcagccacttaccatctaagagaatctgggcaagttagttaatgtctcagagcctccttatactcattctaaaggtaaggaaactagtatctgttttagagaactgccgtaaaatataaatgagattggacaggtgcggtgactcacgcctgtaatcccaacactttgcgaggcccagatgggaggatcactcaaggccaggagttcaagaccagcctgggcaacatagtgagacctcatttctacaaaaagtaaacaaaattcgctgggtgtggtggtgtacacctacagtcctagctactcaggagtctgaggtgggaggaatgtttgagcccagaagatcgaggctgcagtaagtcaagattatgccaccacactccagcccgggtaacacagcaagaacttgtctctaaaagtaaataaataaataaataaatacaattttaaaaaattaaaatgttcgctgggcatggtggtgtgcacctatagtcctagctacttgggaggctgaggcaggaggatctcttgagcccaggagtttacggctgcagtgagctatgattatgccatttcactttagcctgggtgacagagcaagaccctgtctttaaattcacaatcaagccacttagtgagagtgcactcatgtgcactcagtgaacaatagctgatactactgtctctggctctaaccctctacccctgccataaatatttgctctttcatttgttcctgtacttcctcatttctccgtcctttactaaaaacgaccccttcctagccctcagctcctttatttctcatataacagtaatcatgctgatgtgctgagtgcttgccatgtggctgatactgtactaagcacttcatgcgcactgcagcacatcaccctcacagcaagactaagagatgggcactattattaggccaactttataaaagtggacagcagtcgggcacagtggttcacacctgtaatcccagcactttggaagagcaaggtggaaggactacttgagcccaggagttagagccctgggcaacaaagggagatcccatctctacgaaaattagctgggcatgatagtgcatgtctatagtcccaactactccgagaggctgaggtgggaggatcacctgggctcggaaggtccaggctgcagtgagccatgatcatgccactgcgctccagcctggatgacacagcgagaccctgtctcaatcagtcaatgtggacagcaaggattaaattcagtaacttattcaaggtcacacatagcagagctgtcatccttgaagtcttgcctcctagccactccactaccttgtctccacatctccagaccaaaatacccagaagtatcttgtgaaaaatgttattctccaagtcctgggcccactgaaacagcagcactagggtttcagttcaaatgtcacccaccttagcagcctctcgttagcacctaaacaattactgccacactctcctccgtgcctccagccccctaaccttattcttaggcttctctttagctcttatcatcatttcaaatatctttctcttgttgattgtcagtctcccccatccaatagaatggaagtcccctaagatcagaggtcacattactggtgaaccctcatactcagaatagaacctggcacatggtaggtgctcaatcaatatttgttgattcattaaatgaatgaaagattgcaagagacagtattaagaactggactggttaggagcacaagttttagagccaaattgtccacgttcagcttctacatcaatcaaaaacacctaaacccctctaaagttaggataaaaataacagaaatggctggaagcggtggctcacacctataatcccagcactttgggaggccaaggcgggcagatcacctaaggtcaggagttggagaccagcctggccaatatggtgaaaccccatctctactaacaatacaaaaaattagctgggcgtggtggtgggcgcctgtaatcccaggtactcaggaggctgaggcaggagactcactcaaacctgggaggtggaggttgcagtgacctgagatcttgccactgcactccagcctgggtgacggagtgaaactctgtctcaaaaaaaaatttttttaaaaactaagagaaatatgagttcctcctttaagaatactgggctacctctaaaccattttgcaagataaaaggttaaaggggaaaaaaaggtttcaaagcaaattatattttcccttgttctttatatagtagtcattgttcattgagctattaaaaattttcttgaagaattattctatagtattttgtagtctttataatacttagtattttactttctgctatgtatgctaaggacttgtcttcctttaggcatttcaaatactttgagacattgttcagataattacagaagccataaaacaatgtatagcgaggaaattaattacctacaattgtagcgattgatgtgaaaattttcattgtcagtttctaaggcttgcttcaaagtacactgtaagaaaatttaatttactggaattttttttttttgagatgaagtctcactctgtctcccaggctggagtgcagtggcaccatctcagctcactgcaacctctgcctcccaggttcaagccggtctcctgcctcagcctcccgagtagctgggactacaggtgcgtgctaccacacccagctaatttttgtagtttgagtagaaacggggtttcaccacgttggccaggctggtctcgaactcctgacgtcaaatgatccacccacctagacctcccaaagtgctgggattataggcatgagccaccacacccggccaagttgctgcaaattttaagataaataagccactagatcgtgttcctaatgcaacaaaataacaagcaattctgattatttcttgagtcttaaacagaacagcaaacgctttgtttaactggctttgacccctgatcctgccatttcctggctgtgtgacctggtgcatgtcatttatctccctgcgcctcagtttcccggtttgtaaaataggaacaaggataagcgtgctcacacagttcctgtgaggaagaaatgagtcaagtctggcacccacaaagttctcagcacatgtttgctacagccatcatccccgtccctgtcctgggcccagtgtccagggaagatgtgcctcataccttcattaaccagattttggcatgcatcttcccagggtccaacttccgccttctatgtagttctcttggattcttcggctggcagcttgtcaccaccgtagtgggcttgaagtgaaacactaggggtagacaggaaaggacagggagagagtgagggtcccggaaggcctgaggccaggttcccgggagtgcaccattaatgagaggagggccagaccccagctccaccctctgactgccttataatgtgacactagaccgagggtgaaattcacacccttcactaagctcccaggacagactctgggcctcaatatgagggagggacaagcccaggtgaaagcagtaactatggacatggacagaggggagggcagggcagccaggaaccccgctctcaaatgtccagtcagaaagagagtcgggaactcccactccttgtgtctttccagtagctactgcagcacaggacagcagaaagaccagagtctggcaggcctgaatccaaatccctgctgtcccaccaacctggctggcagaaggcctgatggggtaggggttaagagcaagaactaatgagccagacagtccaagtttaaatccaggctcttggccaggcatggcggctcacgcctgtaatctcaacactttgggaggccaaggcgggcggatcacctgtggtcaacagttcaagatcagcctggccaacatggtgaaaccctgtctctattaaaaatacaaaaaatgagatggacatgatgatgggcgcctgtaatcccagctacttgggaggctgaggcaagagaatcgtttgaactcgggaggcggaggttgcagtggtgcgagatcccgccactgcactccagcctgggtgacagagactctatctcaaaaaatatatataatcataaaaataaatttttaaaaattccaggttctgccttctactagctgcgtgaccttgagcaagtcaaatgacctctgtgtccctccattcgtccacctataaaatgggaataatcatcacgcccacctcatagagtcttcctgaagatgaaagaagttactataccttaaaggtgtttggaatagtgcctgatgcatattcagtgctggatacacattaccagttgttactcttacttctagtgacctgagaagtgggaccacaacaccagacgaaggcacagcagccacgcaaaactccaactggctgtctctgaaacactctaagggctgtggttctgccagataagagtacaggcatttggggggcatattctcagaatccctgtttcctctctgcctgtcgtgcaatgacatgggacaaatcgcccaggtggatccagctgtactctcagtcctcaccaaaatccctgcttcaggtacaacccagctcatctgggagagatactaatctctttaatagatcaatgtccttcatcctgagaaatgctggcattaactatggagatgattaagtaaattaattttgtgtttaatttataaattacctgtatatatccggtttttagttgtattgtataagagatagaatgattaataggttaatcttgtgattctaattttaaaagtgtaagtgggattttgatttagatttaagttgaaaggtttaatacactcttattagctccgttgcccaggctggtgttcaatggcgagatctcggctcactgctacttctgcctcccagattcaagcaattctcctgcctcagcctcctgaatagctgggataacaggtgcccgccaccacacccagctaattttttaatttttagtagagatgcggttttgccatgttggccaggctggtcctgacctcaggggatccacctgcctcagcctcccaaagtgctgggattacaggtgtgagccaccgcgcccggccagattacccatatttagaagtttaagtattagatatacaagaattatgtaaatacccaatggtttttgttaatcagacaagtgaaccatttgaaaatgaaaatgaatacgttaaaatttaagatgtggcttaaaaggtttaggagaatttaattaaccaagttccaaaacccccttacaagtgtttataaaaattgtaagattcttaagttgaatttaaatgcttaaggaagatttgcagttttaataatgaggatttattttcattattggtagtagccctaatttatctttttttaaattaaatcttttattacaagatagttcagattcacaagcagttttaagaaataatacggaggggctggccgtggtggctcacgcctgtaatcccagcactttgggaggctgaggcatgtggatcacctgaggttaggagttcaagatcagcctggcgaacatggtgaaaccccatctctactaaaaatacaaaatttagccaggtgtggtggtgcacgcctgtaatcccagctacttgggaggctgaggcaggggaatcgcttgaacccgggagttggaggttacagtgagctgagatcacaccactgtactccagcctgggtaagagagacagagagagagagagactctgtctgaaaaaaaggaaaggaaaggagaggagaggagaggggaggggaagggaggggagaggaaaaggaaaagaaaaagaaaaagaaaaagaaaggaaagaaaaggaaacagaggtagtctatgtaccctttacccagtttctcccagtggcaacatcctgcaaaagtacggtacaatatcacaaccaggatattgacattaagatgagcaagatataggactttcccataaccacaaggatcctgcctgtcgccttctacaaccacacccacttccctccccttaccaccctcctcacaactctgtccctaacccctgcaatcactaatctgctctccatttctataattttgtgatccccagaaggttatataaatggaatcatccagtatgtaactgtggggattggcttttttttacttggcataattctctggagattcatccaagttgttgaatatatcaatagttctttcctgtttatcgctgtatagttttccacggtggggatacaccataggttgtttaaacattcacccactgagggacttcaaggttgtttccagttttgaggaattatgaacgaggctgctatgaacattcacatactggcttttgtgtgaatataagttttcatttctctggaataaatgcccaagagtaaaactgctgggtcggattactaggaagtgcatgtttcatgttgttagaaatggccacacttgtttccagagaggctgcatcattttaccttcccaccagcaattgcgcacaatctgacgtctcctctttgctagcatttggtgttatcactatttttttattttagccatttcgataggtgtgcagtgatatctcactgtggcttaatttgcattgccccaatggctaatgatgttgaacatctttttaatgtgcttatctgacatctgtatatctgctttggtgaaatgtctcttcatgtctttttcccattgcctaactgaattgtctgtttcactgttgagtttttactgttactgatatattctacatagtagtcctttgtcagatacatggtttgcaaatattttctccaagtctatagcttgtcttttcatcctcctaaaaaggtctttcataaggccaggtgcagtggctctcacctataatcccagcactttgggaggctgaggcgggcagattacttgaggtcacaagttcgagaccagcctgtctctactaaaaatacaaaaattagccaggcatggtggcacacgccttcagtcccagctactcgggaggctaaggcaggagaatcgcttgaacccgggagacagagtttgcagtgagctgagatcgcaccactgcaccctggcctgagcaacaaagcgagactccttctcaaaaaaaaaaaaaaaaaaaaaagtctttcacagaacaaaatttttaattttgatgcagtccaattcatctatttttcttttatgggtcaagcttttggtgtgatacctaagaactcttcacttggccctaggccccaaagatttttctctcctgttttcttctaaaagtttttcagtttcacattttacatttaatttctattttattttatctttgagctaatttttatattcgttgttaaatcatttctttctttttctttttctttttttttttttttttttttttgcctatgggtgtccaattgctccagcgccacccatggaaaaggctttcttcctccactgaattgtttttccactttctgaaaaacccattgggaatattggtatggatttattcccttttcctcactgggaagtgttggcagtgtccagcaggtagctgatccttcattccctgcttggtggtgctgattccccaactgggatagtgctggcagggatgagtggggaggtcatcttctaacccccacctggcagaagacagtgctctgactctctctctagggtagtgtcaacagagtctagcagtgacaagatttcatgaagtgtcatgaggtgggactcatcacctctgggcttcactcccctcccccagcctacctatgtcagtagagcctggtgggagcctgagcctctatccccacccagcatcagtgaggtaaaataaggtagtgagatgcagggcaacttggcattctactctcccatctcctttctgtgtttcagtgttgcccacaggggagctgatctaacattacttactcagaggcaatgaggtggtatgagtgattttatacatagatgtatacataagtatgctagattgtctatgaagttcatttcaggataccaaagaaatattacaaaatatttgttattaattctcacaacaatcctaggtggtattagtgtccccatttcacaaatgagaaaaccaaggctcagagagatgaatgatttttccaagtgagtaaatggcagagccaaaatctgaccccatgtctgcctgagcctgacccaaggcctcggaactcccctgtaaagcatgataatgatgtggcagagtttattctacgatttcaccaaaccttgttttcttttcctcctggaaaaacagatggactacatttcccaccttcccttgtggttagcagaggtcatgtggctaaattatggcccctgaaacatgagtaggagtaacatttgtcacttcaaatctggaccccccccaaaaaaaatgcccacataattgtccatgttcttgttctctctcttccctctatgccagctggatgcaaaagtatccagcagaagacttcaagaccttacaaaatatcagacccacaaggtcaaaggaacctggatccctgaatgaccatgtggaacagaatccctccttcctcagatccacaaatgtactgtggcataaatgagatataaacttctatatcaatacttgcaatttgggcattgtttattacatcagttagcctaccctaatataagtggtgtcaccaagagccaaaagcagccactctatcctgtctccaacccccacaccagctcccaggtgcctccgcccacctggttggaccctagtcaaagtcttcattttgcttgtatgaaggctgttggcttgttggactggaggcagagtagatggcttggtttcctgcttggactgctgccatggaacataatcctacaaaatatacaatcagtcacatagcaccatgagtttatatcccagctctacccttttcagatatctgtgaccccaagcaagtgacttgacctctcctgagcctcaatcttctcatctgtaaagtggatctaataataaaacctacttctgtggattggcgcaagaattctgagagatatttatgaagcatgtggtaagtgctccataaatgttagctatcacttttttaaatcagccagccagaatttactaagcacatccaggctgtgaggtgctaagaactgtgagaaacagaaggcatggaaaagacgcagacatccaccctcaggaaaccagagcagcaatcagatgaataagagagcagcataatatacccttacattctgataagacagtgagaggagaaaaatgaggttctgaggcttgctctgggtcccacagcaaagtgtgacccggctgggactggaattcgggtctccagcctatatccgcggagcagtcacgaccgtgagagtggagagcaggtggactgcagggccagcgagcctcccaccccagccctagtcccccaagactcaccggaacctggaactcctggactatggagtgagtcccagagtgcttgggtctggaaagagttgggaagggaaagaacttccattatccccagcccaaggggcagcaagcagcaattcgaaacaggattggagtctcgaaccagaaactgcagtttaccggggacaatagccccgcgggagtggggcggggccaaggagatgtgggcggggagaggacgggggtcagaagaccgagggcgacctcgaggcgagggcgggacagcggcggggtgtgaagtacgcatgcgtattccgcctttcttccaatttttttttttttttttttttacctacttttgtaagacatgcgccattggggaaaatggaagagaagttgcgagtctgtgagaccctgatcttctggtataactactcggcttttccaacttccttgtctcagtgtagatcgcgcggtaacccaggccactcagaagtcccgagacccgatgctttcgccagcgtctcggtctccaaggaaacgcgacgccgcctaccgagcgcctaaagggactaacctctcaaggcaaaatctagttcggcccgcttttcaattttcaaattcccttcagtttgctctgcccataatcctaaaatatgatatcatatttctccactctcatcaaacttccaccatttccttcgccatcttcactcttggctaatgagtttgcttccaattttactaagaaaattgtgggaatcagtaaacccacaagttcatggcatcatttactcgcctacttgcctccctcccgtaactacgtataaactgcctactaagaccaattcctacatttatgcaccgaatcctatcctctcacgttttctcaaagatattggccgagcagttctccccgttttttcctcctcttttctctctcctttgtatcatcagtataccaacgtatttttaaatttcttctatttaaaaagattgtccacagccggacacggtggctcatgcatataagcatgagagcactttgggaggccagaggtgggaagatcgcttgagccagaaaggtccagtctgcagtgagccacgatccagccactgcattccagcctggttgacagagcaagaccctatctctaaataaataaacaaaccacttcccctccagccagctcccatttctgcttcattttaaagcaaaactcctagagaggtttgcctactctgtttcccatttttttccctcctctcaatcaggctttcactccccactgaaactgccctcgtcaacatcattggtgacctccactttgctaaaccccatggtcacttctaggtcctccctttatttggcctgtctgcagcatttgacacaacagatcactccctcccctgaaacactttcttaacttagtatccaggaaaccactcttgagttgcttcctgcctccttttcagtctcctttgctggttcctcctcttctccctttatcattgtagtatcccaggactcagtcccagccccctcccttccagtctcatggttttgaataccatccgtacccagatgcctctcagactcacgtctccatcctccccctgaattccagccatgtacatccaactgcctgcttgggccccttataagcaactctaatgtgcaatatttttccagaaacatttttcccgaacttaaaatagggcatctctcttcttggaatcatccttaactcatctcttatcccacatccatcagcagatcctgttgcaataacttcaacgtatatctggaataggaccacacatacacacacacacacccctctttccttttgtaccccaactaaagtactagttcccacccttgccctacaccaattctctctctacacaccagatttgctagatagagcacggatttaaaagagaattccagtttaaaagataattgggcgggagcaataattttaaatcacttaaacttcaataggggaacattgctatagaataccatgtcagagctcccaaccttttctgcctcttaaaaatcacaggagaatgtgtttaaatgcactgtggtaaatagaagcagctgctaggataaaaagcaattagcccaggtactctggctattcaggcccctcctggctgaccctagagctgagggaatcactgtgttgggtaccctcatttgcagagcacaccatatgacagcactcttgctgggcaactctgtaccaggaaaccattaaaaagtaaaagataaaggccgggcacggtggctcacgcctgtaatctcagcactttgggaggccgaggcagatggatcacctgaggtcagaagttcgagaccagcctggccaacatgatgaaaccccatctctactaaaaatacaaaataggattagccaggcgtggtggcgggtgcctgtaatcccagctacttgggaggctgaggcaggagaattacttgaagcagggaggctgatgttgcagtgagccaagatcacgccactgcactccaacctggacaacaataatgaaactccatctcaaaaaaaaaaaaaagtaaaagataggaatacatgacagatccaggtagtgacttactcaacagccattcctccccatcatcgcaactattggatcctgatcttgtccatgtatgcacttgccttaatggaggcaggccccaggtccagccctagtcctagtcccagctccaatagtcatgactgtctgaggctggacttggtgagccaatttccctttccagttagaggtctagtcatagatacatgatgaaagtctggctaagaagacaggatgagaaatctactcaaaggcttttgggaaaggttttcatcacacttttaaaaaaaggcattgcagaaaaacattccttcatctgctggtagacattgtcatatctgtgtgggattcctggaatcgcggaactgtgaggggagttggccaaagaggatatacagtgaatggtagagaggaaaatgtaaaaaccttcttccttgatagcactgttgagccattaaattaaccaaccctagcctggcacaatagtatgtgcctgtaataccagctacttgggaagctgacgcaggagcatcgcttgaggccaggcatttgagatcagtctgggcaacatagtgagaccacatctcagaaaaaaaaaattttgttttaattagccagatgtgatgatgtgcacctgtagtctcagctacttgggaggctgtggtgggaggattgcttgagcccatgagtttgagactgcagtgagctatgattgtgccactgcacgccagtctgggcaacagagtaagattctgtctctaaaagaaattaattaattaaattaacctttcacctatctagaaaatacttgagattaaataagaaatcacattactgggtgagcaaatttgagttgagttttctggtacttgcagaccaaaagcattttactgaaccctacgtctggaggaacaacaagatagaaggaacctgggtgggtccctgacaaccttgcaggagaaagtcacctacctgtccttactgcctgccaaattccgagctgcttcatcaaagagaaataaacctccaccttgtctgagaccctgtatttgagagtccctttgttacagtagcttaacctgtaccttgattaatacaaagaagagcttggccactgtcagacagccttcctcatcagacatgctgacccagcatggacacccactgagagctgcctgtgccccacatctcaggtacttaaccagtaatattactgcctcccacttcaatttttttttgtttttgagacagagtttcgctcttgttgcccagactggagtgcaatggcatgatcttggctcaccacaacctctgcctcccgggttcaagtgattctcctgcctcagcctctcgagtagctgggactacaggcatgcgccaccacaaccggctaattttgtatttttagttgagacggggtttctctatgttgctcaagctggtctcgaactcctaacttcaggtgacccgcccgccttggcctcccaaagtgctgggattacaggtgtgagccaccgcacctggccccacttcaaatttttaaaaaaaatacataaaaacatttgcaaaaatgctgccatcttaatcaaagccaaaacacacttgaggggccactgacaatcacctgtaacaaagctgttggaactgggattgaatcagatggggtccatttgcacttacacctgttcaggtggcatttctgtgttcacgaacacctgatggaacttcctgcccccaggataggtgggcaagatgagctggcctttcctccctgcacatgtgaggtgataaatgtgatagagggcctctcaggcctgcttggctccaggctcagcaatggcaacctgggctctgattccatcaacatcttgctgagaggtggactaggctgagcaggcagtctcgggcttccatccatgtcatttgatgtgctggctttgtggcaaatgtgcacagcatcctaaacccacaatccctactgttgtcactgggtaagatgccgtggttcttgtggagacacctgctatactcgacataacaagatcctagacattccttcttatcatctgcacagccctccagagctgctctctccatacggcctcagtgcccatccggactgctctccttgcagggtacctgcctggcccctgtagctcctgatgtaataatctctgcaaaatttgacctggaaaaaatgaaactgaccaaaaggatggccctacacataccaatgaaattgtacaacagaagaagatatgattagcaaaattggacatggagccagaacctaatccacaagtcaaatattttcaaaatacagacagatgcctttaaagtccaacacaaaacaaaaatgctcaaaatacgttgattatatgagagttcctgactagtgcagtaagacaagaaaaagtataagatttgaaaaaagagacaaaaccttcattattcacagacgatatgattggcaatacagaaaagtaaagagattccaaaaaccactggaaattttttaaggtttcaactttgttgccagatatggggtcagtacacaaaattcaatcgtgtttcctctaacggacaccaacaaaccatatgtaacttctgatttacaataatttcacttacaatagcagtcaaaccacgtggtactttggaataaatccccaaaagtatgtaagacctttatgaagaaaactataatattttattgaaattcataaaataaggcctaaataagtgagaaatcaagtggggtcattgatggaaagactccgtgttataaagtggtaattctgtacaaatgcagtgcaacgccaattaagatctcatagtttcctggaacttagtaggcaggttgtgaaatttatatggaggttccaaatatagctgagaccatcttaaagaagacgaaagagagagaagaatgtttcccataaaagaagaaactggagttcagatttctctttggaaactgaaagatccccccacagtggaccctcacttctggagaggaatattcagctacagttgactagcagttgccccttcagatagaatattcgatctccagttcacccagtatatcttctacttaaggcacctgcctgacccttgcagatatttgattatgtgatagttacctggagtgagggcttaagataagaggaatggaagagattgtttaaaatacatctattgtttggttgtgtaagtattctcctcatggtgaaacttgaccaggcaagtagaaagaataacagagaagtatgtgaatctaagacattgatgtttctggtaatggtgaagttccgagtatgatcacgggaatgcgtggctgagaagggataaaggaaatggtgcctgaggatataaagtgagaggactggaaagtgcaaacggcccaagtcagtggctcccctgagaccaataccagcagttgggatgaagggaatctgcctgttaacaaggtttcctaggatctgatgcacagttcttgatccacggcgtcagaaataaagtggttaaataaatataagctaccggccgggcgcggtggctcacgcctgtaaccccagcactttgggaggccgaggcgggcgatcacgaggtcaggagatcgagaccatcctggctaacacggtgaaatcccgtctctactaaaaatacaaaaaattagccaggcgtggtggcgggcgcctgtagtcccagctactcaggaggccgaggcaggagaatggcgtgaacccgggaggcggagcctgcagtgagccgagattgagccactgcactccagcctgggcgacagaccaagagtccgtctcaaaaaagaaagaaagaaagaaatataagctacctatacgtggggctgcctattaactccgccaagtgacttaactcctgcctctttatctgtaaaatgggcataattacagcattgtttttggaagattccatgtaataaagtctgaagtgtgcttaacacagtactgggaacttaagcagcactcacacttcatcctaaatacgacgaaagtcttttcaaaaaaataaaaattaatgcaatatgacttacttggaaatgtatcaaaaaataaagaccgatgaatggatcgaggcgtagtgtgacagagtaaaattttaatgataaaaagttaatggtaaaatgttcactgtaaaactttcaacttttcttcttgaaaacgtgcataatccgacgtgggaaaaaaaataacgcattgcagtcagttctggggaaacggaaagctaagttttaattttgctattgcttttgcttttttaacagaaaaggtacaaaaaagaaaaaatgggagagatgttgccgaactccgtcccgcctgtgggctgtgggccgttagcaaagctgctagcatgaaatcgtcgagcaccgcttgcgaaacgccaaatcctcgagagcgaggccggaggctgccaaacccgcgctggggaaagggccgcctccgggcgccccatcccgctgcggacggaggtgaggttggagcgagcgctggcggaagagaggctcagcgcagggggcgcagagccggcgctggccaatatgcgccgcatgtgatacctttgagggcgcggcgggggagggtagcgtcaaatttcaaaaaaaaaaaaaaaccaaacccacacagccccggcgggcgggcgcgcgcgatgggcgccctttggctgcgggagcgagtggaggatgctgggaaggaggtaaaatggccaccggcggcggcgcggaggaagagaggaaacgggggcggccgcagcttctgccccccgcgcggcccgcggcccggggcgaggaggccgacggcggccgcgagaagatgggctgggcccaggtggtgaagaatctagccgagaagaagggcgaattccgcgagccgcggccgccgcggcgggaggaggaaagcggcggcggtggagggagcgccgggctcggcggccccgcgggcctggcggcgccggacctcggcgacttcccaccggctggccgcggggatccgaagggccgtcggagagatccggccggcgaggcggtggacccccgcaaaaagaagggcgctgcggaggcgggcaggaggaagaaggccgaggcggcggcggccgccatggcgaccccggccaggcccggcgaggccgaggacgcggccgagcggcccctccaggatgagccggcggcggcggcggcaggcccgggcaagggtcgcttcctcgtccgcatctgtttccagggagacgagggcgcctgcccgacccgggacttcgtggtaggagcgcttatcctgcgctccatcggcatggacccgagcgacatctacgcggtcatccagatcccgggcagccgcgaattcgacgtgagcttccgctcagcggagaagctggccctgttcctacgcgtctacgaggagaagcgggagcaggaggactgctgggagaactttgtggtgctggggcggagcaagtccagcttgaagacgctcttcatcctcttccggaacgagacggtggacgtggaggacattgtgacttggctcaagcgccactgcgacgtgctggccgtgccggtgaaagtgaccgacaggtttgggatctggaccggggagtacaaatgcgagatcgagctgcgccagggggagggcggggtcaggcacttgccaggggccttcttcctgggggccgagaggggctacagctggtacaaggggcagcccaagacatgctttaaatgtggttcccggacccacatgagcggcagctgcacgcaggacaggtgcttcaggtgcggggaggaggggcacctgagcccttactgccggaagggcatcgtgtgcaacctctgtggcaagcgaggacacgcctttgcccagtgtcccaaagcagtgcacaattccgtggcagctcagctaaccggcgtggccgggcactaaacacccgcctgcctgccagggtgaacacacagccagcttatccctcttaagtgccaaaacttttttttaaaccattttttatcgtttttgaaggagatctttttaaaacctacaagagacatctctctatgccttcttaaaccgagtttactccatttcagcctgttctgaattggtgactctgtcaccaataacgactgcggagaactgtagcgtgcagatgtgttgcccctcccttttaaaattttattttcgtttttctattgggtatttgttttgtttcttgtactttttctctctctccttgcccccctcccgccctccccgccccataccttttcttcccctggattttcaccctttgggctgccttgctcatctttatgccccagcactaggtacggggcccaacacgtggtaggcactccatcagtgtttgctgaattgaaaacattgttgactgtggcttctatcagagtgtctaccttttgcagctcttcccctccctcatttaatttgctgcttttaatctacgtggtctgagaatttgtgaaaccagtgttgttagaagtgtatataatctgaatcaataagctctgaatggtggccaagggcctctcttatggcacaaagatgcatggacttcatgacagctcttttggtggctcagaagccattttttatagaatcatggaatctagaatattcctgctggaaagaacctgagagttggtttggaccaattccctggttttccagcagatgaaacaggcccaaagaggttaaatgactgggtgaaaatcacatagctgtctggtgccagagccagcctatagtagagtcccctgaccccaagcccggtgctcattccactacctctcacacttcacaacaatttcctcaacacttgagggcccagaaagtctgatctctccagaatgatcagcccagaggaatgctgagaaatcacctggaggagggagcagaaagagaaggtttttaaggaggggcttctgaatacttgggagatacggaacggaccaaggaccacactccagggtgcattcgttgctccctggggcaccacttctggattacagtgtgccaggtcctttggaggccctaccccttccccattcattgccaccagtgagaaatgggggtgcccctgtgtaaagaaacctaccaaaggtttacatttgcaccttagcctcaatagctacgaaccctagagaagcagctagctggagctcatgtgcaactcctgattctcaggagaaagatggattttaacccaaaattatgagtgagctgttaactctaaaatgtacttgggagataggccaagcgagaggtcatgggccaactaagtgttatccagtagaaaagacagtacactgcttttcttttagtgtttgcttttcctttgctatatgttttgctatttccttgtggcttagaatgtaaaattgattgttaaaagttttgttctgaataaatatttatcttttgtattgctaaaactggtgcactatttcctttcaaagtgttagatgcacagttacccagctccagaccgtatttcaatcccacttcccctacactccatttgtttaccttgctaaatacatttcccacccctgcaggcaacacttagcacctactacgttgtgccggtccctttgcatcacaatcagcacactgttaaaacgggttttaagtcctaacacagttccaataaatcagaatcactgttagaggaagtgaaacattttagttaatcatcctcaagcaattctgatgggcagccaggtttgagaccagagtataagatgtgtgagctgaaccctgccctcagggagattacagacctgtgggaaagagaggtggtttgccagcttcctcgtctttctgttactgtaagcgcgcgctgtggatgggatgcaaaatattcttgggttctgggaaaatgccatttcttccagctgttgaaaaagcgggatccagggagctgacttctccaagttagcccccactggagactgggcctgcaggcagaatagggtcaaggtccctggacttcaggtccaataccctgcagaccccagatacaactctctgaaggattttccagctggtgatgctaggatgatctgatcctgagagttaaacgttcccagtatattgactctgactcagtgatttgaggatatttccagagctgatctggagttgggacctggtaggctcttgggaatcctgtctttcagagccagttcaacccctctccttgtctcccaaagcaagcagactctcccctccctcccatccctctttcccgtctttgccagcggtttccctccctctcacagagctggaggccaggggccaggagaaagcctgcattcaccatactctccactccgttcctcaaagcaggcactgtgccagggagcctccttgaaggaaccttccctctcctggccccatccccccactctccaggagggaggagaggaagaaactgtttccctgcccatcccccacaggatctgcttcaaggcctcctgcctggtggcccagggacagccaggggctggagctgaacaaacctcccccagcttcctttcctgatcaagcagccctcaaattacaattcttcactgtttttgggctcctggaaagtgtgcagagatgcccggactgaggctggttgactaggggacattgattcattccacttcaacaaatacggagggcattagagctgggccccatgcaaggccctctgcataggctgccttgaacaagacagtgcacttgcaatggaaggtacagataagtaacagtaggcaatgtttacaatcatatatttaacaatttttttttgagacagagtctcactctgttgcccaggctggagtgcagtggcatgatcttggctcactgcaacctccacctcccggattcaagcgattcatgtgcctgagccttccaagtagctgggattacaggcacgtgccaccacgcccggctaatttttgtatttttagtggagatggggtttcagcatgttggccaggctggtctcgaactcctgacctcaggtgatccacctgcctcagcctctgaaagtgctgggattacaggcgtgagacaccgcacccagccaacatttgtcctgtatagaattgtctgaagtaaaggtttccctagaagagaaaacgtcctgactgaaacctgcaagatgagtaagaaccaggctaagagtgaagagacagccaagcagcagaaatagcagatgtagaggcctggaggccagagagcacacagcgtgttcggactggccaagagtcaggggaagatgtggctgggagaaaacgccgagaagaggtgtcacagggcttaccagccatatttaaaaacgtggattttgtcctcagagcctccaatcaggcctcctccattccattcattctttcaacacatgcctgttaagcgccaactctataggggccttttctaagcgatggaacacagcatggagcaggataatcaagtccctgaagctcagattctagagtcacacaagtacataattacagacgatgatgcactaaaagaaacatacagggtgagatccctgtttaacaagcaaagctgatccagtcttaaggatcagagaaaatgtttgaactgagatggaaaagacataaaaggagttaatcgagagatggggctggggattaagggatggcaagggtattaacctaggcaagagggatagcaagtaaaacaaccctatagtgggaggaggcatgaccacttctagagactaaatgaatcagtctaagtttagaaacagaaaccactcttgctgttgaagaaaatgctggtccctgggctgggtattaggaatgactcctagaacaccatagaactgccaggggagttactacctctcacagtcagaaagacagaagccaggaggccaccactggaaaggctgagcatgaggacacaatggtgaagctgccacccaaagacaggatcctgggatcagaaagtcactgccaatgccactggcaggacagtgaaatgccaagtcctttccctgcctctacaaagccagggactgtgcactactgtctccgcaaccatttacaggtaaaaacagcccaaactgtctggcttacttatgcctcccttccatcttttatgcaaatacatctaagtgctagagccctagctgcaagggagttgggagatgttttagctttccagcatccgcaacataggaaggcacatagaatggggatgggtgctgtctgtcaaaagacaatatccagcacaaaaaatgtgactgcagtgcagagaagaggagctcgtgggagcatctggtaggccatgttaagaatgtgggtctaagaacgatgtgccattgaaggacttgcaagcaagagagtaacatgattagattggttatgttttacaagcatcattcaggatagttggtggagactgggtcagaggagagcccaaggggaaatacagtatagttcacccaggtctctcgagagatgaggacatcttaggcatggaaggcggagatgtacagagagaaacagccgagtaaagaaatctttcagagtttaagtcaacaagatttggagctatatttgacatgggctgggagaaagttaagtaccaaggatgttgcccaggtttctagcttctgcagttggatggatggtggggcttttccctgagatgcgaaacagaagagaaaatccaagtttagggtgaagggcttgaatttgattttggatatattgagtttaaggtctccgtagaggatatctaagaggagatgtggagtaggcggttggatacacacagatcttacattcctaggagaattctggccctgagaaataaacacaggagttgtacagctgtggctttcaaactgttttaccacatcccacagtaagatatatattttacattgcagccatcatacatatgcatgtgtgtatttatatctaaatctgaaataagcttcctcaaacaatatttgccctgtgcatgatgcaccttgacactttctattccattgcttcatccttttgtcaatgcttatatgacgtgttaaactgatttcacactctcctaatggtcaagagagaaagcagaaggaaagattataccaactaagattgtgcctcaagcaactttgacacagttttccctgatggaaaaggagatggtgaaaaactaataagggacagccagaaagggagaaggaaaaccagaacgtgcagaaacacataaaccaagggaggacatttcaggtggtaggggttaacaattgtgtcaagggctgcaagaaatcaagtaaaatcagctctaagaaatgtcaattgaggccgggcgcggtggctcatgcctgaaatcccagcactttgggaggccgaggcgggcggatcatgaggtcaggagattgagaccatcctggctaacacagtgaaaccccgtctctactaaaaatacaaaaaattagttgggcgtggtggcgggcgcctgtaatcccagctactcgggaggctgaggcaggagaatggcgtgaacccaggaggcggagcttgcagtgagctgagattgagccactgcactccagcctgggcgacagagcgagacgccgtcaaaaaaaaaaaaaaaatgtcaattgagatcagaactgaagagtgccctaggattgagtagtgtggaggttatcaataagggccttttagaggaaagtgatgggggcagattaaggagcaaatgatctttctaagatgtcaatctggcacgctgaccattttattcccatgtcacgtcctctgggactcccttgtgcacttggaacccagcctggtacccgatccctttcacaagaggctcctggactcctttccaaccttactctcagccagattgcccattacatccctttatgtcaactccagttacggctgacaaacagcaaccagaaagaattttggagtatggagtggtacaagaccaagctaaggggccaggtgcaatggttcatgcctgtaatcctagcactttgggaggcctaggcaagtggatcgcttgaggtcaggagttcgagaccagcctggccaacatggtgaaatcctgtctctactaaaaatacaaaaaaaaatagccatgtatggtggcatgcacctgtagtcccagctactcaggaggctgaggcaggagaactgcttgaacctggtgatacaggaagggaagtgctgggaagggaagggcacagtccctttaaatgacatggaagggagaaagggcgtggtccctggctagggctccaccccagcctgtgcccatggacctaggtgaggacaggcatttttgttttcctgcccaaatgttgcatttcccaagaccaccctggccggccacgcccccatcctgtgcctataaaaaccctagcaggcagacacacaggtaactggacggctagaggagcacatcagtggaggaacacacaagcggctggacgtcgagaggaacgcaccgacaggcactgacaaaccagcacaccacaggccatcgaccaacagaactatgcagagtttggctggggcagtcggaggggagcctgggccactgaacagtccaactccaggggaaaaccttctcactccatccccttctggcttcctccatctgctgagagatacctccactcaataaaaccttgcactaattcttcaagcccaggtgtgatccaattcttctggtacaccaaggcaagaacccaggatacagaaagccctctgtccttgcaacaaggtagagtgtctaattgagctggttaacacaagccacctatagatggcaaaactaagagcatacggtagcataagcccattggggcttcaggagctgtaaacatccaccactagacactcgtggggtcggagccccacaacctgcccatctgtatgctcccctagaggtttgagcagcgggacactgaagaagtgagccactccccttgtcacacgccctgggacggggacaagggaacttttcccgtttcagtgggaggcagaggttgcagtgagccgagattgtgccacactgcactctagcctgggcaacagagcgagactccatctctaaataaataaataaaaggaccaagctaagggtgaggagacgtcagatcatgctgagttgagggtgggggcgccacaggagtgcaccaaacgtgtacaaaggcactgatacatacagccccatttgctggcttgtcaatgtgactaagatttggggtaggacatagtaaaagaaaataaacacagatatattatggaaaagaatgtaaactttgcagagttttaaataaaatatgactttttttttttttgaggcagggtctcactttgttaaccaggctggagtgcagtggctcactgcgtggctcgctacagcctacaactcctgggctcaagcaatacttctgccccagcctcctgtgtaactgagactacaggcacacaccaccacacccagctaattttttctttctttctttttttttttttttttttttttgagacggagtctcactctgttgcccaggctggagtgcagtggcacaatctcggctcactgcaacctctgcctcccgggttcactgtggatatatcccctcccgggatatatccatcactgtgcctggcacagctgcagcctcccaagtagctgggactacaggcacccgccaccacgcccggctaattttttgtatttttagtagagatggggtttcaccgcattagccaggatggtctcaatctcctgacctcgtgatccgcctgcctcggcctcccaaagtgctgggattacaggcgtgagccaccactcccagcctctctctttctttctcctctttcttctctttctttcttttctttttcttttcttttctttcttccttccttcctcctttccttcctttccttccctttctctctctccttccttctttccttccttccttccttcttctttctttctctttcttttctttcttcagggtctcaatatgttggccaggctggtcttgaactcctgccctcaagtgatccttccaccttggcttctcagagtggtaggattacaggtgtaagccaccacacccagcccaagaaagattttattttatttttttatacagacagggtcttgctatgttgcccaggctagactcaaactcctggacaacatagcaatcttcctgcctcagcctccctagtagccaggtgtgcacggaacaaattatatgtattaatatggaacaatctctaagacacattattaaatgaaaaaaagcaagatatggtatcctacagtttacattttttaatgttggaataaatacatacataccctcagcaccataggaaagattttaaaaaagaaaaaatatatatacatatgcttatttttgtacaaatatgtaacactggaaggatattaatgaaattcgtaatttgtaactttggagaactggatatttggggtttgggataaaaggaaagtttattttccactgtgtatccctgcttttaaaaaaatatttcatctattatctctaacaacaacaaaaacaacttttaacaacaaaaataaatgcaaaacacaagacttcaacgaaattcctatagactttagagagacaggagtccatctcctctatctttaaaagtaaaggccgggcttagtggctcatgcctgtaattccaacactttgggaagccaaggcaggaggactgcttgagcccaggagtttgaggccagctgaggcaacacagggatatcctgtctctacaaaaaaaaaacaaatcgttgggtgtggtggtacatgcctgtggtcccagctacttgggaggctgaaacaggaggatcacttgaggttgaggctgcagtgagccgtgatggcaccactgcactccagcctgggccgcagagtgagaccctgtctctaaaaataaaataaaataaaataaaaataaaaaataagaactttgatggaagagtttaagaaattctatagcagacaacacattggtctccctgcttccaggctccctctccttccaaccatggaatccaccccaaaacaaaacttgatcacatttctcccccgcttaaagaacttcaaagattttgcgtcctccctggtgttcaccagggcctgcctgaccagccctgcctcctctgggcctcctctcttgtcgggcctccccctcttaccctggcttggcttccccttctgctccagctggtcattcctggaagcagatctcttcctcccctacccatggttaatccttacctgcctggggcactcagctctaatgctgcttcctaactagagcctaccctaacatcctgtatcagaccctcttacaccgtccgttacctccctggcctctccttcagcagttactcgggtgcaatgatatacttatttgtgccatggtttgattgatatctgcctctgcctctccactttgagctccctgagggcaggaaccagtctcttttggctcacggttatagcttgagcaattagcactatgcctggcacagagtaaagcctaataaatatttattgcatgcatgatctagaatcacttggctgaggttacagattaagacacgtgtctacttgtccttctttaatatacttaacataccttagcactctgtcattgacacatactgaacaagggcttattcattcatcttttaaaagctaactcactcttttagttttcccacctttgataagggaggataggacctgggaggtcaggccctcggtttactagctcatcctcctctatttctctgagagcataaaatcactggaagtcagccagcatgccccatggcactgtgaggcacaggggagaagcaccaggctcctggattctgaatgcgtggctttgaagcctggcaagagtggccccttccctgagtcccccaccacccctccccttggggcgaggattctgcaggcatgagaagtgcccacccagagtctgtgcctatgccttctagaacacgctctgatacccgataattcccttccaaaatgtcactaagttaattcacagggctctttgtgggcctcatccctggcttcatctcacctgagggcaaactatactgcctgatgcacatcttatagacctgagccttgggcctcaagatagctgtttgcaggtgacagctaggtgttgacccatgcatgctagctccatcactgatgggatgagaggtagctggataagggatggatacaggttccaggggacaggtctccttgggcctacacattctggcacataactccaagggtcttagaattctaatttgaacatggccttccaggttgttagaggatatatccatcaaggaagaaaacagaacatatttcatttaacacttgctggactgttgtataatttctaactatagagacatatggtatatgggcctccaactctactcttgttctgagccccacaaatgcccatttggttctgtcatttctttgcatagacaagctacataacctctctgaacttcagtttcctgagcaggaaaatgggtctatggtaataactacattatcagggctggtgagaaaatgaaataaaataatccatgtcaagggcttgagaagaatgccctctggctgtcgtctcctatgacttcctgtatgatctccaaactgctctctttgcagggtttcaacacggctgctccctcctgcctccttacccacagccaataacctccccattctctccacctagtcaaatcccaccgtcttcaattgtgataatagctggttgattgcacgtttactacgtttcaggcattgtattaagaactttccatgcattaactcagttctgacaccaactcgatgaagcaggcactgtttattattccccaaacacaaagacacagggatctggagactggaagcactggcggctgcaagtggcagggctggcggggtgtgaagccggagaggagtctttctgcagtcaggcctcccaaatcccgggatggaatcaaggagcctttggctgtcccacccctcctcctccaagcccccaaatccaagtctgttatatcccgtcagctctgcgggcctgcctgtgactttcagcccaagggggcgggcacttcgtgtcacgccacgttgtccacatcatcgaccctccctccccttctccccttccttccttccctccctctcttcctcccattgagtgccagttctgtgccaagctttgctgttcaaaatgttacgagtggagaagtcagggaaggatggaattataggtgtttcttcttcatacctttctgtttggctgattttttttcaaatgagcacgcaggcccggttcctcaaacccacttccaatgtggcattgctgggttggtttggtccaaggaaagccctgtctccttaactcccagcccccacgcctcctccgccggcccccaaatccaggccgccctgccccctccggaaaggggagttgggggcgagcgccgaaatctgagtggctctttcaagcctccgttgccatagaaaccggccgcacaggccgatgctgtccattacaccatcctctagcctcgcagccaatggactccgagctccatcgccagaggccccgccccccagctctggggagtccaccaatcagcaggtcccgtgacttagagccctgccctcggcccagggacaccaccaatgcgcttcgaccctgccctccttctcttcggtgtaacaagaagactcgatatttttttttttttttttaggaattctccagatcagaaggaattggcagtaaggcctctgtcagctgcaccctgaataatctttggctgctattttatttaaggagagcaaaactgtttcaattacgcaacaatatataccattctctactaaaacaattttaggaaatgaaaatgtaggcaatgggatgatatagtctgctctatatgaatgtctttcattataggtattttaatttaacttaaaatgatcaaggaactagtcatctttcctttgtatttcaaatgcatacaaaattaaagataccgagttttttgatgcagagttcatgagacattgacttaattagttggtaggcaacttttactgaaccatctaattcctggttcagaacattacaactggaggataaatgaatatttctcttaatccatggaagaaattctgtttttgaggcgggctgcgtaaatggctctgacactctggagtctaaataaaccaaatgtgtttttaaaacccgtttgccattacaaaaaaaaaacttcaattttttagaacacttttagatttacagaaaaattgtgaatataaagttcccgtctaccccagccacccaccctgtttctttcattattattattattattgagacagggtcccgctctttcacccaggctggagtgcagtggcgcgatctcggctcactgcaacctccgcctcccaggctcaggcgatcctcccacctcagcctcccaagtagcagagactacaggggcatgccaccaagcccagctgatttttgcatttttcatagagatgaagtctcgccatgttgctcaggctggtgtttctgctattaacatcacatatggtattgcagacgcatggtatatttgttccaattaataaaccaataatgatacattatttattaattagagttcacagtttattcagatttccttcgtttttacccaacgttctttttctactccatctttttctactccaggatccatccagcatgcctcatcgcactagctgtcgtgtctctctgggctcctcttggctggggcggtttctcacatagcaacatgacatcactgttggtgctgcgtcaggtttctctactggaaagtcagtcttcttttgccccttttcatactgtactctttggaaggaagtcactatgctcgggccacacttaagtgaggagttatgctctatctccttaaggttggaatagctacatagattatttgggatttttctacactgaagatttgtctcatttattcagtaatttatttatatcagtatggattcacagataattatttaatactttaggttataatccaatactatttgattttgttgctcaagttgttccagctttggcttttgggagctctttcggttggctcccgtctccctttgacacacccctatttttgtggggttttctcgttgccgtcaagcacttccttactttctggcactacaagatgcctcaggctcatctttcgtatttcctgccccagtcctcaaatcagccatttcgcaagagctttgattgtttcggagaagggtatttattagaaaccaagaactgggcgctaggtgcactcattgctactagggtgtcatttatttccttcctccctccctccctccctcccttcctttttgagacagagtctcactccatcacccacactggagtgcacactcatggctacagccacgtagccatggtaatgaagccataacctcacgaagcttccagtttacacaattagagggttaattaccaagttgcccagcactctgcagtgtgctgtgtaggcaatgcgggggtaaattatctgaagagaatttaaagacaataaaaactgcagcctagacctcctgggctcaagtgatcctccctccttagcctcctgagtagctaggaccacaggtgtgtgccaccacactcagctaattttaattttcaatttttttttttgtagagataaggtcttgccatgttgcccagactgatacaactcccggcctcaagccatcctcctgccttggcctcccaaagtgttgggattacaggcgtgagccaccacacctggccttggggtatcatttcttttaagccttctcaactgacagaacaaagaaatatatctgtatataccaatgtgtatatatatacacacatatctatatttccatttgtaaccatctgtatatatattaagctaaacatgagttcctgtttatatttaccacttgaatccagggatcatttggcttgcttcctgcttgcttatctctaaattcccactccaataacgggaaacctggttcccatcatccacatccaccatccatttacttaattgttcaagtccagtatacatgtgtaggattatcaaaattgttaacccatacccctgtgggaaactttatcaagtagagtacattcttctgaacactttcttttgcctttagtgttccagcagactccacttgtttcttttttctttttcttttttttttttttttgagacagagcctcactctgttgcccaggttggagtgctggagtgcagcggggccatcacagctcacagcagccttgacttcccagtcttaagtgatcctcctgcctcagcctcccaagtagctgggactacaggcatgcgccactacacccatctaattttttaaaatttttgtagagatgggatctcactatgttgcctaggcttgtctccaactcctgggctccagtgatcctcccgcctcagcctcccaaagtcctgggattaaaggcatgagccaccacgcctggcccactcatttctaaagttacttaggtcagcacgttttcctctatcctcttcatgaggtcatttcacacatttgtaatacggtgaagatgtttgtcatattctgcatgacattttggaattatctaaatgtcctaagtgatttttttaactttgcatgcattaaggttcactttttgtgctattaagtttaatggatatcaaccaatgcacagtcatatacccacatttcttcaccctaaaaaaccccctgtgctcacttattgaaccctctccccgccaaacactggcaaccacacatccgtttactgtatctatggttttgcctttttgtgccattattaaaaaaaagaaagacgcacaatatttttgttgttgctcttgtcacagctgccacccattgaatccttactatgtcccaggtccagaattacactgtcccattttgaagatgaggaaacagatgcaaatgagttgaagtactccctagagactcataacaataagcaaagtttgacttctatgattaacttctgagtcacctctgggaatatttgtaatatgtctaatagccacacttcttttgtttgttttgatacaggggtcttgctgttgcctaggctggagtacagtggctactcacaggtgcaatcatagggcactacagccttgaactcctgggctcaagcaatcctcctgcctcaacctcaaaagtggctgggactacaatgtgtgccactgtgcccagctatattagccacatttcaagtactcaatagccgctgtgcagtttatactattatattggtttctgagttttgtttttgagactgcgtcttgctctgtcaccaggctggagtgcaatggcacaatctcggctcactgcaacctccaccacctgggttcaagcgattctcctgcctcagcctcccaaatagctgagactacaggtacgtatcaccaagaccagctaacttttgtatttttagtagagacatggtttcaccatgttggccaggatggtctcgatctcttgacctcgtgatctgcccgcctcggcctcccaaagtgttgggattacaggtgtgagccaccgtgcctagctatattgttttttaaaagatctcttattatttagtgaaaagaaaggacctgtagtctcagttactcaggaggctgaggtgggaagatcatttgagccccagagtttgaggtagcagtgagctatgatgatgccactgcactccagcctgggcaacagagggagatgccatctcacacacatacaaaagaaaagagaccttgtaatgcacacactatcataatctctgatttttctttttttttttttttttttgagacactgtcttgctctgttgcccaggctggagtgcagtggggtgatcactgctcactgcagcctcaacctcctgggctcaagtgatcctcccacctcagcctccccagtggttgggaccacaaatgtgcaccaccacaactggtaaattttttatttattgtagagatgtgggtctcaatattttgcccaggctggtctcaaactcctaggctcaagctagcctcccaaagtgctgggattataggtatgagccactggctttttttgtttgtttgtttgtttttgtttttgatatggagttttgctcttgttgcccaggctggagtgcaatggcgctatcttggctcactgcaacctctgcctcccaggttcaagtaattctcctccctcagccttctgagtagctgggattacaggcatgcgccaacacctccagttaattttgtatttttagtagagacggggtttctccatgttggtcagactggtctcaaactcctgaccgcaggtgatctgcctgcctcagcctccaaaagtgctgggattacaggtgcgagccactgcccctggcctgacttttttaaaatcaggaaatttagatgaatcaaaaaagaaattaccttgtccctattgttctcttctcattatgaatgtctttgaggaccatgccagttggcaaataggtattttggagctagacacagttagggtgagtggagtaacacgacagtacctacaacagccacacccacacctgagttggcttcatcctgccttcaggtatcattaagaataggtattattattattattattattattattattttgagaccgagtctcactctgtcgcccaggctggagtgcagtggcacaatctccgctcattgcaacctctgcctcccaggttcaagcgattctcctgcctcagccttctgggactacaggcccgtgccaccacgcccggctaattttttgtatttttagtagagatgggtttcatcgtgttagccaggatggtttccatctcctgacctcatgatcctcctgcctcagccttccaaagtgctgggattacagatgtgagccaccacacctggccatatatatatttttttctttgagacagttccactctgtcacccaggctggagtgcagtggtgtgatcatggctcactgcagcctggaactcccaggctcaagagatcctcctgactcagtctcccaagtaactaggactataggcacacaccaccaggcccagttaatttttctatttttagagacggggtctcactatgttgcccagactcgtctcgaactcctgggctcaagcaatccttccaacctctacttcccaaagtgttgggattgtaggcatgagacaccacatctggcctataatggaatattatttggcaataaaaaggaagttctgatacatgctacaacatagatgaacctagaaatcatgatgctaagtgaaagaagccaggcacaaaaggccacatgttgtatgattctctttacatgaactgtccagaagagacaaatccatggatacagaagcagattaatggtggcctagggctggggattagagggaaggcagagcagatgggagagtgactgctaatgagtactgatgctaatggtttcttttggggatgatgaaaatagtctaaaatccattgtggcaacagttacacaactctgtgaatgcactgaaagccactgaattgtaaactataaatgactgaatagtgtggtatgtgaattacatctcaacaaagctgtttttttttttttttaatgttctggaagaatcaggatagacattacctcaggtgaaggaaggcaggagatgggatggtaaaggaattcattggggaaaacaggttatcaatgttccagttcttgtgtcagattgctgactccacagatttttattatgttatgtaaaaataaatacacacagggccaggcatggtggctcacacctgtatcccagcactttgggaggctgtggtgggaaaatcgcttgagcccaggagttcaagaccagcctaggaaacatagtgagaacctgcctctacaaaaaaaatttttcgaaattagccagccatggtggcatgcatctgtagtcctaactacttgggaggctgaggcaggaggatcacttgggcccagaagttccaggatgcagtgagctatgatcgcaccactgtactccagcccaggcaacagagcaagaccaggtctctaaaaaaaacccacacaagcataaagtgagggaatcacaggcaacaatgagaatgtgtcgcagatgaagcgattctgtatacctgagacagagggagatgaacgggaaacggcagagagtggtcaggacagtcctctctggggagcccgtttgagccgaagctaggatgagtagatgctccagcccatgtggggatgggggtgaaaagagttccagacaaaggagacagcatgaatgagggccctgaggtaggcccaagcctgttgtgtttgggggacagccagtttaaatgtctgttctgttatattgtggagtctctgtgtatgaatttttcctaaagaaataacagacaggccgggtgcagtggctcacgcctgtcatcccagcacttcgggaggctgaggcaggcagatcatgaggtcaggagatcgagaccatcctggccaacatggtgaaaccccatctctattaaaaatacaggtcgggcacggtggctcacgcctgtaatcccagcactttgggaggccaaggcaggcagatcacaaggtgaggagatcgagaccatcctggctaacacggtgaaaacccagctctactaaaaatacaaaaaaaaaaaaattagccgggcatggtggcgggcgcctgtagtcccagctactcgggaggctgagacaggagaatggtgtgaacccgggaggcagagcttgcagtgagccgacatcaagccactgcactccagcctgggtgacaaagcgagaatccgtctcaaaaaaaaataaaaattagctgggtgtggtagcgcacacttgtaatcccagctactcaggaggctgaggaaagagaatcgcttgaacccaggaggtggagattacagtgagccaagattgcgccactgcactccagcctggcgacagagcgagactccatctctaaataaataagtggccaaaaacatacatacaaaggtgttcactgccatattgtttataatagcaaaaaggggtaaaacaatcaaaatgtctttcaagaaggaactgattcactttgggaggccgaggtgggcagatcacctgaggtcaggagttcgagaccagcctgaccaacatggtgaaaccccatctctaataagaacacaaaattagccaggcgtggtgatgcacgcctgtaattccagctacttggaaggctgaggcagcagagtcatttgaacccaggaggcagagtttgcagtaatccgagatcacgccattgcactccagcccaggcaaaaagagtgaaactccgtctctaaaaaaaaaagaactgattaaatgaattacaatatactcggcagacctggacgagaacctacgcactacatggaaagagaaaagagatgtgaaaaaagcaggttactagaaattacatatagtaacattccacttgtgtaaaaaaaactatgtgtgcatgtgattataagcatttaagtttctggatggccaggtgaagtggctcatgcctgtaatcccagcactttgggaggccaaggtgggcagaccgcttaagcccaggaatttgagaccagctcgggcaacgtggcaaaactcagtctctataaaaaatacaaaaaattagccctgtgtggtggtacgcgtctgtagtcccagctacctgggacactgacgtgggaagatcacttgagcccaagaggttgaggctgcagtgagctgtgattgcgccactgcaccccatcctgggtgacagggagagaccttgtcgaaaaaaaaaaaaggccgggcacggtggctcacgcttataatcccagcactttaggaggccaaggcgggcagatcacaaggtcaggagttccagaccagcctggccgatatggcgaaaccccgtctctattaaaaatacaaaaattagtcgggcgcagtggtgggcggctgtagtcccagctacttgggaggctgaggcaggagaatcgcttgaacgtgggaggcagaggttgcggtgagccaggatcgcgtcactgcactccagcctgggcaacagagtgagactccgtcccgtctcaaaaaaaaaaaattctggaaaattacattaaaatttaaaatttactcattataatgccatttttctagattacaggagacgttcacttttcgccttatataattcagtataaggccgggcgcagtggctcatgcctgtaatcccaaaactttgggaggccgaggcgggcggatcacttgaggtcaggaattcgaggccagcctgaccaacatggcgaaactccgtctctactaaaaatacaaaaattagccaggcgtggtggcacgcacctgtagttccagctactcaggaggctgaggcaggagaatcgcttgaacctgggaggaggaagttgcagtgagctgagatcacgccactgcactccagcctggtgacagagcgagactccacacacacacacacacacacacacacacacacacaaacacaaacaccatatatatacatatataacttttgtaataataaaaaacatacttctacttaaagagaatatcaataagccctaaagtttttcatagtgaaagcccttcaaaattgcttgacaaataaattctaagtatactaactatgggaaaaatgtatgcttgcgaagactttgttagacacattttcttaaatgctgaagctataatttaaaaatgaagatttcaggagacaaaataaagtcagctggataaaaaatgtgcagagagaaaaaatataccaaaatgttaagagtgagtgtctcggccgggcgcagtggctcatgcctgtaatcccggcactttgggaggctgatgcgggcggatcacggggtcaagagtttgagatcagccggccaacatagtgaaaccccgtctctactaaaaatacaaaaattagccgggcatggtgatgcatgcctgtagtcccagccacttgggaggcttagggaggagaatcacttgaacccgggaggcagaggttgtggtgagctgagatcgtgccactgcccttcagcctgggcaacagagcaggactctgtctcaaaaaaaaaaaaagagtgggtgtctcttggcactgagacaatgaatcccaacaaattcccaacaaatgatattttttccttaaatttcagaatttttgaagttttacacaatgaatattttgtgatctgaaaattttttcttcccctcctcttccaattcaacagctgaataataatcttgtgttcattgtctgctactgcttaagacattctttccagacttagaggcttaacaaagcaaacagctaccatctcacagtttctgtgggtcatgaatccacgcagagtttagttgcatggttctggctcagggtcattcacgaggttgcagttgagatgctggtcagggctgcagtcatctgaagacttgactggggctggaggatctgattccaggatggatcgatcactcagatggctgttggaagtaggtctcagttccttgttggtgttggcaggaggcttcagtttctcaccacgtagagctttccacagggctgcttgagtgccctcgcatgacagctgacttctcccagaataaatgatacaaaataagacagccaggaggaaaacatagagctttctatgtccaatcttagatatcacaaaccatcacttctgccatattctattagttagaggcaagttcacacttaactgggaaggggaggaggaattaggctcttccttttgaaggaaggaacattaaagaatttgtgaagggccgggcgcagtggctcatgcctgtaatcccagcactttgggaggctgaggggggcggatcatgaggtcaggagattgagaccatcctggctaaaacggtgaaaccctgtctctactaaaaaaatacaacaaaaattagcagggcgtggtggcaggcgcctgtagtcccagctactggggaggctgaggcaggagaatggcgtgaacccgggaggcggagcttgcagtgagccgagatggcgccaccgcactccagcctgggtgacagagcaagactccatctcaaaaagaaaaaaaaaaaaagaatttgtgaacatgtttttgaaacacaagaaaatttccagctgatctttccccccaaatttccctcctccaatccaactacaacacatgaaactccttaatcttgctgaagcgtacctctgatcatgtcatcctgcaataaaaaaactgtccctggctccccacaacccagggaactccataacttggcttctgaggaccaactaccgtattgcccttcagctccagctcaacataaacgcatcgtattcctcatgtacactcccccatctctggtcttggcacctatccatgccctctcaatacctcgtcccagtctccttcccatctccagtcccttgcacttgctgtttcctctgcctggaatgttttacatggatggttcttcgtcatcttgagatctaaactctcccccatctctatcatcccccgtcccagtcactcactctctcattaccttgttttcttttcattgtcgtttgagacagggtctcactctgtcccacaggctggggtgcagtggtacgatcacagctcactgcagcctcaacttcccgggctcaaacgatcttcctgcctcagcctcccaagtagctaggactaaaggcacaggccatcacacctggctgttttgtattttttgtagagacaggcttttgccatgttgcctaggctggtcttgaacttctaggctcaagcatctgcccacctcagcctctcaaagcgctgggatttcagatgtgagccaccttgcccagcccctccctcccttctttccatcacccagtctggggtgcagtggcaccatcatagctcactacagcctcaaaatctctggcttaagcgttttcccacctcagcctccccagaagctgagatgacaggtgcttgctaccatgcccggctaatttttgaatttttgtggaggtgggatttctctatgttacccaggctggtctgaaactcctgggctcaagcgattctcccgccttggcatcccaaagtgcagggattacaggcgtgaaccaccacacccagcccagctttattttctttatagcagtcacaactatctgaaattatcttatttgtttacctgctcttttctgttgccctcacttgctccttaagaacagggacctctgtcttggtcactgctgtaacccagtagccccagttccaagttcactgcctggtgcacagtaggtggccaataaattgttgaattaaatgtcctctcttccagggagttgttttagaaagaatcacacactgcataaatgtctgttgaggaagaaaatgaaaaaaacaaaagtgaagacattatcttctcggctgaacttcccacaccatcttctctgtcattaataagtcctggtgtctacactggggaaggcagtccaaggttcttccagggcctaggttcagccagactttaaccatctctagctcctcagagtccgtcaaagggcctaaggaatggtaagtattaataatgtttgtttatgtatttatttatttatttattttgagataaagtctctgtctcccaggccggagtgcagaggtacaatcattacaacttccacctttccggctcaagcaatcctcctgcctcagcctgccaagtagctaggactacaggcaggcaccaccctgcccagctaatttttgtacttttttttgtagagtaagggtttcaccatgttgcccaggctggtcttgaactcctggccttaagtgatctgcctgcctcagcctcccaaagtgctaagactacagctgtgaaccactgtgcagggtcaaatgtttattaatggatgcatgcatggatggaagaaggaaaggaggcaggtgtgaataatgaatgcagcattttcactgctgagaataaagagtgaaatcctggtccaaatcagtttggcagtgagtaaggttaggaactattcacatacattggaataataatagcagcagcagctacagggtcagagacagatctttgagaggccataagcattgaaaagattgtggtacctatcacacaccgtctaaaataaaacaaatattttatttatgggaaaagtgttaaggtgttgataattccaagaaagcttttatttgtcctacaatcattactttgataccttttctgaaatcctagagctgtccccactctgcccatttttttttctcattatggtgatgtctctgggttgctggtgacctgcgtaactattgggaaatctagtttctcaaaacttttagtttttttttagacagggtctcactctgtcactcaggctggagtgcagcggctcactgcaacatccgcctcctaggttcaagcgattctcatacctcagtctcctgagtagctgggattacaggtacgcgtcaccaagcctgactcattattttgtacttttagtagagacaaggtttcaccatatcggccaggcggatctcgaacttctgacctcaaatgatccgcccgccttggcttcccaaagtgctgggattacaggtgtgagccaccgcgtcccgtctatcataagttttattgaacattgcctaggtatcaggatgtgtttacatgcattatctcatttaatctgtaaaaccaccatgtgagggagaaactgaattatccccattttcaggataaggaaaaggagggactgggaatgtgaactcaggaagtgtgactccatcgggtagactgctcaggctgcagatgtaaaggttttacacgtaggcttttccagatctcagcttctgaaaggcggagggaccgtttggacgggagcagggcctcctcttccaagcaccctgtgcctttaagagtcgccccctccctccagggatgctccaatttctttctccccaccacccccaccccgccccccgcgccgcggagccgcacctcggtccttcctccccgccccacaccctcaagctcggctcttggccttcgctcgtccagaagtgggtgagctgtaccgccagaggcgcattctcctagccccaaaccatgcccgctacgccccagcggaatgccaccttaaagaccctaatccgggcacctcccagctcctgcttcccaagggcgaggcctcagcgccccctcccatcgcccatgctcacgacgccgtgaaggtgacctcccccaggggcggcacacgcccagtggtgcccgaactggctcacacgtggtgagccgggagcgcgcggcccctccccgccacgcgcctcgtgccggccacccggccacgcccccaggactggctccgccccgtgcccctgcacgcttctccaggcttgggtggggcgacgcgcccaagtcgggcaccgggcaggctacggggtggggtaggacctgggaatggcgcacccacgcatcctcgaatgtcgcctgcggtttgtgaaaagcgggaagtccgcccagctcaggacctttggctggcaggcgaggtgccccgcggcccttggtgctgagcaggggagagacagctgggaccgcgagcctgggaatcgaatcctagtctgcgtgtcctcggtgcttcctatttggaaactgggcatcatattatcatattcccttctccctccggattcttatggagcttcgaacgagattaaatatacatatatatgagaaagggatttgttcactaggtccaaaagcatttgctggtcccatatgtggtcggaccctgtgtgtagtaggcggggggcaacatctacgacaacctgagttcgtccccttaagaagctttcctgagtcttgggccccccaaattctcttctgggatggtccgaaaagacgtccctgaaagaggaaagggcggaaatcctacctgacggcaggtgtctcggaatgagctaaaatttaaaaggcaacgcggggcagggacaagcgtccagcgtcagatggaagcaggctcgcgtcccctacccttcctccaacccctaacctaagaaaagaaaccgatctcgccggtctcccccaatcctagccgcgagaccgcccagccccgcagcccgagccccgccccgctccggcggccagcgattgggagatgcaaataccggcttctctgcccagcaacgggtgacgcggcgcccgagcgcgaggcggggcccggccgcagcccaagcgggcacctcggtgtttacacggggcggccccgcgcgcgccgcagcggcccgcagacggcgagggggaggggtggtgcgcgcgccggcggggccgcgcggggagaaagacactgaaaggcgtcggcggccgggcggggagcggcgcgcgcgggccgcggcggagccagaggctgcaggaagagcccgcgggggcccggagggtgcgattcctcggcccccgcaaaacaatgtgtgttgtgagccaggacgcaacttgccggaggcggcgggggcgcgccgagcccgcctgagaccgcgctgaccttctccccccgccgtccgttgggcccgagcgcccagctcctcgctccccagttcgcgggggccgggccgagccgcggggcggggccgcccctccgtcgccgctgcctcctcccccacccccagccgcggaggatgcggacggcccccggcggcgtctagcggccccgggcccaggcgcgatggtgcagcagcggggcgcgagggccaagcgggacggcgggccgccgcccccgggacccgggccggccgaggagggggcgcgcgagcccggctggtgcaagaccccgagcggccacatcaagaggccgatgaacgcattcatggtgtggtcgcagcacgaacggcggaagatcatggaccagtggcccgacatgcacaacgccgagatctccaagcgcctgggccgccgctggcagctgctgcaggactcggagaagatcccgttcgtgcgggaggcggagcggctgcggctcaagcacatggcggattacccggactacaagtaccggccgcgcaaaaagagcaagggggcgcccgccaaggcgcggccccgcccccccggtggtagcggtggcggcagccggctcaagcccgggccgcagctgcctggccgcgggggccgccgagcagcgggagggcctttggggggcggggcggcggcgcccgaggacgacgatgaagacgacgacgaggagctgctggaagtgcgcctggtcgagaccccggggcgggagctgtggaggatggtcccggcgggacgggccgctcggggacaagcggagcgcgcccaagggccgtcgggcgagggggcggccgccgccgccgccgcctccccgacaccgtcggaggacgaggagccggaggaagaggaggaggaggcggcagcggctgaggaaggtgaagaggagacggtggcgtcgggggaggagtcgctgggctttctgtccaggctgccccctggcccggccggcctggactgcagcgccctggatcgcgacccggacctgcagcctccctcgggcacgtcgcacttcgagttcccggactactgcacccccgaggttaccgagatgatcgcgggggactggcgcccgtctagcatcgcagacctggttttcacctactgagcccaccgtcagcggggcgcgcacgcccccaaaccagctgtttacatacaggaatcaggtattggggcccctcggaggccgaggctggcaccccatctcccgcgcagcctgccccctcctggacgtgcccatcccccctcagatccagacatgcccctcccccgcagacacaccccaaggcagcccaacccccaccccttccccgacacccaagcccctccccacgtcgccccctcctgcacagccaccagcagccagccccctccgatacacctcccgtcctctcctacagacctgcacccctccccccttttgcacacgcccctcctcgtggccggaggacccgccccctcctttgctccggaatctctcctccctcgcccggcccgccttctctgggttaggggggcgatgcggccgggtggcaacgcacgcgcctcctgcgcccctcccttccctggggggaggggcgcaccccttttatccccggagcgctagggcccgcccctccgctggggcccacccccttcgtgcgcatgcttaatgcttctggggaggagggggctggtcccagcggagccgcactcttcgcccgctccgggcaaaagcgggggcgagtgtagagcgatcctgggaaatcctttgatccgggagccctaggtttcctctccagccaacggggcgtcgctgccttaatgggaggagcactcggaagggttggtttgggcctgaaactctcccaagtggcatagccccttttccggtatggggtctcctacacccacgcgcaccacctctccggtcgcgtggctgcctctacagcctacctatacgtccctttttccccccaactgggaattgagaggtaaggtctttctctggaaatccagcagtagaggaagggaccacccaagaaaactaaaaaccaaggcaccttaccagtctgtctggggacaggatccctgctgcaccttccccaccccctcctgggaagtgccccctcacctcagggcacccgcaacctgggctcctccctgagcgcaccggcccttcctgtcacccaggtccaccctcagtactcaagctgcagtatacagcgggaaaaactgaggcactttggtgctaggggtttgggactgaggcgtggagagcagatgtgatggcaggaagactctcgcttttaaacatctggtttgggagagaccatcgacttggccagtgagactgagaatggattccgagtagtgatgggccgtttgcacctcggtttttccacgtgagaaatggggagaacgctgctgttaggaggaagttgtgtccagttcagggtgccctcgggagccctgtccctgttgctgtggcccctctcacgccgccatctctctgccccgccccgcccctccggcctccccacaccccccttgccctcactacctgtatctcaccggcgtgtgttcaccctcccgggtggctcacacactctcattcacacacacaaatctcaggaacaaacggtcccagagtcctccggacccctgcccagggtctctgcaggtctctgccccacgcgttcccgtcgctgacaaagccaccagctgcctcctttaagcttggtgctccggctctgggcctttcttgcgctctattttttttttttttttttttaagaaaaacaacaacaacaaaaaaagacaatgaaaaaaaaaacgtcatgtgagtgaagagatgtcactgtctgtggtcttggagaactagtctcgtagctgaggggtggggtccctctgtctggggcactggcacccacagcaggactccgccagtctgatgccaggactgaataaagtgtatttgccccgaccttgccctgtggttctgcatgtctgtgctcttcctcaaccctccctaaacagtttgccagattcaagtccgtgtgatttgggcccgagctgggtgtcccagggcaagccaccttgcctgtctaggcctctatgtcaggactccctggccttcatgaagaatagcaaactcatccctgtagggaccaggcaggtaacatagacgagtgactctgggtggacagtggtgtcatgacccacttcaaggggcctacctcctgccagttgtgaccctgtgggaatgcagtccacagtggccaggtggccagatttttcaagaaaagctggatggatgtttctgagtcatcttaatttcaaaatgagactcatattttaaaatttctgtgggccaaatgaaacaagtatgcaggcaggtctggtccgagggggctggcttggccatgcctttctgtgcctttaatgaggactaagaagcaagattgggccacactgtctggactcaaagcccagctccaccactgagcacccgtgtgactctttccatatgtataacgtggggataataataatagctgcttcacaggatgaaatgaagtttgaggtgagaagcattcaccatggtgcccatcgtgttactccattgtcagaggaggaaacggggtcaggcaggaaagcaacttaaaggagggcctgcaagcagccagggtcagagacagggcttggttctgcttcctggtgaagcatggcttcggggtgctgcctctccctccctgtttgaatctgcagattgtgttaggcccccagctgagggcctggagtggtgggattggtcccagtgcctggcgcacattggcctgcagagtagattaactgaatgaccaaagagcaacagaagtctagtgattcttgtctttgaggttctgactggtgttttacaactgagtccaaggcttttccctcctttgtccctctgacacccctccccctaattctcatctgtcagatccagtgtattcctaagctgggacaaagcctctgttttcccagtaggagccagggctgagtgtggaaattacagtgactgcttcttctcagcttctctggttgaaagcaagctggcgaagtaagaggaggtagagttgagaaggtgtggaagatagggacagctgcccccagaactcccttcaagggaggacttccccagctatgggaagtgccatcagggtggccgcagctgcagagagccacttcacctgagaccacgcccttcctggggcagcctgtatctggtgtctgagtgaggcatggtataaacacctggtcatttcaatccaacatgggacggacactgacagacagtactcccagcaggcccaggccagccagggcttcgtcaggcctgcagcacaatttgacttcctatgcccaggcctgcttcctcttcttcctcttcttttcacaggtgcttattcctaataaacatcttgcaacccaaactcagtctcattgtctgtttctagagaaacccagtctacaacagagggttcaagagactggacaaagggaattgggtcagtggcccagcaactgcagctaggccggtcggatgtatcctaatgtcaagagtctgttcaccgatgccatcagcaccaaactaggggctgcacactttcctagtctgcacaccagtcacgtcaattagagactccagcctcagcccgaaggccttccagggccccctgctgatgccattctcactgccagtccgtcccctggtaaaagcaggtgggagggaggtcgtcatctgagtttgtcttacagaatagcctggaatggggtgcacggtaaaatgcctgaccggagataatgctagagctgtggaaccttgggcaagcctcttcccctttgtgggctgtactgggagtcggtaataggactagaagagggaccatctcattttggttccttccatttcagatgctgacctgaaaggtcggggagacagctccttatggggtctctggggccacctagtggctaagaggagtagaaccaaggttctgtgcagttgggaggtgggagtcggggtgtgtcccaggccaaggaactgagtcccactcgagtctcactccattcatgcattgactcattgctgggtcatgccccttgcctgggtggtgtgagccaccctgcttccaaggctttcaaaacaccatacgctgatgtattgtttctcatctattgctgcgtaacaaattgccacaagcttagcagtgtaaaacaacatgcatttgttatttcagtctccatgcatcaggagtccagcatgccttagctgggtctctgctcaggatctcacaaggcagcagctggggtgctggtggcccgcattccttcttggagctcagcagccttttccaagctctcacggtagtgggcagaattcagttctttgtgcttataggacagagatccctgttctattgctggctgtcagttagtaccactcttgattactacaagctgctcagtttcttgccacatggcccccacagggcctccccagccttctcacaatattgcaacttattttgtcaaggccagaggagaatttttctgctgcttggagtcacttggctcagggaaggtttaagctctcttttaaaagcctctcctggctgggcatggtgtgttcatgcctgtaatcccagcactttgggaggccaaggtgggtggatcacctgaggtcagcagttcgagaccagcctggccaaatggtgaaaccccttctctactaaaaatacaaaaattagcctggcgtggtggcagtcgcctgtaatcccagctacttgggaggctgaggcaggagaatcactcgaacctgggaggcggaggttgcagtgagccaagaccaagccactgcacttcagcctgggcgacagagcaagactctgtctcaaaaaaaaaaaaagaaaaaaaaggaaaaagagagagagaaaaaaaaagccttccctaattaggtcagactcacccaggaaaatctcctttttgattaggcatcaactaatgtgggattttatatctgcaaaaaatcccttcacctttgcagtatattgtagccttataagagtgacagctgtcatactagatttgcccacactcaaaagggaggaggctgtctagggcagctacaccagagactgggaatcttgggggccatcttagaattctgcttatcacacacctgtaatcccagcacttcgggaggccaaggtgggaggatttcttgagtccaggagttcaagaccaacctggccaacatagcaagacctaatctctagtaaagttttttttaaaaaaattagccaggcacggtggtacacacctgtagtctcagctacttgggaagctgaagtatcatagctgagaattctcaggtctacatctccatcccagacatgactagactagctgccttcttgtcatctccactgatatatctaattggcacctcaaactggacatgccaaaaaatgaactgtttccacagtgctcccaagcctgcttccacagaccacatctgcacagctgatgtgaaatgaaaggctaaagcctctcagttatccttgatgcctcttttcctcccagcgccatctcccttataccctgttggctctaccttcaaaatatgccctgtgtcttgtcacttctcacatcttccatggcctctgggtccaggatataagggcatacgaagggctccttgcgttttcctttgccccactcatagtcttattgtccacacagcagccggagtgatctggttaaactgtaaatcccagcacaccctgccactgttcaaaattctccaaagactctcattcagtagaagccagagtcctcagcatggcctgcaaagccccataagaagtagcctgtggctcagcctcggcttcatcttctactttttctgtttctcacatgcccagtcacactggtcttgctgttcctcaaaagtgccaatcacacttccgcctgaaggcttttgcacatgcttttccctctgcttaagatacccttcctccggctgggcgaggtggctcacgcttctaatcctagcactttgggaggtccaggtgggtggatcacctgaagtcaggagttcgagaccagcctggccaacatggcgaaaccccttctctactaaaaatacaaaattagctgggcgtggtgacacatgcctgcagtcccagttactcaggaggctgagacaggagaatcacttgaatccaggaagcagaggctgcagtgagctgagatcgcatcactgcactccagcctgggcaagacaaagcgagacttcacctcaaaaaacaaacaaaaaaatacccttcctccagatagccacatgtcttacttccttcaggtctcagctcccagggcgccctagagtaggcacagggagtacctcacagtgtcctccctgaccatccatataaagtaacatcctccataaactatcctgttactttgctttatttttctgaatagcatttatcactatctggcatttatcacctgtagtttttactttttgtctctctctctctaatttgtatgtaagcttcataaggaaggaatgactctggactggactccatgcctcagcacattcacccacccattcaacaaacattcttaagggtctaggctgggcatggtggctcatgcctgtaatcccagcactatgggaggccgaggtgggaggatcacttgaagccaggagtttgagaccagcctgggcaaggaaacaagaccctgcctctaaaaaatacaatttaaaaaagtatccaggcacagtggcgtgagcctatagtcccagctactcgggaggctgagctgggaagatctcttgtgcccaggagttcaaggctgcagtgagccatggtcatgccactacactccagcctgggtgacagagttagaccctgcctgtaaaaaaaaaaaggtggggggcagggtggggaaggtttgccttgaccaggccgcgtgctaggtgccgggcatacaaaagtgaaaaacgtgatttgtcctcagtgagctcacaggtctgaggagacacataaacccaggaatggaaatgctttgctggcgatggacagtgagtctgggagaacattgaggagatgtttaacccagacaatggagtggggtgtggtcaggtcattccctggaggaggtgatgtttaagctgtggcatgaaacctcagtaggatgtgatgaccttagaacatggctacacgttctttgacattcctcctttaaattaccttccctttgaatctgggctgggccttcatgatccatttgtaaccaacaggacacagcagacatggtgctgcaggatttccaaggctaagtcacgctgaaccgccatgttgaaaggccaacagccaagactgccatgtggagaagcagcccgggccacgtgggaagaccatgtgtaggtagctgctccagttgacagctgagcccaggcaccagacttatgagttgagaagcttccaggggattccagcccctcataattcaactcactcccagctgttggagggccttcccagcagaggcccagccatcacagagcagagacaagccatcccttctatatcctgtctgaattcctgacccagagtccacgaacataatgagatggcagttgtccacactattaggttttggggcagtttgttatgaaggaataactggaacaataggataaggaagagtgaggtgaaggaaaggactttacagatgccagcaacagtacatgggaagacctggtaagagtggctgacacagaagctaaccagcttgcggggaaggtgtggagagaggagggtgacaggcaagagtgagaaggaccttgaaggtatttggactttatcccgagtcttcacactgcagcccaaggggtcaaggagtctttttttttgtatggtaaacatggggtcttgctatgttgcccaggctggtcacaaactcctggcctccagagatcctcctgccttggcctcctaaagtgctgaaattacaggtgtgagacactgtgcccagcctccaaggggtcttctcttttttttgagaccgcgtctcgctctattgcccaggctggagtgcaatggcgcaatctcagctcactgcaatctccgcctcctaggttcaagcgattctcctgcctcagcctcctgagtagctgggactacaggcatatgccaccacacctggataatttttgtatttttagtagagacagggttttaccatgttggtcaggctggtcttgaactccttacctcatatgatctgcccacctcatcctcccaaagtgctgggattacaggcgtgagccaccatgcccagccggggtcctttgaaaacacaaacctgaccactgctgtaaacctttcgatggccccttactaccctcaggataaactcttgaaattcaaggcattttgcagttgactccctcactcttttatagatttatcttcggtcactttatcctcagctacgccaggccactctccagtgacaatgcttcccgcctcacccatgctatttatctttgctcatgtggaggaattagtgggactttgggctaatcaccttgcctttcgaggcctcagtttccccatctgtatgattaggtggttggactagaagtttttgttttgttttgtttttgtttttgtttttttgagaccgagtttcactctgtcgcccaggctggagtgcagtgctgtgatctcggctcactgcaacctctgcctcccgggttcaagtgatttttctgcctcagcctcccaagtgactgggattacaggcatgcaccaccaggcccaggtaatttttttgcatttttagtagaaacagggtttcaccatgttggccaggctggtcttgaactcctgacctcaagtgatccacctgcctcggcctctcaaagtgctgggattacaggtgtgagccacgacacccagccttagatgtctcttaagagcatatctagcctggcattctaggagtctatgaaaaggagggagaaaggtgtctgtagccaaacctgcctgtctggcttcttctaggttgcctagcaatggatgccaaccctctcccccatccttgggggtttcttagcaacccagtttctcaccctctgctgttttcagggtttccttttaactaaatgtcaagttttgctctttctcctccagaaaacctgaggccaagggtctctgtgtagagctggatacaacccagaatacacagagacctgggtttgaggtcagtggaggatttgctgtgtgacttggaggtctttgacctctctggctttcatttcagactgtgattccctgtcatatgctcctcagagttcttcttcttttcttcttcttcttctttcctcttcttcttcttcttcttcttcttcttcttcttcttcttcttcttcttcttcttcttcttcttctcttcttctttcttcttcttcttctttcttttcttcttcttcctcttcctcttcttcttcttcttcttctcctcctcctcctcctcctcctcctcctccttctccttccttctttcttcttcttcttcttcttttgttttttgagacctagtctcactctgtcgcccaggctggagtgcagtggggcgatcccggctcactgcaacctccgcctccctggtacaagcagttctcctgcctcagcctcccaagtagctgggattacaggtgcacgccaccatgcccagctaattttgtatttttagtagacacagggtttcactatgttagccaggctgatctcgaactcccaaactttgggattacaagcatgagccactgtgcccagcctgttcttttctattttttgagatggagtctcactctgtcacttaggctggagtacagtggcacaatctcagctcactgcaacatccacctcccaagttcaaacgatttttctgcctcagccaccaaagtaagctgggattataggtgaacaccaccacaccgggctaattttttgtattatttggtagagacgggttttcaccgtgttacccaggctggtctcagactcctgacctcaagtgatccgccagcatcagcctcccaaagtgctgggattacaggcatgagccactgtgcccagccctctgtattgttctgattttagtatatgtgtgctgaaatgagcacttccctcttctcttgtatgcgtttggtttgactaccaaatttattcacttttgcaataaaccgtcactgagcacctactatgttccaggcactgtcttaaggactggggattcgtcagtgaataaagcagacatagtcccttccctcacagagcttatactctagtagatggaaacgtataatgaataaacagataagtgcacataatgatatcatgcagtgaaggggacaaagtgtaaggaagggctactattttagatgaggaggttgtatcagtcaagatgggctagggaagtcagagatggttgggaagaaaaagcctggcttccccctttctccctccaacttcctgtgggtgcctcaccttgggtgacctcagctagaggccagctgacaaaggaggctgagtagcttccaggggtcagctctgcaaagcaggaaagagcaaggaatccactggaagcaagaaggcccaaaagtaccttgggaggtacgccgctttttcagctcactcactgcctgtaaactgtcagggaccctaggatcattaaaaaatattttgagggccgggcgtggtggctcacgcctgtaatcccagcactttgggaggctgaggtgggtggatcacttgaggtcgggagatcgagaccagcctgaccaacatggagaaaccccatctctactaaaaatacaaaattagccaggcgtggtggtgtgtgcctgtaatcccagctactcgggaggctgaggcaggagaatcacttgaacccaggagacagaggttgcagtgagctgagatcacaccattgcactccaccctgggcaacaggagcgaaactctgtctctctctctctctctctctctatctatatatatatagatagagagagagagagagagtagtaaaatacagatagcataacatttaccatcttaaccatctttaggtgtacaactcactggatattaagtatagtcacattgttgtgcaaccatcaccatcatccatcttgagaactcttcatcgtgcaaaactgaagttctggatccactatgcactaactctccatttccccctccccctagctcttagcaaccaccattctgctttctatatgtatgaatttgactatggtatatgtctcatataagcagaatcatacagtgtttacttttcgtgactggtctatttcacttcacatcatgtcctcaaggtttatccattgcagcatgtatcagaatttccttctttttaaagctgagtaatattctattgcatgtgtatatcacatcttgcttatccattcatctgttgatagacacttgggttgcttccaccttttagctattgagaataatgttgctatgaaaatgggtttggaaatttctcttcaagatacactgctttcagttcttttttttttctctctgagacagtctcactctattgcccaggctggagtgcagtggcacaatctccgctcactgcaacctccacttcctgggtccaagcaattctcctgcctcagcctcccgagtagctgggattacaggctcacaccaccgcacctgatgtgtgtgtgtgtgtgtgtgtgtgtgtgtgtgtgtgtctgtgtgtgtttagtagggatgaggctttgccatgtttgtcaggctgctctcaaattcctgatctcaggtgatccgcctgcctttgcctcccaaagtgctgggattacaggagtgagccaccacccctggcttcagttctttggggtatataactagaagtaaaattgccagatcatgtggtaattctatttttactttttcaaggaatcactatgtgttttccatagcatctgcaccatttttcattgttatcaacaattcacagggttccagtttccccctatccttgccaaaacttgttattctgttttgttttatggtagtcatcctaatgggtatgaagtgactaggatcattttgagacccaaacagtcacaggcttttttgttgttgttgcccaggctggagtgcagtggtgcaatcatagttgaccgcagcctcaacctccttgggctcaggtgaacctcccacctcaggctcccaaggagctgggactacaggcacacaccaccacatccagctaatttttgtgtattttgtagagacagggttttgccatgttgaccaggctagtcttgaattcctgggctcaagcaatccacctgcctccagcctcccaaagtgctaggattataggcacccagcttcataggctttttagcccaggcttgtgatttctttgtcagtataattctctgaaaaacttaggtttctggcagggggcagtggctcacgcctgtaatcccagcactttgggaggccgaggcggacggatcacctaaggttagaagttcgacaccagcctgaccaacagggtgaaaccccatctctaccaaatacaaaaaattagccaggcatggtagcatatgcctgtaatcccagctacttgggaggcggaagcaggagaatcacttgaacccaggaggtggaggttgcagtgagccaagattgtgccattgcactctagcctgggcaacaagagtgaaactccatctcaaaaaaaatcttaggtttcttatcgatttgactgtagttaatggtactaaaaccatacccacaatacttttcaatatattgtcctcaagtctgctttttccctttgctttctatcctaaagctgtcactctcaatgtaatggcaattagcaagaataacaggtggcagagttgcacctctaaagtgatcttggctctgagagtttttacaggacatttttcactcaaagccttttaaaaatccaatctcatactttagttgattctagccttgaagtactttaattgataaaaaagaaagttcataaggtcattgggaagattaattatcccagcatatagtaaatgctctataaatgatacccatctttgtcacttttttttttttttttgagacggagtctcactctgtcgccaggctggagtggcacaatcttgtattactgcaacctccgcctcctgggttcaagcaattctcctgcctcagcctcccaagcgagtagctgggactacaggcagcatgctgccactcccggctaattttttttttttttttttttcagtagagctggggtttcaccatattttctttctttctttctttcttttctttctttctttctttctctttcttttcttttcttttctttttctttctttcttttcttctcagagtctctctctgtcacccaggctggagtgcagtggcatgatcttggctcactgcaacctctacttcaagtgattctcctgcctcagcctcaagagtagctgggactacaggcatgtaccaccatgtccagataatttttgtatttttagtagagacagagtttcaccacgttggccaggctggtctcaaactcctgacctcaagtgatccacccacctcagcctcccaaagtgctgggatcacaggtgtgagccaccatgcctggacaaattttcctatttcttaatagataatccatcttgtttttctcaaaagtagacagtttatcaggtgtcgtgtctctcaccttcccaccctactcacctataaactaatataacaataacagtaacaataaccataatttgctgagttctaattttgttccaggtactttggataagtgtcttatatgcacatctcatttcactctttcaacccctctgagaggcaagtacttaaattatcttcattttacagtcagggaaactgaggcacagagtgtttaaatcatgtaagcagtaagtagtggagctaagattcaaacgcagatctgctggactccagagttcaacttacagacactacattgtggctcttcttggtggccccctcccctcctccccaggctctcagaggatacaggatccctcctttgctagtcaaggccagcccatccccctgtatatttgacttcatctcttcccactgccccaggatttcatccacccctgctctgatatcaggggccccctccccttctgtccatggtgtggggctttttgcacttcacacacacacacacacaggtgcacatacatacacaccccttctccaaaccactccacaaagggcccctgcctcctcactttcttgccttccacatcacaccctaaattctcctggccaaggttcccactgacctccttgttgccaaacctaagtcctgttgtcccgctgtgtgtctcttatgcacttggcaaggctgagcaggtccttcttggaaatgtgtttctttggtttctatgacacaatgcacccccactccaaaacacacatacacacatcccagattcttgcccccacccaccaccacccgctatctctctagatgcttctgtggttctttctcctcctctgacctcttcaaatgtagtatggtggttttaaaacatgtccataatttttttttttttttttgagatagagtctcactttgttgcccgagctggatacagtggtgcgatcaggtgcgtgccaccatgctcagctaattttttttaacttttaagttttttggagagataggggctccctgtgttgaccaagctggtctcgagctcctgggctcaagcgatcctcccatcttggcctcccaaagtgctaggattacagacttcagccatcgtgcccaaccatgtctataaattctttaagactcctcccactgagtaacagagtctgtttcttccccttgaatctgagccaaacttagtgactcagactacagtagaaatgattctatggtgacttgtgaggctgggtcataaaggcaatgtggcctgactcatgggagtcctgagctacagtgtaagaggtgtcaacactctcagctgccatgctgtgaggaagcccaactggctcatgcagagagacaacatggagaggccttgaggctatatgaagagagatgcttggccagctcccagctgctccagctccccagtgctccggcttccactgtaaccacaaaagagacaccaaggcagaaccacccagatgagcccttcccaaattcctgacccacagaaattgtgaaagatgataaaaatcattggatttggagtggtctgttatgcagccatagacagccaaacagaggcatcttaatctgcttgggctactataacaatttagcatggagcaggtggcttgacaacacacatttattcctcaggtctgcagggtgaagagtctaagatcaaggtgctggcaaattccattctgctggcaaccaagggcctgacttctggtgtacagacgaccatcctattgtagccccaaatggcacagagaagaagcaagctctcaagtctcctcttatcaggctgtaatccctcccaaaggcccacttccaaataacatcaccttaggacttcaacatatgaatatgagggagatacaaacattcagtctgcagcagagggcttcgttagagctctgacctgagcacgcttcatctcaatgtcattgtttttgccagctctacatccactgccctttttttttttttttttttttttttttttttttgagacagagtctcactcttatcacccaggctacggtgcagtggcacgatcttggctcactgcaacctccgcctcccagcttcaagtgattctcctgcctcagcctccggagtagctgggactacaggtgcatgccaccacacccggctgatttttgtatttttagtagagacagggtttcaccatgttggtcaggctggtctcaaactcctgaccttgtgatccacctgcctcagcctcccaaagtgctgggattacaggcatgagccactgggcctggccccactgccctttcttacagtaacagtatttcaatttccctttagggaagctcttcaagcaggttctcagtccaagaggtttctctgggttaagcactgccagccacccaaagggtgagcaagtaaccagccaatcagagacactccagtgggttcagtaaatgacatattatctaactggggtgaggggaatcaacatcagggcttttcctgagactataaggagaaacagattcttttcccagcagttaaatttgaagtctgtggccattttgctaccatatagggaaaatctgcctgacattgaagccaacacagatgagggaagagccaagagataaagagaaagatcctgagcatctggatacagccatgcctgaagccagtatcccttgacttctcaattatgtgagcctttatattccctttgtttaaagccagttcaagtttaaaactgccatttccagtgagaacaattccctatgttgtatctaaggccaagaccttgcccctgactctaggccagaatgtcctgtacagtgccattcaactctgccaaaagcaaagggcatcaacttctccacaacctggctttccctcatctattttacatctctgttaatgggagcatcacccacctgacctataaacataaaagtcagcctctatcctctctgtctctctccctctctctgtctctctctctctctctcaatccctgtcacttcccttacttcttagtaaccaagttctgccaacttaactttatggacatttttcacacctgcaccctcctttccatttttcctgcccactccaattcttcatcatttctcacctaaatttttacaaaatcaatagataactaacatagaggtgtatagtaaaaagtgaatttcggccgggcacagtggctcatgcctgtaatcccagcactttgggaggccgaggcaggcagatcatgaggtcaggagatagagaccatcctggccaacatggtgaaacctcatctgtactaaaaatacaaaaaaaaattagctgggcatggtggcatgtgcttgtagtcccagctactggggaggctgaggcaggagaatcgcttgaacccgggaggcggaggttgcagtgagctgagatcgcaccactgccctccagcctggtgacagagcgagactccatctcaaaaaaaaaaaaaaaaagtgaatttcattcccacccttgccatcagttaccctcccccaaggcatctactgttacctctttcttgtctattttcccagaagttctctatatgtgccatctttttgagaatttcaaatggaggcatactatcaagacttttcagaacactgcatccttcttcacttgaagtgtgattaatataaataattatagactaatttcttctttctaatggatgcatagtattccacaaagacatataatgtacataactcgtcttccattgatggatatttaagtggtgtcccagttatctgttagcacagaacaaaaccccccaaacctagtggtataacacaataaccacttgaatatgcttgtgggttctgtgtgtcaggaattcaggcaggacacagtgaggccagcttgtttctactctgcaatgtttgagtcttcagctaggaagatttgaagatttgaaggctgaagctgattcaaatggctggccactggaatcatcttgttcttccccttccccttcgccttctacagtgcaatggcatgatgtcggctcactgcaacctctgcctcccgggttcaagcaattctcctgcctcatcctccctagtagctgggattacaggtgcacgccaccatgcccggctatttttgtatttttagtagagacggggttttgccatgtggccaggctggtctcgaactcctgaactcagggtatccacccgccttggcctcccaaagtgctgggattacaggtgtgagccaccgtgcctggcctcatctggttcttcttcactcacttcttttatgcttgaactgggatgactcaaagctaagcttagctgggactgtggtgccttcatgtgtcctctcctgatggtcttggcatcctgacagcatggcagcctctaagcagacatggagccctaggtaggcatggtgcctcaggctccaagagctagagttctagcagaagttgcctgtacttttatgtctggaccttagaagtcagagtgttacttccaccgtactccattggttgaagcagtcatcagctcacccaagattcagagagggtacaaggatcccacctctctacagaggagtgctaaagaatttgtagctatattttaaaaccaccacaggttgtttccaatctgtagctattcctgtagttcattttacaggctaacatctcttgaatgtcttcatttctctgcaccaggccaagacactgtcatctctgatctctttgctgatctcttgctgtcactcttgtgctcaacatgctgttctcttgacagcagccagaggtcttttcagaatgaaaatcagatcacatcccacccctcttcataacccttccatggctccccactacccttgggctgaagctcaaactccttaccttggcttatgaggccccacaaggtctcacttctgcctgcctctccaatgccatctcctgtcaccatttggggcctttagttttgagctgcaagagttcctcccatcacacacacacacatacacacacacacacacacttaaatgagtaagtaaatagaacatacaaaacgcttaaacactttgcacatagtgagcataataagtttgctactattattagactgtcttcagtaaatatttactgggctgcctactcagtgccaagcactatgggaggctcacagatacaacacgaacaagaaatatgtggccttggccagacgcggtggctcacgcttacaatcccagcactttgggaggccgaggcaggtggatcacttgagctcaggagttcaagaccagcctgggcatcatggcaaaaccctgtctctattaaaaatacaaaaaattagctaggcatggtagtgcgtgcctgtagtcccagctcctcaggcgactgaggtgggaggatcacctgagccttgggagatcgaggctgcagtgagccgtgatcatgccaccgcactccagcctggacaacagagtgagacgctgtctcaaaaaaataaaaattaaaaaaaaagaaaaagaaaaactaaaaaggaagatgtggccctatcttgccgagctcattcttctgtgtgtccccagcccctagcacaaggagaaacagaatagatgctcaagacacaaaggcatgtctgtgcaagggtgcttgatgacggttggaggggcacaatgactttcccaagatcacacagcaaatgtgggacaaaatcaaggctgacagctcatgacagggtgggaggcagatgcagctgcctggcacaggctggctctccagggagatgggcagtgggcacgcattgcccagggcagaactggggctaggggaggaaacaacaagggaggctgtcattagctccttccaaagtggaggtcacttctctcccaaccccgagtcctccacccaaactcccttctcaaggtacaagggctgatcccgtaccagggatgggtagggactcaaagaggaaaagaggatgaaaagaggatggggactgagtgagatgtgaggactccagagggattagcggctctcaaggcaagtgggaggggacttcccggtaggagcccggagacagatgggagcctgtgaagagggcgggggcccggcgaggagaagcggtttctacgctggggtggggctccatgagggggatggagacctggaaaagggactgacggtgcagcgaggagaggaaggctcggttaagggatgggtcttccacgggaggggtggggaactgcgggagtgacggcagcttcggtgaggagtctgaggggctgcgtgaggggctggggcccagggagtccgaggggtctctgtgagggcgctggggtgtccgagcgagcagggaactctggaaggggacaggagccgggggagctgcaggcggccgccgtctgcagagccaggccctgaggcgggccggcgccccctcccccgccccgaactgcggcgcaggcgcgaaccggacccgcctttgctcggcggagacagcaggcagagaggtgagcttagccctgccccacgcgcggccaggccccagccccagcccctggagaacccccgcgctctgcccgcatcctcagcccgggccgtgtcccgccagggccgggacctttgcgcctgagcctcggctttgggaggtgggggtcccagggaagcagcaggggcgggagacagaaacagccccatcgcccctcgacgcctcagggttgataggctgggtagaggcttcaaaggacacccccacccccgccaacacttcaaaaacccattcctacccctctctgcctcagtttctctctagggaaaaggacgcagttggtgtggagcagggcatcggtggtcctgtcaggaagagtggcgcgggtgccggtggggaagggaggcgggaaatggcctgatttccccggccgacaccccctacccatcccccccgggagggcgccccttctcccccgcccgggcagcgctggacgctgtagtgggcgagtctgagggtctgggaaggacacaactgaatgaggctgtgcagaggcgacagattccgtccatcttcgggccctggcttccgtcacttccgcccgtgcctgccgcccctcgcctcctccctccgccgcagtctccccacgtcggacagcgcagccccctccgcctcccgctcccctcccaccgagctcctcccggctcccgggctggggacgcctccctagcggttcccatggcaaccctcgtcccgggtgcctgcgccccgccccccgcccgccagacctactccgtgcagccctgaaacgccaggcggaggggccaggccgagcgggaggcagcgtcaaggtcaccttccctctccagtagcagcaggactgagtgattccatctatttggagtcgcggaagcggtgaattggaggggaggagctgacccaggtcaacagccccgaagccccctccacacctcctcacctgtggccttgaacagtggtctccgcacggaggctcctaccgtcccccaggccccatttcttctccccacccgggcctccccagcgcctcgccggggcgggtaccgcgctggccgcaccctccgcacagcccgccccgcccgcctcctccggcgagccctcctctccagacctctcgccctcctcctccgacggtccttcgctttcagtctctgccttttcccgttctctgtcgtggcttttgttgttgttgtttttcctcctttccttccccgctcttcttttccctgaattgtaagtgaggagggtgtacagccactatttatggacaggctttcttgacagcaatcttgtgtgccgtgtgactccaagcagaacctccaaccgtgtgtgtgtgtgtgtgtgtgtgtgtgtgtgtgtgtgtgtgtgtcgtacctatctgggtatgtctctgtatgctttgtgagtatgtctgtgtgtttctctgtgctgtttcggtgagtttctctatgcagggatttgaggaccacatctgattggaagtgaggggcagctgtcaggacctttatcttaccctttggaacaagcacattgtttcattttgcaggaggctgctaattaaggctgagggccatcatggagactggggtagaagcccagtcctcccccaacacctcctggctttggttcgggccaaacctgtatatggatatacaagtaccttccattcccaagatccgtgtccacttttgtggaaaaaaaaaaaaaggttatttgataggtttctctggaaatctaacagcccttaagcctaagagtctttaatcctgagggaccctgactttcacttccaatggagtcaaaattcattggaatctggaggctttcaggggcagtcctggggaggacctttttatagccttgcagcttgggaactccagcccaagtgtcagccatgacaattacccccaggagggggtctgaaggggagcggagggtgaggctctctcattccagatatggagactaaaaagttcaagatggaagtaatagcaaaaaaattacagtactaatcacaacagctaccatttctcagcattagacacagtaactgtatgaaagaagtatgattattaggtctgttttacagatgaggaaactgagacccagaaaggtggaagcacttgtctaaggtcacgcctccaggaagcagtgtgtccacgactccagtccaagtggtcaggctccagagcccacagtcccaggtactgggtggcctccagagtaaacatgcacatttattgacacctccaattgccaggcactgggctaaggccttcagtgcattggctcattcgcagtgtgctttgggaaggacaggctgggattccaaaaggccagactgtgctatgcgtgtagggtgtctcgagtgggaggagaagcgggtggggcacaaagatttagggggcttatgaaggtcaccatgagcagctcccactaatccctccctccgtcagctgcaccttacctgctccccaggggtccatgatgccgagctgcaatcgttcctgcagctgcagccgcggccccagcgtggaggatggcaagtggtatggggtccgctcctacctgcacctcttctatgaggactgtgcaggcactgctctcagcgacgaccctgagggacctccggtcctgtgcccccgccggccctggccctcactgtgttggaaggtaaggccagatgagcacctcccatgattcctctgccttgatggaggaaatgagtctgaatttgaggctcagaggaaaaaagaagagatagcgtagtagttaggagtcttgcacagtcaagcaacagaaaacccaattcaaatgggtttaaataatgaagggagccttcattgtatttgtatttacatacaaattatttacataattatttacatatttattgtatgtaaataatggtggctcatgcctgtaatcccagcactttgggaggctgaggtgggcagatcacctgaggtctggagttcaacacctgctctgtcagcatggcgaaaccctttctctactaaaaatacaaaaatggaccgggtgcggtagttcacgcctgtaatcccagcactttggtaggcggaggctgaggctggtggatctcgaggtcaggagttggagaccagcctggccaacatagtgaaaccctgtctgtactaaaaatacaaaaattagctgggtgtggtggcgggcgcctgtaatcccggctactcgggaggctgaggcaggagaatcacttgaaaccaaaaggtggaggttgcagtgagctgagatcaatccattgcactccagcctgggtgaaagagcgaaactccctctaaaaaaaaaaaaaaaaaaaaatgagccgggcgtggtggcaggcgcctgtaatcccagttacttaggaggctgaggcaggagaattgcttgaacccaggaggcagaggttgcagtgagccaagtttgcaccattgcactccagctgggcgacagaacaagactctgtctcaaaaaaaaaaaaaaaaaaaaaaaaaaaaaagaaaaaagaagggaaaatgttgctcattttttagaagagacccaaggtccaaggttgcatactttcaggcaaagtttgatccagcagttcaaccctttataccaaggactttgcaagttttcttagtcttcagcctcctcatggtgcccctaccctggtagcctgttagcttcagactctccccacatgttccccaaatggccactactgtgtggactctcaggtcttcactccacaccatctaagggaagtcagcatttcctgtggtatttccttcagaaaagaaaatagcctgtaatcccatcattttgggaggccaaggtgggtggatcacctgaggtcaggagttcgagaccagcttagccaacgtggtgaaacctcatctctactagaaatacaaaaattagctgggtgtggtgatgggcgcctataatcccagctactctggaggctgaggcaggataatcactagaacccgggagacagcagttgcagtgagcagagatcgtgccgttgcactccagcctgcacaacaagagtgaaactctgtcttaaaaaaacaaacaaacaaaaaatggccacaggtactggcttacacctgtaatcccagcactttgagaggctgaagcaggaggattgcttgagcccaggaattcaagatcagcctgggcaacatagtgagacttcatctctactaaaaataaaaaattagctggatgtagtggcgcgggcctgtgatgcctactactcaagaggctgagccaggaggatcgtttgagcccaggaggttgaagctgcagtgagccatgattgtgccactgcactccagcctgggcaacagagtgagactctgtcaagaaaagaaaagagagaagaaaggaagagagaaagcaaaatagtaagatattaaaaacatgttaccatttaccttagcaccaaagaagagagaaatacttaggtgtaaatctaacaaaatatctgtaatatgagaagaactacaaaactcaaaagatatcaaataactaaataaatggagaaatagttcatattcgtggattggaatagtcaagatgttagttcttcccaacctgatctttgattcaatgcaatgccaatcaaaaccccagcacgttattttgtggacgtcaaaatgtcacctcctcagggaggagatccctggactgagtcgggtcccttgctttactctgggcaaactctgtgcccattcattcttcaatacacttaccactttgcacacttgtagtttatatggagaggtaaaagattcagaaatttaaaaatcatttataagaaacaatgcttttaattcccagaagtcctgacaagcattgtgttggctctcattgggtcacttgccagccttgaactaattactatggttaagagatggactatgctgactggcaggaagtgaggttcatctcacttaaatcttactgtggtttctcaatggtagactggagtaccttgccagggcagagaaaaaatgtgaagaattgatgtctttaacagccaaggagactagtcggccagggtgcaccaatgggtcaaggtgtagaggtggcaatgagctgagtgcctgctatgggcatagctctttgctaaatattctcgggagactgaggcagagggtcccttcttttgctttcaaaggacttcactctagtgaggaggtaaggtgccaacctctgcagagaggccaacttacataacttcaggtcaggtctgtagggaacaccaggagaggaaatgatcaaggaagacttccaaggaaaggttagtgtgtatttaaaatttttaagcatcttcttattgcgaggcactgtgctaggctcttgggaacacagaatttaagacatgaggtccctgtcttcgaggaactcttttagctgtggtttatttaatcattcagcaaacatttattcagcctttgctctgtgccggcacgtgctaggcacagaagactcctagtgagccaaaacaggcacagtctgctctcatggagctctcagtactgcgggagaggcagacgtcacttacatagcaaccaaaatacatgtccaagtgtgcacaatggtaagtgtattgaagaatgaatgggcacagtttgcccagagtaaagcaagagacctgactcagtccaggggtcttctccctgaggaggtgaggtttgagatgagatctgatggtgcataggagttaacccaacagagacaggaaggtagaaaggataaagagatgagttgggatggagggaaacacagggttggccggagaaacccactgctaggtgggagctgggaaggaaattaagaggcctcaggattccaaataaaacatgacagtttatgcctcctgtcagttagaccccagcaagtgtgttctgtgattcccatctcctgaggatggatcaaggggttacccttaagtctggtgaggatccaaggtgatcccttggccaggggcccctggctgaccctgactgcttcctggtctgtctgcttctccctagatcagcctgtcctcggggaccctgcttctgctgctgggtgtggcggctctgaccactggctatgcagtgccccccaagctggagggcatcggtgagggtgagttcctggtgttggatcagcgggcagccgactacaaccaggccctgggcacctgtcgcctggcaggcacagcgctctgtgtggcagctggagttctgctcgccatctgcctcttctgggccatgataggctggctgagccaggacaccaaggcagagcccttggaccccgaagccgacagccacgtggaggtcttcggggatgagccagagcagcagttgtcacccattttccgcaatgccagtggccagtcatggttctcgccacccgccagcccctttgggcaatcttctgtgcagactatccagcccaagagggactcctgagctgcccacatggcctaagatgtgggtcctggatccttccccccttctcaccataaccccctctcagtgtttccccaacttctcccttttagcagggtccctttagagcccaactccaggtcaaatctggagctcaaatcccagtgctccctccccaggagtggggccccaactcttccaagataccagcattcctcaagtcctcccaaaacttcctacccacaccctcttcccaaggccctcaggggcagaaaacatctccttcaacccgtccccactccttcctctgcatgaccttgggcaaacccttgccctttcaagccatcagctcctgcctctctgccatgagggctttggatcagattcctcttctcgccaggatgaggacacgcactgccctccatagacacagatgaaggggtgggggtcattcagctcgaatgggtcccagatgctcacttggcctttccctgcaggatgagtgaagacgtttgcctctcacagtgtgtcttctacctgcattttggcatcagagccccccagcccacccaccacaggcaattactagccctagttgataggtgaggtgggtgaagaaggctggaggtgacatgtccgaggtcacacaacaaagcagcatgcaggaactagaaacacatcttcagcctcctcctgggccagctcttgtgctacaggtggggcggagccagcccctcaccttcctggttccctgagggtcctcagggtggaggacaggtttggcccagaaagactagccagaggcctgatggtcccaggtggctctggatatactttggatatggatttaaatggtctctaagagccgggggtagggggcaggaaaagtgggttgtctttgcccctcaaagtccacctacctagaaaccaagcccacggtcttggccgtgaccctgataataaatgggctctctcagaggcgccagcccctccctccccagccggaggcgtcatctctcttctgtaccactagagggagctctgatgcagctggagagcagcgctcaaggctctcgcccctcccctccctaacccttaccttcagtctccaccagcctgaagggcctcctaggggatcctcaggcggcccccaccagggcacaccctactgtccttgtgcctcacgccccctcctcatcctgcaccccttccatcccaccttccctttcaataaacagctgggatggatactgactttgtttcctttctccctggccactggggcgtggggaggagaaagacacagactcaggagcacctactgtgtgctgggcacgacccattatttctcattcgctcctcaggataacctgttgagaaaggaattattgtcttcttttttttttttttaagatgttgtctcgctctgtcgcccaggctggaatgcagtggggcgatcttggctcactgcaacctctgcctcctgggttcaaccaattctcctgcctcagcctcccaagtagctgatattacaggtgcacgccaccacgcctggctaatttttgtatttatagtggagacggggttttaccatgttggccaggctggtcttgaactcctgacctcaaatgatccgcctgcctcggcctcccaaagtgctgggattaccgggtgagccaccttacccagacttattgtcttcattttacagatgcggtaactgatgatcagagaggtgagtgatttattttttatttttatttttaattcttttttatttttttcgagacggagtctggctctgtcacccaggctggagtgcagtggcacgagctcagctcactgcaagctccgcctcccgggttcatgccagtctcctgcctcagcctcccaagtagctgggactatgagtagctgggactacaggtgcctgccaacacacccagctaattttttgtatttttagtagagacagagtttcaccatgttagccagcatggtctcaaatctcctgacctcgtgatccgcccgcctcggcctcccaaagtgctgggattacaggcgtgagccaccgcgcccggcctatttttaattctttttatttcagtagcctttggggtcaaagtgggttttggttacatgaattagttctatagtgattctgagattttagtacacctatcacctgagcagtgtatactgtacccaatacgcagttttttatccctcatcccctcccaacctccctggactcagtccccaaagttcgttatatcactctgtatgcctatgcatcctcatagcttagcttccgcttatataagtgagaacctaccgtatctggatttccgttcctgagttacttcacttaggataatggcctccagctccacccaagtcctgcagtggatttaaatgctcagcctagggcctggaggggtggctgggccaggcgaggtggctcacgcctgtaatcccaggactttgggaggccgaggtgggtggatcacctgaggtcaggagttcaagaccagcctggccaacatggtaaaaccccataactactaaaaatacaaaaattagctgagcatggtggtgcatgcctgtaatcccagctactcgggagactgaggcaggagaattgcttgaacccgggtggtggaggttgcagtgaaccaagttcacaccattgcactccagcctgggcaacagagcaagcctctgtctcaaaaaaaaaaaaaaaaagtgcttagcctgattggcctattgcctgagtgtggagctcctgtctttgggtgggaaggagatttctcagccaccttgagaacacacttcctctagttctgaaaggaatgtgagggccagggtgtgggagagggggctgaagccaaaggtaagatcttttccaggcctggaagagtaattaaccccttttggcactcaccaggggctgggccttgttcttagtgccttacagaattcgggaattcatttaaccaggacgacaacctctgaggtggcggctattattctcaaacctagtttttcctaaactccaggcttgcgttcccatctgcattcacctggatgttgaatttaaactcaactatctcaaactgttctccttgttaccacccctccctgaccaaacctgcctctactatgctgcccacgtcttagagagtagcgtccccattcttctggctgctccagccaaaacctcctctctttcctcacaccctgtatccaatccatcagcaagtcctgtcaactcaaccttggaaatatatcctgtacccaactacacctcgacatccccgtggctgattccatggtctgaaccaccagcgaccagcgcctcgatctggatcattgcaccagcttcccccggtctcctggcttctgagttttgaaccccaccctactccacgccttgactccccaagtctaattactacacagtagccagacagatcttgttagaacataaactaggtcatgttcctcctccgctccaaaccttcccatggctcccacctaactcagagtagccaaaaccctccctgtggcctccaaggccctacacaatttgctgatttccactccccccgcactttcctctgtaaccccaactcccaccactctccaggttcctgtgtcctctccagccaggatcctgactcagggcctttgcctcactgttccctctgctggggtactcctccccagttgacgacatgggcagttccttcaagtcgttgctcaaacatcaccttctcagcaaggccttccctgagcagcctattagaattgcaaccaggccaggcgcagtggctcaagccagtaatcccagcactttgggaggccgaagcaggtggatctcctaaggttgggagttcgagaccagcctgaccaacatggagaaaccccgtctctactaaaaatacaaaatcacccaggcatggtggcacatgcctgtaatcccagctactcgggaggctgaggcaggagaatcacttgaacctgggaggcggagattgtggtgagctgagatcgcaccattgcactccagcctgggcaacaagagcgaaaccccatctcaaaaacaggaaaaacaaaaaacaaaaaaatgcaaccatgccggccaggtggagtggctcacacctgtaatcccagcactttgggaggccaacgtgggcagatcacctgaggtcaggagttggagaccagcctgggcaacatggtgaaaccctatctctactgaaaatacaaaaattacccaggcatggtggcacgtgtctgtaatcccagctacttgagaggctgaggcatgacaatcacttgaactcgggaggtggaggttgcagtgagccaagatcgcgccattgcattccagcttgggcgacagagcgaaactccatctcaaaaaaataaaaggaagctaacacagagtataaatggtgcaggcagtttgacaatatcaaaatagaaaatacacatgccctttgatttctccctcttatgcaggtggatctatagattcaactctacatgttggaacactatagtattatttgtaattaaagcatttggaaacaacctaaatgctcatggtaggggactattaataaaatacggtaaggctgagtgcagtggctcacgcctgtcatcccagtactttgggaggccaacgcaggaggatcacttgaggccaggagttcaagaccaacctgggcaacatagggcaacatagcaaggccccatctctacaaaaaattaaaaattagctgggcatggtggcacacgcctgtagtctcagctattaatatttgggaggctgaggcaggaggatcacaccactgcactttagcctgaatactgagtaacaaagcaaaaccctgtctctcttaaaaaaaaaattggggggaaggacaagtcttttttcttttcttttcttttcttttctttttttttttttttttgagatggaatttcactcttgttgcccaggctggagtgcaatggtgtgatctcggctcacggcaacctccgcctcctgggttcaagcaattctgcttcagcctcccgagtggctgggattatagtcatgcgccaccacacctggctaattttgtattttaggtagagacggggtttctccatgttggtcaggctggtcttgaactcccaactcctggcctcggcctcccaaagtgctgggattagaggtgtgagccaccgtgcccagccaggacaagtcttcttacagaagaattccaattagtaaatgtagaaggattgagagaaattgaaaaatcatcattagaacaccggaataataattgctgcaggcaacatctaccaatgaacaataaaatgagtgggtgaaactttaaggagaaacaaggttttttttttagaaacgggatcttactacattgtccaggctggtctggaactcctaggctcaatgggatcctcccacctcatgctccccagtagctgctactacaggcacataccaccccaccaggcttgaaacaaaatatttgcatagcctcaaagtatctatccccaaatatgtattaattagtatggtggttttaacatatgcatacatgttctttgatgctctgccatctaggaaatggagcttaatttttctcctcttgagtgtgggctggactcagcaacttgcttctaacaagtagaatgtggaaaggcaaaaacagtgacttcacagtggaaaaatctggcagacaccaccttaaccaaatgaaggctggcaccaccagtcaaaagtcttgttgatatcacagcctctgaaatgatgtggtgagaagggcacttggcctgagtggcattcttcccccaaatccgtaacgtcagcctaatcatgagaagacccattctacaaaagatctgaccagcactcttcaaatgtgtccaggtcacgaaagacaaggaaaggacaagaaacggtctcaggttggaggagactaaggagacgtggctgaaggatacacaggatctccctgtactgtccatgtaactcttcaataaatctacaattatttcaaaatagcaaaaaatacgattgctggccgggcacagtggctcacgcttgtaatcccagcactttgggaggccaagaagggcagattacttgaggtcaggagtttgagatcagcctggccaacatggtgaaaccctgtctctactaaaaatgcaaaaattagctgggcgtggtggcatgtgtctgtaattccagctgctcgagtagctgaggcaggagaatggcgtgaacccgggaggcggagcttgcagtgagccgagattgcgccactgcactcccgcctgggccacagagcgagactccgtctcaaaaaaaaaaaaaaaaaaattactgtggtcaagatggaataacagggatctggtttaacacaccccaaaaaggacctaagaaaggaccattccctctcctctctgaggtgggaagatctgggaaggagaggaggctgaccagtggggtctaccttctgctccacccctcttctatccaagagtctgagcacccaacccccacaccaccctggaggctcccgccctcgtgctgagtctggcatgccctccccatccctactggcccaggggactaggttagctcagagaagcccttctaactcacccacaactggaccaaagaaggattgatctggggccactgcctggtccctgggagcactgtgctagggcagggggctgagatgccccagggtaagagacagaacagtgatttttttttttctaagacagagtttcgctcttattgcccaggctggagtgcaatgcgcgatcttggctcaccgcaatctccgcctcccaggttcgagcgattctcctgcctcagcctcccgagtagctgggattacaggcatgtgtcaccacgccccccggctaattttgtacttttagtagacacagggcttctccatgttggtcaggctagtctcaaactcctgacctcaggtgatcctcccaccttggcctcccaaagtgctgggattacaggcatgtgccaccgcacccggccaaaaacagtgatattcatatagatgggggagggattaatgggggtggagtgagagagagcctgctggagcagtccgaaaggcaggcattccttctgttcagcaacattcctgcccccacaatctcctcccacaacttatatctagtgcaggctgagagtgaatctgtctgccagtgttcaagccactgtgtgaacctgagtttcttaaccgttctgagtgtcaggagtttttttcatctccaaaataggagcaacaaggataccaatcccttgagattgtatgaagcttaatgcacttaacacagcacctggcacgtagacatgctccctaaatgccagctgttattatgaaagagagaagtctgaggttcagaactagcaggcaacacataatctataatgatggatggctcagacagggtcctgtcctatagggactcacagtctagtggaaaggacagtcctgtggacagcaaatggcaatatacctgggtaagtactgtaatagaataacaaagtaatatcctatcacggggcagtcacgggggcagtgagagacaagcgcttgtccatgccaggctctgtactcagtccatcacatacattaggtcttgcagtcctcataccaccataaggtggttaccattatctccaattcacagaaaagcaaacagtatggagtgtttaagcgtcctgtccgagatggcatagctagtggagctgaaatttgaacccaagtaatccaggtccagaatgccccggatgcagaaatgaccacacagattctaccaatgaactaacctgataaggttggaggtcatactcataacccctcacacaggtccacacagacacaggcaagcacacccatgtctattcagatacacaccaattcctgtctatgacgagcgctcagaaaatcctccacaacaccacaccaggaatgatgtgcattttgagaaaaaaaaaaatcagctctgaagacctcacagacacatgcagtgaaatgtaaatggagggacccacccaagttcttgaatagcacattacatgcctggatgcacatcagcgggcatgtaaatgatgacgaggaggtctgcagacactgacacgctgcatttgcactcactctgctactgaattttttagcagctacatttactgagcacctactgtatgtaaggaaagataaagcagccgggagctgtggctcacgcctgtaatctcagcgctttgggaggccaaggcaggtggatcacctgagctcaggagaccagcctggccaacatggtaaaaccttgtctctactaaaaataatacaaaaattagctgagtgtggtggcatgcacctgtaatcccagctactcaggaggctgaggcaggagaatcgcttgaacccaggaggtggaggttgcagtgagccaagatcacgccattgcactccagcctgggtgacagaatgaaactctgtctcaaagaaaaaaaaaaaaaaaagtaaaaaagataaagctcagagaagtgaagtggcttgcccaaagtcaaatggctgagattcaaaccctggccctataatattaggcaacggtgtctccctccaccactgtgcagatgcatccatgagtgaagagatgtgctatggctggattccctcattgacattccctgtgaccttggacatggcatggccttgtctggcccacattctcatgttgagtccattcacaggtgtgctccatggatgtgcatggatgggaccggcaaccctggccttgctctgagtctcagcttggcttggtgtcaccagggctgtgagcttccaatcccagccttgccatgtcccagagcacatggctcaaaaccaagctctgggcatcaggccagcagggcccctgtgatggaagaactgacaggatttcataagcatccggcccgggacacgtggtcagggcagggagaagggagataaacaggatgtccaccagggtgtgcacctgggcagggtccatggaccaggtgtggcaggggaagagctgtcaggacttggcatctgatgggcactcagcagatataggctgtgtgaggggaggagtttgtggggaggcagggctgcagctttgcttccatcctggaggccaggaatgagggagtaagtgagccattgactcaatgaatgaatgaatgagcgagtgagtgaaggaaggaaggggtaagtaaataagtgaagaatggaatgggggagggagtgaatttatttatttatttatttatttattttgagacagggtcttgctctgttgcccaggctggagtgcagtctcagctcactgcaacctctacctctcaggctcaagggattctcccacctcagcccccagcatagctgggactacaggcgcatgccgccacatcccgctaatttttgtattttctgtagagatggggtttcgctatgtcggccaggctggtctcaaactcctgggctcaagcgatctgcctgcctcagcctctgcagtgctgagattacaggtgtgagccaccgtgctgagctgtgaatttattttttacacaaatctgagtgctcactctgtgctggccctggacgggtctctgtggatgtctggtgagcaggatggacacagcccggtcattgcaacgctaaaagcttgaatgacaccagtcaggctggggaactgggagggcccttgacatgcagagtgactcagccagtgtgagcaggggttgtcagcatgcctaggggagcaagagactgtgagagatgtgtgtgtatacttgtgtgcctgtgtgtgtccgtgtgtacacatgtgtgcgccgacacagccaggtgttggccaatgcaggtgtggtgtcctcaagagcacagtgcatcctgattcttcaccctcccaggcctcccctgcccctgttgtgtgccagctgggcctgccccatgttatgcctgacgcccacgcaaaagctgcttcttccagtcacaggacaaaggcatcctcagcccagaccctgtaccccaggggtaaagacctctcagacccctagtgctcctcagcatggacctctccaccaggagcctcagagttgtgagaagcacaggcacccaaagcccaccgccctgtgtccatgtgcatggagtgtgcccaggtacacgcaagggctggagatgccccagggcggtccagacagacgtgcagatgacacattggccactgagtttccacagacactgagctaagtgctttcgagacacactgggtgaccttaggcgtatcaccctctctgagcctcagtttctaatctaaaagtagggtaattatactcacttccagtcttgttagaataactcaatgcatgatcagctcaacacatcatgattatttttcctgagttcctgccttcccagctatattgtctattcctcaacagtacccactgagtcttatatccccgtttctcctatgatactccattacacaggactcaaataactacctgctctaagaattgctgagtgacatgtagtcctcataaatagcaataatagtcactaacatttatataacaacaagagccagcaattttgattttttattgtgtcaggcattgtgctgaacactttacattccttcattcatttgacaaacattcactgaacacctggtaggtgctgggctctgtgctagacctgcagatgcagcatctctgccctcaaggttcttacattctgatggggaagaagagacagacaaaagacagtttggcggggcacagtggctcacgcctgtaatcccagcactttggtaagccgaggcaggcagatcacttgaggtcaggagtttgagaccagcctggtcaacatggtgaaacccctgtctctactgaaaaaatacaaaaattagccaagtgtggaggtaggcatctgtaatcccagctactcgggaggctgaggcacaagaatgacttgaacctagaaggtggaggttgtagtgagcagagatcgagccactgcactccagcctgggcgacagagcgagattcagcctcaaaaaaaaaaaaaagataatttaatacataaatgggataatttcaaaccttgacaagtgctacaaataaaataaggaagagttatggattagagacaaactgcagggattaggtggggcatgatgcttgatgagtgatcagggagggcctctctgaggagcaaatatttgatctgagacctgaagaagaaggaagagcctggaaagatacaggaaaagttccaggcagatggcatagcaagggcaaaggccctggggcaggaagaacttggtaggttcgaggactaggagaaagggaccatagctggaggatgattcagcaaacctggcaggtctgtcctggatgactcagcaagccttgcaggtctgttctggtttcagaacccaggcattttgtccttcactccaggctgcctcagagacatgcatccctgccatacacaacaatgtgtgcacgctggcacacatgcacatgcatgcacacacacactctgcatgctgacacacaactaagggccggaccagccatgatagtctaagacactaacatttttctctagtgtcttgtggggccaagtagaagggccagatgtcacctttgcccagccttccagaagttctgggccaaagaaagattaaatggcaggaagagaaaaatggcttaataaggaggtgacggggaactcgggtggcctgtgggggtgcggagatggggggagatgatagagatgtgagagcccatgggcacatcccctctggggaagtgagggagcaccgagaacagagaagcagagggagtggagacggttctcagaagcacagggcctccacactcaccacagcccctactcagccgacatgccttgcttcctctcacctcccctggttcacctcagagatgggacactcattgcccaccagggcagcctgggtggtgccaactgtgagagagctccccttccacatctgcctttgtggctgtaaaatgtggaaagaataagagaaatacctatgaaatctgcaggaagatactttcttttttttttttttttttttttgagatggagtttagttcttgtcgcccaggctggagtgcagtggagcgatctcagctcactgcaacctccgcctcccaggttcaagcaattctcctgcctcagtctcccgagtagctgggattacaggtgctcgccatcacacccagctaatttttttgtatttttagtagagatggggtttcgccatgttgggcaagctggtctcgaactcctaacctcaggtgatccacccacctcagcctcccaaaggaggctgggattacatttttctaaatcagttcggtaaaaatcaaaaattttgagaacacctggtgttgtagttctgggaagcaggtactcacatgctttgctggcaggaggtagattgataacaatctctatagaggaggagccagagatctctcttaaaagtgcaaatgcacaaacttttgacttagaaattctgcttctgggcagggcgcggtggctcacgcctgtgatccctgcctcccaggccaaggttgcagtgagctgagatcgcaccattgcactccagcctgggcaacaagagcgaaactctgtctcaaaaaagaaagaaagaaagaaagaaaaattctacttctaggaaattagctcagaacttctctccacacccccatgtatgaacactgcagcattttttgttatagcaaaagactggaaataattaactgttcattgacaagggatggtttaaataaaccagtacattcctaaccatggaataggaccaagctgtaaaaactgaccaggcaggtctttctggactgacacggaagagtccccaagataaattgttaaataggaaggaaaaaggcaatctgaaggacatggagtgtgctcccatctgtgtaaaaaagtgacaataaatcctcatattttatgtcttgaaggaaacacgagaaaatggcttgaccccaggaagatgaactaggagctggggataggagtgggagggagacttctcaagtattactcttctgtgcctttgaattttgagctaaaatatttaaataaaatattaatataattaatataatacaattaataattaatattgaataaaataaaatatctaaaaatctgctccccgggtgcggtggcccacgcctataatcccagcactttgggaggccaaggctggtggatcacctgaggtcgagagttagagaccagcctgaccaacatggagaaaccccggctctactaaaaatacaaaataattagccgggagaggtggcgcatgcttgtaatcccagctactcagcaggctgaggcagaagaatcgcttgaacccggaagacggaggttgcagtgagccaagatcgcaccattgcactccagcctgggcaacagaagcaaaactccgtctccaaaaacaaacaaaaaaacaaaacaaacaaacaaacaaaaccacaactgtctgctcaaaagtgccatcctcctacacactccttgccctcagctaagttctgtccccatggaactctccctggaagagacaatctgtctcccaagagagcaggcctatgtgtgagtcctggttccatcactgaccctaagtgtgacctcaggcaagacactcccacccctgacttgtactagacagttctccccagcactgacattctgtctctcctgctggaggggcaggagggcaggcacagtgtcttcttgctctgtgattcattcagttcacttaaactgagttacctactccaggccagagtttgggttcatccatttcttgccctccatgcccaccccagggtctggcatgggagttggtaccctataggagttctgaacagactcagcttacggatgaggaacagacggtgggtcagatgcgcggtaaggagggtcaggtacacggcccatgggatcgaatagattcatgggtgggtctttaagacaaccgccttcactcaatcctaagccctccccacagctaccaccctattttttctcccctttgcagaaaagggctttgagaaaattgtctatcctcgctgtttttaattagtcttctctctctctctccctctgagacaggatctgctctctcacccaagctggagtgcagtggcgtgatcatggctcactgcagcctcaacctcctgggctcaaacgatcttcccacctcagcctcctgagtagctgggactacaggtgtgcactaccatgcctggctaatttttgtattttttgtagagactgggttttgccatgttgcccaggctggttttgaactcccaggctcaagtgatccatccacctcagcctcccaaagtgctgggactgcaggtgtgagccaccacacctggccctcttgtctcttaagtccatttaatcatgcttctacctgtcacttccctagttgaaactgctcttgtcaatttcaacacattgctaaatccaatgtgttcagttctcattcttcatctttttttttttttttttttgagacagagtcttgctctgtcacccaggctggaatacagtggcacgatcttggcccactgcaacctctgcctcctgggttcaagcgattctcctgcctcagcctcccgagtagttgggactacaggcacaagccaccaaacccagctaatttttgtatttttagttgagacggcatttcaccatgttggccaggatggtctcaatctcttgacctcgtgatccgcccaccttggcctccaaaagtgctgggattacaggtgtgagccaccgcacccggcccattcttcatcttcttaactgatcaacagtttgacacagctgaccactccctgctctttgatgtacttcttttcacttggtggccaggcctccactctctgctggttttcctccttctcaggctccctgcttctcccattcctgttggagcagtgaggacttggtccctggagctctcatccagtctcacgtctatgactcccaacactgtatcctcagcccagacctctcccctgaactccagcccatacattcaaatacctacctgatgtctctttgaggatgtcaaaagacatgacagactccacagaaccaaagctgaacctgggcttcccccaaacacctcgctccatgtcatttgatggcagttccatacctgtcaccgttcaggccaagaaaccttggaagcaccttgacacctccttttccctcaaactccacatctagaccatcagcaatcctgttggctccacctttaaaatatacccagaatccagtcacagctcacctctagcatggccactgccctgctctgagccactggagtttaagagaattattgcaacacctgctcccttgtcttcctgtccttgcctcattcagtctattccaagtacagatccctaaatgattttattttaaaagtaagtcaaggctgggcatggtagctcatgcctgtaatcctagcgcttgaggaggccgaggaaggaggatcacttgggtgtaggagtttgagacccacctgggcaatgtggcaaaaccctgtctgtacttaaaaaaaagaaaaaaaatggctgggcatggtggctcaccctgtaatcttagcactttgggaggctgaggcgggtgaatcacctgaggtcaggagttcgagaccagcctggccaacatgatgaaaccccatctctactaaaaatacaaaaattagccgggcaaggtgatgcacgcctgtagtcccagctactcaggaggctaaggaagaagaatcactggaacccaggaggtggaggttgcagtgagccaagatcgcgccactgcactccagcctgcatgacaggagcgagactccatctcaaaaaaaaaaaaaaaaaaaaaaaggtaagtgagatcacttccctcctctccttaaaccctcccctgcctccccatgactcctcagcgtcctttcaaaggcctccaaagctccagattatctgaaccccctttacctctctgacctcatctcccaccgcctccctgtcactggctgcactccagccacattgaccttctccgatggcacaccagtcagctagtcagcttccttttggagcttttgcatgagctgttcctcttcctgaagaatttgcccttcggatagtctcagggcatccactgaacactccactcaatacagccactgcctgcccacccaacactcctcatctctgtacttactctttttttcccttgcattcgtcaccccctaacatgtgctacaatgtacttattatggtaattatttcttgcatgtttctttctttttttttttgagacagggtctcactctgttgcccagtctggagtgcagcagcatgatctcagctcactgaaatcttggcctacctggctcaggccatcctccctcctctgcctcctgagtagctgggactacaggcactcaccaccatgcctggctagttgttgtacttttttgtagagatgaggtttcaccatgttgcctaagctagtctaaaactcctaggctcaagtgatcctcccgcctcagcctcccgaagtactgggattgcgggtgtgagccgctgtgcctggctgcacttttccttctaatggaatgtaagcgccacttttgtctgttattttcactgtagtatccctagcctttggaatgttgcctggcaagtagtaggtactcagtaaatatttgttgaagaaacggatgattctataaatagcatggattgatatgggaaagctatgtaggtggatggatggatgcttgtcggatggagggtagatgaaagaacagcgagaaattcgaatggctagatggtggggatgcattataaaataataattcatagatggaaaaggaatgaatagatgggtggagggatttaatctcttcaactactatttactgaccacttgccgtgtgccaggcactgtatgaggtgctagagacactggtgagccacacaggcaaggtgcctgtcctaagggagcctgtagttcagtgggtgaggcagacactaaacaaataacaaatacatacataattccaattatagttaagtgttctggtggaaaagaacaggatgctctgggagagaataatatggataagtgatggaaaaatggacaataaatgggtagatggagatggataggatcggggttatttgccttaaagggcctggcttcaggactggagctgctttaccttaaagggcctgtcggaccacatgtaccatcccacatcccagaccagctctgcactcagagactgtccctctctccctgccctgactcagcacctgcctggcctatccccagtggtcctgcctgactctacctccagctcccaccctgctgagtcacagtcaggctggtcagggggctgtcccatgttcagtccagcccctcagccttcctcgacctgggggggtatggggagcagcccagaggggaggggagcaggtgccaagctcttgattcctgtgcctgagcactgccctgttgagaccagagagagaatctatggctagggtatctggggctacagttggggtttatctggggcctggggtcacacatgatggattagagctaaatctatctccagggttataactcaatcaggagctagaattcaaattcagtttatggatcatgtggggaaaaagtgaccaagacaccgttcagtttgggacctgtgtcggcgttagctgtggctacggcccagggcttagtgatcacaggtcagaccatgttcaaggtttcaggccagagtgcagttgaagtgcaaagtcaggcaatagggttcaccctaggaccacagtcaaggatctgggtcagttagtgtccagggcactggccttgtctcctcttctttgggagagaagccaggtggatgagttggatctaaatgtcctgaggagcaacttccagctcaagttccttcacccaggcggcctaagccctctcagcactggccccaaagccttccttcatccctcaacttcctccatcactccctgacagcctggccttgctcagtgtccctcgcaaggctgaacagtcctcattctggcacctcaggggacagggtaggggtggggactatgggacagggctcagtgctggacccaggagggcgccttgcgcaaggttttctgatgcaactggctgagtgcttcagcattccacccccaccccccaagcttttctcagaaaggcaaggcctgggcagttatccagactgaacatataatccccttccttctctggcctttgatggcttcaggacctgcaggcaaaaggaaggcaggaaggcaggcaggaaggaaggaaggtcaggtgactcagcaatgcgtccagcactgggagctggcagatctggggctccctcatcctccagctgagaggcgagaaagagaatcaggatccctggaagtttggagatcctaaccccttatacatacaaagcagcaattatgtgcctaagcccagggagagacctgtagctgcccaaggtcagaggcaaggtcagaaccagaccagctgtcttcagcccatggctatgatctagctatttccactacacagaaagagagaacccttcacccttgaggaggacacgggacttccccaggaacctcccgtcaatcctgttgaggctcctgaaatggtggaatgacgtggactttggaaccacgcagacctgggtttaaatcccaggccaggcacggtggctcatgactgtaatcccaacactttgggaggctgaggcaggcagatcacttgtggtcaggagtttgagaccagcctggccaacatggtaaaaccccatctctactaaaaatacaaaaactagccaggcgtggtggcacacgcctgtaatcccagctactcaggaggcagaagcgtgagaatcgcttgaacccgggaggcggaggttgcagtgggctgagatcatgccaccgcactcctaggtgagagtgagactccgtctcaaaaagccacactggctagctgtgtaacgctgggcaggttactttcactctttgacactggatttgctcacttgcaaagtgggcgtaaatgcatccttagctcacagggctgtggtgaggctgacatgaggaagcactggaaggcacagcttaggctccacatgggccactctcaggaagtgtgtccccacctccccctttatcctcagctctcactgggtgtgtttgctggggaaggaggtgcagcagccctggggccttggaaataataatagccactcaccctccagtgcttaccatgtgctgggaactctcctaagcgtgaacttaacctgtattagcccatttaaccctccatttaatccaataacagttcccaggccaggcatggtggtgcatgcccatagtcccagctactcaggaagctgaggcgggagtatcgcttgagcctgggaggttgaggctacagtgagtcatgatcaccctactgcactgcagcctgggcaacagagtgagatcttctctcaaaagaaaagaaaagaaaagagggaaggaaggaaggaagggagggagggaaatcccaatgacaataagcagttcaataaccctacaggaaaacactgtcatcaatcccactttatagatagggctgtgggtctgagtagctaagtgactttgtccaagacagtggacaagagaccacacggattttgagccaggccagctggctctgaatcccactgtctcctccctccttaaactagtgatgtcactgctctgagccctggtttcctcatctgtctccagggataaaaatagcagcttcatggggaagtttgaggatgacacaagatgacgtaagggaggtccccacacagggctccacccacaggcatgagaagagcctttctcaggaagaatcccaggccgcccctggggcaaccgccgggctggccttcctgcctctccttaggcccagcctagcgtgatctggatggtgagagatttctgcaaagcccccaggggcctccagagaagggaggtgcccggtctcctagataagggctcccagagaggatcacagccctggagttgccattcttgaatcacccactgtcttccccaagttgattggtctgaatccatgtacttattttttatattagttccataatgtcttccttccaaccagctcatcttttacttatttatttatttatttattttatttatttttttatacagagtcttgctctgtcacccaggctgaagtgcagtggtatgatctcggctcacggcaatctctgcctcctgggttcaagcgactctcatgcctcagcctcccaagtagctgggactacaggtgcatgccaccacgtccagctaatttttgtatttttagcggagataggtttttgccatgttggccaggctggtctcaaactcctgacctcaggtgatccactcacctctgcctcccaaagtgctgggattacaagcatggaccactgtgcttgaccacaaccacctcattttaaaaaacttatctaaatttatttaacatggaaattttaaatcactgacctcaaatagaaaactactatgatttgccataaagaagaggtaagcatacaattacatacaaaaaaagcagaaccaggttattccattccagctaaatcctgtttcttgctgaaggctccaagctgaactctgctgtctcattcttaacaagagaggtgttaaaaacatagaagctgtgaggccgggcacggtggctcatgcctgtaatcccagcactttgggaggccgagcgagtggatcacgaggtcaggagatcgagaccatcctggctagcacggtgaaaccccgtctctactaaaaacaataacaacaacaacaacaatcagccgggcgtggtggcgggcgcctgtagtcccagctgcttgggaggctgaggcaggagaatcgcttgaacccgggaggcagagattgcagtgagctgagatcataccactgcatttcagcctgggtgacagagcaagagcaagactccgtctcaaaaacaaacaaaacaacaacaacaaaaaaaaaaaccatacaagctgttggccgggcgcggtggctcacacctgtaatcccagcactctgggaggccaaggtgggtggatcacgtggtcaggagatcaagaccatcctggccaacatggtgaaaccctgtctctagcaaaaatacaaaaattagctgggtgtggtggcacacgcccatattcccagctactggggaggctgaggcaggaggatggcgtgaacccgggaggcggagcttgcagtgagctgagatcacgccagtgcactctagcctgggtgacagagcgagactccgtctcaaagaaaaagaaaaaaaaaaaaagaagctgttaaatgagactttctccctgagtctttggagaaacagcaagaaaactgaaagggtttaagtgtatcacaattatgattcaaagttatgtcatacggtatctggagaccctaaaaccctctggcactcagccattgttgtacatggtatatttcagaaaacactgacctcactgacctactccaactttctcttcttattttacagataagaaatttgaagcccccgcaaagggaggtgacttgtccacaatctcacaggctcagtggcttcagccagacttggaacgcaaccagaagttctaaggcatcatgtcacttttgtgggggaaatgtatgaagatgaaaagtttcaaggacacctatggtggaattttaggcatatggcaatcactagggacacccatgtggaaggaaaggaggcaggcatggctcatgtcattgctgtgggccccacatcagtgctgggggtcagagacggaactcatcagaactatagcaaagaggccgggcacagtggctcacgcctataatcccagcagtttaggaggccaaggtgggcggatcatttaaggtcaggagttcgagaccagcgtggccaacttggtgaaaccccgtctctactaaaaatacaaaaacattagccaggtgtggtagtccacacctgtaatgccagctactcagggagctgaggcaggagaattgcttgaacccgggaggcagaggttgcagtgagccaagatcacatgccacttccctccagcctgggcagcagagcgagacactgcctcaaaaaaacaaacaaacaaacaaaaaaccaaacctataggaaagagaaaagcagccttctgggctcagaaatctgagtagaaagatgttctgagcctggagaaagaaattcataaaagcctgactctctctccagaaaagagtacatttctgcatttaattttgggaggttggtcaccattcttttcctcgcttctaaataaatgcttatatagcatttatattccagtcactttacaaatattgtcatttaattctcatgcaaaccaacgaggtaggaactattgttatccccattttacagatggggaaactgaagtacaaagagctgaagtaacttttccaaaatagatgtggttttgaacccaagaaatgtgatacaactatgacatgaggcagtcccaatgcattgaatccttatgactgcaatgcaagggaggtataattaactgcattttatagatgcagaaactgaggcttgaggctatttggtgtttctggtgtagatctaggagccaaactccagcctacctagactctttgcctctgctgtacccctggaccatgtgttaggaattcttggtacagggtggtagtgctcaatatggtagtggttttagtctgttttctgttgcttataacagaatgtctgaaactgaacaattttgaaagaaaaggaatttattccttacagctatggaggataggaagtccaagattgagggggcacttctggtgagggccttattcctggtctctgaagtgtctggaggtggcacagggtatagcgtggagaggggactgggcatgctgacatgctatgctttggtctctcttcctcttcttataaagccaccagttctcctcctgtgaaaacccacaaatccattaatccatgagtgggttagtccattcataagggcagaggcttcatgatccaatcacttcttaaaagtcccaaccgctcagtactgccacattgggggattaagtttccagcacatgacatttgggggacacatttaaaccatagcagtagccatttgccacatgtggttattgagcacttcaagtatggctaatgtggctagtgtgactgagaattttttattttattgaatattttaatttttttttttttttttgagatggagtctcactctgtcgcccaggtcagagtgcagtgtcatgatctcggctcactgcaacctccgcctcccggggtcaagtgattctcctgcctcaacatcccgagtagctgggattacaggtgtgtgccaccatgcccggcaaatttttgtatttttagtagagacagggtttcactgtgttagccaggacgatcttgatcttctgacctcatgatccacccacctccgcctcccaaagtgctgggattacaggcatgagccactgcgcccagcctcacattatatttctattggaacacagaatggtctagagaattgggatttgacaaacccagctgtgacaagtcaccaaaatttgggggccatacccagggtgccgttcctgtcacgatacccataggtccatgtggaggctgcagggatacaaagctcgtgaaatatcccaggatggcatgggcactggagtcagctgccccaagttcaaatctgaaatcagtctttttgttttttttttttttttgagatgcagtttcactcttgttgcccaagctggaatgcagtggcgcaattggctcactgcaacctccgcctcctgggttcaagcgattctcctgtctcagcctcccgagtagctgggattacaggtacatgccatcacgcccggctaaatttttgtattcttagcagaaaccgggtttcaccaccttagccaggctggtctccatctcctgacttcaggtgatccgcctgcctcagcctcccaaagtgttgggattacaggcgtgagccaccgcgcccagcctgaaatcagtcttatacgaccagctgggtggtcttgggtaggtcccttaccttaactcttcttgtctgcagaatggaggtgacttactgtttttctctgtctccctttcacatctttgcactcttcaccccttctcttccctcagcttttagtttaaacatcacctttctgataagccctgctgaaaatggccaccctcagtcatgacggagaacaagtctttcctattttattcaagaaaatgcatgatgcaatctattttaaatgatcatggttttaattttattttcctgataatggtctatctctccactgatttataagatttgtaagagcaggggtggatcattctggtcactgctgagtccccagcatttagaacaggggctgacacagcacaaaacaacgttagttgggaatgtacaagcaaacccagcacaccttcagaggggtgctcaggaaacagccctcccacctttcttcacccctcacagctgtgggatcttcctaaccatttcggtgtcccaggatagaggatgagtttattcacccctccccagcaggggagttgccaggattaaatgagatcccagaatgccctggtataccctgaaggctctgggacacaggtgagctggtccccagggatttggaaacaggaaaacaaatatgactccaccctgcctcccatccagcctctgcctagaggagttattttattttattttactttttttttttttttgagacggagtcttgctctgtcgcccaggctggagtgcaatggcgcaatctcagctcattgcaactcctgcctcctgggttcaagcgattctcctgcctcagcctcccgagtagctgggactacaggtgtgttttttgtatttttagtaattttttgtacttttagtagaaacgggtttcaccgtgttagccaggatggtcttgatctcccgacctcgtgatccacctgcctcagcctcccaaagtgctgggattacaggcataagccaccacgcccagcctctagaggagttattttacttacttacttatttatttattacacaggatctcactctgtcacccaacctggagtgcagtggcacaatcacgtttcactgtaacctgaactcctgggctcaagtgatcctcctacctcagcttcctaagtagctgggaccacaagctcgtaccaccatgcccgctatctttttctctttgtaaagacagggtcttactatgtcatccaggctgttctcaaactcctggcctcaagcaatcctcccgtcttggcctcccaaagtgctaggattacagacatgagccagctcacccagctgaggagttattttttgacactggtgaattcagatcaaaagggatttctaagaaaggtgctggacccaggccgggcgcggtggctcatgcctgtaatctcagcactttgggaggccgaggcaggtggattatctgaggtcaggagttcgagaccagcctgaccaacatggagaaaccctgtctctactaaaaatacaaaattagccaggcatagtagcgcatgcctgtaatcccagctacttgggaggctgaggcaggagaatcgcttgaacccgggaggtggaggttgcagtgagccgagatcgtgccatcgcactcaatcctgggcaacgagtgaaactctgcctcaaaaaaagaaaaaaaaagaaaggtgctggacgcctaggacgcagaggggtgtttcaccccaaatcaagtagcaccaagccctcccaggccttgggtgcaagcatattaaaggcctctttccctctctgtctccattgtttacactccactgagcatccgcaatgtgccacacactgttctaagcgtcttacacatattaaattatttaatcctcacaacaactttatgaagtgagcgcaattatgagcccattttatggagcaggaagttgaggcagggttttaggtagcttttctggggtagcactgtgggttggagcggaggtggagtgcactcttaggccagctggctctaggggctcttcaccactaggccgcactgcctctagcaaagggacgcggggaagctcagcagaccttaggcctcccaagggcgccacggtggttcctttgagcccagagtcagctcttaagtccataggccttcctgaagcttctgaaccacttgcccatagctgggcctcaggctggctctcagtagaatgtggagaatggagattcccgcatgtccacttctcctaaaggttttataaggcagtgctgggaatgtgctttataaaaaaggggaagcaccccgacaacagtcactgtttgctcttttaagcaccatcctgagaaggaggaatgttcttcccatttcataggtggggaaaccgaggctcagaagagcaaatttttggccgggcgcggtggctcacgcctgtaatcccagcactttgggaggccgaggcgggtggatcacgaggtcaggagatcgagaccatcctggctaacaaggtgaaaccccgtctctactaaaaatacaaaaaattagccgggcgtggtgcgggcgcctgtagtcccagctactcgggaggctgaggcaggagaatggcgtgaacccgggaggcggagcttgcagtgagccgagatcgcgccaccgccctccagcctgggcgacagagcaagactctgtctcaaaaaaaaaaaaaaaaagagcaaattttttttccaaggtgatagggagagtccgtggctgatgtctgcactgaccagacgcccctagggggccagcgagggcgggtcccaggtgcagcggatgcagaggagagaggcccgggcgcggcgcgggggatggtgcgatcccgggcccgagggcatcagacggcggctgattagctccggtttgcatcacccggaccgggggattagctccggtttgcatcacccggaccgggggattagctccggtttgcatcacccggaccgggggccgggcgcgcacgagactcgcagcggaagtggaggcggctccgcgcgcgtccgctgctaggacccgggcagggctggagctgggctgggatcccgagctcggcagcagcgcagcgggccggcccacctgctggtgccctggaggctctgagccccggcggcgcccgggcccacgcggaacgacggggcgaggtactcggcggggtgcggcctgcggactcgcccggaggccggggggcgggagggggcggccggggaagggggcgccggaagcctctgggcgtctgcgtgttgccgcgtgttacacgcacgcacgccccttacacaccttttcacagaccccgccgtcggggcgcggccaggtcagatcccttttgatccgggcctgggctgagtgctccccccgggcttcaggtgacgcggccccgcggagcgtggggtcgcccgagttgggctggggaagccagggacggaggtgtccggccgtcacccctagaggagggcgtgcgggggtctgttttgcgtgagtgcgggataggggagtcgtgtggtgcggtgaggggcttgtggggggcactggaggactctgggggtggcgggggatccgagggggtcctcgtgaacccgcaggggagagtcctgggtgagggtgggtcccgagcacctgtgtctcaggagatggtgagagctgtctggagggctgggcacttggtggcaggggttggcggtgcaggggacaccgccgggacagggctggggtgccctggagcgggggagccgagggagtgggagcgggggcgcagcgcgcgatctctggcccggcagggccgctggttctccccagtgcgcggctccgggtttgcaggtggacggtgcgcgcgtgtctgcggtgtgtgctgtgcctgcagaccggggagggcgggggacgacagccacctccttccctctgcctcacccccctcctgtcccagggccgcgcttcaatttccgctgaaacttctgactcggacacccgccgcctttcgcttgggctcccacgggaggggcctggctgcggggggcggggcggggtgggggtgcggccttgctcgggtagaccatgggtgtgacagctgggagggctgtgtgtgtgtgtgtgtgtgtgtgtgtgcgtgcgcgcgcgcgcttgcgcttgatgtaacccgccctcatttccctgggtcccgagtgtggcagggaacagcaagaggtagatattaggggctgctttcattccacatcacagattctattctgcagtgtggtctgcaaaatgccttgcccaagatgtatagactcagttaccgcatctgtccccatctgggtggagcttatcccaggccccaacaggctctgagggatggccggggccaaggcagcctggactactgatgtggcacaggccagagggactccaggcagtctcctgctgcacagggcacaaagcatgtgcacagccaggtatcatcctgcgtgactcagaacagccttgagatgtaaggagtgtcatcccagcctcgaacctggggagctttctaagactcccaaggatggtacttatgcatcttgctgtgaagaataacaggatgagtgctaataatgaccatttcctgacacctacctggcaacaggtccataagctctacatgcttcatttgtgttttcatttcatcatcacgaaaaacctgtaagctttgcatcctgttcccactttacaggaactgaggctcagaaagcttgaggaacttgaccaggggtaccccccagctagaaagggtttgagacaggattagaacccaggaatatctgactacagccactccttactgcattcttaccaagccaaagtcatgacctttcactcatgtggggaggccttcccttccaaggcagctcttccatttgggagcagcgtacttggagaggtgggcctctgtctggtaactgactcatgttgccttgttaatcctgccttgaactgttgggaaggtctttaaccaggctgaggtctctcgcaccaatgcccatacctgggcatgcacctccttggaatggagtttaagtgggtgggcagatgggttctagagagaacccgtctgccctgaccatgccctactgccctctccttcagccaccacacacacagtcacacagctgcgtgaatggtggctttcctttcacttaacagttcactctggagatccttccaattaccctataaagagcatcctcaaccttttaaatggctgcacattgttccgttgtgtggatgaagtataatttatgtaaccagccctgtaattatagacagccaattatttctgtcaaaagggctgcaggaataactgtgtatttgcatgcttacacacacacacctctacagaataaattcttagcaatgggattaattgctgaatcaaagctcacacgcttttcatcgttgtttttgttttgttttgttttgctttgttttgagacagtctcactttgttgcacaggctagagttcctgaccatggctcactgaagcctttaccttctgggctcaagtgattcccctacttcaacctcctgcatggctgggactacagctgtgtgccatcatgaccagataattttttttttcttagggacagggtctcgctacgttgcctaggctggtcttgaactcctgggctcaagtgatcttcctgcttcagcctcccaaagtactgggattacaggcatgaagcactgcacccagcctgtttttcattttgatattgtcaaaatgcactcctcagaggtggtaccttttatcctcccactagcactgtcttcattgttagtggctgcactgccactattccacagtataaacccacttttcatgacactgccaagacataagggtctgaaatacttaacagttttcttccacagtccccaaaatacaggcttctcccccagctcaggacatgaagccatcatccctcctcattgcaggagccaaaggctggacctcacctcgattccaccctctccttcacccctcacatccaatccatccagtccatccagtctgccactgagtcctcttgatcttcctcctatgagcccttaacttcgcgtctccatctagcaccccctagtccaggtcaccttctcctgcctggactcgtgcttgtgtgggcctcctagctagtctcactgccccgtcttgtactttcaaatccaccctaaaagcatgatgttcccctgctgaaatccttcagtggctccccactgcctttggataattccaaatcctattgtgtgttaattaggattaggctcagctgtaatatagaaacagccacttaatagctaaaatgaaatagacgtttttttcttctttttctctttttttgagacagagtcttgctctgtccccaggctggagtgcagtggcgagatctcagctcactacaacctctgcctcccaggctcaagtgattctcctgcctcagcctcccgagtagctgggactacaggcatgcaccaccatgcccacctaatttttgtatgtttagtagagatggggtttcaccatgttggccaagatggtctcgatctcctgaccttgtgatctgcctgcctcggcctcccaaagtgctgggattacaggcatgagccactgcgcccagccttcaatagatgtttatttctctcctgtgtaaaaaacctggaggtctggcctgacaactccatgtgtcagggacctaggctcctctcttgctctactgtatgtggtacttctgaagccaaggtagatgctggagctccagcagttaggtccacattccagcatacaggaaaggaggaaatgaggaagttgggccctccctttaagaacactgtcctgggcattgtacacaacacttccacttgtgtcctactagccatatgctgatacaaggatacaagggagacaggaaatgcagtttattctaggtgtccttgtgctcagctgaaaatctcaggttctaatcctatgtaaggaggggagacctgaaactggggaccactaaccacctctgccatatgatgctcgtagagcccttcacaatagggcctctactaacctcaccttatttttatttatttatttatttttgagacggagtttcactcttgtcgcccaggccggagtgcaatgacactatctcagctcaccgcaacctttgcctcctgggttcaagcaactctcctgcctcagactcctgagtagctgggattacaggcgtgtgccaccacgcccggctaatttttgtagttttagtagagacggggtttcaccatgttggtcaggctggtctcaaactcctgacctcaggtgacctgcctgcctcggcctcccaaagtgctgggattacaggtgtgagccaccacgcccggcctattttttttttttttttaacttttcacttttttttgcagtcacgctcattctccaccgtgttcttggggaacatgcagcatgttcttttgcctcttccctcaccccagaacaggggttactggacagcggcatcaacttcacctgggaactggatagaaatgcagattcagaccttctgaatgagctactttgggagtagggcccagcaatgtatgttgaaacaggcctccagatgatctcaatgcttgctcaagtttgagaaccactgaaccgcagtatgactctccgtgtcacctggctaactctgcctcactttcaggtctcagtgtagacaccacctcttctaggaagacctctcttgacccaccagcccaggagagaggcctctctgggttcctagaggcccatgcttctctgtatagtagggctgatcacactgtatgtgatttttttttttttttttgagagagtctttactctgtcaccaggctggagtgcagtggcacaaacatggctcactgaagcctcaacctcccaggctcaagcaatcttcccacctcagcctcccaagtagctgggactacaggcatccaccaccacacccagctaattaaaaaaaaatttttttttgtagagacagggtctcactatgttgcccaagctggtcttgaacttttgggttcaagcagtcttcccaccatggccttccaaagtgctaggattacaggtgtgggccactgcacctagccttggacgtgattttattactcatctgccctccaaattgactggaagatcctgacggcaagactgctgtctaacctacttctcttcctagcacccagtgttaagtgaatgaacaagatcatatctctcatctgtgaatgtacgagagccatggattatgagattagttgattttcttaactataatttttagaaacaagctgtgtttttaagcaggtatttatttccttaaatgtacatttctgattacaaaatacttttttttgagacagagtcttgctctgtcacccaggctggagtgtagtggcacaatctcggctcattacaacctctgcctcctgggttcaagcgattctcctgcctcagccttcccagtagctgggattacaggtatgcaccaccacgcccggctaattttttttttctcccgtgacggagtcttgttctgttggccaggctgaagtgcagtggtgtgatctcagctcactgcaacctccacctcccgggttcaagtgattctcctgtctcagcctcccaagtagctgggattacaggcccacgccaccacgcctggctaatttttctatttttagtagagatggggtttcaccatgttggccaggctggtctcaaactcctgacctcatgatccaccaccttggcctcccaaagtgctgccgtgggctgcactttggcattgccttggtcacgtgctgctacctgggattacaggcataagccactgcgcctggcctaatttttgtattttttagtagagacagggtttcaccatgttggccaggctggtcttgaactcccagcctcatgattcgcccaccttggcctcccaaagtgctgggattacaggcgtgagccaccacgcctggccaggaaatacatttacatggctcaaattcaaaactataaaagtcggccaaacatggtgactcacatctgtaatcctaacactttgggaggctgaggcaggaggattgcttgagctcaggtgagaccagcctaggcaatgtagggagacccccatctctacaaagaataaaaaaaaattagtcaggcatcatagtgcacacctgtagtcccagctacttgggaggctgaggtggaagaatcacctgaaccctgaggtcgaggctgcaagtgaactgtaatagtaagagtctcctcctaatcttgtgcatcctttcagagagagagatgatagatattcaaacaaatacatacatatatataacatatttatatatattctttttaacataaaagtatagccaggtgtggtggttcactactagagtcccagctacttaggaagctgaggtgggaggttcacttgaggccacgagtttgagaccagcgtgggcaacatctcttggggaaaaaaaaaaaaaaacccaccataaaagcattctataacacgtaattctgtgtttgtctttcttctcttaatacatcttggagatcagtacgcatcagtatatagagagcttccttgtcctttttcagggctgtgtagtattctgctgtatggctataccatgatgttttcactagctttctactgcctgacatttgggatatttcctgcttttgctattggacacaaggctctgatgaacagcctttactatatttaatttttttgtgagaagtttaactggaagataaattcccagaagtggggcacccagttaaggatatgtgactttgtcattttaacacacactgccagatcaccccctataaatgttgtgccacgtatcctcccaccagcaggggaaaggaggggccaccaagcagtctcactttagtgcttttctctcctttttaccagatgcgagccacccctctggctgctcctgcgggttccctgtccaggaagaagcggttggagttggatgacaacttagataccgagcgtcccgtccagaaacgagctcgaagtgggccccagcccagactgcccccctgcctgttgcccctgagcccacctactgctccagatcgtgcaactgctgtggccactgcctcccgtcttgggccctatgtcctcctggagcccgaggagggcgggcgggcctaccaggccctgcactgccctacaggcactgagtatacctgcaaggtacgtgcccatgggcggctgtcccccagcaccacaggaggcctgggaaggaggcctccaaaggattgccagggtgcagaggggtccttatgttcattcattcttgtgtttgtttagtggggaagcatccagggagcccctgctggactgatactagagaggtaaaccagaggtcgtcccagtcctgggggagttcacagcttaggccctacagtgtgataaatgctgcaggggtagaacttagggatcatgggcgcagaaaaggccgagcagaagttagccaggtagaagtgggagatgggagttgcaggcagggggaacagctgttcaaaggcctagaaaagtgaggggatagcactttagagaatgaaaaggacttctctgtggccagagtggagaggatgtgcagaaaggggcaggagatgaaggttggcagcagctggtcatgaaggtgttaacaaggggcctccactgggctgtgcggagctactgaagatgtttgcacaagagaagggtagggcatggtagacatcaaaactcctgggacctcggaggtgatcgagcctaacctggggccattttacagataggaagactgagatgaagacaggagaagggccatgcgtgaagtcacatagcactgggcctggctcctggggtaaactaaggggtagaaaagtctgaggattcctggcagaaaccaggaaatggacagggtcaaggcccctgagggtcagcccatgcaggacactgacaagtgacagtccaagaagacagagatgagaataaaaagtgtaacaataggtattcactgtgcaccaggtactatgatgattgcttagtgtgcacaatctcttttaatcttgacacaaccaatgaggtggtttctatcattgtgccccttttatagatagaggacactgagactcagaaagccatggttacttgccacatgacagagccaggtggtatcagagctgggattgggcccaggaggctgagcccagagagtcctgtgcccgtgctaggataagcgtttcacacaatcagggcaggctgccctggcaggcaagcataaggaagataagggggacctggaaacccaagggagagtagcgggggcctgggtcccttgggaatgcacagagaagcagaaggacttaagcctcctcctggggcagcagcagagctttgctctgttgacggagatgcagtgaacagcggggcagatccagacagggtccagcccctagcttcacctggcctcttgtgcacagatctccagcgcccttaccaggtgccctaaggagcccagaactctgggtccccttcctgcagcatcacaggctcttttccactcccgctggggaggtgagtccatgataagaggaataacccaagcaggctcaggagagaagcgccatgcgttcacagggccctgattctcaagaaacatttgggaaaatccactggaacatactcacccctatgccaatgtgcaccatgggtgctgaatggtcatttccacacttcctcagcttttctggtcagtgtgtagaaagatcaaaatcttgtctttgtaaatgatcaacttattcattaattcaacacaacttcattgagcacccgtatttgccatgtaccatgctgtggttaaaaaacaaagttctgttctcatcaagctgacgttctagtgggagatacagacactaaacaagcgaataagtaaaatacgtgtcaggtggccgggcgcggtggctcacacctgtaatcccagcactttgggaggccgaggtaggcagatcacctgaagtcaggagttcgagactatcctggccaacatggtgaaaccttgtttctattaaaaatacaaaaaattagccgggcatggtggcaggggcctgtaatcccagctactcgagaggctgaggcaggagaatctcttgaacctgggaggtggaggttgcagtgagccgagatcacaccactgcactccagcctgggcaacaagagcaaaactccgtctcaaaaaaacaaaaaacaaacaggaaaacccttattccagcatctttcttggttcctttgcaatgcttatcagcatttgtcaatatttggtttctgggcatgtttgcatggcctcccagtgggcaccggagagcagagcccatggctgtcagtctagctggacatgtggctggcccgtgcaggcccagggccagcatactgaatgaatgaaagcgtgggtgggcaaagaggacgggagctgtgacggtgatgagcatcaggtgccttctgcatcatccgcccttccggattcctcctgctttgtgggttatttttctgtttgggtgacctgttacttttcagttatccgatgtttgaggccatatagcgtagcagttaagagcacagacaaaaggccgggtgcagtggctcacacctgtaatcccagccctttggaaggctgaggcgggaggatcacctgaggtcaggagttcgagaccagcttagccaacatgatgaaaccccatctctactaaaaatacaaaaattagctaggtgcggtggcacatgcctgtaatcccagctacactgggggctgaagcgggagaatcacttgaatccaggaggcggagtttgcagtgagctgagattgcgccagtgtgctccagcctgggtgacagagcgagactccgtctcaaaaaaaaaaaaaaaaaaaaaaagcacagacagtggagtgcatacgtgcaaatctcagccgtgctgtttgctggctgtgtggcctctcagcttcgttaaccgtaaaatggagcaagtcatcctaccttataggaccatggtcagggctgagtgactcggtcagtgaagcgcttggtgcgatgcctagcacatggtagtgtctaataggtcagctgtgactgtttgcaatgccagcctcagctcccgggagtccccagctgtgctaacaccatgctctgcccacaggtgtaccccgtccaggaagccctggccgtgctggagccctatgcgcggctgcccccgcacaagcatgtggctcggcccactgaggtcctggctggtacccagctcctctacgcctttttcactcggacccatggggacatgcacagcctggtgcgaagccgccaccgtatccctgagcctgaggctgccgtgctcttccgccagatggccaccgccctggcgcactgtcaccagcacggtctggtcctgcgtgatctcaagctgtgtcgctttgtcttcgctgaccgtgagaggtgagtgtggtctcagagaccccagccacagacacacccagggggtgggccatgatggagagaaaccgaggcccaggaaggcaaggtaacttaggcaagaagtgggagaaactgaagtaaccagcagcccctgtttagttccctgagaagagttgactcaggccaggtgcagtggctcacgcctttaatcccagcactttgggaggccgaggtgggtgaatcacttgaagtcaggagttcgagaccagcctggccaacatggtgaaactccgtctctactaaaaatacaaaaattagcctagtgtggtggcgcacacctgtaatcccagctactctgaaggctgaggcaggagaactgcttgaacctgggaggcggaagttgcagtgagccaagatcacgccactgcactccagcctcggcaacagagtgagattccatctcaaaaaaaaaaaaaagagttgactcagtcctcttgggagccccttgggattctgggatggagcactgagatgtgaaagtcatagtagccgacagtgacgaaagcatcgccacattatctaacgtggtcttccatccttacaaacacgaggcaggtactgttattatccccatatgatcaaggaaactgaggcccagagagctcaagtaacttgcccaagatcccatagcagaataaatggtagagctgggatttgaacctagatctgactccagagcctgggtcttaattcaatctgagcttgagaggcaggggcctggctgggcttaccaactgactttgggtgacctagtgtctctgagcctcagtttctccgttggtaaggaaaagggctggattgttagggtgttttcaggattccaagaccacagccaaaatagggtctgaggttccccacacgggaacgttttctgtgaaactgagaattagcactttttggttaaaagaatcttccttctctaggttgggatgctaagaatttttttttttttaattgagacagagtctcactctgtcacccaggctggaatgcaatggcgcgatcttggctcactgcaacctctgctgcctgggttcaagtgatacgcctgcctcagcctcccgaatagctgggactacaggcatgcgccaccatgcctggctcattttttctatgtttagtagaaacggggttttgccatgttggccaggctggtcttgaactcttgaccttaggtgatccgcctgcctcggcctcccaaagtgctgggattacaggtgtgaggtactgcacccagcctagacgctaagaaaaatttttaaaagataattctggggagaagggcagagagactcgcctcctgttccctctccagattcctgggggcagtcaagatgtgtcagggagtgcactaagctgccagttacacaggagttttctgtggagaaaggagtgtgaccccatggcattttaaaaaactttttatcttgaaataattttagacttttagaaaacctacaaaaatagttcaaagagtttctgcatatcctttaaccagtgctctccaatgttaacacctgacgtagctatggtacaattacccaaactattaactaagccacagattgattcccacttcccgagtttcccactaacaccccttgctgtgcaggatccagtgaggatcccaatttagtcatcagtggtttccttggtctcttccaatctgagacagttcctcagtctttccctgtctttgaagacccatgaccttgacacttttttttttttgagacagggtctcactctgtcacccaggctggagtgcagtggtgtgatcacagctcactgcagcctcaacctcccgggctcaagtgatcctcccacctcagcctcctgagtagttggttctacaggtgtgtgccaccccacctggctaattgagatggggtcttgctatgttgcccaggctggtctcagactcctgagctcaagcaatctgcctgcctcagcctcccaaaatcctgggattataggcgtgagccactgctcctggccataaccttgagacttttgaagagtactgatcagttactttgtatgtccctcaatttggatttgattgatgttttctcacagttagattgcagttatgtatttttggcaagaacaacacagaatcgataggcccctctccacatcatatcaagagatacttgagctgatagtcattcctatgtcgtgaccttgatcacttggttagggcaggacctaccaggtttctctactgtaaggtcctaatttaccctttgtaattgacaaataccttgggggaggtaagctaggcatataaatatcctgtttttcctcaactttcacccactaattttagcagccatccatcttgcctatagcagttattattgtggtgcttgcctaagtctaattttctttttcttttttttctttctttcttttttttttttttttgagacagagtctcgctctgttgcccaggttggagtgcagtggcacgatctcggctcactgcaacctccacctcccgggttcaagtgattctcgtgcctcagcctcttgagcagctgggattacaggcacacaccaccacacttggctaatttttgtatttttagtagagatggggttttgccatgttggccaggctggtctcgaaatccgcctgccttggcctcccaaagtgctgggattataggcatgggccgctgcgcccagcccccaaggctgattttctgttaatatttccttctacattttatattagaacaagcatgccttttttaaagaagtaacatttataatgatgtttaagctagtacataacttcaaacacattttaggcttagggtagatacaactaccccggacctcctggaggagacagcgtgcttcctgctcttttcaagaagtcacttgatggcccacacctgttatcccagtgcttcgggaagccaaagtaggaggactgcttgagcccaggagttcgaggccagcctaggcaacacagaaaaccccatctgtacaaaaaatttataaaaattagccaggtgtggtgatgcacacctgtgatcccagctacttgggaggctgaggcaggaggattgcttgagcccagaagtttgaggctgcagtgaactaggattgcaccactgcactccagcctgggtggcagagtgagaccctatctctaaagaaaaaaaagaaaaaaaaaaagaaaaatcacatgagagtcattggtagaagagggaccgtgagttagatagacctgtgtttaaatcctgggttctgcttcttacctgctttttggccctgagcaaatgacttcacctgcctgagcctttgtttcttcatctgtaaaatgggctaataatgctgacaccccttgtcccccaatactgtgattcataggattggtcagtatttgtgaaatgccactggacacccaggaagtaatgccataaagaagaaactaatagcagtggtaatagaatgattactattaaagtcatctttgagtgctcagtggaagttgtttaaagtagaaattgcaaatggcaggacacactttttttttttttttgagacagggtctcactctgtcacccaggccggagtgcagtggcgcgatctcagctcactgcaaccgccacctcctgggctcaagtcatatccttctgcctcagcctcccaagtagctgggactacaggtgcgaatcaccatgcctgctaattttcgtattttttgtagagataggtttttaccgtgttgcccaggctggtcttgaactcctgaactcaagtgatccccctacctcggcctcccaaagtgctaggattaccggcatgagccaccgcgcccagccttacacacttttttttttgccctgcttacctgtttgtgttttttatataaactggttgccaatattttttaaatggggaccttttcattaaaatacaattcctggcttctcttggggaaaacaatgggaatgtggggccatcttgggaactgcgagggtgggtcacagcactggctctgagtatctgccagccagcgttcccatcccaggcccatgctctacagctgtaaaatggtgtcttccttgcaggctgtagcctagatagaatgaggtgagccaggtaatgagctgggtcaagggccaggaacacagcaggcacttggtaaaccctagaatgcgttgtgtaccctttttaggtagcgcttgtgctgagatgtcaggcacacttcctgtttctctcatcttattacctgcctggaccctaagtttgtagctggtttaagagaggcttaaccctctcagccccatcagccccctccccaagggactctgttgaaaaatgtattcctttcagaattttagtttaaatttaattgctctgtggccttaaatgacttaacctctctgagcctgggcttgggtatctgtaaaacaggatcagacatcacaggactggcttgtgtctgtcaaaggccagcaggcacttggaaagtgggtgccacaagggtgatagcatggggtggtggcatgggggttctgggtaggacctgacccttctgtttctccccatgtcccaggaagaagctggtgctggagaacctggaggactcctgcgtgctgactgggccagatgattccctgtgggacaagcacgcgtgcccagcctacgtgggacctgagatactcagctcacgggcctcatactcgggcaaggcagccgatgtctggagcctgggcgtggcgctcttcaccatgctggccggccactaccccttccaggactcggagcctgtcctgctcttcggcaagatccgccgcggggcctacgccttgcctgcaggcctctcggcccctgcccgctgtctggttcgctgcctccttcgtcgggagccagctgaacggctcacagccacaggcatcctcctgcacccctggctgcgacaggacccgatgcccttagccccaacccgatcccatctctgggaggctgcccaggtggtccctgatggactggggctggacgaagccagggaagaggagggagacagagaagtggttctgtatggctaggaccaccctactacacgctcagctgccaacagtggattgagtttgggggtagctccaagccttctcctgcctctgaactgagccaaaccttcagtgccttccagaagggagaaaggcagaagcctgtgtggagtgtgctgtgtacacatctgctttgttccacacacatgcagttcctgcttgggtgcttatcaggtgccaagccctgttctcggtgctgggagtacagcagtgagcaaaggagacaatattccctgctcacagagatgacaaactggcatccttgagctgacaacacttttccatgaccataggtcactgtctacactgggtacactttgtaccagtgtcggcctccactgatgctggtgctcaggcacctctgtccaaggacaatccctttcacaaacaaaccagctgcctttgtatcttgtaccttttcagagaaagggaggtatccctgtgccaaaggctccaggcctctcccctgcaactcaggacccaagcccagctcactctgggaactgtgttcccagcatctctgtcctcttgattaagagattctccttccaggcctaagcctgggatttgggccagagataagaatccaaactatgaggctagttcttgtctaactcaagactgttctggaatgagggtccaggcctgtcaaccatggggcttctgacctgagcaccaaggttgagggacaggattaggcagggtctgtcctgtggccacctggaaagtcccaggtgggactcttctggggacacttggggtccacaatcccaggtccatactctaggttttggataccatgagtatgtatgtttacctgtgcctaataaaggagaattatgaaataattttatttttctctgcaatttcttccatcctttccaacgatctcttaccagtttttcctgccttcaaaactggcccccatggtgaaaggccgtagagttgtgtcttaacctgggctgagtggtttgtgagaacagattacctggagcccagtgggtcttcctgcactccttctgtttcttctggcagcagcagtgtctctattagggtactttctgagtcaaaatggcttcaacaagatggaaatatgtttcacacaaaacaagaagtcagcagatagggtgggcttcagtgctggtccattcaactcccaaagctgcgcacagggaccccggctctccaggctccttctgtctcttggctgtattgtctcgagactgctggcccaatggctacagcaggtgtcacattaaagaggtccatgaccagaggaagaagccaggggtcattgtagtacctgagaactcagaactctggagtcaggctgcctggaattaaatcctggctccagcactcaatagctgtttgacccttggcaagtttcttaaccactctatgcctcagattcttcatctgtgaaatgggggacaatgatagtacctaacttatgagaactaaatgacttattttgtataaagcaattagaacaagcagcgcctggcataataagcccacaataaaagttactcccggctgggcacggtggctcacgcctgtaatcccagcactttgggaggccgaggtgggcagatcacaaggtcaggagttcaagaccaacctgaccaacatggtgaaaccccgtctctactaaaaatacaaaaatttttagtagagacggggcgtggtggtgcgtgcctgtagtcccagctactcgggaggctgaggcaggagaattgcttgaacccgggaggtggacgttgcagtgagccaagatc

SEQ ID NO: 200 - protein, 363 aa, Homo sapiens
MAHVLQKPKHSGTHSIVQEFQVPDYVPWQQSKQETKPSTLPPVQQANSLHTSKMKTLTRVQPVFHFKPTTVVTSCQPKNPRELHRRRKLDPGKMHAKIWLMKTSLRSGRAALRELRSRENFLSKLNRELIETIQEMENSTTLHVRALLQQQDTLATIIDILEYSNKKRLQQLKSELQEWEEKKKCKMSYLEQQAEQLNAKIEKTQEEVNFLSTYMDHEYSIKSVQISTLMRQLQQVKDSQQDELDDLGEMRRKVLESLSDKIQKKKKKILSSVVAETQRPYEEALLQKMWESQDFLKCMQRFREIIDQFEENMPVLRAEVEELQAQTREPREVIFEDVLLRRPKCTPDMDVILNIPVEEPLPF

SEQ ID NO: 201 - DNA, 456 bp, Homo sapiens
tgggattacaggcgtgcgacctcacccggcctattgatccatattctgtaatcaaaatatcataagcctccataatgtagtggggcatacaaaaggctttcatccattcaggtgaaaggtgaagtttgggtgtggtggtgcatgcctgtaatcccagctacttgggaggctgaggcaggagaattgtttgaacctgggaggtggaggttgcagtgagcccagatcacaccactgcactccagcctggacgacagagcgaaattctgtgtaaaaaaaaaaaaaaaaaaaaggtgaggtttcagatgtgtatgttaatctactcaatctaattagtttattgaattgctacaatgtattcagtattgtgctttataatatggaggatgatgtctctgtgcttttgctcattcttatccttgacttcaaattgtttcctattattctagcctcatctgt

SEQ ID NO: 202 - DNA, 465 bp, Homo sapiens
cttccctccccgtgtccggtccccgtgcgtcccgaggctccccgccgcccgtcccggcgcgcaccgggcgtcgtgtccgaacgccttccagccacctgagccctcctgcgggcgactcgctcagctagcccgtgcccgcctccaccttctccgtcatcacctactataaagccaaggtctctgaagaagagaatgacattgaagagcagcaagatgagtttttcagcggtgacaatggagtggatttgctgattgaagatcagctcctgagacacaacggcctgatgaccagtgtcacccggagcctgcagccacccgtcaggacacagcactgctgtgacaagcgacctgaacgctcggaccgcaccctggtcctcagcactgccacagccctcgacctcagatcccagcatcgccaaccatgcctcagtgggaccaacactccaaacaacctcggtgtctccg

SEQ ID NO: 203 - DNA, 462 bp, Homo sapiens
aagagttgggttttcttttttaattatccaaacagtgggcagcttcctcccccacacccaagtatttgcacaatatttgtgcggggtatgggggtgggtttttaaatctcgtttctcttggacaagcacagggatctcgttctcctcattttttgggggtgtgtggggacttctcaggtcgtgtccccagccttctctgcagtcccttctgccctgccgggcccgtcgggaggcgccatggctcggatgaaccgcccggccccggtggaggtgagctacaaacacatgcgcttcctcatcacccacaaccccaccaacgccacgctcagcaccttcattgaggacctgaagaagtacggggctaccactgtggtgcgtgtgtgtgaagtgacctatgacaaaacgccgctggagaaggatggcatcaccgttgtggactggccgtttgacgatggggcgccc

SEQ ID NO: 204 - DNA, 4071 bp, Homo sapiens
gagtccagccgctggtgcgcggagcggttcaccgtcttcggagcggttcggcccagcctttcgcccaggcgcccaggcccgctgcgcgcgtgcgtgagcgcgcctgcgccgccagggccgctgcaaggggaggagagcggccgcctcaggaggatcccttttcccccagaaattactcaatgctgaaacctctcaaagtggtattagagacgctgaaagcaccatggacgggttttatgatcagcaagtcccttttatggtcccagggaaatctcgatctgaggaatgcagagggcggcctgtgattgacagaaagaggaagtttttggacacagatctggctcacgattctgaagagctatttcaggatctcagtcaacttcaagaggcttggttagctgaagcacaagttcctgatgatgaacagtttgtcccagattttcagtctgataacctggtgcttcatgccccacctccaaccaagatcaaacgggagctgcacagcccctcctctgagctgtcgtcttgtagccatgagcaggctcttggtgctaactatggagaaaagtgcctctacaactattgtgcctatgataggaagcctccctctgggttcaagccattaacccctcctacaacccccctctcacccacccatcagaatcccctatttcccccacctcaggcaactctgcccacctcagggcatgcccctgcagctggcccagttcaaggtgtgggccccgcccccgccccccattcgcttccagagcctggaccacagcagcaaacatttgcggtcccccgaccaccacatcagcccctgcagatgccaaagatgatgcctgaaaaccagtatccatcagaacagagatttcagagacaactgtctgaaccctgccaccccttccctcctcagccaggagttcctggagataatcgccccagttaccatcggcaaatgtcagaacctattgtccctgcagctcccccgccccctcagggattcaaacaagaataccatgacccactctatgaacatggggtcccgggcatgccagggcccccagcacacgggttccagtcaccaatgggaatcaagcaggagcctcgggattactgcgtcgattcagaagtgcctaactgccagtcatcctacatgagagggggttatttctccagcagccatgaaggtttttcatatgaaaaagatccccgattatactttgacgacacttgtgttgtgcctgagagactggaaggcaaagtcaaacaggagcctaccatgtatcgagaggggcccccttaccagaggcgaggttcccttcagctgtggcagttcctggtcacccttcttgatgacccagccaatgcccacttcattgcctggacaggtcgaggcatggagttcaagctgatagaaccggaagaggttgctcggcgctggggcatccagaagaaccggccagccatgaactatgacaagctgagccgctctctccgctattactatgaaaagggcatcatgcagaaggtggctggagagcgatacgtctacaaatttgtctgtgacccagatgccctcttctccatggctttcccggataaccagcgtccgttcctgaaggcagagtccgagtgccacctcagcgaggaggacaccctgccgctgacccactttgaagacagccccgcttacctcctggacatggaccgctgcagcagcctcccctatgccgaaggctttgcttactaagtttctgagtggcggagtggccaaaccctagagctagcagttcccattcaggcaaacaagggcagtggttttgtttgtgtttttggttgttcctaaagcttgccctttgagtattatctggagaacccaagctgtctctggattggcacccttaaagacagatacattggctggggagtgggaacagggaggggcagaaaaccaccaaaaggccagtgcctcaactcttgattctgatgaggtttctgggaagagatcaaaatggagtctccttaccatggacaatacatgcaaagcaatatcttgttcaggttagtacccgcaaaacgggacatgatgtgacaatctcgatcgatcatggactactaaatggcctttacatagaagggctctgatttgcacaatttgttgaaaaatcacaaacccatagaaaagtgagtaggctaagttggggaggctcaaaccattaagggttaaaaatacatcttaaacattggaaagctcttctagctgaatctgaaatattaccccttgtctagaaaaaggggggcagtcagaacagctgttccccactccgtgttctcaaaatcataaaccatggctactcttgggaaccacccggccatgtggtcgccaagtagagcaagccccctttctcttcccaatcacgtggctgagtgtggatgacttttattttaggagaagggcgattaacacttttgacagtattttgttttgccctgatttgggggattgttttgttttggtggttgttttggaaaaacagtttataaactgatttttgtagttttggtatttaaagcaaaaaaacgaaaaacaaaaaacaaaaacaaaccttttggtaatgtgcactgtgtctttagccagggccgtgcaacttatgaagacactgcagcttgagaggggctttgctgaggcttccccttggccatgtgaaagcccgccttgttgcctgctttgtgctttctgcaccagacaacctgatggaacatttgcacctgagttgtacatttttgaagtgtgcagggcagcctggacacaagcttagattctctatgtatagttccccgtgttcactaacatgccctctctggaaagcatatgtatataacatgtgtcatgtcctttggaaacctggtcacctggtgaaaacccttgggattcttccctgggcatgactgatgacaatttccatttcatcagtttgttttgttttcctttttctttaaatcttggactttaaaccctacctgtgtgattcagtagggtttgagacttagctgtgatactgacaggtaagcaacagtgctagcattctagattcctgcctttttttaaaaagaaattattctcattgctgtattatattggaaaagttttaaacaaccaagctaaagctatgtgaaagttgagctcaaagtagaggaaaagttactggtggtaccttgctgcctgctctgctggtagaattctgtgctccccgtgacacttagtacattaagaatgactacactgttcctcgtatgtgaaggaggcagtgctgactccgtgagtgtgagacacgtgctttgaactgcttttctattcatggagcactccatagtctcaaactgtcccccttatgaccaacagcacatttgtgaagaggttcgcagggataaggggtgcactttatagctatggaaacatgagattctcctctattggaagctaattagcccacaaaggtggtaaacctgtagattgggccttaattagcattgtactctaatcaaaggactctttctaaaccatatttatagctttcttaacctacacatagtctatacatagatgcatattttacccccagctggctagagatttatttgttgtaaatgctgtatagatttggttttcctttctttacttaccctggtttggattttttttttttttttttttgaatggatttatgctgtcttagcaatatgacaataatcctctgtagcttgagctacccctcccctgctgtaacttacgtgacctgtgctgtcactgggcataggacagcggcatcacggttgcattcccattggactcatgcacctcccggatggtttttgtttttttcgggggttctttggggtttgtttgtttgcttcttttccagagtgtggaaagtctacagtgcagaaaggcttgaacctgccagctgatttgaaatactttcaccctgcgcagggccgtatgcatcctgccaagctgcgttatattctgtactgtgtacaataaagaagtttgcttttcgttta

SEQ ID NO: 205 - protein, 510 aa, Homo sapiens
MDGFYDQQVPFMVPGKSRSEECRGRPVIDRKRKFLDTDLAHDSEELFQDLSQLQEAWLAEAQVPDDEQFVPDFQSDNLVLHAPPPTKIKRELHSPSSELSSCSHEQALGANYGEKCLYNYCAYDRKPPSGFKPLTPPTTPLSPTHQNPLFPPPQATLPTSGHAPAAGPVQGVGPAPAPHSLPEPGPQQQTFAVPRPPHQPLQMPKMMPENQYPSEQRFQRQLSEPCHPFPPQPGVPGDNRPSYHRQMSEPIVPAAPPPPQGFKQEYHDPLYEHGVPGMPGPPAHGFQSPMGIKQEPRDYCVDSEVPNCQSSYMRGGYFSSSHEGFSYEKDPRLYFDDTCVVPERLEGKVKQEPTMYREGPPYQRRGSLQLWQFLVTLLDDPANAHFIAWTGRGMEFKLIEPEEVARRWGIQKNRPAMNYDKLSRSLRYYYEKGIMQKVAGERYVYKFVCDPDALFSMAFPDNQRPFLKAESECHLSEEDTLPLTHFEDSPAYLLDMDRCSSLPYAEGFAY

SEQ ID NO: 206 - DNA, 313 bp, Homo sapiens
  misc_feature (73)..(73): n is a, c, g, or t
  misc_feature (77)..(77): n is a, c, g, or t
  misc_feature (133)..(133): n is a, c, g, or t
  misc_feature (183)..(183): n is a, c, g, or t
ccgggaacaagccatggtggcggcgacggtggcagcggcgtggctgctcctgtgggctgcggcctgcgcgcanaggnagcaggacttctacgacttcaaggcggtcaacatccggggcaaactggtgtcgctngagaagtaccgcggatcggtgtccctggtggtgaatgtggccagcgagtncggcttcacagaccagcactaccgagccctgcagcagctgcagcgagacctgggcccccaccacttcaacgtgctcgccttcccctgcaaccagttttgccaacaggagcctgacagcaacaaggagatt

SEQ ID NO: 207 - DNA, 1560 bp, Homo sapiens
ctccataaggcacaaactttcagagacagcagagcacacaagcttctaggacaagagccaggaagaaaccaccggaaggaaccatctcactgtgtgtaaacatgacttccaagctggccgtggctctcttggcagccttcctgatttctgcagctctgtgtgaaggtgcagttttgccaaggagtgctaaagaacttagatgtcagtgcataaagacatactccaaacctttccaccccaaatttatcaaagaactgagagtgattgagagtggaccacactgcgccaacacagaaattattgtaaagctttctgatggaagagagctctgtctggaccccaaggaaaactgggtgcagagggttgtggagaagtttttgaagagggctgagaattcataaaaaaattcattctctgtggtatccaagaatcagtgaagatgccagtgaaacttcaagcaaatctacttcaacacttcatgtattgtgtgggtctgttgtagggttgccagatgcaatacaagattcctggttaaatttgaatttcagtaaacaatgaatagtttttcattgtaccatgaaatatccagaacatacttatatgtaaagtattatttatttgaatctacaaaaaacaacaaataatttttaaatataaggattttcctagatattgcacgggagaatatacaaatagcaaaattgggccaagggccaagagaatatccgaactttaatttcaggaattgaatgggtttgctagaatgtgatatttgaagcatcacataaaaatgatgggacaataaattttgccataaagtcaaatttagctggaaatcctggatttttttctgttaaatctggcaaccctagtctgctagccaggatccacaagtccttgttccactgtgccttggtttctcctttatttctaagtggaaaaagtattagccaccatcttacctcacagtgatgttgtgaggacatgtggaagcactttaagttttttcatcataacataaattattttcaagtgtaacttattaacctatttattatttatgtatttatttaagcatcaaatatttgtgcaagaatttggaaaaatagaagatgaatcattgattgaatagttataaagatgttatagtaaatttattttattttagatattaaatgatgttttattagataaatttcaatcagggtttttagattaaacaaacaaacaattgggtacccagttaaattttcatttcagatatacaacaaataattttttagtataagtacattattgtttatctgaaattttaattgaactaacaatcctagtttgatactcccagtcttgtcattgccagctgtgttggtagtgctgtgttgaattacggaataatgagttagaactattaaaacagccaaaactccacagtcaatattagtaatttcttgctggttgaaacttgtttattatgtacaaatagattcttataatattatttaaatgactgcatttttaaatacaaggctttatatttttaactttaaaaaaaaccgg

SEQ ID NO: 208 - protein, 99 aa, Homo sapiens
MTSKLAVALLAAFLISAALCEGAVLPRSAKELRCQCIKTYSKPFHPKFIKELRVIESGPHCANTEIIVKLSDGRELCLDPKENWVQRVVEKFLKRAENS

SEQ ID NO: 209 - DNA, 3164 bp, Homo sapiens
gcagccccggcggccgaacgcccgcggcgcgggactccatcgtcagagaagtcattcagaattcaaaagaagttctaagtttattgcaagaaaaaaaccctgccttcaagccggttcttgcaattatccaggcaggtgacgacaacttgatgcaggaaatcaaccagaatttggctgaggaggctggtctgaacatcactcacatttgcctccctccagatagcagtgaagccgagattatagatgaaatcttaaagatcaatgaagataccagagtacatggccttgcccttcagatctctgagaacttgtttagcaacaaagtcctcaatgccttgaaaccagaaaaagatgtggatggagtaacagacataaacctggggaagctggtgcgaggggatgcccatgaatgttttgtttcacctgttgccaaagctgtaattgaacttcttgaaaaatcaggtgtcaacctagatggaaagaagattttggtagtgggggcccatgggtctttggaagctgctctacaatgcctgttccagagaaaagggtccatgacaatgagcatccagtggaaaacacgccagcttcaaagcaagcttcacgaggctgacattgtggtcctaggctcacctaagccagaagagattccccttacttggatacaaccaggaactactgttctcaactgctcccatgacttcctgtcagggaaggttgggtgtggctctccaagaatacattttggtggactcattgaggaagatgatgtgattctccttgctgcagctctgcgaattcagaacatggtcagtagtggaaggagatggcttcgtgaacagcagcacaggcggtggagacttcactgcttgaaacttcagcctctctcccctgtgccaagtgacattgagatttcaagaggacaaactccaaaagctgtggatgtccttgccaaggagattggattgcttgcagatgaaattgaaatctatggcaaaagcaaagccaaagtacgtttgtccgtgctagaaaggttaaaggatcaagcagatggaaaatacgtcttagttgctgggatcacacccacccctcttggagaagggaagagcacagtcaccatcgggcttgtgcaggctctgaccgcacacctgaatgtcaactcctttgcctgcttgaggcagccttcccaaggaccgacgtttggagtgaaaggaggagccgcgggtggtggatatgcccaggtcatccccatggaggagttcaaccttcacttgactggagacatccacgccatcaccgctgccaataacttgctggctgccgccatcgacacgaggattcttcatgaaaacacgcaaacagataaggctctgtataatcggctggttcctttagtgaatggtgtcagagaattttcagaaattcagcttgctcggctaaaaaaactgggaataaataagactgatccgagcacactgacagaagaggaagtgagtaaatttgcccgtctcgacatcgacccatctaccatcacgtggcagagagtattggatacaaatgaccgatttctacgaaaaataaccatcgggcagggaaacacagagaagggccattaccggcaggcgcagtttgacatcgcagtggccagcgagatcatggcggtgctggccctgacggacagcctcgcagacatgaaggcacggctgggaaggatggtggtggccagtgacaaaagcgggcagcctgtgacagcagatgatttgggggtgacaggtgctttgacagttttgatgaaagatgcaataaaaccaaacctgatgcagaccctggaagggacacctgtgttcgtgcatgcgggcccttttgctaacattgctcacggcaactcttcagtgttggctgataaaattgccctgaaactggttggtgaagaaggatttgtagtgaccgaagctggctttggtgctgacatcggaatggagaaattcttcaacatcaagtgccgagcttccggcttggtgcccaacgtggttgtgttagtggcaacggtgcgagctctgaagatgcatggaggcgggccaagtgtaacggctggtgttcctcttaagaaagaatatacagaggagaacatccagctggtggcagacggctgctgtaacctccagaagcaaattcagatcactcagctctttggggttcccgttgtggtggctctgaatgtcttcaagaccgacacccgcgctgagattgacttggtgtgtgagcttgcaaagcgggctggtgcctttgatgcagtcccctgctatcactggtccgttggtggaaaaggatcggtggacttggctcgggctgtgagagaggctgcgagtaaaagaagccgattccagttcctgtatgatgttcaggttccaattgtggacaagataaggaccattgctcaggctgtctatggagccaaagatattgaactctctcctgaggcacaagccaaaatagatcgttacactcaacagggttttggaaatttgcccatctgcatggcaaagacccacctttctctatctcaccaacctgacaaaaaaggtgtgccaagggacttcatcttacctatcagtgacgtccgggccagcataggcgctgggttcatttaccctttggtcggaacgatgagcaccatgccaggactgcccacccggccctgcttttatgacatagatcttgataccgaaacagaacaagttaaaggcttgttctaagtggacaaggctctcacaggacccgatgcagactcctgaaacagactactctttgcctttttgctgcagttggagaagaaactgaatttgaaaaatgtctgttatgcaatgctggagacgtggtgaaataggccaaagatttcttcttcgttcaagatgaattctgttcacagtggagtatggtgttcggcaaaaggacctccaccaagactgaaagaaactaatttatttctgtttctgtggagtttccattatttctactgcttacactttagaatgtttattttatggggactaagggattaggagtgtgaactaaaaggtaacattttccactctcaagttttctactttgtctttgaactgaaaataaacatggatctagaaaaccaaaaaaaaaaaaaaaaa

SEQ ID NO: 210 - protein, 917 aa, Homo sapiens
SPGGRTPAARDSIVREVIQNSKEVLSLLQEKNPAFKPVLAIIQAGDDNLMQEINQNLAEEAGLNITHICLPPDSSEAEIIDEILKINEDTRVHGLALQISENLFSNKVLNALKPEKDVDGVTDINLGKLVRGDAHECFVSPVAKAVIELLEKSGVNLDGKKILVVGAHGSLEAALQCLFQRKGSMTMSIQWKTRQLQSKLHEADIVVLGSPKPEEIPLTWIQPGTTVLNCSHDFLSGKVGCGSPRIHFGGLIEEDDVILLAAALRIQNMVSSGRRWLREQQHRRWRLHCLKLQPLSPVPSDIEISRGQTPKAVDVLAKEIGLLADEIEIYGKSKAKVRLSVLERLKDQADGKYVLVAGITPTPLGEGKSTVTIGLVQALTAHLNVNSFACLRQPSQGPTFGVKGGAAGGGYAQVIPMEEFNLHLTGDIHAITAANNLLAAAIDTRILHENTQTDKALYNRLVPLVNGVREFSEIQLARLKKLGINKTDPSTLTEEEVSKFARLDIDPSTITWQRVLDTNDRFLRKITIGQGNTEKGHYRQAQFDIAVASEIMAVLALTDSLADMKARLGRMVVASDKSGQPVTADDLGVTGALTVLMKDAIKPNLMQTLEGTPVFVHAGPFANIAHGNSSVLADKIALKLVGEEGFVVTEAGFGADIGMEKFFNIKCRASGLVPNVVVLVATVRALKMHGGGPSVTAGVPLKKEYTEENIQLVADGCCNLQKQIQITQLFGVPVVVALNVFKTDTRAEIDLVCELAKRAGAFDAVPCYHWSVGGKGSVDLARAVREAASKRSRFQFLYDVQVPIVDKIRTIAQAVYGAKDIELSPEAQAKIDRYTQQGFGNLPICMAKTHLSLSHQPDKKGVPRDFILPISDVRASIGAGFIYPLVGTMSTMPGLPTRPCFYDIDLDTETEQVKGLF

SEQ ID NO: 211 - DNA, 1271 bp, Homo sapiens
tgggcgcggccatgttggaggctccgggcccgagtgatggctgcgagctcagcaaccccagcgccagcagagtcagctgtgccgggcagatgctggaagtgcagccaggattgtatttcggtggggccgcggccgtcgcggagccagatcacctgagggaagcgggcatcacggccgtgctaacagtggactcggaggagcccagcttcaaggcggggcctggggtcgaggatctatggcgcctcttcgtgccagcgctggacaaacccgagacggacctactcagccatctggaccggtgcgtggccttcatcggtcaggcccgcgctgagggccgtgcggtgttggtgcactgtcatgcaggagtcagtcgaagtgtggccataataactgcttttctcatgaagactgaccaacttccctttgaaaaagcctatgaaaagctccagattctcaaaccagaggctaagatgaatgaggggtttgagtggcaactgaaattataccaggcaatgggatatgaagtggatacctctagtgcaatttataagcaatatcgtttacaaaaggttacagagaagtatccagaattgcagaatttacctcaagaactctttgctgttgacccaactaccgtttcacaaggattgaaagatgaggttctctacaagtgtagaaagtgcaggcgatcattatttcgaagttctagtattctggatcaccgtgaaggaagtggacctatagcctttgcccacaagagaatgacaccatcttccatgcttaccacagggaggcaagctcaatgtacatcttatttcattgaacctgtacagtggatggaatctgctttgttgggagtgatggatggacagcttctttgcccaaaatgcagtgccaagttgggttccttcaactggtatggtgaacagtgctcttgtggtaggtggataacacctgcttttcaaatacataagaatagagtggatgaaatgaaaatattgcctgttttgggatcacaaacaggaaaaatatgaacatgatattttatagcttgggaagaaacttgcagatgatatgtgctgcctttgcttcttatcattcatggcagattgttagtgctttcaacatttcatttgaaatgggagaagataaaatcacttgatgtaacctggaaactatgctttacatggcaatcaaagccttttgatcatgtacattttatttgatattaaaatcttttataaccagaaaaaaaaaaaaaaaaaaaaaaa

SEQ ID NO: 212 - protein, 340 aa, Homo sapiens
MLEAPGPSDGCELSNPSASRVSCAGQMLEVQPGLYFGGAAAVAEPDHLREAGITAVLTVDSEEPSFKAGPGVEDLWRLFVPALDKPETDLLSHLDRCVAFIGQARAEGRAVLVHCHAGVSRSVAIITAFLMKTDQLPFEKAYEKLQILKPEAKMNEGFEWQLKLYQAMGYEVDTSSAIYKQYRLQKVTEKYPELQNLPQELFAVDPTTVSQGLKDEVLYKCRKCRRSLFRSSSILDHREGSGPIAFAHKRMTPSSMLTTGRQAQCTSYFIEPVQWMESALLGVMDGQLLCPKCSAKLGSFNWYGEQCSCGRWITPAFQIHKNRVDEMKILPVLGSQTGKI

SEQ ID NO: 213 - DNA, 603 bp, Homo sapiens
gtcagctcctccgctgtagtattgctccttaaaaacccctctctctgaaaatgacatgccctcgcaatgtaactccgaactcgtacgcggagcccttggctgcgcccggcggaggagagcgctatagccggagcgcaggcatgtatatgcagtctgggagtgacttcaattgcggggtgatgaggggctgcgggctcgcgccctcgctctccaagagggacgagggcagcagccccagcctcgccctcaacacctatccgtcctacctctcgcagctggactcctggggcgaccccaaagccgcctatcgcctggaacaacctgttggcaggccgctgtcctcctgctcctacccacctagtgtcaaggaggagaatgtctgctgcatgtacagcgcagagaagcgggcgaaaagtggccccgaggcagctctctactcccaccccttgccggagtcctgccttggggagcacgaggtacccgtgcccagctactaccgcgccagcccgagctactccgcgctggacaagacgccccactgttctggggccaacgattcgaagcccctttcgagcagcgggccagtctcaacccggcgccgaa

SEQ ID NO: 214 - DNA, 1701 bp, Homo sapiens
aagtcgccccggcaacagccgcctccctcgcgtcccccactccccctctgtctctccaaggaaaactaggcccctgcgcggccaacgcccaggatccgcaagctgcgcgcccacgagctccaccagcccattggagaaaagttactgttcagtccctgaaggcttgtgccataaaagagtgggagacattcccagggaggtgaggaatgaaagatcgaattaaagaccattaaagaccaaagggcatctaaatctgcagcaaccatcagctctcttttctttgagagtttcagcacccatttggactttcacaatcagagatggcagcggtaaaggcatcaacatcgaaagctaccaggccttggtattctcatccggtatatgcaagatactggcaacattatcatcaagcaatggcttggatgcaaagccatcacaatgcctacaggaaggccgtggaatcctgtttcaatcttccatggtacttaccttctgcgcttcttccccaaagctcttacgataatgaggctgcgtatcctcagtccttctatgaccatcatgtggcctggcaggactacccctgcagttcttcacatttcagaagatctgggcagcatccacgttacagcagtaggatccaggcatccacaaaagaagaccaagctttgtccaaagaggaagagatggagactgagtcagatgcagaggtagaatgtgacctgagcaatatggaaatcactgaagagctccgccagtactttgcagagaccgagaggcatagagaagaacgacggcggcagcagcagctggatgcagagcgcctggacagctatgtgaacgctgaccacgacctgtactgcaacacccgccggtcggtagaagccccaactgagaggcctggtgagcggcgccaggccgagatgaagcgtttgtacggggacagtgctgccaagatccaagccatggaggccgcggtgcagctgagctttgacaagcactgtgaccgaaagcagcccaagtactggccggtcatccccctgaagttctgagctcagggcacagggtaccagcctctccttcttccttttgggtacacgctctttatctctccttctgtacacttcttagggaaaggggactttgtactggggtacaggcatgttcaccacagtcccagtgggcctgtcacggggtggatgtactatgccagccacttggaggtctgcaggacatgttctgttgccaacatgataaattttctcctgacataaaataattttgcatatactatactggttttttatgttgttggtaacagttcaattcattaacgttcttgcctagagatactgcctggtgttttgcttttttatcttttcttgtctttaacctgtctgaactacacaaatgcctttaaaaaaccagatatcctctctgactctagctccattagcccccactaaaaatgagccaagtgtgtagtgagacaaataccactacctgtagtggagagggatgcatgttctatagagggccagagagtgaatatctttggcactgcaagccacacggtcagtgttgtgactactcaaccctccctttgtagtgtgaaagcagctgtagacagtaagtaaacaaatgggtgtggctgtgttctaataaaactctatttataaaaacagaaaaaaaaaaaaaaaaaaa

SEQ ID NO: 215 - protein, 242 aa, Homo sapiens
MAAVKASTSKATRPWYSHPVYARYWQHYHQAMAWMQSHHNAYRKAVESCFNLPWYLPSALLPQSSYDNEAAYPQSFYDHHVAWQDYPCSSSHFRRSGQHPRYSSRIQASTKEDQALSKEEEMETESDAEVECDLSNMEITEELRQYFAETERHREERRRQQQLDAERLDSYVNADHDLYCNTRRSVEAPTERPGERRQAEMKRLYGDSAAKIQAMEAAVQLSFDKHCDRKQPKYWPVIPLKF

SEQ ID NO: 216 - DNA, 535 bp, Homo sapiens
gcggccgccgccgaaaggagccctcctcgaacatgaactctctggccgggtcgatggtccagtagtggcccttgccgggccgcccaaggcccttgggtagcttgatgaagcactcgttgagcgagaggttgtggcgcacggagttcttccagccctggtaggagccccggaagaaggggaagcggctctgcaggaactggtagatctcgctcagcgtcaggcgcttggtgggtgaactctggatggccatgacgatgagcgcgatgtaggaatagggcggcttctccgggcgccggatgccggcgttggtcttcttggccttggacgggccggacgacgcggggtccatggccgcgccgcctcccccgccgccgccgccgccgccgccgtgcggtggctgctgcttctcgggcgccgaagacatcgggtggctgctgccgccgccgccgctgccgccgctgctctgcgccgcggaccctcgtgccgaattcggcacgaggtgttaccattatttgagtacctgtctctatcaact

SEQ ID NO: 217 - DNA, 971 bp, Homo sapiens
gattgcttgaggagagaagtatgtgatcagaaagcattctttgtctattaactcctgcccagcaaaagtgaaagaaaattcatgggagcatgcaagaacaaagagcacagcaaagctggacaaacacagcaatccaggcaggggatttccaactcaactctggtatgtaagctgcatgcaaagtcctttttctgtctctggtttctggccccttgtctgcagagatggctcccaatgcttcctgcctctgtgtgcatgtccgttccgaggaatgggatttaatgacctttgatgccaacccatatgacagcgtgaaaaaaatcaaagaacatgtccggtctaagaccaaggttcctgtgcaggaccaggttcttttgctgggctccaagatcttaaagccacggagaagcctctcatcttacggcattgacaaagagaagaccatccaccttaccctgaaagtggtgaagcccagtgatgaggagctgcccttgtttcttgtggagtcaggtgatgaggcaaagaggcacctcctccaggtgcgaaggtccagctcagtggcacaagtgaaagcaatgatcgagactaagacgggtataatccctgagacccagattgtgacttgcaatggaaagagactggaagatgggaagatgatggcagattacggcatcagaaagggcaacttactcttcctggcatcttattgtattggagggtgaccaccctgggcatggggtgttggcaggggtcaaaaagcttatttcttttaatctcttactcaacgaacacatcttctgatgatttcccaaaattaatgagaatgagatgagtagagtaagatttgggtgggatgggtaggatgaagtatattgcccaactctatgtttctttgattctaacacaattaattaagtgacatgatttttactaatgtattactgagactagtaaataaatttttaagccaa

SEQ ID NO: 218 - protein, 165 aa, Homo sapiens
MAPNASCLCVHVRSEEWDLMTFDANPYDSVKKIKEHVRSKTKVPVQDQVLLLGSKILKPRRSLSSYGIDKEKTIHLTLKVVKPSDEELPLFLVESGDEAKRHLLQVRRSSSVAQVKAMIETKTGIIPETQIVTCNGKRLEDGKMMADYGIRKGNLLFLASYCIGG

SEQ ID NO: 219 - DNA, 428 bp, Homo sapiens
tttttttttttttttttgatgcttgcagagcaaccccaataacttgatcttcaagacgggaattacttctgattacactctgagaatatctgtcatctgcctttgacaccttataagttgattcttgagcattaatttctccatcagatagcctttgggttgatgactcaagagatgcttgtggctgcaacacctgtaactcttgcattggaaaaccatcttcttgctttgaagatggatacacatctgagtcaagctttctttcagcataagactttgggtcaggggaagttatgttattttgtaatgtctgacaatgagtagaggatgcaaaagatgatgactggacagcaggcaaaaacttctgggactggggagatgatgactcttgagtctgaacattttgggaagaatgcatagaaatataa

SEQ ID NO: 220 - DNA, 498 bp, Homo sapiens
tggtcatttcctttttatctgtcaggcagccagctctgactttctctctgtttctgtcatctctcccccacataccaacttcttcaccatgatgattataccaataatacagttccttatatgaggggctctggaaaattagacagtgaagcatgttgcagattacatgttaaacaggtctaattcacaatgaatgacaacctgagacaatatgagacagttttcagacaacagttttgtggcaggtaggggactcctttctctgcatactcttcttggctgaggttgtgttgcactggctgaggttgctgaaacagtggcccatggatggagatgtagaatcagaagcaaggagacacagttctccgctggagtcttctaaagaaatcaagcctgcccatacttttgattttggccttctggtctccagaacatagtgaatgagttctcctgaaatcttgtttaaaagtgtgttgcatctcctcttctctctctcgc

SEQ ID NO: 221 - DNA, 481 bp, Homo sapiens
  misc_feature (443)..(443): n is a, c, g, or t
  misc_feature (446)..(446): n is a, c, g, or t
  misc_feature (453)..(453): n is a, c, g, or t
gtctccgcgcccggcgctgggcggcgctcggctgtctccggccgatcgctcggcgctcgggtccgcggccgctgcggcgccgggcatttctccgcagctcggctcgcggccgcgcccgccgccgcccggcccgcgcccatgcaggccatcaagtgcgtggtggtcggcgacggcgccgtggggaagacatgcttgctgatcagctacacgaccaacgccttccccggagagtacatccccaccgtttttgacaactactctgccaacgtgatggtggacgggaaaccactcaacttggggctgtgggacacagcgggtcaggaggactacgatcggctgcggccactctcctacccccaaactgacgtctttctgatctgcttctctctggtgagcccggcctccttcgagaatgttcgtgccaagtggtaccctgaggtccngcnccactgnccccacacgcgcatcctgctggggggca

SEQ ID NO: 222 - DNA, 374 bp, Homo sapiens
  misc_feature (366)..(366): n is a, c, g, or t
ggtctgctttgttcttaaatgtatcccatttggcacgtaatagacatcaaaaaatatttactggctaaaaggatgaatgaatatcatcaatgctccaaaaaagggtacttgattaatgaagcgttgtaagagagagcaaccagcttggggtagggggcagagcgcctagctctcctcgtggcaggtaacactagtggggttttcaaggaaggacagaaaacatctcctaagaaaaggaaggacattctacacatcagctggcctgtaattaaaagtgtcagtgtcatgaaagatgaaggaagaatgaagaatgcttctagaatgaaggagactggaaagatatgacagctgggtatgagtgatccntgaaccgg

SEQ ID NO: 223 - DNA, 1990 bp, Homo sapiens
gcatcagagctaaacagcagcagtcgtgcagtatcatccacagcctgagagagagtcagcagcaagagctgagccggtttctgaacccgcccagcatcgagaccacccagcccagtgaggacacgaatgccaacagtcaggacaacagcatgcaacctgagacaagcagccagcagcagctcctgagccccacgctgtcggatcgaggaggaagtcggcaagatgcagccgacgcagggaaaccccagaggaaatttgggcagtggcgtctgccctcagccccaaaaccaataagccattcagtgtcctcagtcaacttacggtttggaggaaggacaaccatgaaatctgtcgtgtgcaaaatgaaccccatgactgacgcggcttcctgcggttctgaagttaagaagtggtggacccggcagctgactgtggagagcgacgaaagtggggatgaccttctggatatttaggtggatgtcaatgtagatgaatttctagtggtggaaaccgttttctaataatgtccttgattgtccagtgagcaatctgtaattgatctataactgaattccagcttgtcacaagatgtttataaattgattttcatcctgccacagaaaggcataagctgcatgtatgatgggttactatcaatcattgctcaaaaaaatttttgtataatgacagtactgataatattagaaatgataccgcaagcaaatgtatatcacttaaaaatgtcatatattctgtctgcgtaaactaaggtatatattcatatgtgctctaatgcagtattatcaccgccccgcaaaagagtgctaagcccaaagtggctgatatttagggtacaggggttatagctttagttcacatctttcccatttccactagaaatatttctcttgagagaatttattatttatgattgatctgaaaaggtcagcactgaacttatgctaaaatgatagtagttttacaaactacagattctgaattttaaaaagtatcttctttttctcgtgttatatttttaaatatacacaagacatttggtgaccagaacaagttgatttctgtcctcagttatgttaatgaaactgttgcctccttctaagaaaattgtgtgtgcaagcaccaggcaaagaaatggactcaggatgcttagcggtttaaaacaaacctgtagataaatcacttgagtgacatagttgcgcaaagatgttaagtttcttaagaaaccttttaataactgagtttagcaaaaagaataaaactatatagctcaatttatttaaaaaaatctttgcatgtgtgatgttatcattggcttcatttcttacccaaggtatgtctgttttgccataaatcagcagagtcatttcattctgggtgatcctaacacaccattgctacgttagatttgaaatgacatctctgttaaaagaatcttctatggaaataatggtgccctgcaaaatcttcctttgaactcacaggttagggatcacacaacttacttaatcgttttttgtttttgttttttttccttatatgtcaatggcccatgtcctccgggaaaattagaaaagcaaaatgattacaaagtgctgttagatttcttgtgctgggccagccaagtagaagtggacttgacttggacctttaactattttattacagattggacatttgctgttcagatgttttttaacagagggattatctcagaatcctgtgacctccaggttgttttataatctatttttctctatttaacattcctcagatagataggcaaataggacattccttctgtgtcacagaagtatcgtggtagtggcagtctacagtttatatgattcattgtaactatgagataaagaacaaccagtcatgtggccaaaaggattagatttgatttgatgttcacttggagtttactttttgtacatacaagataaaataaatattggatttgtaaaat

SEQ ID NO: 224 - DNA, 3187 bp, Homo sapiens
cgcccggagtcggagccgggagcgctagcggcagccggatcgcagcctgcggggcccgccgcagccatgggcaaccgcggcatggaagatctcatcccgctggtcaaccggctgcaagacgccttctctgccatcggccagaacgcggacctcgacctgccgcagatcgctgtggtgggcggccagagcgccggcaagagctcggtgctcgagaatttcgtaggcagggacttcttgcctcgaggatctggcattgtcacccgacgtcccctggtcttgcagctggtcaatgcaaccacagaatatgccgagttcctgcactgcaagggaaagaaattcaccgacttcgaggaggtgcgccttgagatcgaggccgagaccgacagggtcaccggcaccaacaagggcatctcgccggtgcctatcaacctccgcgtctactcgccgcacgtgctgaacctgaccctggtggacctgcccggaatgaccaaggtcccggtgggggaccaacctcccgacatcgagttccagatccgagacatgcttatgcagtttgtcaccaaggagaactgcctcatcctggccgtgtcccccgccaactctgacctggccaattctgacgccctcaaggtcgccaaggaggtggacccccagggccagcgcaccatcggggtcatcaccaagctggacctgatggacgagggcacagatgcccgtgatgtgctggagaacaagctgctccccctgcgcagaggctacattggagtggtgaaccggagccagaaggacattgatggcaagaaggacattaccgccgccttggctgctgaacgaaagttcttcctctcccatccatcttatcgccacttggctgaccgtatgggcacgccctacctgcagaaggtcctcaatcagcaactgacgaaccacatccgggacacactgccggggctgcggaacaagctgcagagccagctactgtccattgagaaggaggtggaggaatacaagaacttccgccctgatgacccagctcgcaagaccaaggccctgctgcagatggtccagcagtttgccgtagactttgagaagcgcattgagggctcaggagatcagatcgacacctacgaactgtcagggggagcccgcattaaccgaatcttccacgagcgcttccctttcgagctggtcaagatggagtttgatgagaaggaactccgaagggagatcagctatgctatcaagaatatccatggcattagaacggggctgtttaccccagacatggcctttgagaccattgtgaaaaagcaggtgaagaagatccgagaaccgtgtctcaagtgtgtggacatggttatctcggagctaatcagcaccgttagacagtgcaccaagaagctccagcagtacccgcggctacgggaggagatggagcgcatcgtgaccacccacatccgggagcgcgagggccgcactaaggagcaggtcatgcttctcatcgatatcgagctggcttacatgaacaccaaccatgaggacttcataggctttgccaatgctcagcagaggagcaaccagatgaacaagaagaagacttcagggaaccaggatgagattctggtcatccgcaagggctggctgactatcaataatattggcatcatgaaagggggctccaaggagtactggtttgtgctgactgctgagaatctgtcctggtacaaggatgatgaggagaaagagaagaaatacatgctgtctgtggacaacctcaagctgcgggacgtggagaagggctttatgtcgagcaagcatatctttgccctctttaacacggagcagaggaatgtctacaaggattatcggcagctggagctagcctgtgagacacaggaggaggtggacagctggaaggcctccttcctgagggctggcgtgtaccctgagcgtgttggggacaaagagaaagccagcgagaccgaggagaatggctccgacagcttcatgcattccatggacccacagctggaacggcaagtggagaccatccggaatcttgtggactcatacatggccattgtcaacaagaccgtgagggacctcatgcccaagaccatcatgcacctcatgattaacaataccaaggagttcatcttctcggagctgctggccaacctgtactcgtgtggggaccagaacacgctgatggaggagtcggcggagcaggcacagcggcgcgacgagatgctgcgcatgtaccacgcactgaaggaggcgctcagcatcatcggcaacatcaacacgaccaccgtcagcacgcccatgcccccgcccgtggacgactcctggctgcaggtgcagagcgtaccggccggacgcaggtcgcccacgtccagccccacgccgcagcgccgagcccccgccgtgcccccagcccggcccgggtcgcggggccctgctcctgggcctccgcctgctgggtccgccctggggggggcgccccccgtgccctccaggccgggggcttcccctgaccctttcggccctccccctcaggtgccctcgcgccccaaccgcgccccgcccggggtccccagccgatcgggtcaggcaagtccatcccgtcctgagagccccaggccccccttcgacctctaaacagatccctcctcttctcggagacctccctttccaagcctgcctggacggctgttctgtgacttgacagtggctcccccagccccaaagccagcccccttcatctgtgacttaatctgttgtagtggtgagctgatacattcaggtgtgaccgttggtgaaaacttgtgccccttctgtggtatgcccttgccctgttctataaatatctataaatactcatatatatacacacctacacatggccaaccgcctcgcctctagcgctgggaatcagtcactgtgctatccttgtggagtcttgtggcccaactaccagagaacgctgtcccccgacatcccactccaaagtgtgccacctccagtgagcctccttgtcatgcccggcctgtggacagccagcccccgccatccctcccaccccctaccaagcatgggggtgctgtgcaggcagccgtgtggcctgacagtttctaccagtcctgctgtccctcggctgagaataaaacccatttctggatgatgg

SEQ ID NO: 225 - protein, 864 aa, Homo sapiens
MGNRGMEDLIPLVNRLQDAFSAIGQNADLDLPQIAVVGGQSAGKSSVLENFVGRDFLPRGSGIVTRRPLVLQLVNATTEYAEFLHCKGKKFTDFEEVRLEIEAETDRVTGTNKGISPVPINLRVYSPHVLNLTLVDLPGMTKVPVGDQPPDIEFQIRDMLMQFVTKENCLILAVSPANSDLANSDALKVAKEVDPQGQRTIGVITKLDLMDEGTDARDVLENKLLPLRRGYIGVVNRSQKDIDGKKDITAALAAERKFFLSHPSYRHLADRMGTPYLQKVLNQQLTNHIRDTLPGLRNKLQSQLLSIEKEVEEYKNFRPDDPARKTKALLQMVQQFAVDFEKRIEGSGDQIDTYELSGGARINRIFHERFPFELVKMEFDEKELRREISYAIKNIHGIRTGLFTPDMAFETIVKKQVKKIREPCLKCVDMVISELISTVRQCTKKLQQYPRLREEMERIVTTHIREREGRTKEQVMLLIDIELAYMNTNHEDFIGFANAQQRSNQMNKKKTSGNQDEILVIRKGWLTINNIGIMKGGSKEYWFVLTAENLSWYKDDEEKEKKYMLSVDNLKLRDVEKGFMSSKHIFALFNTEQRNVYKDYRQLELACETQEEVDSWKASFLRAGVYPERVGDKEKASETEENGSDSFMHSMDPQLERQVETIRNLVDSYMAIVNKTVRDLMPKTIMHLMINNTKEFIFSELLANLYSCGDQNTLMEESAEQAQRRDEMLRMYHALKEALSIIGNINTTTVSTPMPPPVDDSWLQVQSVPAGRRSPTSSPTPQRRAPAVPPARPGSRGPAPGPPPAGSALGGAPPVPSRPGASPDPFGPPPQVPSRPNRAPPGVPSRSGQASPSRPESPRPPFDL

SEQ ID NO: 226 - DNA, 1885 bp, Homo sapiens
gggcaatttgttagttatccgccgccaccaagacgcggcacggcgcctggaccggaggggccccgcgcgggcgcgaactttgggctcgggcgagtgggtggtgctccgcccagcccgagacgggcgggcgcgcgggccaatgggtgccgcctcttggccgcggggggccccgacccgtgggtcccggccaccagcgccccagccccgaggctcagaagcggcaggcggaggcgcggtccgggcgctatggccatgcccggcgggtctcacgcggctgcccctcgcccggcgcgccttcggtagggggcgcccggggcccagctggcccggccatgctgctggagacacaggacgcgctgtacgtggcgctggagctggtcatcgccgcgctttcggtggcgggcaacgtgctggtgtgcgccgcggtgggcacggcgaacactctgcagacgcccaccaactacttcctggtgtccctggctgcggccgacgtggccgtggggctcttcgccatcccctttgccatcaccatcagcctgggcttctgcactgacttctacggctgcctcttcctcgcctgcttcgtgctggtgctcacgcagagctccatcttcagccttctggccgtggcagtcgacagatacctggccatctgtgtcccgctcaggtataaaagtttggtcacggggacccgagcaagaggggtcattgctgtcctctgggtccttgcctttggcatcggattgactccattcctggggtggaacagtaaagacagtgccaccaacaactgcacagaaccctgggatggaaccacgaatgaaagctgctgccttgtgaagtgtctctttgagaatgtggtccccatgagctacatggtatatttcaatttctttgggtgtgttctgcccccactgcttataatgctggtgatctacattaagatcttcctggtggcctgcaggcagcttcagcgcactgagctgatggaccactcgaggaccaccctccagcgggagatccatgcagccaagtcactggccatgattgtggggatttttgccctgtgctggttacctgtgcatgctgttaactgtgtcactcttttccagccagctcagggtaaaaataagcccaagtgggcaatgaatatggccattcttctgtcacatgccaattcagttgtcaatcccattgtctatgcttaccggaaccgagacttccgctacacttttcacaaaattatctccaggtatcttctctgccaagcagatgtcaagagtgggaatggtcaggctggggtacagcctgctctcggtgtgggcctatgatctaggctctcgcctcttccaggagaagatacaaatccacaagaaacaaagaggacacggctggttttcattgtgaaagatagctacacctcacaaggaaatggactgcctctcttgagcacttccctggagctaccacgtatctagctaatatgtatgtgtcagtagtaggctccaaggattgacaaatatatttatgatctattcagctgcttttactgtgtggattatgccaacagcttgaatggattctaacagactcttttgtttttaaaagtctgccttgtttatggtggaaaattactgaaactattttactgtgaaacagtgtgaactattataatgcaaatactttttaacttagaggcaatggaaaaataaaagttgactgtactaaaaatgtatacttgttgccaggaaggtgacctcaaaaattaaaagtataattattcggccgggcatggtggctcacacctgtaattccagcactttgggaggccaaggcaggcggatcacgaggtcaggagttcaaaaccagcctgtccaatatagtg

SEQ ID NO: 227 - protein, 332 aa, Homo sapiens
MLLETQDALYVALELVIAALSVAGNVLVCAAVGTANTLQTPTNYFLVSLAAADVAVGLFAIPFAITISLGFCTDFYGCLFLACFVLVLTQSSIFSLLAVAVDRYLAICVPLRYKSLVTGTRARGVIAVLWVLAFGIGLTPFLGWNSKDSATNNCTEPWDGTTNESCCLVKCLFENVVPMSYMVYFNFFGCVLPPLLIMLVIYIKIFLVACRQLQRTELMDHSRTTLQREIHAAKSLAMIVGIFALCWLPVHAVNCVTLFQPAQGKNKPKWAMNMAILLSHANSVVNPIVYAYRNRDFRYTFHKIISRYLLCQADVKSGNGQAGVQPALGVGL

SEQ ID NO: 228 - DNA, 2569 bp, Homo sapiens
  misc_feature (244)..(244): n is a, c, g, or t
  misc_feature (275)..(280): n is a, c, g, or t
tgttctctctctctgttctctttcacacacacacacacacacacacacaccagtggcatttgcaaacagccttgggaatgggccttacactcccccacttcagggtatcccacctccagttccatcaagacaaagctgcagcccctggccccaagacccgtgggagagcccagcctcacctgtcagtcatctgggctgtgctctgagacttgagcagagcacaccaggccggccccctgagccncgcatgctccccacaccctgtgccggccccnnnnnncagtggcagcgtcctcactagcttctccctcgcaggccttgccctctctgacctgatccagaagtacttcgtgtcacccacgctgttccgtgtgatccgcctggcgcggattgggcgtgtcctgcggctgatccgcggggccaagggcatccggacgctgctgttcgccctcatgatgtcgctgcctgccctcttcaacatcggcctcctcctcttcctggtcatgttcatctactccatcttcggcatgtccaactttgcctacgtcaagaaggagtcgggcatcgatgatatgttcaacttcgagaccttcggcaacagcatcatctgcctgttcgagatcaccacgtcggccggctgggacgggctcctcaaccccatcctcaacagcgggcccccagactgtgaccccaacctggagaacccgggcaccagtgtcaagggtgactgcggcaacccctccatcggcatctgcttcttctgcagctatatcatcatctccttcctcatcgtggtcaacatgtacatcgccatcatcctggagaacttcaatgtggccacagaggagagcagcgagccccttggtgaagatgactttgagatgttctacgagacatgggagaagttcgaccccgacgccacccagttcatcgcctacagccgcctctcagacttcgtggacaccctgcaggaaccgctgaggattgccaagcccaacaagatcaagctcatcacactggacttgcccatggtgccaggggacaagatccactgcctggacatcctctttgccctgaccaaagaggtcctgggtgactctggggaaatggacgccctcaagcagaccatggaggagaagttcatggcagccaacccctccaaggtgtcctacgagcccatcaccaccaccctcaagaggaagcacgaggaggtgtgcgccatcaagatccagagggcctaccgccggcacctgctacagcgctccatgaagcaggcatcctacatgtaccgccacagccacgacggcagcggggatgacgcccctgagaaggaggggctgcttgccaacaccatgagcaagatgtatggccacgagaatgggaacagcagctcgccaagcccggaggagaagggcgaggcaggggacgccggacccactatggggctgatgcccatcagcccctcagacactgcctggcctcccgcccctcccccagggcagactgtgcgcccaggtgtcaaggagtctcttgtctagcaggcagcatcggggtggccccactgagtctcggcatagtccccagagctcccccgtggtgcctgcacacagagtgagggaggagggctttgaatctgggactgtgcctggctccctgatgggggacaggatttggccacactggggctgacacccaggcccgagcgcctgcgttcccagaccatgggaaatgggaattgcgctcaggggctccatgctgggtctgaggcccctgcctccaagatttaacctgcaagttgctctgacctcctctgggccctgtcgcccctccttttggcctgggggaggtcagaacattcgaatctctgcccctcacttgaggaggagctggcctgcggtggagggatcagttgccccccatcaccagagtcttaagggtcactggcctctccccaggaagtgggctcagacccccctcagccccagcccagacaaagatgtcttaacctcagggagtgcagacacctaaccccagggcactgccagcccaccccctttgactctggggtgcagcttcacccaccaggccagctcaggaattccctggaaaagggaaatgtgactggttcagaaatagctcctcaaagcctcaaaacctgattggccactggatcctgctgctttgggctgggatggtgactcctgaaacctcttcctaggccacgtccaggtccgtagctcccctggctggctcctaggggaagagcagaaggaaggatgccacttgggaatgaattgtccttttctaggaagcacgggggagtgagacaggctgggtcctgccagctggatcgctgcacatggcctgagcatccagacctgagcgggagtcagggacctgctgctcagtaagaagattctcgccccttccctctctccctgcctcactcctccgtgagcaccaccagggctccaggagcctcatccagcctcagagatctcccttctcatctccccacgccccgtctctttctcacctttcccacctctctccccaaagtgatcctaag

SEQ ID NO: 229 - protein, 1836 aa, Homo sapiens
MARPSLCTLVPLGPECLRPFTRESLAAIEQRAVEEEARLQRNKQMEIEEPERKPRSDLEAGKNLPMIYGDPPPEVIGIPLEDLDPYYSNKKTFIVLNKGKAIFRFSATPALYLLSPFSVVRRGAIKVLIHALFSMFIMITILTNCVFMTMSDPPPWSKNVEYTFTGIYTFESLIKILARGFCVDDFTFLRDPWNWLDFSVIMMAYLTEFVDLGNISALRTFRVLRALKTITVIPGLKTIVGALIQSVKKLSDVMILTVFCLSVFALVGLQLFMGNLRQKCVRWPPPFNDTNTTWYSNDTWYGNDTWYGNEMWYGNDSWYANDTWNSHASWATNDTFDWDAYISDEGNFYFLEGSNDALLCGNSSDAGHCPQGYECIKTGRNPNYGYTSYDTFSWAFLALFRLMTQDYWENLFQLTLRAAGKTYMIFFVVIIFLGSFYLINLILAVVAMAYAEQNEATLAEDKEKEEEFQQMLEKFKKHQEELEKAKAAQALEGGEADGDPAHGKDCNGSLDTSQGEKGAPRQSGSGDSGISDAMEELEEAHQKCPPWWYKCAHKVLIWNCCAPWLKFKNIIHLIVMDPFVDLGITICIVLNTLFMAMEHYPMTEHFDNVLTVGNLVFTGIFTAEMVLKLIAMDPYEYFQQGWNIFDSIIVTLSLVELGLANVQGLSVLRSFRLLRVFKLAKSWPTLNMLIKIIGNSVGALGNLTLVLAIIVFIFAVVGMQLFGKSYKECVCKIALDCNLPRWHMHDFFHSFLIVFRILCGEWIETMWDCMEVAGQAMCLTVFLMVMVIGNLVVLNLFLALLLSSFSADSLAASDEDGEMNNLQIAIGRIKLGIGFAKAFLLGLLHGKILSPKDIMLSLGEADGAGEAGEGGETAPEDEKKEPPEEDLKKDNHILNHMGLADGPPSSLELDHLNFINNPYLTIQVPIASEESDLEMPTEEETDTFSEPEDSKKPPQPLYDGNSSVCSTADYKPPEEDPEEQAEENPEGEQPEECFTEACVQRWPCLYVDISQGRGKKWWTLRRACFKIVEHNWFETFIVFMILLSSGALAFEDIYIEQRRVIRTILEYADKVFTYIFIMEMLLKWVAYGFKVYFTNAWCWLDFLIVDVSIISLVANWLGYSELGPIKSLRTLRALRPLRALSRFEGMRVVVKPLLGAIPSIMNVLLVCLIFWLIFSIMGVNLFAGKFYYCINTTTSERFDISEVNNKSECESLMHTGQVRWLNVKVNYDNVGLGYLSLLQVATFKGWMDIMYAAVDSREKEEQPQYEVNLYMYLYFVIFIIFGSFFTLNLFIGVIIDNFNQQKKKLGGKDIFMTEEQKKYYNAMKKLGSKKPQKPIPRPQNKIQGMVYDLVTKQAFDITIMILICLNMVTMMVETDDQSQLKVDILYNINMIFIIIFTGECVLKMLALRQYYFTVGWNIFDFVVVILSIVGLALSDLIQKYFVSPTLFRVIRLARIGRVLRLIRGAKGIRTLLFALMMSLPALFNIGLLLFLVMFIYSIFGMSNFAYVKKESGIDDMFNFETFGNSIICLFEITTSAGWDGLLNPILNSGPPDCDPNLENPGTSVKGDCGNPSIGICFFCSYIIISFLIVVNMYIAIILENFNVATEESSEPLGEDDFEMFYETWEKFDPDATQFIAYSRLSDFVDTLQEPLRIAKPNKIKLITLDLPMVPGDKIHCLDILFALTKEVLGDSGEMDALKQTMEEKFMAANPSKVSYEPITTTLKRKHEEVCAIKIQRAYRRHLLQRSMKQASYMYRHSHDGSGDDAPEKEGLLANTMSKMYGHENGNSSSPSPEEKGEAGDAGPTMGLMPISPSDTAWPPAPPPGQTVRPGVKESLV

SEQ ID NO: 230 - DNA, 517 bp, Homo sapiens
tttttttcaaataaaccttttatttacaggcaaaggatatagtacaagaagaaaaagagaatacagatgacatcgggggtccaagagacattccatatttaagcttcataatgtccttatttgcacacatataccacactgccttcattttctccagctgatagatttgtgtaagaaatcttgactttgagagttcaatgtcattcccaacagggtctttatgtctgtctggtcatgttatcagccagtcttacttaatgtattaggccagttggaaaccatcattaaagaaactgaccctggtgatcaccagagtagtttcagactataaacaacacatcataaatcccactgcccttatcttggcccaaagacaaaactggacattctgatgaccccagagattatgacagtgttttctggtctaattaaaccatagtcttcatatacctttaccacgcctccttcctccaattaggaagctaagtgggtaagaaagaaaaaataaaggcagagc

SEQ ID NO: 231 - DNA, 375 bp, Homo sapiens
tgttgggaagcagccgtccccgtccagagtcctctgtggtccctgctgccaccatggccactcaccgcctcgtgatggtccggcacggcgagagcacatggaaccaggagaaccgtttctgtggctggttcgatgcagagctgagtgaaaaggggaccgaggaggccaagcggggagccaaggccatcaaggatgccaagatggagtttgacatctgctacacgtcagtgctgaagcgggccatccgcaccctctgggccatcctggacggcacggaccagatgtggctgcctgtggtgcgcacttggcgcctcaatgagcgggattacgggggcctcacaggcctcaacaaggcagaaacggccgccaagcacg

SEQ ID NO: 232 - DNA, 416 bp, Homo sapiens
  misc_feature (72)..(72): n is a, c, g, or t
  misc_feature (75)..(75): n is a, c, g, or t
  misc_feature (271)..(271): n is a, c, g, or t
  misc_feature (313)..(313): n is a, c, g, or t
  misc_feature (335)..(335): n is a, c, g, or t
  misc_feature (342)..(342): n is a, c, g, or t
  misc_feature (369)..(369): n is a, c, g, or t
  misc_feature (401)..(401): n is a, c, g, or t
ggaataaataaaaaggaggaccacttgtgagccaacctaggaaggacttgccagaaagtagcagctcctgcnganagcatacagtgccttcaaaatgattctctgtgtgaattgcatgcaatttcatgtaaccataaagtgtaacctgtatgtgcatgacatgtgtctagaatgtgtaaagttaggattcagcaggaaggggcctggctcgtcactgtggtggatcagtggacctgctgaagtcactggactcatgtgacttaaggtttgnaacaatcaacttttcctttccctacttttgcaagcttttgcngggtttttaaactggctttcanttcttcntggcttcttgggtaaccctttttttcntttgtgaaaataaaaaccatgaaatacttaantcaaaaaaaaaaaaa

SEQ ID NO: 233 - DNA, 669 bp, Homo sapiens
  misc_feature (516)..(516): n is a, c, g, or t
  misc_feature (646)..(646): n is a, c, g, or t
ttttaaggtgtgaaaaggagaaacttcctatattctttcatagagcttttttctctcctaacaccaggagcacacacacaaaaggatcagcttcatgaaatatataagctctttaagttcacttggagctggattttgatggccaaaattctcttttccttctgacattgacattcatcgttcatccacagcattgatctggtcaaaacgccactgctggcgggcttttccatcacacggacgcaggtacaaatctttattgttttcttgcaccacagcttccatgcatttcccagaaagaatgtggacaatcatcccattctcctggaagtcccagtgctgctggtggatggccaggccttcctccgtgcagttctgaagaatcacctgctcctgcctgacagcaaagcacaggtgctgtgggctgccaaagtgaatctccttcctgctggtgtgctgcaggtactgttgctgccggctgtcactgcaaggagccaacaccatgggacagcccangatgtccccttctgccttgcagtctgcacagagcccaagtccagtgttgtggagctttccagagaaactgggcctgggttcagatggggtacagctagggtagacattagcccagaaccagtggaatgtncgaccacccagtctcccttgcag

SEQ ID NO: 234 - DNA, 328 bp, Homo sapiens
  misc_feature (216)..(216): n is a, c, g, or t
tttttttttttttttttgggtggatcgggtgccatgctacgggctcatttattgggaccgacggcatctgggacattccatccaggagcactcacaggcccacagccagctgtgagacaggagggagaggtcgatgttgggacagacagaacaggtggtaggagctgagagggggttgttctgatgggggagatcaggaaagccctcctggggagnggggctgggccgaccccatcccctccctgccacggctaagccactaaactacaccagagctgaggtacagctgagcttaaaatcagagctaagctaccgctgcctcgtgccg

SEQ ID NO: 235 - DNA, 567 bp, Homo sapiens
tccgtgccctccgcgaactgtggagtcggcggagggctgaatcagcgtggctccaggtcgctggcagctgggtggcagaactcttccgaggctccttgggaagaagctacacccgagggagccggatgggcctcgaaaacctggcccgctctggttctgtaccattgcaaggggaaccgtaaactgagcctttctaacgtaggtttctgccaagtacttttccagctgcccccttccccccagcacacaggagagcctctgtgtagccagcgcttgacagtcgtaaggtccagtgtatctttgcctgcctacatcaaatctgcaagggagttgcagaaagcctcatgttcatcgagccgtgagttcacaaccaatttctaagctgttataacaaaaaagtgtttgcttttttccacaagtaactttaaaagtgtagtctagaaagaaaccattttcaataaacagacactacattaatccaggatgcttgcaaatcctaaaatatattcctcctctagcgttgcacagttctgtgttgtatacacagactagcttaaaatttgtcac

SEQ ID NO: 236 - DNA, 527 bp, Homo sapiens
tgcacactcaccacatagcaggacaggctgggaaagagggagacatagcagtcatggtgtccaacctggggtcacgaggccgggaaggaggcagggcagtttggccaggcagttcaccatacccttgaacaggccgggaaggaagcagacaaagcggtccaagggttccacactggggtccaccaggctgggaaggaagcagagaaacttggccaaggggtcaaccatgctgctgaccaggctggaaaggaagtggagaagcttggccaaggtgcccaccatgctgctggccaggccgggaaggagctgcagaatgctcataatggggtcaaccaagccagcaaggaggccaaccagctgctgaatggcaaccatcaaagcggatcttccagccatcaaggaggggcacaaccacgccgttagcctctggggcctcggtcaacacgcctttcatcaaccttcccgccctgtggaggagcgtcgccaacatcatgccctaaactggcatccggccttgctgggagaat

SEQ ID NO: 237 - DNA, 219 bp, Homo sapiens
tggacacatgctggctgtgtggggtagagggaggaatgatggagggtaggagagccttgagcctgcgagaagagtctcttagaatagagaagctgaagttaaagttgtggaagagagtggggataactgagtgacagataatcaggagaagaaaaggagatccagactcatgacagagagatgacctttgccaagagcacagccgtctttcacggtcac

SEQ ID NO: 238 - DNA, 421 bp, Homo sapiens
gcgtcgacaaaacactagtccgttatcaacttcttcacagagaaagtagctatactataccctacatatttatttatttattattctactatagcagaataacaaaacttgatgcattaagccagttctttgcaactgaaaattacctgtttctccttccctttcacactccatgtatatatgatcagcctctccattaaaaagaagctggacatgcaagtacatcatattatgttttctccatattttatgtttttctatgtatctgaatacagtgggataaataattgaaagtagtgttcctatggcattagtgtttttgtgagaagggtaaatgtagtgagaaaggttttttcatggcattaataagaaagcccttctgtaatatatatattattttgtaaacatttcactgaagggc

SEQ ID NO: 239 - DNA, 294 bp, Homo sapiens
cgagaagacgacagaagggctgaggagcagacatcattccctgccctggcagtgacttggagccctgaagaagggaccaatcatgggaccacagccactgtgccctgccgtttcctgctgggcccctgcatatgcccctgagcctggggctgccacgtgtttaggaaacaaagtatgcgctactgtctgaaaacaaataaagcagatgcctttgttttcaaaaaaaaaaaaaaaaaaaaaaaaaaaaaaaaataaaaaaaaaaaaaaaaaaaaaaaaaaaaaaagtcgtatcga

SEQ ID NO: 240 - DNA, 403 bp, Homo sapiens
tttttttttaatgtccacttacaaggtctggttttatttaaaaagtttataaacatgcatttttttctccttttaaatttttcttttcaatttccttattcaaaatgggtcaaacgtattttagttggaagccaatttctgagaatgtaccatagaatatttattccaataaatctacttactgcgaactgaacatactctcggcactgttttttaagcacgtacaatttggctatacattgggtggcgtaaacttcacttcttaatcaaataaaaaacaagttgtatataaactgtattattttttaagtcatgaatttaagtgatgcagctctatccctctgtgtgcactgtacatgtattagaaagatgaaataagatattgcaatagagtttatatttg

SEQ ID NO: 241 - DNA, 4206 bp, Homo sapiens
  misc_feature (1667)..(1667): n is a, c, g, or t
gtcgactcgatctcggcccactgcaacctccacctcctgggttcaagcaattctcctgcctcagcctcctgagtagcttggactacaggcacgtaccaccatgcccagctaattttgtatttttagtagagaaggggtttctccatgttggtcaagctggtctcaaactcctgacctcaggtgattcacccacctcagcctcccaaagtgctgggattacaggcatgagccattgcgaccggccatgaaacaatctttacatgaagcatccttatacaaattctgcatgctatcccattccgccttttattttcttcaagtgatgaaaaggaaggatgctcagagagaccagcaaggacatggcaggactgcaagttgcatccagggtccaaaccctcatccctgattccaaattccatcaccacccaccacccagcactgcctgtccagcccatcagttacgctactaattcacagcatcctttgaatcagtggaaagaaaaccctaaaaagttaccaaagaactaaacaaagttatcaattaatttataattaaccgagataatccttgtaaaaataactttcagcggagggtggatggccttaaatttccccacaaaaggtaaaactttcccagacatccctttctgaaaatgagatgtcagtggatgagaaaagcctgctcccaagagtaggtgtgaggtattgcacctaggcccactgctgggataagctggcacagatacacgggacatgatgctttcattctcaccttaaagaaagagacagagaagaaaaggaaggggagcaagtggagaaggaatacaagaaagaggaagagaagcaggaagattctacatacaggctggctgtgtttcccctggggcatgctcctgtttactggtcccatgccaggttgactcattgcctcgttcatgggtggaattaagatgcctacctggggaataaatagagcaaggctgggtgctcacctccacagcggcttccttgatccttgccacccgcgactgaacaccgacagcagcagcctcaccatgaagttgctgatggtcctcatgctggcggccctctcccagcactgctacgcaggtgagttctgtgcagggagggctgcctcggggttaggggttgtcacttgggcctctatggaagaactcctgctccccaattctcagcagagatcagccccagtacaaaggctgtaggtttaacagatctcaccatgttgcccaggctggtcttgaactcctgagctcaggcagtctgtccacctcggcctccaaagtgctgggattataggtgtgagccaccacactgcctagatactgaaatcttctgtgatgctctgaatggtaatagtgaagcatcgtatgattttgaaccaaagaagaccaaataatcttcacgatatacttccaagtccgagtgtttcatttctcaagtcttgtcattaaatgaagtttcatgaggtttagcttttctgggctggggagtggagagaaagaagttgcagggcttacaggaaatcccagagcctgaggttttctcccagatttgagaactctagattatgcatcattatctttgagtctatattctcttgggctgtaagaagatgaggaatgtaataggtctgcccaagcctntcatgccttctgtaggaagcttgtttccttgtgcatccttcccaggctctggctgccccttattggagaatgtgatttccaagacaatcaatccacaagtgtctaagactgaatacaaagaacttcttcaagagttcatagacgacaatgccactacaaatgccatagatgaattgaaggaatgttttcttaaccaaacggatgaaactctgagcaatgttgaggtgtttatggtaatttcattttcttcctataagctttttaaatcccctgaccagggacaagtgggctcttcatttctcactgacaatgccaaagccactagtgaacaagccttttcttacattggttaatttagttgaatggttagtctaatgacgtttgccatcaagaaaaacatccagtgtccctgtgttgtcactctacccagagaatcctcagtggatgataaatgaatagggcaagagaggaaaaggaaaggtcggtagaagtcttacctatccccagagctctctaattcatgctcacaaacacagacacaatcacacaaacacagaaacacacatacacacatccagacacatgcaaacacacagacacagtcacaatcacacaaacacacacacattagacatacacaaacatagacagacaggcaaagacacagacacagacacagacacaatcacaccagcacacaatcatccagacacaaacacaaacacacagacagaaccacacaaccacagaaacacagagacacacacaaacacactcagacacacacatacaaacatatgttcactctctacagaaaaaacaattttccagaagacccgcacctatagaccaatctgcagagaaaacttctcttcttcaaaaaaaagtaaaagtgttctttcttaaaaaatgccctatttttcaacagtttggaaaataccatttgagcaagattctatacatctcaaataaaaagaatttaaaatgcacttccaggcaatcataatttgctagcataaatgatgagaaaccttggactatccaataggcaactgtagatcatgggtatgaaaccaccatggaggaagaattgcctcaaacaaaaaccaatagttttgtatttctttctaactatacatgtatattgttgagggttttctttagcatttattccctatgttaaattcttctttaatcgttccctggtaaaaaaaaaaaaaaaaaaaaagttagaaatataccaaacccctccattaggatgaaagtgaacatcacctcaggaaaccctgacgctttctacaacatggatgaaccttgaggatattatagcgagtgaagagtgaagcaaagagtcacaaaaacacaaatgctgcatgacccatgcatatgggaatctggggagccagactcagagacagtgaaaaaaaaaaaaacagtggttgtcagggcttgggtgcagagaagaagggggagtcatatttaatgggtctggagtttcagttgtgcaaaacagtaatattctggagttaggttgcacaaccacacgaatatacagaacactccgaactgtccccttaaaatggcaaattttatgagatgtacattttaccactattaataatttgttaaaaactaattatcaactgcagggaagggtgatggatttgtttcttttaaaacttcctcagacagatcatagtctgcagctccaataattagtagagcacaatggtggtggcagagggcgtcggactgctgggatgctgggaatatttccacaatggagggttagacgagagctcaaagtttcacttttttttttttttttttttttgcatttgagctaagattttaacaatcctgtgaaaataggtaatatagtcacgtatttgttgaatacattatttcaaagaaccacaaacacacagaaaaaatatttaaaaagtccatggtgggggaaatgatccagaaacaacagctcttctacttccagccctaaccgtctgggatgctagatggttgtgggcaaaccgtggaaaaagataagcttctgtttttcaagattttattttgttagagagtgcagaaaatctaagtgatgtctctgtttttgctttctagcaattaatatatgacagcagtctttgtgatttattttaactttctgcaagacctttggctcacagaactgcagggtatggtgagaaaccaactacggattgctgcaaaccacaccttctctttcttatgtctttttactacaaactacaagacaattgttgaaacctgctatacatgtttattttaataaattgatggcaaaaactgaagtttctctttgttctaccgtagaaaagaggcgttagagggcctcacatattttacatacacacacacacacacacttacttattaaagaactcatggtcatgggttgaggactctgtgaagcatttgtttcctcagtctgacctctaagccttggtactctctctgaagagtgtttccctgtccccatcccaccacctcccccgtcgac

SEQ ID NO: 242 - protein, 93 aa, Homo sapiens
MKLLMVLMLAALSQHCYAGSGCPLLENVISKTINPQVSKTEYKELLQEFIDDNATTNAIDELKECFLNQTDETLSNVEVFMQLIYDSSLCDLF

SEQ ID NO: 243 - DNA, 232 bp, Homo sapiens
tttyttttttttttttttttttagaaatctaaaattaaatatttaattagaactctgatttgctttaaagattggtggcattgcacaggctatattacaccctctttataattttyttgacaaaaaaaagatactgttcattttaacaggccactttaatattaatacatgtgtaatagggttggvactgaaaatcagctagagatggtacattttacattattgggraaat

SEQ ID NO: 244 - DNA, 413 bp, Homo sapiens
cttgattgctaattttgttaagttcataagcgatacttacatatgtacatgtggaggctggaatctgctctggttgatgttgtagtgcgtgaatgcctgggtggggtttgagctgtactcatccaccgttatggtaactttgccttgagaaggaatcccatgtgccatccttcctccctataggcatgagcaattcacaactttacagagcaaaagatggaagcaggcatggtgcgtttcagccaacctctgaatccaaggatctactcatcaataccgctgtgcatttctgctccaaatccgccaaatttcgctctctcctccctctgccgcgcagatccagtgcgttcttaattcacgcccctactcttttatgcccacttccagatactcatccctgtatctgggagcga

SEQ ID NO: 245 - DNA, 648 bp, Homo sapiens
  misc_feature (405)..(405): n is a, c, g, or t
cagcagaggggaaattgtggtcattggtgctacgaacaggctagattctatagatcctgctttacgaaggcctggtcgctttgatagagaattcctctttagcctgcctgataaagaggctcgaaaagagattctaaagattcacaccagggattggaatcccaaaccactggacacatttttagaagagctagcagaaaactgtgttggatactgtggagcagatattaaatcaatatgtgctgaagctgctttatgtgctttacgacgacgctacccacagatctataccactagtgagaaactgcagttggatctctcttcaattaatatctcagctaaggatttcgaggtagctatgcaaaagatgataccagcctcccaaagagctgtgacatcacctgngcaggcactgtccaccgttgtgaaaccactcctgcaaaacactgttgacaagattttagaagccctgcagagagtatttccacatgcagaattcagaacaaataaaacatttgactcagatatttcttggcctctgttagaagtgacttggctacaatgatgatgatgttccatcagtttatgaaaatgggacttcctcagaaatcttctcataaggcaaaagaccaatttaatttttttcaa

SEQ ID NO: 246 - DNA, 271 bp, Homo sapiens
  misc_feature (12)..(12): n is a, c, g, or t
  misc_feature (27)..(27): n is a, c, g, or t
  misc_feature (30)..(30): n is a, c, g, or t
cacgtcctaatncgctcagctacgtcngcnatgagctcacccagtccttccaccgactctcggtctgtgtgtatggcaacaatctccatggcaacagtgaggtgaaccttcatggttgcagggacctggggggagattgggctccctttcctcatgacatcctgccctatcaggactctggagatagtgggagcgactaccttttcccagaagctagtgaagaatcagcaggcatcccgggaaagtcagaacttccctacggaagagctgt

SEQ ID NO: 247 - DNA, 281 bp, Homo sapiens
cttttttttttttttttttttagtagagatagggtttcaacatgttagccaggatggtctcgatctcctgacctcatgatcttcctgctttggcctcccaaagtgctgcgattacaggcgtgacactgcacccagcccagagttttttttaacaaggttcttctcagcaattctagtatccagatataggcccatcatagacatcacacaagcgtgtacttcataatcctggtgaatacagaagtttcctggactccttgaggagctactgcgtcgacgcg

SEQ ID NO: 248 - DNA, 276 bp, Homo sapiens
ggtgattcaccaccatttgtgaaaggaccaacgtgctgataaacaggaccgatccgagtgctacatgactgtgcgtttgctatttcaatgggcctgaacgactacaaagccagctaggtctggaaggggaagccagctctggccacgacatctggtcggagggaagtggggatgtggcatggtagcgtctgttcatccatggaataaaacattattttaccacaaaaaaaaaaaaaaaaaaaaaaaaaaaaaaaaaaaaaaaaaaaaaaaaaaaag

SEQ ID NO: 249 - DNA, 654 bp, Homo sapiens
caagagtcaaattgtatccgttaagggttttctaacttttgctatcccccccgcgaccaaaaaaagggggggtttataatttaaagaaaaggaaaagaggcgtgggttggtagttgtgtccttaacattcaggaatgacatagcctctggagtctacaaactgaagaaactttcatctgatcagccttggaaatccaaagttaaagagcctatgtgtctcttgaggcgggggttagaggattcaaatttcggatgatgctcattgattcctgaccatagcagtgagaggccattttttgtgcgggaaatgtgcttaggactcactcttgttttcgattatccaccacagaaaccctgagacacagagcagcttaaaagtctctacccatgcgtaaatagagctccctactgcagaccacctgccacccacctcccaagttgagaacacaagctccagctgggctggagagtcaggcttggtgcaaggtgactttggcgaaggtttgtcagatccataaagcaaactggaatttgagctttcacttaccctaggatacgttcttcaaaaaaaaaacaaaaaaccttgagggggggccccgtacccaatttggccttttgtgagtcgtattgcaataaactggccgttgttttaca

SEQ ID NO: 250 - DNA, 564 bp, Homo sapiens
  misc_feature (19)..(19): n is a, c, g, or t
  misc_feature (25)..(25): n is a, c, g, or t
  misc_feature (43)..(43): n is a, c, g, or t
ccgcggcgagcaggcggantgcggngtcgggacgctctggtgngggcggggcgcaagggaggtttcgagcccggaaggtccggcgcccagagctaacgggagtcccaggttaaacactttaagatgagaaaaattgatctctgtctgagctctgaagggtccgaagtgattttagctacatcaagtgatgaaaaacacccacctgaaaatatcattgatgggaatccagaaacgttttggaccaccacaggaatgtttccccaggaattcattatttgtttccacaaacatgtaaggattgaaaggcttgtaatccaaagttactttgtacagaccttgaagattgaaaaaagcacgtctaaagagccagttgattttgagcaatggattgaaaaagatttggtacacacagaggggcagcttcaaaatgaagaaattgtggcacatgatggctccgctacttacttgagattcattattgtatcagcctttgatcattttgcatctgtgcatagcgtttctgcagaaggaacagtagtctcaaatctttcctcataatgatac

SEQ ID NO: 251 - DNA, 305 bp, Homo sapiens
ttgagaagagctttcagagtggttttatcattaaattaatatctaatcacataattcaaagatataaaaattggaatgtagaaggtggggcaagcccctccctcaggactggaggcggcagcagggacagagccgcactgaagcgggtgagcgtgcgagaaacatacagccgagcaggctgccccgaacactcagtccagggtggaagcatcgccccggcaccccccaacccccgagcccactgcgcagcccacaggaagagtgcaggcttttcacatttcagagggtggggtggggtggggtgg

SEQ ID NO: 252 - DNA, 1581 bp, Homo sapiens
ataactaaattacattttcttggtcttttgactatgaaatagtttaccctagcaacatgaaaaacaagagacctaagctattagaagaaatgcagttctatgtatcttgtgtgtatagtttttccctgggtggttttcaacgaccagtgactccttagctggtttcctcagctgctagcacttgctctgggtacttgtcctcaacacgtccatctgcaacaatgtgtgcctaggaaataaactcaacttactactcacccaaccaaaatgtaattttttaaacgcagcacacactgggtggattccaaagtcatgattatgctttactatgcactctgtactattcagaccactactctcattcattactgcaattaactgcacacataactattttttattgctaattatacaccactgatttccactttaaaaaaacattagcatttgtctctaattaaatatttactgcttgtgttttacagacccgatatcaggttcttctttagactgggcttatgacctgggcatcaaacacacatttgcctttgagctccgagataaaggcaaatttggttttctccttccagaatcccggataaagccaacgtgcagagagaccatgctagctgtcaaatttattgccaagtatatcctcaagcatacttcctaaagaactgccctctgtttggaataagccaattaatccttttttgtgcctttcatcagaaagtcaatcttcagttatccccaaatgcagcttctatttcacctgaatccttctcttgctcatttaagtcccatgttactgctgtttgcttttacttactttcagtagcaccataacgaagtagctttaagtgaaaccttttaactacctttctttgctccaagtgaagtttggacccagcagaaagcattattttgaaaggtgatatacagtggggcacagaaaacaaatgaaaaccctcagtttctcacagattttcaccatgtggcttcatcaatttatgtgctaatacaataaaataaaatgcacttaatgctttaaaattcatctttttatgataaacaatattctctgtatttctctatagcattaataatcaatattaatgccattcattcagtctgttaataagaaataatatcttcaattttcaaaaacataatttgcctatctttttctgatagaagtagacattgtttatatcttcaaaaaagcaaaaggatgtcctagcaggaaataaagtggttcatatagagatgaatctcagtcctttaaataaccgatccagttctcatcagcataatgtacattaaattcaaaatagtttaatttaacctgccataatcagaagaaaccacctgctaaaacatctgtttgccggtacagacacagacaagacagtctggtcagctgtgacccctgccctcctaatggatagaaaggaaacctggaaacatactgtaagttgaggacggaaagtcatgttgaccaaaggcaatcagggtaacttgctgcatttgtaccatttatactcctattatttaagatagtattattggatagcttctccc

SEQ ID NO: 253 - protein, 417 aa, Homo sapiens
MRLILPVGLIATTLAIAPVRFDREKVFRVKPQDEKQADIIKDLAKTNELDFWYPGATHHVAANMMVDFRVSEKESQAIQSALDQNKMHYEILIHDLQEEIEKQFDVKEDIPGRHSYAKYNNWEKIVAWTEKMMDKYPEMVSRIKIGSTVEDNPLYVLKIGEKNERRKAIFMDCGIHAREWVSPAFCQWFVYQATKTYGRNKIMTKLLDRMNFYILPVFNVDGYIWSWTKNRMWRKNRSKNQNSKCIGTDLNRNFNASWNSIPNTNDPCADNYRGSAPESEKETKAVTNFIRSHLNEIKVYITFHSYSQMLLFPYGYTSKLPPNHEDLAKVAKIGTDVLSTRYETRYIYGPIESTIYPISGSSLDWAYDLGIKHTFAFELRDKGKFGFLLPESRIKPTCRETMLAVKFIAKYILKHTS

SEQ ID NO: 254 - DNA, 925 bp, Homo sapiens
  misc_feature (591)..(591): n is a, c, g, or t
ctattaatctttatttatatgatggttctctggaaagcacttcattttaaaacctgtttctgagataagtagcataaggcgcatttgaagaaatactattgttgtatcacagagaacttccatgccttgaaatcatttttttcagagtattattaataagatggtctagctatgcagagcaaaaaagaaaaaaaatcttcaaaagccaagactgtcaggcacatgaaggtatgcataaacggtcttcacatttaattttgtatgattcgggagatacctccatgtacatctaaccaggtcaggcagcataagtcctcagtaaccctgggtgtgccggcttcaagccaaagtattctgttgagtttggtttgtggagagacatttgaaatgttgcttcatagcttccattttctggagaagtggaagaaatgaagcatgaaaaggcctaggaatcttcgtcttctccaggctcttctccttctgcagtttcttcctcctcctcggcttccacttccgcaccctccatggctatttcttccgtctcttctgtggctgtctctccttcttcttcattcttctcctgggcttcanggaagttgcccacatcttcactgccctctttttgtgcctcagtttctccaccttcttcagccttctctgatccctttgagtctggaagaggagcccaaccaagggaaggaataaataatattctcttcttttgcagagaagaaagagtcaaaatccccacagtactggctcctcattgaagaatctgggagggcaaaggaatcccatttttgaggtttttctcttcaggaaacattctcttctatccacacttctgctttatctccaagcaatccaattcccttaaagccaattaattcgcttccaaaaaaccaaatactttctgctggttctt

SEQ ID NO: 255 - DNA, 725 bp, Homo sapiens
  misc_feature (30)..(30): n is a, c, g, or t
ggactacagctccatgactgctcgtgcagnagcagggcttctccccaggcagagaatagcagctcagggcagttctgcaccatatttatacctacttttaattgcatgcagattaaggactggtttatgcagaaatttctagggaaagggtggttatttccgggtcatcgggtctttgccatggaaaagggcagtagctcctgagtgttgccatggtgatggcaaactgacatggcacactggtgggcgtgtccaatggaaagatgcttccgctctgtccctgttttggctagtcctcaatttggtcctgtgtctgagccctacctccagagtcaagatctgtttcttacctccagagggtgagggaagccccttcagaggccacctcacccctccacccaaccacactgtctataaactgggcctggcccccagctctgcaagaaggtgagttaagttggggcggcctcagggcttttggaggagcaaccctgatcctgctccatgctcctgtccaggtctggggtcagtgacatatcagagaccccagggagacccatataccctgatgacaagtcccaggtacacacagagaccaaacactgctgaatcacctgtgacccttgtaggtttaagctctgccctgtggtttgtctggtctcactctggcataaagatttaccgagaagggtaatttgggattttaagaaaaaaaaaaaaaaccg

SEQ ID NO: 256 - DNA, 392 bp, Homo sapiens
attgcaaggactgaggctggagctccacttaagtggtttgatccaaactggaaaagcaacttccagcaaggaacatccagataaaccctttgcggaacaaaagagtgggccccctcctgaccacaaagatggaacccgctctccttgatacaatccacgaatttacatcttttaatcggctgtccactcaggcctaggcgtagtcagaaaatgacaccctccacacatgtgtaagcagaaattagctcaaccacggctgaccctatgtagttctgggtttgactggggagcactttcaaactcctatacttccgacgaaactcactggagcttttaagtcacacagttcaataatttgtatcccgccttcctggagtgtatcttccctgcta

SEQ ID NO: 257 - DNA, 455 bp, Homo sapiens
ttgaatttaggtgacactatagaagagctatgacgtcgcatgcacgcgtacgtaagcttggatcctctagagcggccgcctactactactaaattcgcggccgcgtcgaccaatgacttgaaatgttattgggattcaaagagtgttccataccatcaaattgactgcaacgtttatatgtacaaataattcttagctcatgactgtacaaaaattgggagctcagttatagtttggtgattgctgtggtactcctgtgattggggtggagcccaggaatctgcattttacatgcctctcacgtgattctggtaatgggccatggacccaatggactatccaatcctcggaatgtcgacgcggccgcgaatttagtagtagtagtcgacccgggaattccggaccggtacctgcaggcgtaccagctttccctatagtgagtcgtattagagctt

SEQ ID NO: 258 - DNA, 6784 bp, Homo sapiens
agcgaaatctccgtttcatggaggctgaggcaagagaaaatttcggagcctggatgtggaggagcccaacagcagaactaactcaggaaattgtctttcagaaaaaggccgaacgtaggctgggtctgagaatcaggctggggtaggtggaggaacctgcaagtttaaaggaaaaagaaaaggagagaatattttcagtgattatctctggtttgttatcattactaccatcttaaaggtaaaaagcattgcatttcaggtgttctttgatttttattttatttttttttttggtgcaattggctcatttaagaatttcaaaacatttaatgtaaaagcttttttttttttaaggaagtccataaattttggttcccagggttgcactggacttggaaggagtgctgttgtgtacatactattgtatggttttatttattattttactgtacaaatcagccgaaagaatttttccaagtgccatttcggatttattaatccttttttttttcctttcctcaaagatatttgctgttgtcatattaagcattggagactagaaaattactttccccctttgagctagagggtctcttgccaacagaaggacagctgagaaagctggatttaaaggatggttttatctgtactttgcagttaacagtgatattttgaaggcacatttttctgtgattcatttttttttggccatagtgctaaccttgaagagattcgtggctgggtttttggtttctgagaaggtcgtagtttttcctcttttcctttttttttcttttttcttttcttttctttttttttaaagcgggggaggggaagaggggctgagaaaggaaatcatgttcactggtagaagtagagtggagcatcagttaccagggtcctgagagctggaggagaaaggattctatcttcaagttgggaggccctcctctcaccttgctcaaaaattgcaagcgattcaatcctgatcaagacaccaaagctacaggattctggaaccgtggagacaccgagaaaccatgagtgtaaggttaccccagagtatagacaggttaagtagcctgtcttctctgggagattctgcaccagagcgcaagtccccttcccaccatcgccagccttcggatgcctctgagacaacaggtctcgttcaacgctgtgtcattatccaaaaggaccagcatggcttcggcttcacagtcagtggggatcgcattgttctggtgcagtctgtgcggcctggaggtgcagccatgaaggccggtgtgaaagagggcgaccggatcatcaaagtcaacggcaccatggtgaccaatagctcacacctggaagtggtaaagctgatcaaatctggcgcctatgtcgcactcaccctcctgggctcttcaccttcatccatgggcatctctgggctccagcaggacccatccccagcaggagctccccgaatcacgtcagtgatcccctcaccaccacctcctccacctctaccacctccacaacgcatcacaggacccaaacctctgcaggatcccgaagttcaaaaacatgccacccagatcctcaggaatatgctgaggcaggaagaaaaagaattacaggacatacttccactatatggtgacaccagccagagaccatcagaaggccggctctctctggattcccaggagggggacagtggcttggactctgggacagaacgctttccttccctcagtgagtcattgatgaatcggaactcggtactgtcagaccctgggctagacagtcctcgaacctcccctgtgatcatggccagggtggcccagcaccacaggcggcagggctcggatgcagcagtcccctcaaccggtgaccagggtgtagatcaaagcccaaagcctttaattattggcccagaggaagactatgacccgggttatttcaacaacgagagcgacatcatattccaggatctggagaaactgaagtctcggccagctcacctgggggtttttctacgttacatcttctctcaggcggaccccagtccactgcttttttacctgtgtgcagaagtttatcagcaggcaagccccaaggattcccgaagcttggggaaagacatctggaatattttcctggagaaaaatgcgcctctgagagtgaagatccctgagatgctacaggctgaaattgactcgcgcctgcggaacagcgaagatgcccgtggtgttctctgtgaagctcaagaggcagccatgcctgagatccaagagcagatccacgactacagaacgaagcgcacactggggctgggcagcctgtatggtgaaaatgacctgctggacctggatggggaccctctccgagagcgccaagtggctgagaagcagctggctgcccttggagatattttgtccaagtatgaggaagacaggagcgcccccatggacttcgccctcaatacctacatgagccatgctgggatccgtcttcgagaggcacgaccttccaacacagctgaaaaggcccagtctgctcctgacaaggacaagtggctaccgttcttccctaagaccaagaagagcagcaattccaagaaagaaaaggatgccttggaggacaagaagcgaaaccctatcctcaaatacattgggaagcccaaaagctcttctcaaagcacatttcatattcccttgtcccctgtggaagtcaaaccaggcaatgtgaggaacatcattcagcactttgagaacaaccagcagtatgatgccccagaacctgggacacaacgactctcgaccggaagctttcctgaggacctgctggagagtgacagttcacgctcagagattcgcctgggccgctctgaaagcctcaagggccgggaagagatgaaacggtctcgaaaggcagagaacgtgccccgctctcgcagtgatgttgacatggatgctgctgcggaggctactcgcctgcaccagtcagcctcgtcctctacctccagcctctccaccaggtctcttgagaacccaacccctccattcactcccaaaatgggccgcaggagcattgagtcccccagtttggggttctgcacagataccctccttccccacctcctagaggatgatctgggccagctgtctgacctggagccagagccagatgcccaaaattggcagcatacagtgggcaaggatgtggtggctgggctaacccagcgggagattgaccggcaagaggtcatcaatgagctgtttgtgactgaagcttcccacctgcgcacactccgggtcctggacctgatcttctaccagcgaatgaagaaggagaacctgatgccccgggaggagctggcccggctcttcccgaacctgcctgaactcatagagattcacaattcctggtgtgaagccatgaagaagctccgggaggaaggccccatcatcaaagagatcagtgacctcatgctggcccggtttgatggccctgcccgagaggaactccagcaagtggctgcacagttctgttcctatcagtcaatagccctagagctaatcaagaccaagcaacgcaaggagagtcgattccagctcttcatgcaggaggctgagagccaccctcagtgtcggcggctgcagctgagagacctcatcatctctgagatgcagcggctcaccaagtacccgctgctgctggagagcatcatcaagcacacagagggtggcacctctgagcatgagaagctgtgccgggcccgggaccagtgccgggagattctcaagtatgtgaatgaagcggtaaaacaaacagagaaccgccaccgtttagagggctaccagaaacgcctggatgccaccgccctggagagggccagcaaccccctggcagcagagttcaagagcctggatcttacaaccagaaaaatgatccatgagggacccctgacctggaggatcagcaaggataagaccttggacctccacgtgctgctgctggaggacctcctagtgctgctacagaaacaggatgagaagctattgctgaagtgccacagcaagactgctgtgggctcctcagacagcaagcagaccttcagccccgtgctcaagctcaatgctgtgctcatccgctctgtggccacagataaacgggccttcttcatcatctgcacctccaagctgggcccaccccagatctatgagctggttgcattgacgtcatcagacaagaacacatggatggagctcttagaagaggccgtgcggaatgccaccaggcaccccggagctgccccaatgcccgtccatcctccacccccaggtccccgggagccagcccagcagggccccacacccagcagggtagaactggatgactcagacgtgttccatggtgaacctgaacctgaggagctgcctggaggcactgggtcccagcagagggtccaagggaagcaccaggtcctgctagaggaccctgagcaggagggcagtgcagaggaagaggaactgggtgtcctgccttgcccttccacatccctggatggagagaacaggggcatcaggacaaggaaccccatccacttggccttcccaggccctctgttcatggaagggctcgctgactccgctctggaagatgtggagaacctgcgacatctgatcctgtggagcctgctgccaggtcacaccatggaaactcaggctgcccaggagcccgaggacgacctgacacccacaccttctgtcatcagcgtcacctctcacccctgggacccaggctccccagggcaagcaccccctgggggtgaaggggacaacacccagcttgcagggctggagggggaacggccagagcaggaagacatgggtctctgttctctggaacacctacccccaaggaccagaaattctgggatatgggagtctccagaactggacaggaatctggctgaagatgcttcaagcacagaggcagcaggaggttacaaagttgtgagaaaagctgaggtggcaggcagcaaggttgtccctgcactaccagagagtggccagtcagagcctgggccacctgaagtggaaggcggaacaaaggctacggggaactgcttttatgtcagcatgccatcaggacccccggactcaagcaccgaccactcagaggcacccatgagcccccctcagcctgacagcctccctgcagggcagacagagcctcagcctcagctgcagggaggcaacgatgatccaagacgccccagccgctctcctccaagcctggccctcagggacgtgggcatgatcttccataccattgagcagctcactctcaagctcaacaggctcaaggatatggagctggcccacagagagctgctcaagtcccttgggggagagtcatctggtggcaccacgcctgtgggcagtttccacacagaagcagctagatggacagatggctccctctcacctcccgctaaggagcccctagcttctgactccaggaacagccatgaactggggccctgccctgaggatggctctgacgcccccctggaagacagcacagcagacgcagccgcgtcaccaggaccataaccgtacaaaccaccaaatcctctgcgtccccactcctccttcagggactggcctgagaccggggcacagggtaggggggatcccaacactcctccctgtggaggaggcagttagggaaactaggatccagccaaggcccggggggagacccgcatgttgcttggtctgctcaagtcggagtcaggtttcagtgtcttttccctcccttagcccaaccctccaaggcctcatgtctcctaagcatgctgactgcatccgaaaggcccccactcaccatggtctgccctcaccccacatatgtgtgtacacgcgcacgcctgtatgtgcgctgccctcagacatgcaagtgaaaggaggaggcttctgtgtaaatgcactttcttcctcccctctttctccataagaccccaggcagaggtgggtgcctcccctcccctctttgtcactttggtttcctataaatatgtatgtatcgtatgtgcatctttgctattgtaaataactttgaccttttttgttcctgttcctgaagtgctggaggcagttatggaaggagctgcttagggaagaggggtttcacttgtatctccttagttaacaacccagttccaggatcgagcctaaagcgggagccaggcctgagtgttcctgtccctgtgagtgggaaggtcttctggctccccatcccacctggctccagagcctgccctccacagcttgctgccaagctactccctccctccctggacttctcatcttcacaagatggggatcatgggggtttcttaccccacctatgtccccctcttccccaccctgtccctgtagaaaaccagtgaagcaggtacggagctgaggactgggccccaggaggtggggacaggggtctgaatgccgagtccctgaattcacccaggaccatccaaggggccaccgcagcattggccccatcaccacgtcctcacccaactctccctgatgaatagaatatacacactgtgctaggtgtatatatacatatatatatatataaatatatatataatatataaaatatagatatggaaatgactgttctgctgttaagataatgtatactcttttattttcttcctttcatggttaagattttttttttaagaaaagttaaatatccttcaaaaaaaaaaaaaaaa

SEQ ID NO: 259 - protein, 1522 aa, Homo sapiens
MSVRLPQSIDRLSSLSSLGDSAPERKSPSHHRQPSDASETTGLVQRCVIIQKDQHGFGFTVSGDRIVLVQSVRPGGAAMKAGVKEGDRIIKVNGTMVTNSSHLEVVKLIKSGAYVALTLLGSSPSSMGISGLQQDPSPAGAPRITSVIPSPPPPPPLPPPQRITGPKPLQDPEVQKHATQILRNMLRQEEKELQDILPLYGDTSQRPSEGRLSLDSQEGDSGLDSGTERFPSLSESLMNRNSVLSDPGLDSPRTSPVIMARVAQHHRRQGSDAAVPSTGDQGVDQSPKPLIIGPEEDYDPGYFNNESDIIFQDLEKLKSRPAHLGVFLRYIFSQADPSPLLFYLCAEVYQQASPKDSRSLGKDIWNIFLEKNAPLRVKIPEMLQAEIDSRLRNSEDARGVLCEAQEAAMPEIQEQIHDYRTKRTLGLGSLYGENDLLDLDGDPLRERQVAEKQLAALGDILSKYEEDRSAPMDFALNTYMSHAGIRLREARPSNTAEKAQSAPDKDKWLPFFPKTKKSSNSKKEKDALEDKKRNPILKYIGKPKSSSQSTFHIPLSPVEVKPGNVRNIIQHFENNQQYDAPEPGTQRLSTGSFPEDLLESDSSRSEIRLGRSESLKGREEMKRSRKAENVPRSRSDVDMDAAAEATRLHQSASSSTSSLSTRSLENPTPPFTPKMGRRSIESPSLGFCTDTLLPHLLEDDLGQLSDLEPEPDAQNWQHTVGKDVVAGLTQREIDRQEVINELFVTEASHLRTLRVLDLIFYQRMKKENLMPREELARLFPNLPELIEIHNSWCEAMKKLREEGPIIKEISDLMLARFDGPAREELQQVAAQFCSYQSIALELIKTKQRKESRFQLFMQEAESHPQCRRLQLRDLIISEMQRLTKYPLLLESIIKHTEGGTSEHEKLCRARDQCREILKYVNEAVKQTENRHRLEGYQKRLDATALERASNPLAAEFKSLDLTTRKMIHEGPLTWRISKDKTLDLHVLLLEDLLVLLQKQDEKLLLKCHSKTAVGSSDSKQTFSPVLKLNAVLIRSVATDKRAFFIICTSKLGPPQIYELVALTSSDKNTWMELLEEAVRNATRHPGAAPMPVHPPPPGPREPAQQGPTPSRVELDDSDVFHGEPEPEELPGGTGSQQRVQGKHQVLLEDPEQEGSAEEEELGVLPCPSTSLDGENRGIRTRNPIHLAFPGPLFMEGLADSALEDVENLRHLILWSLLPGHTMETQAAQEPEDDLTPTPSVISVTSHPWDPGSPGQAPPGGEGDNTQLAGLEGERPEQEDMGLCSLEHLPPRTRNSGIWESPELDRNLAEDASSTEAAGGYKVVRKAEVAGSKVVPALPESGQSEPGPPEVEGGTKATGNCFYVSMPSGPPDSSTDHSEAPMSPPQPDSLPAGQTEPQPQLQGGNDDPRRPSRSPPSLALRDVGMIFHTIEQLTLKLNRLKDMELAHRELLKSLGGESSGGTTPVGSFHTEAARWTDGSLSPPAKEPLASDSRNSHELGPCPEDGSDAPLEDSTADAAASPGP

SEQ ID NO: 260 - DNA, 624 bp, Homo sapiens
cgtctgtcccaggggaccggaacacggagcaggaggagggcggtgaggcggtgcacgaggtggaggtggtcatcaagcacaaccggttcacaaaggagacctatgacttcgacatcgccgtgctccggctcaagacccccatcaccttccgcatgaacgtggcgcctgcctgcctccccgagcgtgactgggccgagtccacgctgatgacgcagaagacggggattgtgagcggcttcgggcgcacccacgagaagggccggcagtccaccaggctcaagatgctggaggtgccctacgtggaccgcaacagctgcaagctgtccagcagcttcatcatcacccagaacatgttctgtgccggctacgacaccaagcaggaggatgcctgccagggggacagcgggggcccgcacgtcacccgcttcaaggacacctacttcgtgacaggcatcgtcagctggggagagggctgtgcccgtaaggggaagtacgggatctacaccaaggtcaccgccttcctcaagtggatcgacaggtccatgaaaaccaggggcttgcccaaggccaagagccatgccccggaggtcataacgtcctctccattaaagtgagatcccactc

SEQ ID NO: 261 - protein, 488 aa, Homo sapiens
MGRPLHLVLLSASLAGLLLLGESLFIRREQANNILARVTRANSFLEEMKKGHLERECMEETCSYEEAREVFEDSDKTNEFWNKYKDGDQCETSPCQNQGKCKDGLGEYTCTCLEGFEGKNCELFTRKLCSLDNGDCDQFCHEEQNSVVCSCARGYTLADNGKACIPTGPYPCGKQTLERRKRSVAQATSSSGEAPDSITWKPYDAADLDPTENPFDLLDFNQTQPERGDNNLTRIVGGQECKDGECPWQALLINEENEGFCGGTILSEFYILTAAHCLYQAKRFKVRVGDRNTEQEEGGEAVHEVEVVIKHNRFTKETYDFDIAVLRLKTPITFRMNVAPACLPERDWAESTLMTQKTGIVSGFGRTHEKGRQSTRLKMLEVPYVDRNSCKLSSSFIITQNMFCAGYDTKQEDACQGDSGGPHVTRFKDTYFVTGIVSWGEGCARKGKYGIYTKVTAFLKWIDRSMKTRGLPKAKSHAPEVITSSPLK

SEQ ID NO: 262 - DNA, 347 bp, Homo sapiens
  misc_feature (153)..(153): n is a, c, g, or t
  misc_feature (177)..(177): n is a, c, g, or t
  misc_feature (179)..(179): n is a, c, g, or t
  misc_feature (294)..(294): n is a, c, g, or t
  misc_feature (309)..(309): n is a, c, g, or t
  misc_feature (324)..(324): n is a, c, g, or t
  misc_feature (336)..(336): n is a, c, g, or t
  misc_feature (341)..(341): n is a, c, g, or t
cgtcgcgttctgcccagtacgaacttcccgccgctttcgccgactcgtaactcggcagcggcgccggccccttcgcaccctgcagtatggagccttcccattggctcggaggcgacgaggaggggcgggacgagtggtaacgcgaggcgcggngcgaggctacgctagccccctccncncggggaaatgccgggaagctgtggtccagcgctcccaaggcatcctgggagttggagtctcttagcggcaaagggagatccccgtccttctgctccctgggtcttctaggaaatntggtttacagccttntttcgtagtagcttnatttattaagtntattngcagag

SEQ ID NO: 263 - DNA, 4167 bp, Homo sapiens
cggcagggagaaggtggatgaaggggccgccaggagggagctgaatggctttctcctggcctgtcctggcttgttgggcatggctcagtatcactcacagtgagagactgagccatgtttcccagccaagggtctctacgagcaggctaggaagatgctgcagtgagtccttctacctgtcttctccaaatgtactttcaagcctgctgggatggccctgcaaggcaggccaccatgcacagctttactcacagcccctggccaggactgccaaggctggcctcatgcagtgagtccggagggaagaccctaaagcttagagctggaagggcccagccctggcaccgactccctggggtgtggttcagggatgactgggacctgcccaaggccgcgcagtcctctgggaggaggcagggcttctaacacagtgcatttgggcttcaagttcatggctctttccagttctcagattacaggcagcaagcagccaagtaacagagaattcctatttccaagtagggaaattgaggccaaagcagattaaggttctcagctgaggtgatgctgtgagctgggggtgtggtctccagtgacccagatgtgaaccagagctgacccaggctgttggtgcccctggaatcctggagagaactctgccttcctattttctccttgtcccctgaggcgacttttcttgagtagatttcctagtggatttcaggagggcagggtaaaaacatgtttagaccacgagagaaaggggctgggaaagttcaggggtctttccatgtcagcacgcttggagcctgcacacctagaaaagaatatggctgcttcgagtgcagcaggaaggatgcaggttagacttaagcaggaacttccaggccttggagaatgtccacctggtaagaagttctccaagatccttttgcgggcttctcctagaggttattaaatattcccactcttgatataaaccctaactagtgtagtgatggcacattagagttgaccaggggctgcattagaaacatctcaccgtttcttcagcccagccctgccaggtgagtgggacagtgctgactgttttgcaggccagggacctgagccttaggagcatgagggggactttggattctagatgtttcttgcttctctgcccctgtatcctacccgctggagcacacggttggggtggacacttcctggaggcagaagagtggaggagatggccttctgagttctccttggcatcctgctttggatgtggtggcgaggaccgtccctgtcctcagctctattcctctgagttgttgtggccaagagagaatgcagagtctcactccttagccttgttctatctcctcttgggccttgttctgctccaagtatgaagtgttcagttctccagaggggcccgacctgggaaagtagagaaaccacgtggcctggggccctggcagggagccaagtcattccttgggcctggggccagcctgctgcagccaggagctcgggcatgtggaggaaggtccctgctgctggccaggctgggcatgcatgccatgtggtcgccttacacatgcaggcatggccagagagagggaagcagatggggttgaagtgggggctatacattccagctcagcagccgccaccctaagacccagggagctctggggtgactgctggaaatggctctgccacttagtagcggagggatgaggcaaggtatgggtgagggggtcttgggtgtgttctgggctgcagtctccccattggtgtaatgaggtggtgaacatcaagaacgtctcgggtcctttcatccttagaccatctgtgattgttccaatcagagatttgttccagcacctttaaagctcttttttccaaccactgtgctcttaattacaaaccctagattcctagaggtcatctgcttgacccctccattggaagggagattgaagatggagacaggggttgactcccggaggccctcagcgtgtccaagcagaaccagtcctcagcatcaatcatgccattcctttttgcacattagctcagggctctaatgagccctcggagagcctgtaggctggttctagttcatctgttcattcagtgtccagttgtagctaagagaacagcttctggagtcacactgcctaggttcgaatctcatctctgctatgccagggctgtgtgactttggaaacatttcctagcctttcagaatcacagtttcctcatctcaaaaattcagccaataatagggacctgttgggtggtcacgctgttggggtttactgttgctatgattgtttcatcccaccatcatcgccctctggctagactcaggctgcattttgtctgcagaggttactcccctccagaaactgactcaaaattctgatgaccgtctctcccttgcttatacctcagagacattccctcacatggctgaggcctcccatgtggcagtgaggcaccctcactgaggcacccttcatgtggcatctcagctcatcctcacagcactcccttttggatggcaaagagaactgaggccccaagaggcctgtgggtggtgcagtcaggactgtcttggggcaggctggccagcctggaatggcctctgaatgcagacccatgggtctgagacctgcctggcagctgctgtatgtgaatatattgggcatcacagggtcctaaaggatccttagagatcacacacctccaacctgagcaggacagagggtcaagtgtgggggcctgcccaaggtcagacagccagcctagaggagagccagggctcatctgcaggccatctccatatgctggacttggagaacagggcaggactacaagttctgtcccttgtaggccatgtggagtcagccaggtgcccagccagacaacattgcccttgtctcaaggagttgctttcctctcctaccaggttcttctaccccaaagttcagaggccagaggtgggaactcaatgccttcagaaggtgccctggctggacgccatggctcacacctgtaatcccaacactttgggaggccaaggcaggcagatcgcttgagcccaaggagttcgagaccagcttgggcaacatggagaaaccccatctttaccaaaaatacaaaaattagccaggtgtagtggtgtgcatctgtaatcccagctacttgggaggctgaggcggcaggatcactaggaggcagaggttgcagtgagcagttatcacagcactgcacttcagcctgtatgacagagtgagaccctgtatcatgaaaaaaaaaaaaaggaattccctgttatgacagagagatgatgaaagtaggcagggctgtgttcctttgtgtagcctgtatatattttccatatgtagagccctgattaacttcaaggacaaacactggctggagaaagccagactgatgggaatgagactttggccaaaaatcccaaaacatcattttcaatcagtaaagaagtgcttagggttgaaaattgatttcatttgctactgaatttggtaaatcctgggtaacttttatcaagatgaagacattttaccctacctactctagaaatatacaacaatgttatattttacactccttggaaacatttgaggaaaaaaatgcaatttgcacttcactttgttggaatatcccatagcactcaataaactcagctgctagagtgccgatgtcaggagggctgtgtcgggtaatgcgtgtggctgaatgggcataaccactgtggcttcttgtgctgcagaagctcgttgacaagactgaggaggatttcaagagcaaccaagtaaagtcatgcattttctaattttgtgtatatggaatatatttttaaatagagatttttttactttagataatgtgttaatattgctattacctaggttaagcactattgtctgtgctagtaagaaaaagaaaggaaaaccatcattgctttatagtagcttatatcaatttagatttcatcattactattttgcatactggaatttataaatgtgtaaattatcattttcttagttttgtaataccttttttatttgtgaataaaattatcacctggtatttttaaaaaaaaaaaaaaaaaaaaaaaaaaaaaaaaaaaaaaaa

SEQ ID NO: 264 - DNA, 2546 bp, Homo sapiens
cagcggcggcccaggaggcagccggtgagcgcctgcgagcagagtggcgggggccgctgacaggtcccgcgcagcccagcccagcccagccacgcggctcacaggtggggtccaagagcagtttggagcaacccggcgctacggagaggggtggacggctctgcacgggcctcctgtctcccgctcgggcagagggactcggggggacctcgctccttggccgagagaacctgaactcgggcggagagaacgcgcccaggcgggcaaggggaccagagaaagccggggctggaagtcactgtcgctcgccactgtctggagcgcacggagcgcagaggcccggcagccgcgcgtgccctcccggggaccgagccagtgatgcaggatcgctgagcggagatccgcgccgagaagtctctcggggccggggctgagacgcacgccttcgacaccgctgccaagaccccgattccggcgactcttgcggggaaccgaggggccaaggctgccccaagctcaggacttgggcgagtctaagacgatggtttcttaagcacggacccgcgttccccttcccgccccctcgactggaggcagggatcctgcgcggggcccccgggattccgtttccccgcggagccccggccgctgcctcccgggacagttcgcacggccacaggggcgcacggcgatgtggcctccgtccagcgcgctggcccgccggggggatgctctggcacctgtcggggtccaggcctagcatggccggcgcgttgcccgacgtcgcctccggctaggatggcccctccgggcccggccagtgccctctccacctcggccgagccgctgtcccgcagcatcttccggaagttcttgctgatgctctgctccctgctcacgtccctttacgtcttctactgcctggccgagcgctgccagaccctgtccggccccgtcgtggggctgtccggcggcggcgaggaggcgggggcccctggtggcggcgtcctggccggaggcccgagggagctggcggtgtggccggcggcggcacagagaaagcgcctcctgcaactgccgcagtggcggaggcgccggccgcccgcgccccgcgacgacggcgaggaggcggcctgggaagaagagtcccctggcctgtcagggggtccgggcggctccggggccggaagcaccgtggccgaggccccgccggggaccctggcgctgctcctggacgaaggcagcaagcagctgccgcaggccatcatcatcggagtgaagaagggcggcacgcgggcgctgctggagttcctgcgcgtgcaccccgacgtgcgcgccgtgggcgccgagccccacttcttcgaccgcagctacgacaagggcctcgcctggtaccgggacctgatgcccagaaccctggacgggcagatcaccatggagaagacgcccagttacttcgtcacgcgggaggcccccgcgcgcatctcggccatgtccaaggacaccaagctcatcgtggtggtgcgggacccggtgaccagggccatctcggactacacgcagacgctgtccaagcggcccgacatccccaccttcgagagcttgacgttcaaaaacaggacagcgggcctcatcgacacgtcgtggagcgccatccagatcggcatctacgccaagcacctggagcactggctgcgccacttccccatccgccagatgctcttcgtgagcggcgagcggctcatcagcgacccggccggggagctgggccgcgtgcaagacttcctgggcctcaagaggatcatcacggacaagcacttctacttcaacaagaccaagggcttcccctgcctgaagaaggcggagggcagcagccggccccattgcctgggcaagaccaagggcaggacccatcctgagatcgaccgcgaggtggtgcgcaggctgcgcgagttctaccggcctttcaacctcaagttctaccagatgaccgggcacgactttggctgggatggataaccatataatttaaaaagaaaaaaaaaatcaaaatataatatatttttttaccaatcggtagagaagagacagtttaatatttgtgctgaaaatatgtttcagtatttttttcaatgaatgttaagagattgttctcactcccgccccatcttaatgtataaccaacaccaaacacgtggatcaacagaaaaggaaaatttcactcgtctaaacactttcaattttcagtttttattttatgttctatatacccagtcataaagtataagcatcagttgtcattaaaagttttcagaaaatcttgaggttaaacatctctctctctttttttaaaatacaaggccctgataaaattgatatctatccttatatttttctccctttttcccgtgccactttttcttaaattatttcccagttagtattatcatatgtttgtacccgtcacagttttcatagtgctttcaaatacacctttttgatcattaaaataaaaaaataaatcttggaaaaaaaaaaaaaaaaaa

SEQ ID NO: 265 - protein, 406 aa, Homo sapiens
MAPPGPASALSTSAEPLSRSIFRKFLLMLCSLLTSLYVFYCLAERCQTLSGPVVGLSGGGEEAGAPGGGVLAGGPRELAVWPAAAQRKRLLQLPQWRRRRPPAPRDDGEEAAWEEESPGLSGGPGGSGAGSTVAEAPPGTLALLLDEGSKQLPQAIIIGVKKGGTRALLEFLRVHPDVRAVGAEPHFFDRSYDKGLAWYRDLMPRTLDGQITMEKTPSYFVTREAPARISAMSKDTKLIVVVRDPVTRAISDYTQTLSKRPDIPTFESLTFKNRTAGLIDTSWSAIQIGIYAKHLEHWLRHFPIRQMLFVSGERLISDPAGELGRVQDFLGLKRIITDKHFYFNKTKGFPCLKKAEGSSRPHCLGKTKGRTHPEIDREVVRRLREFYRPFNLKFYQMTGHDFGWDG

SEQ ID NO: 266 - DNA, 8046 bp, Homo sapiens
ctgcggcggcgcgctccgagcctgcgtctagggcgcccccgggtcagagctgtcgccgtggccgccgctgcaaagaacaatgtaccgcaagcagcgctcgctcctccgtttcttcccaccggcctaaagacgacggcgggggcggcccgcgcagcggccgcagctctggctcctcttcaggcccggctcgccgcagctcaccgccgccttccgccctccggctcctcgtcgcggaccccggctcgccgaccccgctcgccctcaaggcaccgcggccgccgggcctcgccgtccccgccacgggttcgtcgcgtctccccgtccccgcctcgggcccgtcgcggctccccgtcgccaccgcggggccgacgactcttcccgccgggcccggccggcttcagaggcagcagccgaggggagtcccgcgccgactatgcccgggacggccgcggagaccatccaggcgacagcggcagccggagacgctctcctggtctgtgttctgactctttggaaaagagcttaaggatcactgttggcaatgaccacttctgtgttagcacaccagaacggcgacggcttagtgatcggctggggtcaccagtggataatctggaagacatggacagggatgacctgactgatgattctgtcttcactcgaagctcccagtgctctcggggtcttgagcgatatatttcccaggaggaagggcctctcagtcccttcttgggacaacttgatgaggactaccgaacaaaagaaactttcctgcatcgatctgattatagtccccatatcagttgtcatgatgagctgttgcggggaacagaacggaatcgagaaaaactcaaaggctactccatacgatctgaagaaaggagccgggaggccaaaagaccccgttatgatgacacagtgaagataaacagcatgggaggggatcacccaagttttacatcaggaactcgcaactatcgacagcgtagaagaagcccaagtcctaggtttctcgaccctgagtttcgagaactggatcttgccagacgaaagcgagaggaagaggaggagcgaagtaggagcttgagtcaggagctggttggggttgatggtggtggtactggctgttccatccctggattgtcaggtgtcctaacagcatcggagccaggatattctttgcatcggcctgaggaagtatctgtgatgcccaagaaatccattttgaagaagcggattgaggtggacataatggagccctccatgcagcttgagagtttttccagcagtaccagctccagccaggatcaccctctctactctgggcacccatcccttccactaagtggtgctattgctgcttttgcctcagagattgaaaacaaggggactatggtagagactgccttgaaggaacctcagggcaacctctaccaatggggtccccttcctgggattcccaaagacaacagtcctctcagagaaaaatttggaagttttctatgccacaaggataatttggatttgaaggctgagggacctgagcgacacacagacttcctgctgccccatgagagagctagccaggatggcagtggtttttcccgcattctgagcatgttggctgattctaccagtacacaggaaaaaaggcgacgtagctttcccgacattgaagatgaggagaaatttctctatggggatgaagaagaggatttaaaggcagaatccgtaccaaagccccttgggagctctgagagtgaagttatgaggcagaaggcaagctccctgccgtcttcagctccagctgtaaagctagaatcactagaagagaccaatccagaatatgcgaagatccatgacttgctcaagacaatagggctggatattggagtagcagagattagtcaattggctgcacgcacccaggaacgacttcatggcaagaagccatcattacgctcctcagctgaccgccgttcctcagttgaccgatacttttcagctgaccactgttcctcagttgaccaccgcttctcagctgaccgctgttcctcagttgaccactgcttctcagctgatcgacgttcctcagatccccacagactagagagcagggaggcacatcatagcaatacccactctccagaggtgtcccatccacacccaccttctcctgtggatccttacctgctcacaaaaaacagccctccattcctaaagtctgaccatccagtgggtcatatttcaggaccagaggtggttggtagtgggtttcagtcatctgttgcagtcaggtgcatgttgccatcagccccatctgccccaattagacttccacacactgctgctttatctcagtttcacatgccaagggcctctcagtttgctgcagctcggatacctccgaactaccagggacctgccattccccctgcctcttttgatgcctataggcactacatggcatatgcagcctccagatggcccatgtatcccacctctcaaccgtcaaaccaccctgtacctgaaccacacaggataatgccaataaccaaacaagctactcgtagccgtcccaatcttcgtgtgatccccactgtgactcctgataagcctaagcagaaagagtctctgcgaggctcaattcctgcggcccaagtgcctgtccaggtgtccattccatcactcataagatataatccagagaagatctctgatgagaagaaccgtgcttcccagaagcaaaaggttattgaagagagggaaaaactaaagaatgaccgggaagcccgccagaagaagatgtactatcttaggaccgagttagagcggcttcataaacaacaaggagaaatgctgcgcaagaaacgaagggagaaggatggccacaaagatcctctcttggtggaggtgagtcggcttcaggataacattatgaaggacattgcagagctacggcaagaggcagaagaggcagaaaagaagcaatctgaactggacaaagtggctcagatcttgggaattaacattttcgataaatcccagaagtctttaagtgacagtagagagcctacagagaagcctgggaaagcagaaaaatctaagagcccagaaaaagtgtcatcgttctcaaactcctcctccaacaaggaatcaaaagtaaacaatgagaagttttgtattaagagccccaagcctgccgaaagcccccagtcagccactaagcagttggatcagcccactgctgcttatgagtattatgatgctggcaatcactggtgcaaagactgcaacaccatctgtgggaccatgtttgatttcttcactcatatgcacaataagaagcacacacagacactggatccctacaacagaccttgggcttcaaagacccagagtgaggccaagcaagatgccataaagcgcactgacaagataactgttcctgcaaaaggctctgagtttctggttcccatcagtggattttattgccagctctgtgaggaatttttgggggatccaatttctggggagcaacatgtgaagggtcaccaacacaatgagaaatacaagaaatatgtggatgaaaacccattatatgaggagcggcggaatctggaccgccaagctggcttggctgtggtcctagagacagaacggcgacggcagagtgagctaaagcgcaaacttagtgagaaaccaaaggaggagaagaaagaaaaaaaggcaaaggctgtgaaagaagtaaaggaggatgacaaggtctctgagaaattagaagaccaactctctgagggtaggaactcccctgaaaaagctgaaaataaaaggaacactggcatcaaactccagtttaaagaagaagtaaagaaggaatcaccaacatcatcttcttttgggaaattcagctggaagaagcccgaaaaagaagaggagaaaagttccttggtgaccccaagtatctctaaagaagagattctagaaagtagtaaggacaaagaggatggcaaaactgaagctgggaaggcaaagcctatcaaaatcaagctctctgggaaaactgttgttgcacataccagcccttggatgcctgttgtgacaacttccacacagactaagatcggacccaacctgcctattccatccacagtactccgcaagtcatgttcagccacaatgagcaagccagctcctcttaacacctttctgtctattaagtcctctggaaccactgctaaacctctgccagtggttaaagagtcttcagctgatctcctcttacctccagacatcatctccaaagcatttggaggggaagaggtgattctaaaagggtctccagaggaaaaagtggtgttggctgaaaagagtgagccatctcatttacctgaacaaatactaccacctcctccaccacccccacctccaccacctccaccaccccccgttatacctcatccagctgccccgtctgctgctcaagcaaatgctatcttggctccagtaaaatcaaacccagttgtatctcaaactctcagccctggcttcgtgggtcctaacattttgaacccagtgttgcctgtagccatcatggcctcagcacagccagctgccattccttctgatgagacagctcctggggtgagtgagagtgaccgagaccagaccctgttctctgtgttagtacgtcctccaccacccctctcaagtgtgttcagtgaacaagccaaaaaattagagaagcgaaattcatgcttagccacagccaatgctaaggacctgtatgacatattctatagtagtggtggaaagggggcccctgagactaagggggcccctgagactaagctaagtggtggtccattggccaatggggaaaatagcaacctctctagaaccaaaagttcagacacctcttctacttctcctttgaacagcagtgcatcccaagaggagttgcatcaagatgagggtttggtcgctgctcctatagttagcaactctgaaaagcccattgcaaaaactctggtggccctagggaaatggtcagttgtagaacatgtaggcccaaaaagcacaggcagcacctatggcttcctacagcctctgacaaggttgtgccaaagcaggccttatgaaacaattaccccaaagacagacactttggccatatggacctctagttccttccagagtgacactagtagggatatatctccagagaagagtgagcttgacctgggagagccaggaccacctggtgtagaaccacctcctcaactgttagatatacagtgcaaagaatctcagaagttggtagaaatccacctcagagaatctgttaaccaggataaggaaagccaagagctccgtaaatctgaggattgtagagaaagtgagatagagacaaacactgaactaaaagaaagggtaaaggagctgtctgaggggatagttgatgagggagcaagtaccagcattggaccccacagcatagatgattctaatttgaaccatggaaacagatacatgtgggagggagaagtaaaacagcccaacttgctaatgattgacaaagaggctgaacagtccaataaattgatgacaggaagtgaaactccaagtaaagtagtgatcaaattgagtccacaggcttgctctttcacaaaggcaaaattagactcatttttatcagaagctaggtctttactcaacccacaagatacacctgtgaaaatttctgccccagagttgctgcttcattccccagccagatcagctatgtgtttaacaggtagtccacaagagcaaggagtttcagttgttagtgaggaggggctagagaattcagctccagaatcagcttctagaacttctaggtacagaagtctcaaactcaagagagaaagatcaaaagactttcaagttaaaaagatctatgagttggctgtttgggatgaaaacaagaagaggccagagacctgggagagcccagagaaaccaaaaacagaagcactggagctacaagatgtccatccagagttaacagtgacaatagaaagcaaggccctagaagactttgaagctacagacttaaaggtagaggagcttactgccctggggaatctgggggatatgcctgttgatttctgcactactcgggtaagcccagcacatagatccccaactgtcttgtgtcagaaagtgtgtgaagaaaattctgtatcacctatagggtgtaattcctccgatcccgctgacttcgaaccaatcccatctttttctgggtttccgttagattctcccaaaaccttggtgcttgactttgagacagagggtgaacgaaactcacctaatcccaggagtgttaggatcccttctcctaacattttgaaaactggacttacagaaaatgttgaccgtggcttggggggcctagagggaacacaccaggcccttgacctgttagcaggaggaatgatgcctgaggaagtaaaagaatcttcccaattagacaaacaagagtcactcggattggaattaaaaacaattaattttgcaggccttgggccatctccttgccttccagaccttgttgactttgtcacacggacctctggagttcaaaaagataaactgtgttctccactctctgagccaggtgacccttctaaatgtagttccctggagttggggccattacagctagaaatatcgaatgcatccaccacagaggtggcaattctgcaagtagatgatgacagtggcgaccctctgaatttggttaaagctccagtgtcaaggtcccctccaagggagcaggtaattgaagacaatatggtccctcagggaatgcctgaacaggaaactacagttggtgccatccaggaccacacagaatccagtgttcacaactaagaataaatacctagagctacttgtgagtgaatcattggcttctagaaatcagatgcccagatgatccaagactagtttgttatctcatctggaacctacaccaagagatgcagtcagcatcttaaagtaaatgttcatggaagctaaaaaatttacctcctttccttttccctttccccttaaaacaccagacaaatcgataacaacttatatatatatatatatatatctgtaaaaatgtattttgttaatttttttggccaatttattttctcccactttgtcattaaaatcacatgtctaactggctcaccacatagtgtgctttgattgtattttggctttgactctgccatttctgaaatgtgggggaggatggaggcagctgacctctccagttgctgtgttgtattcctacccaatttcctgggcagttgatgcatctctgggaaaaacaccagaaagcttgctgaaatggaaaacttggaagaattgttcatctcttaggcttccatttggatgggcctgccttaacattgtttgaaatgcagcgtgagtagctcttttgtttactgtttacaccccttattggcatgtcaactcctgtacttcccttactctgttgcctttcttgagatgcattgtcctgctaacccacaaacctgtttggaaataaacatggaagaatatctggcaggcttacttttagaagacgacaaatcggtaaggcttattcatggttcattgccaggagcagatatgcttttgagatcacttttatttttgaaatggcctttgttcattgtattgtgatccaataacactttgtattaaattgtttagcagccatttgtgttgtgaaggggtagaagatctctgaaacttgtctttagattgaactcattccctgttccacaaacccatatgtatcctttcctcaacctcctcctttcccaattaatttcaaccatagtacgatgtttggggttgtatattttgttaaaaagattaaagaatttatgagttggcttggacaagtttaactttatttttaatgtgttaattacttggaataaatgcattaatttcagaaaaaaaaaaaaaaaaaaaaaaaaaaaaaaaaaa

SEQ ID NO: 267 - protein, 2099 aa, Homo sapiens
MDRDDLTDDSVFTRSSQCSRGLERYISQEEGPLSPFLGQLDEDYRTKETFLHRSDYSPHISCHDELLRGTERNREKLKGYSIRSEERSREAKRPRYDDTVKINSMGGDHPSFTSGTRNYRQRRRSPSPRFLDPEFRELDLARRKREEEEERSRSLSQELVGVDGGGTGCSIPGLSGVLTASEPGYSLHRPEEVSVMPKKSILKKRIEVDIMEPSMQLESFSSSTSSSQDHPLYSGHPSLPLSGAIAAFASEIENKGTMVETALKEPQGNLYQWGPLPGIPKDNSPLREKFGSFLCHKDNLDLKAEGPERHTDFLLPHERASQDGSGFSRILSMLADSTSTQEKRRRSFPDIEDEEKFLYGDEEEDLKAESVPKPLGSSESEVMRQKASSLPSSAPAVKLESLEETNPEYAKIHDLLKTIGLDIGVAEISQLAARTQERLHGKKPSLRSSADRRSSVDRYFSADHCSSVDHRFSADRCSSVDHCFSADRRSSDPHRLESREAHHSNTHSPEVSHPHPPSPVDPYLLTKNSPPFLKSDHPVGHISGPEVVGSGFQSSVAVRCMLPSAPSAPIRLPHTAALSQFHMPRASQFAAARIPPNYQGPAIPPASFDAYRHYMAYAASRWPMYPTSQPSNHPVPEPHRIMPITKQATRSRPNLRVIPTVTPDKPKQKESLRGSIPAAQVPVQVSIPSLIRYNPEKISDEKNRASQKQKVIEEREKLKNDREARQKKMYYLRTELERLHKQQGEMLRKKRREKDGHKDPLLVEVSRLQDNIMKDIAELRQEAEEAEKKQSELDKVAQILGINIFDKSQKSLSDSREPTEKPGKAEKSKSPEKVSSFSNSSSNKESKVNNEKFCIKSPKPAESPQSATKQLDQPTAAYEYYDAGNHWCKDCNTICGTMFDFFTHMHNKKHTQTLDPYNRPWASKTQSEAKQDAIKRTDKITVPAKGSEFLVPISGFYCQLCEEFLGDPISGEQHVKGHQHNEKYKKYVDENPLYEERRNLDRQAGLAVVLETERRRQSELKRKLSEKPKEEKKEKKAKAVKEVKEDDKVSEKLEDQLSEGRNSPEKAENKRNTGIKLQFKEEVKKESPTSSSFGKFSWKKPEKEEEKSSLVTPSISKEEILESSKDKEDGKTEAGKAKPIKIKLSGKTVVAHTSPWMPVVTTSTQTKIGPNLPIPSTVLRKSCSATMSKPAPLNTFLSIKSSGTTAKPLPVVKESSADLLLPPDIISKAFGGEEVILKGSPEEKVVLAEKSEPSHLPEQILPPPPPPPPPPPPPPPVIPHPAAPSAAQANAILAPVKSNPVVSQTLSPGFVGPNILNPVLPVAIMASAQPAAIPSDETAPGVSESDRDQTLFSVLVRPPPPLSSVFSEQAKKLEKRNSCLATANAKDLYDIFYSSGGKGAPETKGAPETKLSGGPLANGENSNLSRTKSSDTSSTSPLNSSASQEELHQDEGLVAAPIVSNSEKPIAKTLVALGKWSVVEHVGPKSTGSTYGFLQPLTRLCQSRPYETITPKTDTLAIWTSSSFQSDTSRDISPEKSELDLGEPGPPGVEPPPQLLDIQCKESQKLVEIHLRESVNQDKESQELRKSEDCRESEIETNTELKERVKELSEGIVDEGASTSIGPHSIDDSNLNHGNRYMWEGEVKQPNLLMIDKEAEQSNKLMTGSETPSKVVIKLSPQACSFTKAKLDSFLSEARSLLNPQDTPVKISAPELLLHSPARSAMCLTGSPQEQGVSVVSEEGLENSAPESASRTSRYRSLKLKRERSKDFQVKKIYELAVWDENKKRPETWESPEKPKTEALELQDVHPELTVTIESKALEDFEATDLKVEELTALGNLGDMPVDFCTTRVSPAHRSPTVLCQKVCEENSVSPIGCNSSDPADFEPIPSFSGFPLDSPKTLVLDFETEGERNSPNPRSVRIPSPNILKTGLTENVDRGLGGLEGTHQALDLLAGGMMPEEVKESSQLDKQESLGLELKTINFAGLGPSPCLPDLVDFVTRTSGVQKDKLCSPLSEPGDPSKCSSLELGPLQLEISNASTTEVAILQVDDDSGDPLNLVKAPVSRSPPREQVIEDNMVPQGMPEQETTVGAIQDHTESSVHN

SEQ ID NO: 268 - DNA, 547 bp, Homo sapiens
tttttttttttttttttgggcgggggggaggtttatgaagttttgctctttgaaccacagctttattatggtcctttacactggagacagacacagagacactgttcagaagatgaactaaactcagcagtggtctggtatcaagagctttctgatgttttacagcctgaatttggagggataacgatctgctgtgcctttgcagtcactgcttagcccaaagtaatagtacttttgataataactcactctgtgcgatattcctgaataagtccatctcaaaagtttgggattttcctcctcttaactttcttaatatttggacatgcagttgtcgccaaacttgggtattcatggaatttctagtaaatgaaatacctatactttgatactgaagactgccaaatacataggaattttctttcttaaaaaacagtaatgaagactatatctcctttcccagcactgaatgttttactagcactgggtgctcaccatgcaactgaagaaaatgtggaaactcaaaaggtcaggacagacttccaag

SEQ ID NO: 269 - DNA, 240 bp, Homo sapiens
ttcatgggtttgcggacccaccatcgaaggcgtgaaggtgtcgcagggacatcttctggctgtttccgtcgcctgcgtggcccttgcaccccggtcttccattagcggcgcagacgtttggggcctaagcgctgggcgaggcgaggcccttgccctccccgccaacggccattctctggacctgtctttcttccgggatgcggttacagctgctgagacgtgttgcagccagagtctcct

SEQ ID NO: 270 - DNA, 531 bp, Homo sapiens
tttttttttttttttttcctccatccctctccttcactggcatagaagaaaactgaaaactcgaaaagcactccggaacgacctaaattgaagtttttggaagattgcctactagctacacaaatagactgtgaaaggaaaatacaatcgacccttgaacaacatagggattacgacttagggtggcagtagagtggcagatgcagaagaaactccaagtgtagccagacaaggtagtgtgtggatgcagtcccagatactcaggaggcagagatgggaggactgtttgagcccagatgtttgaggctgtaatgtgctatgactgtacactgcactccagcctgggcaacagagagcgacctcatctcttaaaaaaaaaaaagtcaaatccatgtgtatgtggatccacatgggtcaaactcacattgttcaagggtcagctgcagtctctaggatggcataatctacttgtggatataatgtattcttagaactttcaagaatatattctaacacagattaccatagaca

SEQ ID NO: 271 - DNA, 656 bp, Homo sapiens
  misc_feature (531)..(531): n is a, c, g, or t
  misc_feature (546)..(546): n is a, c, g, or t
  misc_feature (592)..(592): n is a, c, g, or t
  misc_feature (606)..(606): n is a, c, g, or t
  misc_feature (636)..(636): n is a, c, g, or t
aatatcaaagtattctcattttttaaaaaaactaaatctctggttttattataatttatacatagcactatttcatactctatgtataaaatctcctttcttgagcatgtcttatttcccctattaaattacggggtcctagtggacagagattatgtcttacacaagatttactttgtactccaataagacctaggaaagaagctaacaaatataaccatttcctgtgcaggacacactattcaaaggagaagaaacaaaaggacacatagaggaaagtcaggggtgctgaggacaagaagttttgacttgtcaactcagccttaactcctgtccatatacccagaaacaactgctttttctctctactgaaagcctggaagtctgaatgatttatccagttctacaaaggacaacctggtcccaactcccaaggttaattcagtagcctgctatcttctttggtacttttcagtctatctgtagttttgttgtctttgggaattgcaggttccatttttaataatcctnctttcccattgctancctcaaccttcaccaaaatcatacggccggagccttaaaaaacatnattttgggccctgnactggtgcaataggcctttggtggtgaaanctgaccagtgccagataggg

SEQ ID NO: 272 - DNA, 2307 bp, Homo sapiens
gtgactgtggagtttgaattgggtggcggttgactgtagagccgctctctctcactggcacagcgaggttttgctcagcccttgtctcgggaccgcagcctccgccgagcgccatggctcctaggaagggcagtagtcgggtggccaagaccaactccttacggaggcggaagctcgcctcctttctgaaagacttcgaccgtgaagtggaaatacgaatcaagcaaattgagtcagacaggcagaacctcctcaaggaggtggataacctctacaacatcgagatcctgcggctccccaaggctctgcgcgagatgaactggcttgactacttcgcccttggaggaaacaaacaggccctggaagaggcggcaacagctgacctggatatcaccgaaataaacaaactaacagcagaagctattcagacacccctgaaatctgccaaaacacgaaaggtaatacaggtagatgaaatgatagtggaagaggaagaagaagaagaaaatgaacgtaagaatcttcaaactgcaagagtcaaaaggtgtcctccatccaagaagagaactcagtccatacaaggaaaaggaaaagggaaaaggtcaagccgtgctaacactgttaccccagccgtgggccgattggaggtgtccatggtcaaaccaactccaggcctgacacccaggtttgactcaagggtcttcaagacccctggcctgcgtactccagcagcaggagagcggatttacaacatctcagggaatggcagccctcttgctgacagcaaagagatcttcctcactgtgccagtgggcggcggagagagcctgcgattattggccagtgacttgcagaggcacagtattgcccagctggatccagaggccttgggaaacattaagaagctctccaaccgtctcgcccaaatctgcagcagcatacggacccacaaatgagacaccaaagttgacaggatggacttttaatgggcacttctgggaccctgaagagacttcttcccttcaggcttattgtttgagtgtgaagttccagagcaaggagccatgttcctctaagggaattcaggaattcagacgtgctagtcccacaccagttaggtagagctgtctgttcaccctcccatcccagctgatcccagtcactgcttgctggggccatgccatggaagcttcccatcagtctcccagctgaatcctccctgctctctgagctgctgccttttgcctcctgcaactcaacatcctcttcaccctgccctgcctgcagttgagggggcgaagaagaaccctgtgttctcaggaagactgcctccaccaccgctacccagagaacctctgcatctggcatttctgctctctatgcttgagaccgggaggtttaggctcagataagtgagctctgggccatgagagggtaggtccagaaggtggggggaactgtacagatcagcagagcaggacagttggcagcagtgacctcagtagggaacatgtccgtctaccctctcgcactcatgacacctccccctaccagccctcctcttcctcctcctcctcctcctgtgggaggtggtcagtgggacttagggatctttcacctgctgtgcccagtagttctgaagtctgcttgtggagcagtgttttatgtttatccctgtttactgaagaccaaatactggtttggagacaacttccatgtcttgctcttctacctccctagttagtggaaatttggataagggaactgtagggcccagattctggaggttttatgtcattggccacagaataactgtctctaagctatccatggtccagtggtccctgccaagtctgtagacttcagagagcacttctctcttatggggttcatgggaacaggggcgggtgtgacttgcttggtggcctcattccatgtgtgcctgtgcctggggcatggactttgttaagcagagtcagcagtgaggtcctcattctccagccagcctctctgccctggagaatcatgtgctatgttctaagaatttgagaactagagtcctcatccccaggcttgaaggcacatggctttctcatgtagggctctctgtggtatttgttattattttgcaacaagaccattttagtaaaacagtcctgttcaagttgtattcttttaagttcttttattctcctttccctgagatttttgtatatattgttctgagtaatggtatctttgagctgattgttctaatcagagctggtacctactttcaataaattctggttttgtgttttcttctgt

SEQ ID NO: 273 - protein, 280 aa, Homo sapiens
MAPRKGSSRVAKTNSLRRRKLASFLKDFDREVEIRIKQIESDRQNLLKEVDNLYNIEILRLPKALREMNWLDYFALGGNKQALEEAATADLDITEINKLTAEAIQTPLKSAKTRKVIQVDEMIVEEEEEEENERKNLQTARVKRCPPSKKRTQSIQGKGKGKRSSRANTVTPAVGRLEVSMVKPTPGLTPRFDSRVFKTPGLRTPAAGERIYNISGNGSPLADSKEIFLTVPVGGGESLRLLASDLQRHSIAQLDPEALGNIKKLSNRLAQICSSIRTHK

SEQ ID NO: 274 - DNA, 2511 bp, Homo sapiens
atgaagccgagtccggccgggacggcgaaggagctggagcctccggcgccggcccgaggcgagcagcgcacggcggagcccgaggggcgctggcgggagaagggcgaggcagacaccgagcggcagcgcacccgggagcggcaggaggccacgctggccgggctggcggagctggagtacctgcgccagcgccaagagctgctggtcaggggcgccctgcgcggcgccgggggtgcgggagccgctgcgccccgcgctggggagctactgggggaggcggcgcagcgcagtcgcctggaggagaagttcttggaggagaacatcttgctgctaagaaagcaattgaactgtttgaggcgaagagatgctggtttgttgaatcagttgcaagagcttgacaagcagataagtgacctgagactggatgtagaaaagacatctgaagagcacctggagacagacagtcggcctagctcagggttttatgagctgagtgatggggcttcaggatccctttccaattcctctaactcggtgttcagtgagtgtttatccagttgtcattccagcacctgcttttgcagccccttggaggcgaccttgagtctctcagatggttgccccaaatctgcagatctcataggattgttggaatataaagaaggccactgtgaagaccaggcctcaggggcagtttgccgttccctctccacaccacaatttaattcccttgatgtcattgcagatgtgaatcccaagtaccagtgtgatctggtgtctaaaaacgggaatgatgtatatcgctatcccagtccacttcatgctgtggctgtgcagagcccaatgtttctcctttgtctgacgggcaaccctctgagggaagaggacaggcttggaaaccatgccagtgacatttgcggtggatctgagctagatgccgtcaaaacagacagttccttaccgtccccaagcagtctgtggtctgcttcccatccttcatccagcaagaaaatggatggctacattctgagcctggtccagaaaaaaacacaccctgtaaggaccaacaaaccaagaaccagcgtgaacgctgaccccacgaaagggcttctgaggaacgggagcgtttgtgtcagagccccgggcggtgtctcacagggcaacagtgtgaaccttaagaattcgaaacaggcgtgtctgccctctggcgggataccttctctgaacaatgggacattctccccaccgaagcagtggtcgaaagaatcaaaggccgaacaagccgaaagcaagagggtgcccctgccagagggctgcccctcaggcgctgcctccgaccttcagagtaagcacctgccaaaaacggccaagccagcctcgcaagaacatgctcggtgttccgccattgggacaggggagtcccctaaggaaagcgctcagctctcaggggcctctccaaaagagagtcctagcagaggccctgccccgccgcaggagaacaaagttgtacagcccctgaaaaagatgtcacagaaaaacagcctgcagggcgtccccccggccactcctcccctgctgtctacagctttccccgtggaagagaggcctgccttggatttcaagagcgagggctcttcccaaagcctggaggaagcgcacctggtcaaggcccagtttatcccggggcagcagcccagtgtcaggctccaccggggccacaggaacatgggcgtcgtgaagaactccagcctgaagcaccgcggcccagccctccaggggctggagaacggcttgcccaccgtcagggagaaaacgcgggccgggagcaagaagtgtcgcttcccagatgacttggatacaaataagaaactcaagaaagcctcctccaaggggaggaagagtgggggcgggcccgaggctggtgttcccggcaggcccgcgggcgggggccacagggcggggagcagggcgcatggccacggacgggaggcggtggtggccaaacctaagcacaagcgaactgactaccggcggtggaagtcctcggccgagatttcctacgaagaggccctgaggagggcccggcgcggtcgccgggagaatgtggggctgtaccccgcgcctgtgcctctgccctacgccagcccctacgcctacgtggctagcgactccgagtactcggccgagtgcgagtccctgttccactccaccgtggtggacaccagtgaggacgagcagagcaattacaccaccaactgcttcggggacagcgagtcgagtgtgagcgagggcgagttcgtgggggagagcacaaccaccagcgactctgaagaaagcgggggcttaatttggtcccagtttgtccagactctgcccattcaaacggtaacggccccagaccttcacaaccaccccgcaaaaacctttgtcaaaattaaggcctcacataacctcaagaagaagatcctccgctttcggtctggctctttgaaactgatgacgacggtttga

SEQ ID NO: 275 - protein, 836 aa, Homo sapiens
MKPSPAGTAKELEPPAPARGEQRTAEPEGRWREKGEADTERQRTRERQEATLAGLAELEYLRQRQELLVRGALRGAGGAGAAAPRAGELLGEAAQRSRLEEKFLEENILLLRKQLNCLRRRDAGLLNQLQELDKQISDLRLDVEKTSEEHLETDSRPSSGFYELSDGASGSLSNSSNSVFSECLSSCHSSTCFCSPLEATLSLSDGCPKSADLIGLLEYKEGHCEDQASGAVCRSLSTPQFNSLDVIADVNPKYQCDLVSKNGNDVYRYPSPLHAVAVQSPMFLLCLTGNPLREEDRLGNHASDICGGSELDAVKTDSSLPSPSSLWSASHPSSSKKMDGYILSLVQKKTHPVRTNKPRTSVNADPTKGLLRNGSVCVRAPGGVSQGNSVNLKNSKQACLPSGGIPSLNNGTFSPPKQWSKESKAEQAESKRVPLPEGCPSGAASDLQSKHLPKTAKPASQEHARCSAIGTGESPKESAQLSGASPKESPSRGPAPPQENKVVQPLKKMSQKNSLQGVPPATPPLLSTAFPVEERPALDFKSEGSSQSLEEAHLVKAQFIPGQQPSVRLHRGHRNMGVVKNSSLKHRGPALQGLENGLPTVREKTRAGSKKCRFPDDLDTNKKLKKASSKGRKSGGGPEAGVPGRPAGGGHRAGSRAHGHGREAVVAKPKHKRTDYRRWKSSAEISYEEALRRARRGRRENVGLYPAPVPLPYASPYAYVASDSEYSAECESLFHSTVVDTSEDEQSNYTTNCFGDSESSVSEGEFVGESTTTSDSEESGGLIWSQFVQTLPIQTVTAPDLHNHPAKTFVKIKASHNLKKKILRFRSGSLKLMTTV

SEQ ID NO: 276 - DNA, 651 bp, Homo sapiens
attatacttcagaattaccactgcaagtttataatatccttagaattaccataaatataaagatgaaagcaaaatgtttacatatttctaaatgtctttctgaggaaacaagatactttttttttcatcacagtggaatcccttatggtagataaatgaatggaatagaaaacaggaagaggcaagattcatttatataagaatataatcttctctctctctctctctctctctcatgcccacacacgtgcacactcatgcacaccagacccatactttaaaagctcacagtaactctaggaagtgggtactaatgcaattaataccttcctcattttacaaagagagctacagaattgcccaaggttacacagttaataagtgactgagttggaatttgcacataggtagcctggagacagagtagctggcacagagtaagagctcagtaaatttagttgatgttattattattacttcactggagtatacttgtatcatatcacctagttcctccagaatccgatttttacattatgccttaatttgtatcaaaggatacttctagatttatataaaatgtgcttctacctttgctctaaaaatgatatttgtaatattttatgttacaatatgcagtgtctctcctgc

SEQ ID NO: 277 - DNA, 358 bp, Homo sapiens
aatctaaagatccacgaatcccccacaaaagtacaaataaaaccataccaaggccatattgcaatttaggaaagcagcaggcaggactttcaattgacttgatatgatttatcatttttactatttgtaagaatggaaataagttcttagagttttggtcttggagaaagtctgacgttaaggacaaacgacagttattaaaggcagatgactttccagacttgtcttaaatgttccattcttcaccttagaacttatttaaatttgtttcttccaaatactgcagtaatattgatgctccagagagatgtcccacggagattctgctcttgtgcgtctgccctgcacggagctgagg

SEQ ID NO: 278 - DNA, 633 bp, Homo sapiens
attaagtgggttgttttagatgtatagagtattgatatgagttaacactttttagtagatggcaaagtgggcttgatgttcaaaagtaatgttcgagttagggttcatggtccctttctcagtaatttttttttaataaaagtaaacactggttcaaagacaaatagcaagtattccctcctgtgctatttatagagggctcaattcgtagaaaggcataccctccaatgcaattctgtggctgtcccttacagtggtttcagaatcacgaaaaaacagctagtaaataggatagaaacaataaaagaaagagtttagaagttccctgtgagcaatctgtgtgtcttcagcgagcttgaaccaaagtcttcatatcctgacccactgaattataagcaattgctacttgcccatcttgccaaagtagtccaaacacacttcaatgaggacagttatatttagcaggtcctcacccctgcaagagacagcatatcctcactattattattcatgtgttattggcaaaaacatagcttgcatctttccagaggcagagtttcaaagacagggttttctttgagacataagcacattgcttaagtacataacaaggttattaacacttgcactcag

SEQ ID NO: 279 - DNA, 294 bp, Homo sapiens
  misc_feature (147)..(147): n is a, c, g, or t
  misc_feature (158)..(158): n is a, c, g, or t
  misc_feature (177)..(177): n is a, c, g, or t
  misc_feature (186)..(186): n is a, c, g, or t
  misc_feature (193)..(193): n is a, c, g, or t
  misc_feature (221)..(221): n is a, c, g, or t
  misc_feature (235)..(235): n is a, c, g, or t
  misc_feature (253)..(253): n is a, c, g, or t
  misc_feature (264)..(264): n is a, c, g, or t
  misc_feature (271)..(271): n is a, c, g, or t
tttttttttttacatcaaaaaccatactttattttatgtatagcaatacaatttacatattaaataacactataatagaatgatttgatatagtttaaacagaagaaaaagggaaaaatttcaggttacaaaacccctccccctggnacaaatttttnaaaaaaaaaaaaaagcccnctttttccnaatgggncaatgggacgaatgttttccagtgaccnattatggtccaaantcccattggccaaatggnccatgggattnaaaaggnaaccccactttcacaaatcactg

SEQ ID NO: 280 - DNA, 4764 bp, Homo sapiens
ctgtcttggtacctgcggtagtagcctggctttgctctgacggcgatctcgcggcccgagagccttttataggttgcttttcccggggatgtgaaggatacagaaatgactgtgaatcaacccatatcatcaaggagctgataatctagtggaagagttagacgtgtgcatacttcactatgatatgaggcagtctctgagcttatattctctgtggaagatgtgacatatccaggcggaacatcatgatgcagggaaacacatgtcacagaatgtcgttccacccgggacgagggtgtccccgaggacgaggaggacatggagccagaccctcagcaccatcctttaggccccaaaatctgaggctgcttcaccctcagcagcctcctgtgcaatatcaatatgaacctccaagtgccccttccaccactttctcaaactctccagcccccaattttctccctccacgaccagactttgtacccttccccccacccatgcctccgtcagcgcaaggccctcttcccccctgcccaatcaggccgcctttccccaaccaccagatgaggcaccccttcccagttcctccttgttttcctcccatgccaccaccaatgccttgtcctaataaccccccagtccctggggcacctcctggacaaggcactttccccttcatgatgccccctccctccatgcctcatcccccgccccctccagtcatgccgcagcaggttaattatcagtaccctccgggctattctcaccacaacttcccacctcccagttttaatagtttccagaacaaccctagttctttcctgcccagtgctaataacagcagtagtcctcatttcagacatctccctccatacccactcccaaaggctcccagtgagagaaggtccccagaaaggctgaaacactatgatgaccacaggcaccgagatcacagtcatgggcgaggtgagaggcatcggtccctggatcggcgggagcgaggccgcagtcccgacaggagaagacaagacagccggtacagatctgattatgaccgagggagaacaccatctcgccaccgcagctacgaacggagcagagagcgagaacgggagagacacaggcatcgagacaaccgaagatcaccatctctggaaaggtcctacaaaaaagagtataagagatctggaaggagttacggtttatcggttgttcctgaacctgctggatgcacaccagaattacctggggagattattaaaaatacagattcttgggccccacccctggagattgtgaatcatcgctccccaagtagggagaagaagagagctcgttgggaggaagaaaaagaccgttggagtgacaaccagagttctggcaaagacaagaactatacctcaatcaaggaaaaagagcccgaggagaccatgcctgacaagaatgaggaggaagaagaagaacttcttaagcctgtgtggattcgatgcactcattcagaaaactactactccagtgaccccatggatcaggtgggagattctacagtggttggaacgagtaggcttcgtgacttatatgacaaatttgaggaggagttggggagcaggcaagaaaaggccaaagctgctcggcctccgtgggaacctccaaagacgaagctcgatgaagatttagagagttccagtgaatccgagtgtgagtctgatgaggacagcacctgttctagcagctcagactctgaagtttttgacgttattgcagaaatcaaacgcaaaaaggcccaccctgaccgacttcatgatgaactttggtacaacgatccaggccagatgaatgatggaccactctgcaaatgcagcgcaaaggcaagacgcacaggaattaggcacagcatttatcctggagaagaggccatcaagccctgtcgtcctatgaccaacaatgctggcagacttttccactaccggatcacagtctccccgcctacgaactttttaactgacaggccaactgttatagaatacgatgatcacgagtatatctttgaaggattttctatgtttgcacatgcccccctgaccaatattccactgtgtaaagtaattagattcaacatagactacacgattcatttcattgaagagatgatgccggagaatttttgtgtgaaagggcttgaactcttttcactgttcctattcagagatattttggaattatatgactggaatcttaaaggtcctttgtttgaagacagccctccctgctgcccaagatttcatttcatgccacgttttgtaagatttcttccagatggaggaaaggaagtgctgtccatgcaccagattctcctgtacttgttaaggtgcagcaaagccctggtgcctgaggaggagattgccaatatgcttcagtgggaggagctggagtggcagaaatatgcagaagaatgcaaaggcatgattgttaccaaccctgggacgaaaccaagctctgtccgtatcgatcaactggatcgtgaacagttcaaccccgatgtgattacttttccgattatcgtccactttgggatacgccctgcacagttgagttatgcaggagacccacagtaccaaaaactgtggaagagttatgtgaaacttcgccacctcctagcaaatagtcccaaagtcaaacaaactgacaaacagaagctggcacagagggaggaagccctccaaaaaatacggcagaagaatacaatgagacgagaagtaacggtggagctaagtagccaaggattctggaaaactggcatccgttctgatgtctgtcagcatgcaatgatgctacctgttctgacccatcatatccgctaccaccaatgcctaatgcatttggacaagttgataggatatactttccaagatcgttgtctgttgcagctggccatgactcatccaagtcatcatttaaattttggaatgaatcctgatcatgccaggaattcattatctaactgtggaattcggcagcccaaatacggagacagaaaagttcatcacatgcacatgcggaagaaagggattaacaccttgataaatatcatgtcacgccttggccaagatgacccaactccctcgaggattaaccacaatgaacggttggaattcctgggtgatgctgttgttgaatttctgaccagcgtccatttgtactatttgtttcctagtctggaagaaggaggattagcaacctatcggactgccattgttcagaatcagcaccttgccatgctagcaaagaaacttgaactggatccatttatgctgtatgctcacgggcctgacctttgtagagaatcggaccttcgacatgcaatggccaattgttttgaagcgttaataggagctgtttacttggagggaagcctggaggaagccaagcagttatttggacgcttgctctttaatgatccggacctgcgcgaagtctggctcaattatcctctccacccactccaactacaagagccaaatactgatcgacaacttattgaaacttctccagttctacaaaaacttactgagtttgaagaagcaattggagtaatttttactcatgttcgacttctggcaagggcattcacattgagaactgtgggatttaaccatctgaccctaggccacaatcagagaatggaattcctaggtgactccataatgcaactggtagccacagagtacttattcattcatttcccagatcatcatgaaggacacttaactttgttgcgaagctctttggtgaataatagaactcaggccaaggtagcggaggagctgggcatgcaggagtacgccataaccaacgacaagaccaagaggcctgtggcgcttcgcaccaagaccttggcggaccttttggaatcatttattgcagcgctgtacactgataaggatttggaatatgttcatactttcatgaatgtctgcttctttccacgattgaaagaattcattttgaatcaggattggaatgaccccaaatcccagcttcagcagtgttgcttgacacttaggacagaaggaaaagagccagacattcctctgtacaagactctgcagacagtgggcccatcccatgcccgaacctacactgtggctgtttatttcaagggagaaagaataggctgtgggaaaggaccaagtattcagcaagcggaaatgggagcagcaatggatgcgcttgaaaaatataattttccccagatggcccatcagaagcggttcatcgaacggaagtacagacaagagttaaaagaaatgaggtgggaaagagagcatcaagagagagagccagatgagactgaagacatcaagaaataaaggagggcatgcaagtgtggagtatttacttgctcagtaactgtgactgttgtctattgagacctagcctagttttcctgcagacaatgaacgaagtgtgctcattgaaataaaatacagagtcaaatcgctattgttgttttaatgatctgtttttagctggatggtctttattacaaagtattagatttttcttctatttaacggaaaacttgactttggtgaatgtgcattacttccttttattttgctctttaaataataaaattcaagaagcatattctatgtggaatagatcctgtttttccatctgtgtcccagattgtgaccctagactttcaattgacaagtaaaaaattgactttactagtaaaaaaaaaaaaaaaaaaaaaaa

SEQ ID NO: 281 - protein, 1374 aa, Homo sapiens
MMQGNTCHRMSFHPGRGCPRGRGGHGARPSAPSFRPQNLRLLHPQQPPVQYQYEPPSAPSTTFSNSPAPNFLPPRPDFVPFPPPMPPSAQGPLPPCPIRPPFPNHQMRHPFPVPPCFPPMPPPMPCPNNPPVPGAPPGQGTFPFMMPPPSMPHPPPPPVMPQQVNYQYPPGYSHHNFPPPSFNSFQNNPSSFLPSANNSSSPHFRHLPPYPLPKAPSERRSPERLKHYDDHRHRDHSHGRGERHRSLDRRERGRSPDRRRQDSRYRSDYDRGRTPSRHRSYERSRERERERHRHRDNRRSPSLERSYKKEYKRSGRSYGLSVVPEPAGCTPELPGEIIKNTDSWAPPLEIVNHRSPSREKKRARWEEEKDRWSDNQSSGKDKNYTSIKEKEPEETMPDKNEEEEEELLKPVWIRCTHSENYYSSDPMDQVGDSTVVGTSRLRDLYDKFEEELGSRQEKAKAARPPWEPPKTKLDEDLESSSESECESDEDSTCSSSSDSEVFDVIAEIKRKKAHPDRLHDELWYNDPGQMNDGPLCKCSAKARRTGIRHSIYPGEEAIKPCRPMTNNAGRLFHYRITVSPPTNFLTDRPTVIEYDDHEYIFEGFSMFAHAPLTNIPLCKVIRFNIDYTIHFIEEMMPENFCVKGLELFSLFLFRDILELYDWNLKGPLFEDSPPCCPRFHFMPRFVRFLPDGGKEVLSMHQILLYLLRCSKALVPEEEIANMLQWEELEWQKYAEECKGMIVTNPGTKPSSVRIDQLDREQFNPDVITFPIIVHFGIRPAQLSYAGDPQYQKLWKSYVKLRHLLANSPKVKQTDKQKLAQREEALQKIRQKNTMRREVTVELSSQGFWKTGIRSDVCQHAMMLPVLTHHIRYHQCLMHLDKLIGYTFQDRCLLQLAMTHPSHHLNFGMNPDHARNSLSNCGIRQPKYGDRKVHHMHMRKKGINTLINIMSRLGQDDPTPSRINHNERLEFLGDAVVEFLTSVHLYYLFPSLEEGGLATYRTAIVQNQHLAMLAKKLELDPFMLYAHGPDLCRESDLRHAMANCFEALIGAVYLEGSLEEAKQLFGRLLFNDPDLREVWLNYPLHPLQLQEPNTDRQLIETSPVLQKLTEFEEAIGVIFTHVRLLARAFTLRTVGFNHLTLGHNQRMEFLGDSIMQLVATEYLFIHFPDHHEGHLTLLRSSLVNNRTQAKVAEELGMQEYAITNDKTKRPVALRTKTLADLLESFIAALYTDKDLEYVHTFMNVCFFPRLKEFILNQDWNDPKSQLQQCCLTLRTEGKEPDIPLYKTLQTVGPSHARTYTVAVYFKGERIGCGKGPSIQQAEMGAAMDALEKYNFPQMAHQKRFIERKYRQELKEMRWEREHQEREPDETEDIKK

SEQ ID NO: 282 - DNA, 462 bp, Homo sapiens
tttttttttttttttttacagagaatcactttgctttatcaagtgttgagtcaaagtgttaagtaaaagttgacatgcctgcaacttatttttaaatagcaaatcataatcatcccacactgtctaaagcactaaacttaacatataaatcatatacccttactagaaagagctagctagaaaaatgtaaataataaaattaaaattgctaaactccctcattatgtatttataattagcagccaaattattaactctgttttcagaatttctgaaataggttgttgatattaaggaagccattcaacaaaaacctcaacaagtatagtcttaaaatcaaatcagcgaaataatcttttaaatgtttagctattcattagcatttgcattaaatttcagcagcagtggttgcttttagctttttgggatgttatttttctgcacaaacatactgcaaagaac

SEQ ID NO: 283 - DNA, 548 bp, Homo sapiens
  misc_feature (76)..(76): n is a, c, g, or t
  misc_feature (78)..(78): n is a, c, g, or t
  misc_feature (285)..(285): n is a, c, g, or t
  misc_feature (312)..(312): n is a, c, g, or t
  misc_feature (352)..(352): n is a, c, g, or t
  misc_feature (473)..(473): n is a, c, g, or t
  misc_feature (538)..(538): n is a, c, g, or t
agaaactgaaaccaaaaaccagtgtaagcaagtaaacatctaaactgtttcaggagccgcgtagaaggaacgccgntngttgccccggaagcggaagtagattctcctatagaaaggctggactacgcggagtggtgacgtttcctcattgggcggaaggttcgctggcactccgttggtcttccagctggtgggagttgacgacgtggtgctgggcgttgggaccctactttatctagttcgggaagttgggttgtggggtcatacctgtctgtctgctcccanctttcttgggtttcttccgacggcgtngggcctcgctaaaggaattcccgggccccttcaggcaacngggcttttagcgggtgttctttttgcgagttctttcgtaaagttacatcttaaaagctgttcaagatggtttttaggcagaccttgggaaggaaaaataacatcagcattacggttcattnagcaatgccaccattattcaatgaaggaggtatttgaatgctatgctaaaagaagtctttacccnttttttggag

SEQ ID NO: 284 - DNA, 5878 bp, Homo sapiens
cgcactcgtccccagcccgcccgggagctgcgagccgcgagctggattatggtggcctgagcagccaacgcagccgcaggagcccggagcccttgcccctgcccgcgccgccgcccgccggggggaccagggaagccgccaccggcccgccatgcccgcccctcccagccccgccgggagcccgcgcccgctgcccaggctggccgccgccgtgccgatgtagcgggctccggatcccagcctctcccctgctcccgtgctctgcggatctcccctgaccgctctccacagcccggacccgggggctggcccagggccctgcaggccctggcgtcctgatgcccccaagctccctctcctgagaagccaccagcaccacccagacttgggggcaggcgccagggacggacgtgggccagtgcgagcccagagggcccgaaggccggggcccaccatggcccaagccctgccctggctcctgctgtggatgggcgcgggagtgctgcctgcccacggcacccagcacggcatccggctgcccctgcgcagcggcctggggggcgcccccctggggctgcggctgccccgggagaccgacgaagagcccgaggagcccggccggaggggcagctttgtggagatggtggacaacctgaggggcaagtcggggcagggctactacgtggagatgaccgtgggcagccccccgcagacgctcaacatcctggtggatacaggcagcagtaactttgcagtgggtgctgccccccaccccttcctgcatcgctactaccagaggcagctgtccagcacataccgggacctccggaagggtgtgtatgtgccctacacccagggcaagtgggaaggggagctgggcaccgacctggtaagcatcccccatggccccaacgtcactgtgcgtgccaacattgctgccatcactgaatcagacaagttcttcatcaacggctccaactgggaaggcatcctggggctggcctatgctgagattgccaggcctgacgactccctggagcctttctttgactctctggtaaagcagacccacgttcccaacctcttctccctgcagctttgtggtgctggcttccccctcaaccagtctgaagtgctggcctctgtcggagggagcatgatcattggaggtatcgaccactcgctgtacacaggcagtctctggtatacacccatccggcgggagtggtattatgaggtcatcattgtgcgggtggagatcaatggacaggatctgaaaatggactgcaaggagtacaactatgacaagagcattgtggacagtggcaccaccaaccttcgtttgcccaagaaagtgtttgaagctgcagtcaaatccatcaaggcagcctcctccacggagaagttccctgatggtttctggctaggagagcagctggtgtgctggcaagcaggcaccaccccttggaacattttcccagtcatctcactctacctaatgggtgaggttaccaaccagtccttccgcatcaccatccttccgcagcaatacctgcggccagtggaagatgtggccacgtcccaagacgactgttacaagtttgccatctcacagtcatccacgggcactgttatgggagctgttatcatggagggcttctacgttgtctttgatcgggcccgaaaacgaattggctttgctgtcagcgcttgccatgtgcacgatgagttcaggacggcagcggtggaaggcccttttgtcaccttggacatggaagactgtggctacaacattccacagacagatgagtcaaccctcatgaccatagcctatgtcatggctgccatctgcgccctcttcatgctgccactctgcctcatggtgtgtcagtggcgctgcctccgctgcctgcgccagcagcatgatgactttgctgatgacatctccctgctgaagtgaggaggcccatgggcagaagatagagattcccctggaccacacctccgtggttcactttggtcacaagtaggagacacagatggcacctgtggccagagcacctcaggaccctccccacccaccaaatgcctctgccttgatggagaaggaaaaggctggcaaggtgggttccagggactgtacctgtaggaaacagaaaagagaagaaagaagcactctgctggcgggaatactcttggtcacctcaaatttaagtcgggaaattctgctgcttgaaacttcagccctgaacctttgtccaccattcctttaaattctccaacccaaagtattcttcttttcttagtttcagaagtactggcatcacacgcaggttaccttggcgtgtgtccctgtggtaccctggcagagaagagaccaagcttgtttccctgctggccaaagtcagtaggagaggatgcacagtttgctatttgctttagagacagggactgtataaacaagcctaacattggtgcaaagattgcctcttgaattaaaaaaaaaaactagattgactatttatacaaatgggggcggctggaaagaggagaaggagagggagtacaaagacagggaatagtgggatcaaagctaggaaaggcagaaacacaaccactcaccagtcctagttttagacctcatctccaagatagcatcccatctcagaagatgggtgttgttttcaatgttttcttttctgtggttgcagcctgaccaaaagtgagatgggaagggcttatctagccaaagagctcttttttagctctcttaaatgaagtgcccactaagaagttccacttaacacatgaatttctgccatattaatttcattgtctctatctgaaccaccctttattctacatatgataggcagcactgaaatatcctaaccccctaagctccaggtgccctgtgggagagcaactggactatagcagggctgggctctgtcttcctggtcataggctcactctttcccccaaatcttcctctggagctttgcagccaaggtgctaaaaggaataggtaggagacctcttctatctaatccttaaaagcataatgttgaacattcattcaacagctgatgccctataacccctgcctggatttcttcctattaggctataagaagtagcaagatctttacataattcagagtggtttcattgccttcctaccctctctaatggcccctccatttatttgactaaagcatcacacagtggcactagcattataccaagagtatgagaaatacagtgctttatggctctaacattactgccttcagtatcaaggctgcctggagaaaggatggcagcctcagggcttccttatgtcctccaccacaagagctccttgatgaaggtcatctttttcccctatcctgttcttcccctccccgctcctaatggtacgtgggtacccaggctggttcttgggctaggtagtggggaccaagttcattacctccctatcagttctagcatagtaaactacggtaccagtgttagtgggaagagctgggttttcctagtatacccactgcatcctactcctacctggtcaacccgctgcttccaggtatgggacctgctaagtgtggaattacctgataagggagagggaaatacaaggagggcctctggtgttcctggcctcagccagctgcccacaagccataaaccaataaaacaagaatactgagtcagttttttatctgggttctcttcattcccactgcacttggtgctgctttggctgactgggaacaccccataactacagagtctgacaggaagactggagactgtccacttctagctcggaacttactgtgtaaataaactttcagaactgctaccatgaagtgaaaatgccacattttgctttataatttctacccatgttgggaaaaactggctttttcccagccctttccagggcataaaactcaaccccttcgatagcaagtcccatcagcctattatttttttaaagaaaacttgcacttgtttttctttttacagttacttccttcctgccccaaaattataaactctaagtgtaaaaaaaagtcttaacaacagcttcttgcttgtaaaaatatgtattatacatctgtatttttaaattctgctcctgaaaaatgactgtcccattctccactcactgcatttggggcctttcccattggtctgcatgtcttttatcattgcaggccagtggacagagggagaagggagaacaggggtcgccaacacttgtgttgctttctgactgatcctgaacaagaaagagtaacactgaggcgctcgctcccatgcacaactctccaaaacacttatcctcctgcaagagtgggctttccagggtctttactgggaagcagttaagccccctcctcaccccttccttttttctttctttactcctttggcttcaaaggattttggaaaagaaacaatatgctttacactcattttcaatttctaaatttgcaggggatactgaaaaatacggcaggtggcctaaggctgctgtaaagttgaggggagaggaaatcttaagattacaagataaaaaacgaatcccctaaacaaaaagaacaatagaactggtcttccattttgccacctttcctgttcatgacagctactaacctggagacagtaacatttcattaaccaaagaaagtgggtcacctgacctctgaagagctgagtactcaggccactccaatcaccctacaagatgccaaggaggtcccaggaagtccagctccttaaactgacgctagtcaataaacctgggcaagtgaggcaagagaaatgaggaagaatccatctgtgaggtgacaggcaaggatgaaagacaaagaaggaaaagagtatcaaaggcagaaaggagatcatttagttgggtctgaaaggaaaagtctttgctatccgacatgtactgctagtacctgtaagcattttaggtcccagaatggaaaaaaaaatcagctattggtaatataataatgtcctttccctggagtcagtttttttaaaaagttaactcttagtttttacttgtttaattctaaaagagaagggagctgaggccattccctgtaggagtaaagataaaaggataggaaaagattcaaagctctaatagagtcacagctttcccaggtataaaacctaaaattaagaagtacaataagcagaggtggaaaatgatctagttcctgatagctacccacagagcaagtgatttataaatttgaaatccaaactactttcttaatatcactttggtctccatttttcccaggacaggaaatatgtccccccctaactttcttgcttcaaaaattaaaatccagcatcccaagatcattctacaagtaattttgcacagacatctcctcaccccagtgcctgtctggagctcacccaaggtcaccaaacaacttggttgtgaaccaactgccttaaccttctgggggagggggattagctagactaggagaccagaagtgaatgggaaagggtgaggacttcacaatgttggcctgtcagagcttgattagaagccaagacagtggcagcaaaggaagacttggcccaggaaaaacctgtgggttgtgctaatttctgtccagaaaatagggtggacagaagcttgtggggtgcatggaggaattgggacctggttatgttgttattctcggactgtgaattttggtgatgtaaaacagaatattctgtaaacctaatgtctgtataaataatgagcgttaacacagtaaaatattcaataagaagtcaaaaaaaaaaaaaaaaaaaaaaaaaaaaaaaaaaaaaaaaaaaaaaaaaaaaa

SEQ ID NO: 285 - protein, 501 aa, Homo sapiens
MAQALPWLLLWMGAGVLPAHGTQHGIRLPLRSGLGGAPLGLRLPRETDEEPEEPGRRGSFVEMVDNLRGKSGQGYYVEMTVGSPPQTLNILVDTGSSNFAVGAAPHPFLHRYYQRQLSSTYRDLRKGVYVPYTQGKWEGELGTDLVSIPHGPNVTVRANIAAITESDKFFINGSNWEGILGLAYAEIARPDDSLEPFFDSLVKQTHVPNLFSLQLCGAGFPLNQSEVLASVGGSMIIGGIDHSLYTGSLWYTPIRREWYYEVIIVRVEINGQDLKMDCKEYNYDKSIVDSGTTNLRLPKKVFEAAVKSIKAASSTEKFPDGFWLGEQLVCWQAGTTPWNIFPVISLYLMGEVTNQSFRITILPQQYLRPVEDVATSQDDCYKFAISQSSTGTVMGAVIMEGFYVVFDRARKRIGFAVSACHVHDEFRTAAVEGPFVTLDMEDCGYNIPQTDESTLMTIAYVMAAICALFMLPLCLMVCQWRCLRCLRQQHDDFADDISLLK

SEQ ID NO: 286 - DNA, 516 bp, Homo sapiens
gtttggataggtgttgggcgtcgctaggcgccgacgaagaacttctttccagtccatggccgacttccgcgcagcagcttctgcatttgctgtttcctacctgctccacccctaccagctcaggcgtcagcaccgccaggccccgtaaaggttaggaaggccgtccaaccaccatcttgatcgagggcggaagtcttggctaaagaggcaaaaacaattactgtcactgccgcggagaataccgctaccacgctgactgggggaaaaaactatgaaagagatggaaaatggttctccttcagaggcgacccaagctcaccaagccggattttaaaggccacgataagcccgcgttttcctttatcgtgtgcctttggcgcgtgcgcaccacgtgacccaggagttcattagttccggcttgagggaagcgccttctttcacaatttcttttcattgttcattgcggatatctggaagccttccaggtcccctgaatgtagtagacacttcagcagc

SEQ ID NO: 287 - DNA, 2777 bp, Homo sapiens
gatctgagcgccggccgcggtgcccaggcactcccttggcgggccggatggcggaccccggcccagatcccgaatctgagtcggaatcggtgttcccgcgggaggtcgggctctttgcagactcttactcggagaagagccagttctgtttctgtgggcatgtgctgaccatcacgcagaactttgggtcccgcctcggggtggcggcgcgcgtgtgggacgcggccctgagcctgtgcaattatttcgagagtcaaaatgtggatttccgaggcaagaaggtgatcgaactgggtgcggggacaggcatcgtggggatcttggcagcgctgcagggagcttatggtctagtgagggagacagaggacgatgtcatagaacaagaactctggcgaggtatgcgtggagcctgtggacatgctctatccatgtctaccatgactccctgggaatccatcaagggaagctctgtcagggggggatgttaccatcactgacctgcccctggccctagaacagatccagggcaacgtccaggccaatgtgccagctggaggccaggcccaggtgcgtgccttgtcctgggggattgaccatcatgtcttccctgcaaactatgacctggtgctgggggctgatatcgtgtacctggaacccaccttccctctgctgctggggaccctccaacacctgtgcaggccccatggcaccatctatctggcctccaagatgagaaaggagcatgggacagagagcttctttcagcacctcctgccccagcatttccaactggagctggctcagcgggatgaggatgaaaatgtcaacatctatagggccaggcacagggaaccaagacctgcttgacatcacccttgctgttcttctcaatctcttgctctaatgaaggaactgtgtatctcaaaaaccatatttccagagccacaaacatgaggaccaaaaaggatggatttccctggcctctctcactttcctccttccctctttgttaccccagatactcttgggcaggtgcagtgaggtgcctgcttacaaggaatcccagagttctggcagcactagtgttagaacaccaaggaggttcctggctcctgttctcagagaaggaggatggtaaggtatccaggatttttagggggtaagggagatatatgggatgtgagagcagtgattgtagacagactgtcactgatcacttccattcctgttgctgtttacacagaatggactttaaaaaaattctgtgggatttttttttctttttttcttttttttgagacagggtctcactctgtcatccaggctggagtgcagtggtgtgatcacagctcactgcagcctcaacctctgaaggcccagatgatcttcctgcctcagctccccaagtagctgggactagaggcatgcgccaccacacccggctaatttttgtattttcagtagagacagggtttcgccatgttgcccagggtggtctcaaactcctgggctcaagtgatccacccgccttgcctcccaaagtgctgggattgcaggcatggcccactgtgctagcctaggatttttttttttttttaagaaagaattaagccttaaaaatctattgtgcaagaacccaacttttactcaggagctgagaaggaagaagcctcaaaccacccatttcctgctttttagagatagagtctagtggaaccatggctctaactgggtcaagtcctcctagctctgaagctaaggctgcagagctgtcctttggactgtatttcttcatgctttccagagttagagccttgatcacggaacatcattgtgtgcagaagaatactgtacctagtactaagttcttttcatctttgatttttctttagcttcatcagtccttccttcctaatctctaatcccctgaagcctaacacagttcctaatgtgttttgccttaacctcttttctcttcccacattggtacttctggttggggctctctttacttactgcttaggcacatagtcaccttctctggactccctgcttccatgctttctccttcagtccattccgcaaactcttgtgatcttccaaaattagctctgattagctttcacttcctgtagaagcaagaacaagctcctctgcttggtacttagtctgtgtccatgtgatccaaaattaccttcctattgcatttcctactcctttgctacgtgtattggacctctggccaaattacaaaagatgtactctttgttctctaaaaccacactaaagttttctgacttctttcacactctttatgataatcctctgcctgaaaggctattgccacctgtcaaaatcttcattattctttgcctctttcctgagcctcttgcttgaatgtgatttctttctccctgagacccataaggttcatcttatgggaccttaatttgtcttgcatggacatttgtgattctcattttctcaccattaaattaccttggagggtagggctgtggtttactcctgtctaaacccctgaagcctaacacagttcctggcacacaacaggtgttcaacagatattgtgctcattcaataaatatttactcgctttgtttaatggattccacccctgccttcctaggtgaccttggacaaattctcgaacccattcaccaaccacacaagtttgttgtgagtcataaatggataatgaatataaatgcgcattgaaaataaacataaaatgttacccacaaaaaaaaaaaaaaaaa

SEQ ID NO: 288 - protein, 164 aa, Homo sapiens
SERRPRCPGTPLAGRMADPGPDPESESESVFPREVGLFADSYSEKSQFCFCGHVLTITQNFGSRLGVAARVWDAALSLCNYFESQNVDFRGKKVIELGAGTGIVGILAALQGAYGLVRETEDDVIEQELWRGMRGACGHALSMSTMTPWESIKGSSVRGGCYHH

SEQ ID NO: 289 - DNA, 434 bp, Homo sapiens
ctcatatctgccatagaaaggcaatcaagcttactccctgcaatcggagtcaatatcaattcttgctcaagcaaacatgttttacagtgttggcgcaatggcaggaactagtcaagggcactttcagatctggaaagaggaaagagaaaatcactcttttgtgtttcttaaactgtcaatcaagcaagaaaatttattccaccccttcatatttgctctaaaatctggggccagtagttgaaatgtgatcttgttctttctcagccttttggcaatttaatgccaaatattccaaatgttagatgaatggcagtaataaaatgattcaaatgtttgataaatacaagctgagagcaaaatctggactctgaaaaatcggaactattttatcatgttgctaaaatgagagcatcattttcttccctctctgtaag

SEQ ID NO: 290 - DNA, 446 bp, Homo sapiens
gcacgaggcgcgcctatcactgcagatacagagatggaaagtctgatgaaataatcatctctgtaaaccataatgcttggaaaatttcacatgtactatttgtgtcctgctggtgtgaagatgtttctcattcttccacctttttttgtacacgggaatgctacttctgaactcagatgaaacaactgcttccaaattgacaacacaaggctgagagcataaatactcaaccgagacttcagaaacgttgcgaacgtttccttcaaagacagtaaaataaataaagtctttgtaagccacgctctgttcagcttggggtatcactgatgtcgtcagggaagtctgcctacccaaagatggtacaacattcaggtagcagagcaggagcagcgcgcaggcagagcggccgccgaagcccctggggaacgcgcctcgtgcggttcggg

SEQ ID NO: 291 - DNA, 354 bp, Homo sapiens
ttttaggtcaaagcggaacagtagttattttatttgtacacaatgaaatatcgtgcagccattaaaacaatgtataaaaattaaaaaaatcatatcatcaaatgctaatgatagtaagcaaaaatgtgtatgtgatcttaataatgatcttaaatactagcaaagaaaacaccataataattaacaattataaaactatggtattaattatggataatgtgtaattttaattcgaaccttccctgaggatttcctacaaataaatagcacatgcttctttaaatcttaaaaattcttgagagaacatagaaaaactaaagaatcaatcaatgaatgctcatcaatgtgccattc

SEQ ID NO: 292 - DNA, 2065 bp, Homo sapiens
ggcttggcaatgaggccgaactcctggagagcatgggggatgcaccgccgccccaggacgagcacaccaccatcatagaccgcggaccgggggcctgcgaggagagcaaccatctcctgctcaatggtggctcccacaagcacgtgcagagccagattcacaggtcagccgactccggggggcggcagggcagagaacagaagcaggaccccctgcactcgcccacctccaagaggaagaaggtgaaatttaccacctttaccaccatccccccggacgacagctgccccacggtgaactccatcgtcagcagcaatgatgaggacatcaaatgggtgtgtcaagacgtggctgtgggtgcccccaaggaacttagaaactatctggagaaactcaaagataaggcttaggcccctctagccaaagggccctgcccagatgccttccttgtactggaaactggcccaagtggggcagaaggcgttgtcagtggggttaagaagggacggtcccagggtccatgctagaccagttggaaagttttgaagtcaggaaaagacgtttttgtatcaagggatttttagcagttaatggtggtggatttttaaaggtcaggggaataaagtctggggcatggggagtgcagaccaagttactgaactgcacaggcaaaattaggaaggttattttatgagtcaaaacatactacagacaagctaccaaaaattatttgttaaaaaatgcaacaagacaaataaaaagagaaataatcatctgtttatatttctaataaaggagcaaaatataaaaataggacctgctaagagacattttccattctaattcacgattcacttttccaaggacagccttcaactgtcaccacacagctgggggggagtcatttcttaacaagggatgcctcttgggatagaactagggagttttaaatctttacttgatcatcttttattttcttttccactttttccttttctctctctctctgtgtcctagacttccattgcatttatatttaatgtttatttctgagaatcaagcagtatatttttcctaaatgaaacataaattatattcctattcattagataggttcctaggaacaatgccaattaatccattgtttaagtagtaacttgaatgtttttctatatccctccagctttgttgatagtggcgggttttgtacaattggagggagccctcagagccttctgggggaggagaggaactgtccttaatccatcaccactaccatagggcaaagccagcaggtgtggccctgtgaggggctgtacagacgggatgtggccaggagaacagagccccacctggaccacctgacccctcgggattccacccctgtcatcgtggggatgttcctatataggagaaagttgggttaaatcaaaaaagaggccacgcccaggtgtaatcagagccaacctggtgggctgggtctatcacaagacataactgatgctgaacatgaacaaagataaaaactgtttggagggtttttgagttgtttttcttatgttgttgggtggggtataccagcataaactctaaagataaaatctatgttagattgtcaatcaactgtgtttttgaacagcataattgtgtagcagcacattgcaaaaatgcattcatccaaagcgacacatgtggcaacgtagaccacgccagtgaaataagccccttcgtgatcacctgactccagttctccgtgtgctccattggctgcggctgcaggaggaagatgcctgacagccctcatgctctccgcaggggggcgctcacaaagatgccaggggtgtttattgtgtttatttttttaattactaaaatcagtagctaagaaagggtccttgaagcctcctaacctgggttggacctttgaaaaatatatttgtagcacatattatagatggaaagaagaagatatttatttatacctgtgatgccaattgtcattaaaaggcttttcatggcttgacaagtcaaaaaaaaaaaaaaaaaaaaaaaaaaaaaaaaaaag

SEQ ID NO: 293 - DNA, 3513 bp, Homo sapiens
ccgtgtaccaggtgctgctagtgggaagcacgctgctgaaggaagtgccttccgggctgcagctggagcagttgccttctcagagcctgctgacccacatcccaacggcggggctgcccacttcgctaggaggaggcctgccttactgccaccaggcctggctggatttccgaaggcggctggaagctctactacagaactgccaggcagcttgtgccctgctccagggggccatcgaaagtgtgaaggctgtgccccagcccatggagcctggggaggtcggtcagctgctacagcagacagaggtcctgatgcagcaggtgctagactcgccatggctggcatggctacaatgccaggggggccgggagctgacatggctgaagcaagaggtcccagaggtgaccctgagcccagactacaggacggcaatggacaaggctgacgagctatatgaccgggtggatggattgctgcaccaactgaccctgcagagcaaccagcgaatacaggccctagagttggtccaaacactggaggcccgggaaagcggactgcaccagattgaagtgtggctgcagcaggtgggctggccagcactggaggaggctggggagccctcgctggacatgctgctccaggcccaaggctcttttcaggagctgtaccaggttgcccaggagcaggtcaggcaaggggagaagtttctgcagccgctgactggctgggaggcggctgaactggacccccctggggcacgctttctggccctgcgagcccagctgactgaattctctagggctttggcccagcggtgccagcggctggcggatgctgagaggctgtttcagctcttcagggaggccttgacgtgggctgaggaggggcagcgagtgttggcagagctggagcaggaacgcccgggggttgtgttgcagcagctgcagctgcactggaccaggcaccctgacttgcctcctgcccacttccgaaagatgtgggctctggccacggggctgggctcagaggccatccgccaggagtgccgctgggcctgggcgcggtgccaggacacctggctggccctggaccaaaagcttgaggcttcactgaagctaccaccggtgggcagcacagctagcctgtgtgtcagccaggtccccgctgcacctgcccaccctcccctgaggaaggcctacagcttcgatcggaatctggggcagagtctcagtgaacctgcctgccactgccaccatgcggccactattgctgcctgccgcagaccagaggctggaggaggtgccctgccccaggcatcccctactgtgcctccaccaggcagctctgaccccaggagcctcaacaggctacagctggtgctggcagagatggtggccacggagcgggagtatgtccgggctctagagtacactatggagaactatttccccgagctggatcgccccgatgtgccccagggcctccgcggtcagcgtgcccacctctttggcaacctggagaagctgcgggacttccactgccacttcttcctgcgtgagctggaggcttgcacccggcacccaccacgagtggcctatgccttcctgcgccatagggtgcagtttgggatgtacgcgctctacagcaagaataagcctcgctccgatgccctgatgtcaagctatgggcacaccttcttcaaggacaagcagcaagcactgggggaccacctggacctggcctcctacctgctaaagcccatccagcgcatgggcaagtacgcactgctgctgcaggagctggcacgggcctgcgggggccccacgcaggagctcagtgcgctgcgggaggcccagagccttgtgcacttccagctgcggcacggaaacgacctgctggccatggacgccatccagggctgtgatgttaacctcaaggaacaggggcagctggtgcgacaggatgagtttgtggtgcgcactgggcgccacaagtccgtgcgccgcatcttcctttttgaggagctgctgctcttcagcaagcctcgccatgggcccacaggggttgacacatttgcctacaagcgctccttcaagatggcagaccttggtctcactgagtgctgtgggaacagcaacctgcgcttcgagatctggttccgccgccgcaaggccagggacacctttgtgctgcaggcctccagcctggctatcaagcaggcctggacagctgacatctcccacctgctttggaggcaggccgtccacaacaaggaggtgcgcatggctgagatggtgtccatgggtgtggggaacaaggccttccgagacattgctcccagcgaggaagccatcaacgaccgcaccgtcaactatgtcctgaagtgccgagaagttcgctctcgggcgtccattgccgtagccccgtttgaccatgacagcctctacctgggggcctcgaactcccttcctggagaccctgcctcttgctctgttctggggtccctcaacctgcacctgtacagagacccagctcttctgggtctccgctgtcccctgtatcccagcttcctagaggaagcagcactggaggctgaggcagagctgggcggccagccctctttgactgctgaggactcagagatctcgtcccaatgcccatcagccagtggctccagtggctctgacagcagctgtgtgtcagggcaggccctgggtaggggcctggaggacttaccctgtgtctgagcccgggactggacgagcagtagatccagcagcctgcagctccaaggaacattgcctctctggatctgctgtgaccagggtgtggctgacacctgggctacctccaacctacatgtgcaacgctgttgactaccctttctgatgtgtgtggccattggactaactggcacggggcctctctagggaagtctggttgtagagcctgaataggctcctggccccatgaccccttctcctgtccccagctcccatcccagttgtgggttaagaataggctagagcagacattgggtgtttccatgctgtaggctggtgggggaccatgtgcctctaggcagtgactagggtgcccccacccctcaggaagaacacaggtgggctcctagcagctgatccccaatgcctggccttaaagccgagctcagttaccatagggacaggtccacctctactgggccctcatgcttgcctttcctggcccccaggcccagcccctttttactggggcagtttcgttattttgacttgatgccttttgaataactttcaatagaattgtctaaaattatcttactggttgttaggcctttggtgtctcagagaaggagtctaggtctttgatgtgtgatttaatcttttatttgtttataataaaaaatagactgatttgtaaaaaaaaaaaaaaaaaaaaaaaaaaaaaaaaaaaaaaaaaaaaaaaaaaaaaaaaaaaaaaaaaaaaaaaaaaaaaaaaaaaaaaaaaaaaaaa

SEQ ID NO: 294 - protein, 914 aa, Homo sapiens
VYQVLLVGSTLLKEVPSGLQLEQLPSQSLLTHIPTAGLPTSLGGGLPYCHQAWLDFRRRLEALLQNCQAACALLQGAIESVKAVPQPMEPGEVGQLLQQTEVLMQQVLDSPWLAWLQCQGGRELTWLKQEVPEVTLSPDYRTAMDKADELYDRVDGLLHQLTLQSNQRIQALELVQTLEARESGLHQIEVWLQQVGWPALEEAGEPSLDMLLQAQGSFQELYQVAQEQVRQGEKFLQPLTGWEAAELDPPGARFLALRAQLTEFSRALAQRCQRLADAERLFQLFREALTWAEEGQRVLAELEQERPGVVLQQLQLHWTRHPDLPPAHFRKMWALATGLGSEAIRQECRWAWARCQDTWLALDQKLEASLKLPPVGSTASLCVSQVPAAPAHPPLRKAYSFDRNLGQSLSEPACHCHHAATIAACRRPEAGGGALPQASPTVPPPGSSDPRSLNRLQLVLAEMVATEREYVRALEYTMENYFPELDRPDVPQGLRGQRAHLFGNLEKLRDFHCHFFLRELEACTRHPPRVAYAFLRHRVQFGMYALYSKNKPRSDALMSSYGHTFFKDKQQALGDHLDLASYLLKPIQRMGKYALLLQELARACGGPTQELSALREAQSLVHFQLRHGNDLLAMDAIQGCDVNLKEQGQLVRQDEFVVRTGRHKSVRRIFLFEELLLFSKPRHGPTGVDTFAYKRSFKMADLGLTECCGNSNLRFEIWFRRRKARDTFVLQASSLAIKQAWTADISHLLWRQAVHNKEVRMAEMVSMGVGNKAFRDIAPSEEAINDRTVNYVLKCREVRSRASIAVAPFDHDSLYLGASNSLPGDPASCSVLGSLNLHLYRDPALLGLRCPLYPSFLEEAALEAEAELGGQPSLTAEDSEISSQCPSASGSSGSDSSCVSGQALGRGLEDLPCV

SEQ ID NO: 295 - DNA, 474 bp, Homo sapiens
  misc_feature (459)..(459): n is a, c, g, or t
gtcggagcccattgcacgcctgctctcttgtagcttctctcagcctagcccagcatcactatggtggacgctttcctgggcacctggaagctagtggacagcaagaatttcgatgactacatgaagtcactcggtgtgggttttgctaccaggcaggtggccagcatgaccaagcctaccacaatcatcgaaaagaatggggacattctcaccctaaaaacacacagcaccttcaagaacacagagatcagctttaagttgggggtggagttcgatgagacaacagcagatgacaggaaggtcaagtccattgtgacactggatggagggaaacttgttcacctgcagaaatgggaccgggcaagagaccacacttgtgccgggagtaatttgatggaaaactcatcctgacacttcacccacggcactgcagtttgcactcgcacttatgagaaagangcatgacctgactgc

SEQ ID NO: 296 - DNA, 4223 bp, Homo sapiens
gcggccgctgacagcaccagcatgtcttacagtgtgaccctgactgggcccgggccctggggcttccgtctgcaggggggcaaggacttcaacatgcccctcactatctcccggatcacaccaggcagcaaggcagcccagtcccagctcagccagggtgacctcgtggtggccattgacggcgtcaacacagacaccatgacccacctggaagcccagaacaagatcaagtctgccagctacaacttgagcctcaccctgcagaaatcaaagcgtcccattcccatctccacgacagcacctccagtccagacccctctgccggtgatccctcaccagaaggaccccgctctggacacgaacggcagcctggtggcacccagccccagccctgaggcgagggccagcccaggcaccccaggcaccccggagctcaggcccacctttagccctgccttctcccggccctccgccttctcctcactcgccgaggcctctgaccctggccctccgcgggccagcctgagggccaagaccagcccagagggggcccgggacctactcggcccaaaagccctgccgggctcgagccagccgaggcaatataacaaccccattggcctgtactcggcagagaccctgagggagatggctcagatgtaccagatgagcctccgagggaaggcctcgggtgtcggactcccaggagggagcctccctattaaggaccttgccgtagacagcgcctctcccgtctaccaggctgtgattaagagccagaacaagccagaagatgaggctgacgagtgggcacgccgttcctccaacctgcagtctcgctccttccgcatcctggcccagatgacggggacagaattcatgcaagaccctgatgaagaagctctgcgaaggtcaagcacccctattgagcatgcgccggtgtgcaccagccaggccaccaccccgctgctgcccgcttctgcccagccacctgctgctgcctctcccagtgcggcttcgccacccctggccacagctgctgcccacactgccatcgcctccgcctccaccacagcccctgcttcaagtcctgccgacagcccaaggccccaggcctcttcctacagccccgcagtggccgcctcttcagcacctgccacccacaccagctacagtgagggccccgccgcccctgcacccaagccccgggttgtcaccactgccagcatccggccttctgtctaccagccagtgcctgcatctacctacagcccgtccccaggggccaattacagtcccactccctacaccccctcccctgcccctgcctacaccccctcccctgcccctgcctacaccccctcacctgtccccacctacactccatccccagcaccagcctataccccctcacctgcccccaactataaccctgcaccctcggtggcctacagcgggggccctgcggagcctgccagccgtccaccctgggtgacagatgatagcttctcccagaagtttgccccgggcaagagcaccacctccatcagcaagcagaccctgccccggggaggcccagcctacaccccagcgggtcctcaggtgccaccacttgccagggggaccgtccagagggctgagcgattcccagccagcagccggactccactctgcggtcactgcaacaatgtcatccggggcccatttctggtagccatgggccgttcttggcaccctgaagagttcacctgtgcctactgcaagacttccctggcagatgtgtgctttgtggaagagcagaacaacgtttactgtgagcgatgttatgagcaattctttgccccgctgtgtgccaagtgcaacaccaaaattatgggggaagtaatgcatgccttgagacagacatggcacaccacctgcttcgtctgtgcggcctgcaagaagccttttgggaacagcctcttccacatggaagacggggagccctactgcgagaaagactacatcaatctgttcagcaccaagtgccatggctgcgatttccccgtggaggctggcgacaagtttatcgaagccctgggccacacttggcacgacacctgcttcatttgcgcagtctgccatgtgaatctggaggggcagccgttctactccaagaaggacagacccctgtgcaagaagcacgcacacaccatcaacttgtaggcggccaaggccgcctgtgctgacgaggcccggagctgctcctgctgctggcaacaaaggattcgggaggctgatgtttcttctgaggggaatggggagagagaggaagcgactgagccctttggaagtataattttaggttttttcttctgtacacagatcgtgcatttgcatagttcagactaggagccaaatgaagactcaaaaccaagctagttattaatccaagactggaattgtacttcagacatttagagcagaattccaagaactcaaaagtgaaaagcaacaagcagctttcccaaagcgatacacttgctttggtcaccagaggaggacagagcttagagcagctgtggagaatctgaagcattctgcggagttcttaagcgctcccctggcaaacaaattgaagtgccaaacagcactcgctgcagggtatttttagagtcatagctgagagcttgttagctaagacccattgggctttcctcaccaaaaaaggaagtgttattccattactagcgtcatggagctacctctgcgcatcagacttcagaccttgaacaaacttaaaaccttcttgggagcccggacgtccaaagagatgtcttctgggagccactgggcaattgccagggctccaggaagggctctggctcaggttgcagacagctgagaaaagatggccctgtcagccaccctctctcagtctgaaacatccaacatccccagaaggcttagctcctttttgaattgtgatgggaaagtagagttgggtttttccagttttgctctgtggtgtgtgagagatttttttaaaggctttgggttgtctttggcctttgtttagctttaagggttcgttagcatgagtgtccagtcgtgtgcatgaatttcaccccaacttgtgactgctcacttatgacgtctcccccagtaccctccatctcaaataggcttggtggcctgtggaaaagaagagagacagagagacagtgtctgaaacaggatggcagaataggctcacatgcccaaactctgggtggggaagaggaaacttactttctgccaccctcagtaagaacacacgaggaggcaggacctcccaccttcaggtctgcatcatccttttcaaatgttcctttaaatgcagcacactgagtttgtacaattgtgttaactgctggaagggacagatgcactgatatatatgcatttgctgttttggccaatattttgaaaatgtatgagctgagttgatctagctattatttaagtatttattgaagtagaggggccttcaaactactttatactagtgatagtttgagttaggtaagcatcttaaagctgtttggtgataaagaaggcagcttagattctgtggttggaaacagtgtagtcgcttccctttttaggaagccctgttaatatgctcattgaaaacatggcattgaagcaggcacttgcgtggatgtttctcacttgagcacgatatttaggctctcttccaactcactctattctgtcctcactcctgttttggatttttctctttgcatgtttgaaatgttttatgggaatgtattagaactcttttcttctaaggactgagacttccaggggattgccatcttacctgtctcttctccatgagggagaaggaagcagctagctatgtccctagctgcaggaagcccctattttttccaagcacgaagccaccagtctcccccaaggagcatcaggaagggacatggatgtgctcctgccacagggcccttcctacctttggatctgtgagaaggtgaatacaaagcagcaggcagagtaaaatctgctgggactgcctggagatttgtcaggagctgcagacaagtaccttggagcattctgttatttttggaaagttcaaatatgcagggacaaggaggttgctgactgtactgacaggctctaagtcattttctccaaaaactatctattcaattatcaggggctggtcttgaggaagg

SEQ ID NO: 297 - protein, 734 aa, Homo sapiens
AAADSTSMSYSVTLTGPGPWGFRLQGGKDFNMPLTISRITPGSKAAQSQLSQGDLVVAIDGVNTDTMTHLEAQNKIKSASYNLSLTLQKSKRPIPISTTAPPVQTPLPVIPHQKDPALDTNGSLVAPSPSPEARASPGTPGTPELRPTFSPAFSRPSAFSSLAEASDPGPPRASLRAKTSPEGARDLLGPKALPGSSQPRQYNNPIGLYSAETLREMAQMYQMSLRGKASGVGLPGGSLPIKDLAVDSASPVYQAVIKSQNKPEDEADEWARRSSNLQSRSFRILAQMTGTEFMQDPDEEALRRSSTPIEHAPVCTSQATTPLLPASAQPPAAASPSAASPPLATAAAHTAIASASTTAPASSPADSPRPQASSYSPAVAASSAPATHTSYSEGPAAPAPKPRVVTTASIRPSVYQPVPASTYSPSPGANYSPTPYTPSPAPAYTPSPAPAYTPSPVPTYTPSPAPAYTPSPAPNYNPAPSVAYSGGPAEPASRPPWVTDDSFSQKFAPGKSTTSISKQTLPRGGPAYTPAGPQVPPLARGTVQRAERFPASSRTPLCGHCNNVIRGPFLVAMGRSWHPEEFTCAYCKTSLADVCFVEEQNNVYCERCYEQFFAPLCAKCNTKIMGEVMHALRQTWHTTCFVCAACKKPFGNSLFHMEDGEPYCEKDYINLFSTKCHGCDFPVEAGDKFIEALGHTWHDTCFICAVCHVNLEGQPFYSKKDRPLCKKHAHTINL

SEQ ID NO: 298 - DNA, 347 bp, Homo sapiens
  misc_feature (292)..(292): n is a, c, g, or t
ggcacgagcggcacgagcattcactcacaccttgcatttcacccctgcatcccagtcgccctgcagcctcacacagatcctgcacacacccagacagctggcgctcacacattcaccgttggcctgcctctgttcaccctccatggccctgctactggccctcagcctgctggttctctggacttccccagccccaactctgagtggcaccaatgatgctgaagactgctgcctgtctgtgacccagaaacccatccctgggtaacatcgtgaggaacttccactaaccttntcatcaaggatggctgcagggtgcctgttgtagtgttcaccacactgaggggccg

SEQ ID NO: 299 - DNA, 5776 bp, Homo sapiens
gctcacccaggaaaaatatgcaatcgtcccattgatatacaggccactacaatggatggagttaacctcagcaccgaggttgtctacaaaaaaggccaggattataggtttgcttgctacgaccggggcagagcctgccggagctaccgtgtacggttcctctgtgggaagcctgtgaggcccaaactcacagtcaccattgacaccaatgtgaacagcaccattctgaacttggaggataatgtacagtcatggaaacctggagataccctggtcattgccagtactgattactccatgtaccaggcagaagagttccaggtgcttccctgcagatcctgcgcccccaaccaggtcaaagtggcagggaaaccaatgtacctgcacatcggggaggagatagacggcgtggacatgcgggcggaggttgggcttctgagccggaacatcatagtgatgggggagatggaggacaaatgctacccctacagaaaccacatctgcaatttctttgacttcgatacctttgggggccacatcaagtttgctctgggatttaaggcagcacacttggagggcacggagctgaagcatatgggacagcagctggtgggtcagtacccgattcacttccacctggccggtgatgtagacgaaaggggaggttatgacccacccacatacatcagggacctctccatccatcatacattctctcgctgcgtcacagtccatggctccaatggcttgttgatcaaggacgttgtgggctataactctttgggccactgcttcttcacggaagatgggccggaggaacgcaacacttttgaccactgtcttggcctccttgtcaagtctggaaccctcctcccctcggaccgtgacagcaagatgtgcaagatgatcacagaggactcctacccagggtacatccccaagcccaggcaagactgcaatgctgtgtccaccttctggatggccaatcccaacaacaacctcatcaactgtgccgctgcaggatctgaggaaactggattttggtttatttttcaccacgtaccaacgggcccctccgtgggaatgtactccccaggttattcagagcacattccactgggaaaattctataacaaccgagcacattccaactaccgggctggcatgatcatagacaacggagtcaaaaccaccgaggcctctgccaaggacaagcggccgttcctctcaatcatctctgccagatacagccctcaccaggacgccgacccgctgaagccccgggagccggccatcatcagacacttcattgcctacaagaaccaggaccacggggcctggctgcgcggcggggatgtgtggctggacagctgccggtttgctgacaatggcattggcctgaccctggccagtggtggaaccttcccgtatgacgacggctccaagcaagagataaagaacagcttgtttgttggcgagagtggcaacgtggggacggaaatgatggacaataggatctggggccctggcggcttggaccatagcggaaggaccctccctataggccagaattttccaattagaggaattcagttatatgatggccccatcaacatccaaaactgcactttccgaaagtttgtggccctggagggccggcacaccagcgccctggccttccgcctgaataatgcctggcagagctgcccccataacaacgtgaccggcattgcctttgaggacgttccgattacttccagagtgttcttcggagagcctgggccctggttcaaccagctggacatggatggggataagacatctgtgttccatgacgtcgacggctccgtgtccgagtaccctggctcctacctcacgaagaatgacaactggctggtccggcacccagactgcatcaatgttcccgactggagaggggccatttgcagtgggtgctatgcacagatgtacattcaagcctacaagaccagtaacctgcgaatgaagatcatcaagaatgacttccccagccaccctctttacctggagggggcgctcaccaggagcacccattaccagcaataccaaccggttgtcaccctgcagaagggctacaccatccactgggaccagacggcccccgccgaactcgccatctggctcatcaacttcaacaagggcgactggatccgagtggggctctgctacccgcgaggcaccacattctccatcctctcggatgttcacaatcgcctgctgaagcaaacgtccaagacgggcgtcttcgtgaggaccttgcagatggacaaagtggagcagagctaccctggcaggagccactactactgggacgaggactcagggctgttgttcctgaagctgaaagctcagaacgagagagagaagtttgctttctgctccatgaaaggctgtgagaggataaagattaaagctctgattccaaagaacgcaggcgtcagtgactgcacagccacagcttaccccaagttcaccgagagggctgtcgtagacgtgccgatgcccaagaagctctttggttctcagctgaaaacaaaggaccatttcttggaggtgaagatggagagttccaagcagcacttcttccacctctggaacgacttcgcttacattgaagtggatgggaagaagtaccccagttcggaggatggcatccaggtggtggtgattgacgggaaccaagggcgcgtggtgagccacacgagcttcaggaactccattctgcaaggcataccatggcagcttttcaactatgtggcgaccatccctgacaattccatagtgcttatggcatcaaagggaagatacgtctccagaggcccatggaccagagtgctggaaaagcttggggcagacaggggtctcaagttgaaagagcaaatggcattcgttggcttcaaaggcagcttccggcccatctgggtgacactggacactgaggatcacaaagccaaaatcttccaagttgtgcccatccctgtggtgaagaagaagaagttgtgaggacagctgccgcccggtgccacctcgtggtagactatgacggtgactcttggcagcagaccagtgggggatggctgggtcccccagcccctgccagcagctgcctgggaaggccgtgtttcagccctgatgggccaagggaaggctatcagagaccctggtgctgccacctgcccctactcaagtgtctacctggagcccctggggcggtgctggccaatgctggaaacattcactttcctgcagcctcttgggtgcttctctcctatctgtgcctcttcagtgggggtttggggaccatatcaggagacctgggttgtgctgacagcaaagatccactctggcaggagccctgacccagctaggaggtagtctggagggctggtcattcacagatccccatggtcttcagcagacaagtgagggtggtaaatgtaggagaaagagccttggccttaaggaaatctttactcctgtaagcaagagccaacctcacaggattaggagctggggtagaactggctatccttggggaagaggcaagccctgcctctggccgtgtccacctttcaggagactttgagtggcaggtttggacttggactagatgactctcaaaggcccttttagttctgagattccagaaatctgctgcatttcacatggtacctggaacccaacagttcatggatatccactgatatccatgatgctgggtgccccagcgcacacgggatggagaggtgagaactaatgcctagcttgaggggtctgcagtccagtagggcaggcagtcaggtccatgtgcactgcaatgccaggtggagaaatcacagagaggtaaaatggaggccagtgccatttcagaggggaggctcaggaaggcttcttgcttacaggaatgaaggctgggggcattttgctggggggagatgaggcagcctctggaatggctcagggattcagccctccctgccgctgcctgctgaagctggtgactacggggtcgccctttgctcacgtctctctggcccactcatgatggagaagtgtggtcagaggggagcaatgggctttgctgcttatgagcacagaggaattcagtccccaggcagccctgcctctgactccaagagggtgaagtccacagaagtgagctcctgccttagggcctcatttgctcttcatccagggaactgagcacagggggcctccaggagaccctagatgtgctcgtactccctcggcctgggatttcagagctggaaatatagaaaatatctagcccaaagccttcattttaacagatggggaaagtgagcccccaagatgggaaagaaccacacagctaagggagggcctggggagccccaccctagcccttgctgccacaccacattgcctcaacaaccggccccagagtgcccaggcactcctgaggtagcttctggaaatggggacaagtcccctcgaaggaaaggaaatgactagagtagaatgacagctagcagatctcttccctcctgctcccagcgcacacaaacccgccctccccttggtgttggcggtccctgtggccttcactttgttcactacctgtcagcccagcctgggtgcacagtagctgcaactccccattggtgctacctggctctcctgtctctgcagctctacaggtgaggcccagcagagggagtagggctcgccatgtttctggtgagccaatttggctgatcttgggtgtctgaacagctattgggtccaccccagtccctttcagctgctgcttaatgccctgctctctccctggcccaccttatagagagcccaaagagctcctgtaagagggagaactctatctgtggtttataatcttgcacgaggcaccagagtctccctgggtcttgtgatgaactacatttatcccctttcctgccccaaccacaaactctttccttcaaagagggcctgcctggctccctccacccaactgcacccatgagactcggtccaagagtccattccccaggtgggagccaactgtcagggaggtctttcccaccaaacatctttcagctgctgggaggtgaccatagggctctgcttttaaagatatggctgcttcaaaggccagagtcacaggaaggacttcttccagggagattagtggtgatggagaggagagttaaaatgacctcatgtccttcttgtccacggttttgttgagttttcactcttctaatgcaagggtctcacactgtgaaccacttaggatgtgatcactttcaggtggccaggaatgttgaatgtctttggctcagttcatttaaaaaagatatctatttgaaagttctcagagttgtacatatgtttcacagtacaggatctgtacataaaagtttctttcctaaaccattcaccaagagccaatatctaggcattttcttggtagcacaaattttcttattgcttagaaaattgtcctccttgttatttctgtttgtaagacttaagtgagttaggtctttaaggaaagcaacgctcctctgaaatgcttgtcttttttctgttgccgaaatagctggtcctttttcgggagttagatgtatagagtgtttgtatgtaaacatttcttgtaggcatcaccatgaacaaagatatattttctatttatttattatatgtgcacttcaagaagtcactgtcagagaaataaagaattgtcttaaatgtc

SEQ ID NO: 300 - protein, 1013 aa, Homo sapiens
AHPGKICNRPIDIQATTMDGVNLSTEVVYKKGQDYRFACYDRGRACRSYRVRFLCGKPVRPKLTVTIDTNVNSTILNLEDNVQSWKPGDTLVIASTDYSMYQAEEFQVLPCRSCAPNQVKVAGKPMYLHIGEEIDGVDMRAEVGLLSRNIIVMGEMEDKCYPYRNHICNFFDFDTFGGHIKFALGFKAAHLEGTELKHMGQQLVGQYPIHFHLAGDVDERGGYDPPTYIRDLSIHHTFSRCVTVHGSNGLLIKDVVGYNSLGHCFFTEDGPEERNTFDHCLGLLVKSGTLLPSDRDSKMCKMITEDSYPGYIPKPRQDCNAVSTFWMANPNNNLINCAAAGSEETGFWFIFHHVPTGPSVGMYSPGYSEHIPLGKFYNNRAHSNYRAGMIIDNGVKTTEASAKDKRPFLSIISARYSPHQDADPLKPREPAIIRHFIAYKNQDHGAWLRGGDVWLDSCRFADNGIGLTLASGGTFPYDDGSKQEIKNSLFVGESGNVGTEMMDNRIWGPGGLDHSGRTLPIGQNFPIRGIQLYDGPINIQNCTFRKFVALEGRHTSALAFRLNNAWQSCPHNNVTGIAFEDVPITSRVFFGEPGPWFNQLDMDGDKTSVFHDVDGSVSEYPGSYLTKNDNWLVRHPDCINVPDWRGAICSGCYAQMYIQAYKTSNLRMKIIKNDFPSHPLYLEGALTRSTHYQQYQPVVTLQKGYTIHWDQTAPAELAIWLINFNKGDWIRVGLCYPRGTTFSILSDVHNRLLKQTSKTGVFVRTLQMDKVEQSYPGRSHYYWDEDSGLLFLKLKAQNEREKFAFCSMKGCERIKIKALIPKNAGVSDCTATAYPKFTERAVVDVPMPKKLFGSQLKTKDHFLEVKMESSKQHFFHLWNDFAYIEVDGKKYPSSEDGIQVVVIDGNQGRVVSHTSFRNSILQGIPWQLFNYVATIPDNSIVLMASKGRYVSRGPWTRVLEKLGADRGLKLKEQMAFVGFKGSFRPIWVTLDTEDHKAKIFQVVPIPVVKKKKL

SEQ ID NO: 301 - DNA, 2099 bp, Homo sapiens
tttttttttttttttttttagtcacatatttacataagatatcatagtcatggtagactaatgagaggagaagcattttggttatgtcatttcgggataattttatcagttgtgagagtttaacaataaagaacataaaacttgctgtttcataaaaatatgaaattttcctggagaaattttgacttaataaaggaacaaagaactcagtttgtagtgaataaaattttacattcacttccccactttctcatagaagatctacagttggggataaccgataagaggcaattggtttctggcttaagagcctttctcattaggaattttcggtaaattaaagtctgaaattagaaaaacattagacattaatcaacagaccaacaccagtcacgtaaataaatggcattcgtataatttggcagctgaaattcttaaataatctggcaggtacaaggagagaaagaggaaaaatgaaccgttcatcattctcactgcggtctcaccgtttctctccccacctcctttttaaaaattccttttttgcctctgtttccaaagaaatgccagctcaaaaccaaggcagttggaatttaacagctctaggaagctctagtgagaataaaagccaaataatatgaaccagccaaaattccttttgcaacatttttccccaaaagaaaaatacagaagatatttcttttcaagtctctaattctacctttaaaaaatatgtgtactaatgaacagtattcattttaaatctagaacctgggaatatattactataggcaagacacctttaggtaaagagctcataattttccattgaatacagtaaaattataaagaatgtaacaaaggctttggtaatttggtagaggggctttttgatgaaaaaaagacagatgatttagaaagcgaggaacacatcaagcctcagggaaagaaaatgtttgattggtattaattaaaacactgctaatatattctaataaaatcaaatttaacattctaaagtaatcctcttggtatgtcaaaggaaaagaaaggtattatcttatttgcatctctgcaatccaaatgcatttgctcattcagcagaattaatttttatcaccagcctgttttatctcctcacagatttagtcaaagttattctttcaaactagaaaggatcagggtggggaatccatggaaggtattggaagactagtgactgtatttagtaccggctttatattttacgatgttctttctcttcattcgctgtaatggggtgtggagggaaacggtgagaccgcagtgagaatgatgaacggttcatttttcctctttctctccttgtacttgccagattatttaagaatttcagctgccaaattatacgaatgccatttatttacgtgactggtgttggtctgttgattaatgtctaatgtttttctaatttcagactttaatttaccgaaaattcctaatgaaaaaggctcttaagccagaaaccaattgcctcttatcggttatccccaactgtagatcttctatgagaaagtggggaagtgaatgtaaaattttattcactacaaactgagttctttgttcctttattaagtcaaaatttctccaggaaaatttcatatttttatgaaacagcaagttttatgttctttattgttaaactctcacaactgataaaattatcccgaaatgacataaccaaaatgcttctcctctcattagtctaccatgactatgatatcttatgtaaatatgtgactaacaaaaaaaaaatgaatgggccataaatactgaggaccatatttgcgtgtttccaaagtgaggggttctgcgtcctatcaaggagatgtaaactactgactacactaccgatgatgctggctttttgctccattgccttttcaagtcttcaacgtaaaagagcaatcgcagttcggtttcacatgtattgttctataatccaggcaataaatgctaattagtaatgctcaaggatccgaccattcagagtaattatcataatttacttcttccttgttaaagacattccttgctgattaaaaaaaaaaaaaaaaaaa

SEQ ID NO: 302 - DNA, 578 bp, Homo sapiens
  misc_feature (245)..(245): n is a, c, g, or t
  misc_feature (338)..(338): n is a, c, g, or t
  misc_feature (420)..(420): n is a, c, g, or t
  misc_feature (450)..(450): n is a, c, g, or t
  misc_feature (474)..(474): n is a, c, g, or t
  misc_feature (532)..(532): n is a, c, g, or t
  misc_feature (537)..(537): n is a, c, g, or t
tgtgctgcaaggagctaaggccttcagtgtccccttccttacccaggtttctcacagaatggattcccagcggaacttgcagaggaactgcggctttaccaatccacccttcttcaggatggtctaaaagatctcctggatgagaaaaaattcatcgattgcaccctaaaagcaggtgacaaaagtcttccttgccacagattgattttgtcagcttgtagtccttacttccgtgagtacttttnatctgaaattgatgaggcgaaaaaaaaggaggtagtgctagacaatgtggatcctgctatacttgatttaatcatcaaatacctgtactctgncagtattgatctcaatgacggaaatgtgcaagatatttttgcattggccagccgctttcagaatccctcagtgtttactgtntgcgtttcctatcttcagaaaaagacttgntcctggtaactgtctagccatccnaagaataggacttcttcttgaactggcccgagactcgccatttctggcccgtgaattntgtcngatcgctttgtacagatttgtaaggaagaggactttatgca

SEQ ID NO: 303 - DNA, 284 bp, Homo sapiens
  misc_feature (47)..(47): n is a, c, g, or t
  misc_feature (56)..(56): n is a, c, g, or t
  misc_feature (113)..(114): n is a, c, g, or t
tcggacaagctgtttccttcttctgaccaacccaggtgtgacctggngatgcaganctttctgttttgggtgttgggagaagcagcaggaaggagtcgccagatgatcaagcnncccctttgcctgtcatctgtgaatgagcttcgccaggtggtgggcacctgggagccatgcagaggcctgtggtgctgagttagactccaggtactttgtggtcaaaggaaatcgcctagctccaggctgtgttaggacagtattagcatgaaggctgtgcgaccatcatg

SEQ ID NO: 304 - DNA, 626 bp, Homo sapiens
ggacctgggaaggagcataggacagggcaaggcgggataaggaggggcaccacagcccttaaggcacgagggaacctcactgcgcatgctcctttggtgcccacctcagtgcgcatgttcactgggcgtcttcccatcggccccttcgccagtgtggggaacgcggcggagctgtgagccggcgactcgggtccctgaggtctggattctttctccgctactgagacacggcggacacacacaaacacagaaccacacagccagtcccaggagcccagtaatggagagccccaaaaagaagaaccagcagctgaaagtcgggatcctacacctgggcagcagacagaagaagatcaggatacagctgagatcccagtgcgcgacatggaaggtgatctgcaagagctgcatcagtcaaacaccggggataaatctggatttgggttccggcgtcaaggtgaagataatacctaaagaggaacactgtaaaatgccagaagcaggtgaagagcaaccacaagtttaaatgaagacaagctgaaacaacgcaagctggttttatattagatatttgacttaaactatctcaataaagttttgcagctttcaccaaaaaaaaaaaaaaa

SEQ ID NO: 305 - protein, 146 aa, Homo sapiens
MLLWCPPQCACSLGVFPSAPSPVWGTRRSCEPATRVPEVWILSPLLRHGGHTQTQNHTASPRSPVMESPKKKNQQLKVGILHLGSRQKKIRIQLRSQCATWKVICKSCISQTPGINLDLGSGVKVKIIPKEEHCKMPEAGEEQPQV

SEQ ID NO: 306 - DNA, 356 bp, Homo sapiens
  misc_feature (84)..(84): n is a, c, g, or t
  misc_feature (86)..(86): n is a, c, g, or t
gaccccaggtccagccgtccattccggtggaggcagaggcagtcctggggctctggggctcgggctttgacaccaggtacctcnangagccagagtcactcggcgccgcctggtgcatgggaggggagccgggccaggagtaagtaactcatacggccgccggggacccgggtcgggctgggggcttccaactcagagggagtgtgatttgcctgatcctcttcggcgttgtcctgctctgccgcatccagccctgtaccgtcatcccaattcccgccgttcccatctgtgttccgggtgggatcggtctggacgcggcccgcgactttccaggcaggagctcggggcggaggccg

SEQ ID NO: 307 - DNA, 602 bp, Homo sapiens
  misc_feature (14)..(14): n is a, c, g, or t
cggccgccacgccncgtggagccgcgcacccgcacgcgcgccgcgccgccgccgcccaggctgtaggtgtccaagcccggcttggcagccagagcgcgctccaccgacacggagaagtcggccgcggggcctggccccagcagccgggccacgagcgcccgcacggccgccgcctcccgggcctcgtcgcctgccgcgcccccggccccggccaggagaaggacccccaccgccgcggccaccgccaccgcctccatggtctcagtcctgcgggtcccgcgacggccagggggtggggcggcccgcgtccaatcagctgccggcctccggccacgtggacccgaaggctaagcccgggctcagggccaggagtcgcggcttccgggtaccaggatactcccttgggggcgtctcgtgaccgcacgcggtggggagcgtgtgaccccggctccagggccgaaggggacccgctggccctcacagagcgccttcgggtaaaacgcgctttcacacgcaaataacttccatccaaccatctaataaatacacatttggagtttattttgtatcaggcactgccatagctacttccctactgatga

SEQ ID NO: 308 - DNA, 314 bp, Homo sapiens
  misc_feature (198)..(198): n is a, c, g, or t
  misc_feature (296)..(296): n is a, c, g, or t
acacaggacacagcagctttctttggaaatctcccaggtgaggattcacatcccaaaataaaattcagaagccaggtggcctgtgctccccatgggtgacctctggaggcagtggaccaagatgcagcaaggagaggatgcagaacagcttcttgcagaagcacctgctccggcatccagcgctgcctgggaggcagnaaggagaggcagggcaggacacgctggtctgagatgagggggagccccacggcccccagggcaggcttagaggaggcacaggccctgccacggccaantcaggttcagccagcctt

SEQ ID NO: 309 - DNA, 819 bp, Homo sapiens
atgggaaacaccaccagcgaccgggtgtccggggagcgccacggcgccaaggctgcacgctccgagggcgcaggcggccatgccccggggaaggagcacaagatcatggtggggagtacggacgaccccagcgtgttcagcctccctgactccaagctccctggggacaaagagtttgtatcatggcagcaggatttggaggactccgtaaagcccacacagcaggcccggcccactgttatccgctggtctgaaggaggcaaggaggtcttcatctctgggtctttcaacaattggagcaccaagattccactgattaagagccataatgactttgttgccatcctggacctccctgagggagagcaccaatacaagttctttgtggatggacagtgggttcatgatccatcagagcctgtggttaccagtcagcttggcacaattaacaatttgatccatgtcaagaaatctgattttgaggtgttcgatgctttaaagttagattctatggaaagttctgagacatcttgtagagacctttccagctcacccccagggccttatggtcaagaaatgtatgcgtttcgatctgaggaaagattcaaatccccacccatccttcctcctcatctacttcaagttattcttaacaaagacactaatatttcttgtgacccagccttactccctgagcccaaccatgttatgctgaaccatctctatgcattgtccattaaggacagtgtgatggtccttagcgcaacccatcgctacaagaagaagtatgttactactctgctatacaagcccatttga

SEQ ID NO: 310 - protein, 272 aa, Homo sapiens
MGNTTSDRVSGERHGAKAARSEGAGGHAPGKEHKIMVGSTDDPSVFSLPDSKLPGDKEFVSWQQDLEDSVKPTQQARPTVIRWSEGGKEVFISGSFNNWSTKIPLIKSHNDFVAILDLPEGEHQYKFFVDGQWVHDPSEPVVTSQLGTINNLIHVKKSDFEVFDALKLDSMESSETSCRDLSSSPPGPYGQEMYAFRSEERFKSPPILPPHLLQVILNKDTNISCDPALLPEPNHVMLNHLYALSIKDSVMVLSATHRYKKKYVTTLLYKPI

SEQ ID NO: 311 - DNA, 711 bp, Homo sapiens
  misc_feature (612)..(612): n is a, c, g, or t
  misc_feature (642)..(642): n is a, c, g, or t
ttttttttttttcaaagtggcagctgctcatttatttagccaaaaatagatactttctcgtacaatttggttcacacatatgtacatttctttgtatatatacacacacacaaaggcagacacgtttattctcactgaaactccaccccccaaaatcaaccggacaaacaaacctcacagcgaatgcggggtgccacaaaagcgacttggggagggctgaggaggactggttttatttctttttcttactttctttgtttagttttgcttttaggtatttatacacggacatgcttacaaggtggaactatacagagcgattttttttatacaattattacaacgattaaaaaaagttttttttgtttttttgttttttttaaagaactaggatgaggagagagccgataagaccagggcggcgtccaaatggttctggggccgcctgggcacgggatggaaagctgtcttgagtaactttttctccacttccaaggcactacagcgatctgttccgccttcgggctccgctggccgagcgaaggcggcggcggcagccgggtggcccgcggcttcgggaagtcccagcaggtgcggaggggcagagcccancagggaagagcggggtgcgggcgggggcgnggcgtgggccctgaaaacggcggtttgtcccaagccgggaaacttgcccagcggcgcttgagacagtct

SEQ ID NO: 312 - DNA, 5261 bp, Homo sapiens
ctcaggcacgtctagattttcccacttacataggtcttgttaagaaaccagtcctgccttcttgccactcgtgtctttcgatggctcccttcccgaagtcccgctgcctctaagcggagtgttaagcggggctctcggaagccggtggaccgagatttccccgggtggggcgggcgcggtgtagcggcccgcgggctgacttgctcccggctgtcccccggccccagcgaccatgccccgtaaaggcacccagccctccactgcccggcgcagagaggaagggccgccgccgccgtcccctgacggcgccagcagcgacgcggagcctgagccgccgtccggccgcacggagagcccagccaccgccgcagagactgcaagtgaggaacttgataatagaagtttagaagagattttgaacagcattcctcctcccccgcctccagcaatgaccaatgaagctggagctcctcggcttatgataactcatattgtaaaccagaacttcaaatcctatgctggggagaaaattctgggacctttccataagcgcttttcctgtattatcgggccaaatggcagtggcaaatccaatgttattgattctatgctttttgtgtttggctatcgagcacaaaaaataagatctaaaaaactctcagtattaatacataattctgatgaacacaaggacattcagagttgtacagtagaagttcattttcaaaagataattgataaggaaggggatgattatgaagtcattcctaacagtaatttctatgtatccagaacggcctgcagagataatacttctgtctatcacataagtggaaagaaaaagacatttaaggatgttggaaatcttcttcgaagccatggaattgacttggaccataatagatttttaattttacagggtgaagttgaacaaattgctatgatgaaaccaaaaggccagactgaacacgatgagggtatgcttgaatatttagaagatataattggttgtggacggctaaatgaacctattaaagtcttgtgtcggagagttgaaatattaaatgaacacagaggagataagttaaacagggtaaagatggtggaaaaggaaaaggatgccttagaaggagagaaaaacatagctatcgaatttcttaccttggaaaatgaaatatttagaaaaaagaatcatgtttgtcaatattatatttatgagttgcagaaacgaattgctgaaatggaaactcaaaaggaaaaaattcatgaagataccaaagaaattaatgagaagagcaatatactatcaaatgaaatgaaagctaagaataaagatgtaaaagatacagaaaagaaactgaataaaattacaaaatttattgaggagaataaagaaaaatttacacagctagatttggaagatgttcaagttagagaaaagttaaaacatgccacgagtaaagccaaaaaactggagaaacaacttcaaaaagataaagaaaaggttgaagaatttaaaagtatacctgccaagagtaacaatatcattaatgaaacaacaaccagaaacaatgccctcgagaaggaaaaagagaaagaagaaaaaaaattaaaggaagttatggatagccttaaacaggaaacacaagggcttcagaaagaaaaagaaagtcgagagaaagaacttatgggtttcagcaaatcggtaaatgaagcacgttcaaagatggatgtagcccagtcagaacttgatatctatctcagtcgtcataatactgcagtgtctcaattaactaaggctaaggaagctctaattgcagcttctgagactctcaaagaaaggaaagctgcaatcagagatatagaaggaaaactccctcaaactgaacaagaattaaaggagaaagaaaaagaacttcaaaaacttacacaagaagaaacaaactttaaaagtttggttcatgatctctttcaaaaagttgaagaagcaaagagctcattagcaatgaatcgaagtagggggaaagtccttgatgcaataattcaagaaaaaaaatctggcaggattccaggaatatatggaagattgggggacttaggagccattgatgaaaaatacgacgtggctatatcatcctgttgtcatgcactggactacattgttgttgattctattgatatagcccaagaatgtgtaaacttccttaaaagacaaaatattggagttgcaacctttataggtttagataagatggctgtatgggcgaaaaagatgaccgaaattcaaactcctgaaaatactcctcgtttatttgatttagtaaaagtaaaagatgagaaaattcgccaagctttttattttgctttacgagataccttagtagctgacaacttggatcaagccacaagagtagcatatcaaaaagatagaagatggagagtggtaactttacagggacaaatcatagaacagtcaggtacaatgactggtggtggaagcaaagtaatgaaaggaagaatgggttcctcacttgttattgaaatctctgaagaagaggtaaacaaaatggaatcacagttgcaaaacgactctaaaaaagcaatgcaaatccaagaacagaaagtacaacttgaagaaagagtagttaagttacggcatagtgaacgagaaatgaggaacacactagaaaaatttactgcaagcatccagcgtttaatagagcaagaagaatatttgaatgtccaagttaaggaacttgaagctaatgtacttgctacagcccctgacaaaaaaaagcagaaattgctagaagaaaacgttagtgctttcaaaacagaatatgatgctgtggctgagaaagctggtaaagtagaagctgaggttaaacgcttacacaataccatcgtagaaatcaataatcataaactcaaggcccaacaagacaaacttgataaaataaataagcaattagatgaatgtgcttctgctattactaaagcccaagtagcaatcaagactgctgacagaaaccttcaaaaggcacaagactctgtcttgcgtacagagaaagaaataaaagatactgagaaagaggtggatgacctaacagcagagctgaaaagtcttgaggacaaagcagcagaggtcgtaaagaatacaaatgctgcagaggaatccttaccagagatccagaaagaacatcgcaatctgcttcaagaattaaaagttattcaagaaaatgaacatgctcttcaaaaagatgcacttagtattaagttgaaacttgaacaaatagatggtcacattgctgaacataattctaaaataaaatattggcacaaagagatttcaaaaatatcactgcatcctatagaagataatcctattgaagagatttcggttctaagcccagaggatcttgaagcgatcaagaatccagattctataacaaatcaaattgcacttttggaagcccggtgtcatgaaatgaaaccaaacctcggtgccatcgcagagtataaaaagaaggaagaattgtatttgcaacgggtagcagaattggacaaaattacttatgaaagagacagttttagacaggcatatgaagatcttcggaaacaaaggcttaatgaatttatggcaggtttttatataataacaaataaattaaaggaaaattaccaaatgcttactttgggaggggacgccgaactcgagcttgtagacagcttggatcctttctctgaaggaatcatgttcagtgttcgaccacctaagaaaagttggaaaaagatcttcaacctttcgggaggagagaaaacacttagttcattggctttagtatttgctcttcaccactacaagcccactcccctttacttcatggatgagattgatgcagcccttgattttaaaaatgtgtccattgttgcattttatatatatgaacaaacaaaaaatgcacagttcataataatttctcttcgaaataatatgtttgagatttcggatagacttattggaatttacaagacatacaacataacaaaaagtgttgctgtaaatccaaaagaaattgcatctaagggactttgttgaactttatgctgaagattcttcaagttgattcagtgtattactgatttttttctatttgtaaaggattatgagttgtataaaatacatactccctaaactagatcatgaaactggtttctgttttatgcagttgtcatttgtaaagtctaataaaatattctctataattgcttctagattacaaaaatatgacaatcttgtaagtagcagactatggagaaaaatgagttacctggagggtcaggtaacttgccaaactaaaaagtatgttagttgaggcaaagtcctaagcaaggttgtgctatcaaggctcagcataccttcgtgggcctttgatttaccaacactggaaatgcctgccaactaatcttggatagattctttaaggcattccacttagcttgccagttgagacaatcaccacagttattacccaaatactatgaacatatttttgtaaaccagtcattctgaattatagtgatgagaatttaaatatatgcttttctagaatttgatgtttgaccatttatgacttaattaccagagagccagtaaattaggacagtgtttcaacaagcctaggctatctcgtaagttgaaaaatatcccactatagttgcttcatgagtatgaagtaagatggcctctgatttacactggttcaatttacaaattttcaactttatgataggtttatccgggtactaaatgcatttcaacttgatagtttcaacttatgataggtttaccaggatgtagtcccactgttgaggagcatctatttaggggttaattactttagtaataagtggaaagtaagataccttgagtaatgtttgcctataaaattgtcagcgtatttttacactattggctcaagaatgttataatgctaagggacataagttggcaaccacttggtttttggaaggactttcggtattgtattagaagtctgccctagctgttaaatttctgggtatttatcctaaggaattaattaaagagttaattgttcctttcttcagtgggccattgttttagatatttaaaaaatccaacagtttctatcataatgtaactgtaaaaatgtaaacacattattagcatggacttttaaataaagatttaaagaaagcaaaaaaaaaaaaaaaaaaaa

SEQ ID NO: 313 - protein, 1288 aa, Homo sapiens
MPRKGTQPSTARRREEGPPPPSPDGASSDAEPEPPSGRTESPATAAETASEELDNRSLEEILNSIPPPPPPAMTNEAGAPRLMITHIVNQNFKSYAGEKILGPFHKRFSCIIGPNGSGKSNVIDSMLFVFGYRAQKIRSKKLSVLIHNSDEHKDIQSCTVEVHFQKIIDKEGDDYEVIPNSNFYVSRTACRDNTSVYHISGKKKTFKDVGNLLRSHGIDLDHNRFLILQGEVEQIAMMKPKGQTEHDEGMLEYLEDIIGCGRLNEPIKVLCRRVEILNEHRGDKLNRVKMVEKEKDALEGEKNIAIEFLTLENEIFRKKNHVCQYYIYELQKRIAEMETQKEKIHEDTKEINEKSNILSNEMKAKNKDVKDTEKKLNKITKFIEENKEKFTQLDLEDVQVREKLKHATSKAKKLEKQLQKDKEKVEEFKSIPAKSNNIINETTTRNNALEKEKEKEEKKLKEVMDSLKQETQGLQKEKESREKELMGFSKSVNEARSKMDVAQSELDIYLSRHNTAVSQLTKAKEALIAASETLKERKAAIRDIEGKLPQTEQELKEKEKELQKLTQEETNFKSLVHDLFQKVEEAKSSLAMNRSRGKVLDAIIQEKKSGRIPGIYGRLGDLGAIDEKYDVAISSCCHALDYIVVDSIDIAQECVNFLKRQNIGVATFIGLDKMAVWAKKMTEIQTPENTPRLFDLVKVKDEKIRQAFYFALRDTLVADNLDQATRVAYQKDRRWRVVTLQGQIIEQSGTMTGGGSKVMKGRMGSSLVIEISEEEVNKMESQLQNDSKKAMQIQEQKVQLEERVVKLRHSEREMRNTLEKFTASIQRLIEQEEYLNVQVKELEANVLATAPDKKKQKLLEENVSAFKTEYDAVAEKAGKVEAEVKRLHNTIVEINNHKLKAQQDKLDKINKQLDECASAITKAQVAIKTADRNLQKAQDSVLRTEKEIKDTEKEVDDLTAELKSLEDKAAEVVKNTNAAEESLPEIQKEHRNLLQELKVIQENEHALQKDALSIKLKLEQIDGHIAEHNSKIKYWHKEISKISLHPIEDNPIEEISVLSPEDLEAIKNPDSITNQIALLEARCHEMKPNLGAIAEYKKKEELYLQRVAELDKITYERDSFRQAYEDLRKQRLNEFMAGFYIITNKLKENYQMLTLGGDAELELVDSLDPFSEGIMFSVRPPKKSWKKIFNLSGGEKTLSSLALVFALHHYKPTPLYFMDEIDAALDFKNVSIVAFYIYEQTKNAQFIIISLRNNMFEISDRLIGIYKTYNITKSVAVNPKEIASKGLC

SEQ ID NO: 314 - DNA, 1098 bp, Homo sapiens
atgtcagccccactggatgccgccctccacgcccttcaggaggagcaggccagaccgccctccacgcccttcaggaggagcaggccagactcaagatgaggctgtgggacctgcagcagctgagaaaggagctcggggactcccccaaagacaaggtcccattttcagtgcccaagatccccctggtattccgaggacacacccagcaggacccggaagtgcctaagtctttagtttccaatttgcggatccactgccctctgcttgcgggctctgctctgatcacctttgatgaccccaaagtggctgagcaggtgctgcaacaaaaggagcacacgatcaacatggaggagtgccggctgcgggtgcaggtccagcccttggagctgcccatggtcaccaccatccaggtgatggtgtccagccagttgagtggccggagggtgttggtcactggatttcctgccagcctcaggctgagtgaggaggagctgctggacaagctagagatcttctttggcaagactaggaacggaggtggcgatgtggacgttcgggagctactgccagggagtgtcatgctggggtttgctagggatggagtggctcagcgtctgtgccaaatcggccagttcacagtgccactgggtgggcagcaagtccctctgagagtctctccgtatgtgaatggggagatccagaaggctgagatcaggtcgcagccagttccccgctcggtactggtgctcaacattcctgatatcttggatggcccggagctgcatgacgtcctggagatccacttccagaagcccacccgcgggggcggggaggtagaggccctgacagtcgtaccccaaggacagcagggcctagcagtcttcacctctgagtcaggctaggggcctccccttctcatcctccccacccccccgccaaggttctcacactggcctgggcttgggtgcccatataggaggtctgtatgttcaccaacagtgcggaggggtcacacattgcaaaacactgcccagaacagtaaaaagagcctgcatgccaaaaaaaaaaaaaaaaaaaaaaaaaaaaaaaaaaaaaaaa

SEQ ID NO: 315 - protein, 299 aa, Homo sapiens
VSPTGCRPPRPSGGAGQTALHALQEEQARLKMRLWDLQQLRKELGDSPKDKVPFSVPKIPLVFRGHTQQDPEVPKSLVSNLRIHCPLLAGSALITFDDPKVAEQVLQQKEHTINMEECRLRVQVQPLELPMVTTIQVMVSSQLSGRRVLVTGFPASLRLSEEELLDKLEIFFGKTRNGGGDVDVRELLPGSVMLGFARDGVAQRLCQIGQFTVPLGGQQVPLRVSPYVNGEIQKAEIRSQPVPRSVLVLNIPDILDGPELHDVLEIHFQKPTRGGGEVEALTVVPQGQQGLAVFTSESG

SEQ ID NO: 316 - DNA, 304 bp, Homo sapiens
  misc_feature (21)..(21): n is a, c, g, or t
  misc_feature (121)..(121): n is a, c, g, or t
  misc_feature (249)..(249): n is a, c, g, or t
  misc_feature (251)..(251): n is a, c, g, or t
  misc_feature (258)..(258): n is a, c, g, or t
  misc_feature (291)..(291): n is a, c, g, or t
tgccccatgctgactccttgnttctttccagccggagccgctgccttgccccccggagactgaagacatggcacccaagagggccaagagaaggacagtagagggcggaagctccagcttnttctccatgttcgaccagactcagatccaggagttcaaagaggccttcactgtgatcgaccagaaccgtgatggtattatagacaaggaggaccttcgggacaccttcgcagccatgggccgcctcantntgaagantgaggagttggatgccatgatgaaggaagccancggtcccatcaat

SEQ ID NO: 317 - DNA, 408 bp, Homo sapiens
  misc_feature (312)..(312): n is a, c, g, or t
tttaatgggagaatctgtaagttatgtctgaactttcaggttgtcttataattgtctttttccttatgtcagatgttctatgtcataagaataaaatggttcacaccaatacaagtacttagttgtggaaagggagagtagaagataaaaatggagattttcctgtgctacaggcttagtcaagcttatggtctatttaatggttatcaaaggcaattaaatagtgttgaatgttctgcttttacctacatttcatttttcatgtacttagttacaaattgaaccctcttctatttttttcctgctcctgtntctgtttcattttagttttccttttccctggattatcatttaggcatgtaagtgacacccagtaagcattggctttaaattctggctgggtggaca

SEQ ID NO: 318 - DNA, 615 bp, Homo sapiens
  misc_feature (97)..(97): n is a, c, g, or t
  misc_feature (377)..(377): n is a, c, g, or t
  misc_feature (434)..(434): n is a, c, g, or t
  misc_feature (519)..(519): n is a, c, g, or t
aaaatttgtcttcttgacagggcctgaaaacgaagggaggtgtcgtggagaaatggtgatttttctggttacatcacttgattcaagcactccctgnagctttcaaagccttttttatctgctcaaagttgacacccaactcagagtcagaactcaccagaagatgaggaacacccccgaaatcaatgtttcctttctccatgggatttttttcaatcttggtacagctgcatatctcccaaactcggatgctcttgtgaaatgacagccacatcagtgtggttactccccacaaataacactagggggaaatgaccttttttatttaaaaaaaaaaaaaaggctaatgctataaaatgatcatgtaaagaatgttnaataaaatttggcccatgttttaattgactctaggcacctctattgaaataagtctnaggcatagtttgtgaaacatgtttcaaaagtgtttgatgtataataaatgctagaaatttacagtacagaaatagtaaaaaaatnaaataaaaataaacctgtagattacagctctgttcctaagaacctcagcctttattgtgtcttagtaaagttgatctgctttatttttagtttatg

SEQ ID NO: 319 - DNA, 563 bp, Homo sapiens
tgagaagtctgcggctgagctgggagcaaatcccccaccccctacctgggggacaggcaagtgagacctggtgagggtggctcagcaggcagggaaggagaggtgtctgtgcgtcctgcacccacatctttctctgtcccctccttgccctgtctggaggctgctagactcctatcttctgaattctatagtgcctgggtctcagcgcagtgccgatggtggcccgtccttgtggttcctctctacctggggaaataaggtgcagcggccatggctacagcaagacccccctggatgtgggtgctctgtgctctgatcacagccttgcttctgggggtcacagagcatgttctcgccaacaatgatgtttcctgtgaccacccctctaacaccgtgccctctgggagcaaccaggacctgggagctggggccggggaagacgcccggtcggatgacagcagcagccgcatcatcaatggatccgactgcgatatgcacacccagccgtggcaggccgcgctgttgctaaggcccaaccagctctactgcggggcggtgttggt

SEQ ID NO: 320 - DNA, 454 bp, Homo sapiens
  misc_feature (343)..(343): n is a, c, g, or t
  misc_feature (391)..(391): n is a, c, g, or t
  misc_feature (424)..(424): n is a, c, g, or t
  misc_feature (433)..(433): n is a, c, g, or t
catttgtattcagcatgctaatgatgtaactcctctctttatcattaccacggtgatagttaagttcattcgttaactcattttagtgacatgtgaggccatttaaatatttttaagataatgtatattgattagaaagggttagaaggagacaaatttatggtagaaattagccttgccattgtctaagttaatttatgtgacctgattgaacagttttagttgtaactttagagtagcttctttgttagaggatctctttcctttctcttttggttttctcccaatatttttatctgtcttgggattatcttaaaaggtatttattaatgagtattttggnagaaaaatacctagaaaatgtctcctttaaatttatctagggtacttngtatcaccagagaccttcatcaaggtcctactngccacaccnggataaggccactacccccgg

SEQ ID NO: 321 - DNA, 249 bp, Homo sapiens
  misc_feature (3)..(3): n is a, c, g, or t
  misc_feature (16)..(16): n is a, c, g, or t
  misc_feature (19)..(19): n is a, c, g, or t
  misc_feature (28)..(28): n is a, c, g, or t
  misc_feature (156)..(156): n is a, c, g, or t
  misc_feature (189)..(189): n is a, c, g, or t
ttntcctccattctgnttnaatcctcgncactgttggcctactgaatccagaggcaggggagggacggtgcaggcgcagagtattgggttttggctggcctcgatttaaagagacagaagctgtcggggtcctggaagacggtccccaataccctncccccaagtccttgggaccacttgggtccccanagctggggagatggtttgtggcggctttgcctgctccaagaatgcgctttgcgctctcaa

SEQ ID NO: 322 - DNA, 162 bp, Homo sapiens
caatccctgagatggaggccatgtcccccacgacacagccaagccccatgccatatacccagaggccgctgggcaggcacatcccaggcaccggagcaggtagagactgaagccacaccaggtactgattccactgggccaacacccaggagctcagggggc

SEQ ID NO: 323 - DNA, 2250 bp, Homo sapiens
tgtggttgctcgtagtgagttgcgctcgctatgtctggacgtggcaagcagggaggcaaagcccgcgctaaggccaagactcgctcttctagggccggtctccagttccccgtgggccgagtgcaccgcctgctccgcaaaggcaactatgccgagcgggtcggggccggcgcgccggtgtatctggcagcggtgctggagtacctgaccgccgagatcctggaactggcgggcaacgcggcccgcgacaacaagaagacccgcatcatcccgcgtcatctccaactggccatccgcaacgacgaggagctcaacaagctgctgggcaaagtcaccatcgcacagggcggtgtcctgcccaacattcaggccgtgctactgcccaaaaagactgagagccaccacaaggcgaagggcaagtaactatctgtactagtttgtggcagctcaagtaaaatcgagtccaaaccaacggctcttttcagggccacccacgtcttctctaaaagaacttaacatttattccatgtgaaagaaagtgagacatggacaagactctagtcataaattacccatctttttgaaaacagtgtagcgaacaccgcagatttaaaagaaaaactagagggaaggtggtccagattttaccacgcttaaaagttaagatgtgaacaaatctcttaggccattacttaattttaaacttaatcagtgtgtgtccacagagcaccagtggcttcgtgagttcttgaagcactttggcccaaaagagttatcgcccgggctagaatttagcagacagctgttccacgcgggccagggcggcatgaagaagtcccgccgctactggcccggcacagtggccctgcgcgacgttcggcgctaccagaactccgagctgctgatcagcaagctgccgctcctgcgagagctcggcggtgacgccgctgcacgagagcgaggctgaagaactttgtgacacaatagtccacctccctgcaaggctctgtcagagactcacatctttcctgatggatagctgtgaagcattctcttacccaccctactgcatgttgcaaagtattcctttaaaatgaagtgagtaaaatactgggatgacgttatctggagccaagaagatggctcatttggaaaggcctaatatcccaagttgcttacctagaagaacttgacaggatagttaataataaaccttaaaacccatgaagaaatctgaggtaaagtgttagcacacagactgttaaaatgtctgcctcacagataggagggaaaatatatagaggattataatatggttcaacaaatgttgatgagtattagaaatgtacattagaaatattagaaatgtttatgactattagaaaagtacagggtattgggcgttcctgacacaaactgaggcctcctagcaagactggcagttttctgtaaaggagggttatttactacggtagtgcaaataacttttggtgttgtagctaaataaggaatactcatgccaagatcatcgaattgtgcctcctccctctgttcactgaactctgatgtaattttttttttttttttttgagacggagtctcgctctgtcgcccaggctggagtgcagtgggcgctatctcggctcactgcaagctccgcctcccgggttcacgccattctcctgcctcagcctcctgagtagctggggctacaggcgtctgccaccatgcccagctacttttttgtatttttagtagatacggggtttcaccgtgttagccaggatggtcttgatgtcctgacctcgtgatccaccggcctcggcctcccaaagtgctgggattaccggcgtaagccaccacgcccggcccactctgaagtaatcttaagaagacgttaactcatttttcttgtgtattgtagacacttttggctgtctggtaacatggaaaatctcagaatgatgttttaagtatataaaatgccaaacaaagttaaattacagttatcaaagtatttttaaaacttcatagtgataaatgagactatatagttatattgttaatatagttaacacattacatgatttggtgagcctaattgctgttactaattagaggagtaaaaatgtttcacgataactcagcaattgtaatgagaaatgaaacatctaatgtcttttgggttacaaagtaacaggtactgagatttgtggcctaaattcataataaagtgaaatgttcaagttc

SEQ ID NO: 324 - protein, 130 aa, Homo sapiens
MSGRGKQGGKARAKAKTRSSRAGLQFPVGRVHRLLRKGNYAERVGAGAPVYLAAVLEYLTAEILELAGNAARDNKKTRIIPRHLQLAIRNDEELNKLLGKVTIAQGGVLPNIQAVLLPKKTESHHKAKGK

SEQ ID NO: 325 - DNA, 721 bp, Homo sapiens
  misc_feature (628)..(628): n is a, c, g, or t
gcggaaatgagccgtggcttttggctggcggagccgctggcagggaccgggccccaccctgccccagtggctgccgactcacgcgggtgcagctctgttccgcggaggcacgccccctcccgtctctccgtctcgaccccctcgcggggcccaggtggggcccaagtcgccgccagcgtctgtgccgcgtcccttgctctgtgaaggacaggcctcgcgccaggaccccggtggacttctgaggtgccaggatggtgggagaactccgctacagggaattcagggtgcccctggggcccggcttacatgcctatcctgatgagctgatccgccagcgcgtgggccatgatgggcatcctgagtaccagatccgttggctcatcctgcggcgtggcgatgagggggacgggggctctggccaagtggactgcaaggctgagcacatcctgctgtggatgtccaaggatgagatctatgccaactgccacaagatgctgggcgaggatggccaggtcatcgggccctcccaggagtctgcaggggaggttggggccctggacaaatctgtgctggaggagatggaaaccgacgtgaagtccctcattcagagagcccttcgcagctggangagtgtgtgggcactatcccttctgcttctctacttcacacttgtccacgtgctcagcgcctatgccagcattgagcccctcactggagtatt

SEQ ID NO: 326 - DNA, 4654 bp, Homo sapiens
gaattcctgccactcttcctgcaacggcccaggagctcagagctccacatctgaccttctagtcatgaccaggaccagggcagcactcctcctgttcacagccttagcaacttctctaggtttcaacttggacacagaggagctgacagccttccgtgtggacagcgctgggtttggagacagcgtggtccagtatgccaactcctgggtggtggttggagccccccaaaagataacagctgccaaccaaacgggtggcctctaccagtgtggctacagcactggtgcctgtgagcccatcggcctgcaggtgcccccggaggccgtgaacatgtccctgggcctgtccctggcgtctaccaccagcccttcccagctgctggcctgcggccccaccgtgcaccacgagtgcgggaggaacatgtacctcaccggactctgcttcctcctgggccccacccagctcacccagaggctcccggtgtccaggcaggagtgcccaagacaggagcaggacattgtgttcctgatcgatggctcaggcagcatctcctcccgcaactttgccacgatgatgaacttcgtgagagctgtgataagccagttccagagacccagcacccagttttccctgatgcagttctccaacaaattccaaacacacttcactttcgaggaattcaggcgcacgtcaaaccccctcagcctgttggcttctgttcaccagctgcaagggtttacatacacggccaccgccatccaaaatgtcgtgcaccgattgttccatgcctcatatggggcccgtagggatgccaccaaaattctcattgtcatcactgatgggaagaaagaaggcgacagcctggattataaggatgtcatccccatggctgatgcagcaggcatcatccgctatgcaattggggttggattagcttttcaaaacagaaattcttggaaagaattaaatgacattgcatcgaagccctcccaggaacacatatttaaagtggaggactttgatgctctgaaagatattcaaaaccaactgaaggagaagatctttgccattgagggtacggagaccacaagcagtagctccttcgaattggagatggcacaggagggcttcagcgctgtgttcacacctgatggccccgttctgggggctgtggggagcttcacctggtctggaggtgccttcctgtaccccccaaatatgagccctaccttcatcaacatgtctcaggagaatgtggacatgagggactcttacctgggttactccaccgagctggccctctggaaaggggtgcagagcctggtcctgggggccccccgctaccagcacaccgggaaggctgtcatcttcacccaggtgtccaggcaatggaggatgaaggccgaagtcacggggactcagatcggctcctacttcggggcctccctctgctccgtggacgtagacaccgacggcagcaccgacctggtcctcatcggggccccccattactacgagcagacccgagggggccaggtgtctgtgtgtcccttgcccagggggtggagaaggtggtggtgtgatgctgttctctacggggagcagggccacccctggggtcgctttggggcggctctgacagtgctgggggatgtgaatggggacaagctgacagacgtggtcatcggggccccaggagaggaggagaaccggggtgctgtctacctgtttcacggagtcttgggacccagcatcagcccctcccacagccagcggatcgcgggctcccagctctcctccaggctgcagtattttgggcaggcactgagcgggggtcaagacctcacccaggatggactggtggacctggctgtgggggcccggggccaggtgctcctgctcaggaccagacctgtgctctgggtgggggtgagcatgcagttcatacctgccgagatccccaggtctgcgtttgagtgtcgggagcaggtggtctctgagcagaccctggtacagtccaacatctgcctttacattgacaaacgttctaagaacctgcttgggagccgtgacctccaaagctctgtgaccttggacctggccctcgaccctggccgcctgagtccccgtgccaccttccaggaaacaaagaaccggagtctgagccgagtccgagtcctcgggctgaaggcacactgtgaaaacttcaacctgctgctcccgagctgcgtggaggactctgtgacccccattaccttgcgtctgaacttcacgctggtgggcaagcccctccttgccttcagaaacctgcggcctatgctggccgcactggctcagagatacttcacggcctccctaccctttgagaagaactgtggagccgaccatatctgccaggacaatctcggcatctccttcagcttcccaggcttgaagtccctgctggtggggagtaacctggagctgaacgcagaagtgatggtgtggaatgacggggaagactcctacggaaccaccatcaccttctcccaccccgcaggactgtcctaccgctacgtggcagagggccagaaacaagggcagctgcgttccctgcacctgacatgtgacagcgccccagttgggagccagggcacctggagcaccagctgcagaatcaaccacctcatcttccgtggcggcgcccagatcaccttcttggctacctttgacgtctcccccaaggctgtcctgggagaccggctgcttctgacagccaatgtgagcagtgagaacaacactcccaggaccagcaagaccaccttccagctggagctcccggtgaagtatgctgtctacactgtggttagcagccacgaacaattcaccaaatacctcaacttctcagagtctgaggagaaggaaagccatgtggccatgcacagataccaggtcaataacctgggacagagggacctgcctgtcagcatcaacttctgggtgcctgtggagctgaaccaggaggctgtgtggatggatgtggaggtctcccacccccagaacccatcccttcggtgctcctcagagaaaatcgcacccccagcatctgacttcctggcgcacattcagaagaatcccgtgctggactgctccattgctggctgcctgcggttccgctgtgacgtcccctccttcagcgtccaggaggagctggatttcaccctgaagggcaacctcagctttggctgggtccgccagatattgcagaagaaggtgtcggtcgtgagtgtggctgaaattacgttcgacacatccgtgtactcccagcttccaggacaggaggcatttatgagagctcagacgacaacggtgctggagaagtacaaggtccacaaccccacccccctcatcgtaggcagctccattgggggtctgttgctgctggcactcatcacagcggtactgtacaaagttggcttcttcaagcgtcagtacaaggaaatgatggaggaggcaaatggacaaattgccccagaaaacgggacacagacccccagcccgcccagtgagaaatgatccctctttgccttggacttcttctcccgcgattttccccacttacttaccctcacctgtcaggctgacggggaggaaccactgcaccaccgagagaggctgggatgggcctgcttcctgtctttgggagaaaacgtcttgcttgggaaggggcctttgtcttgtcaaggttccaactggaaacccttaggacagggtccctgctgtgttccccaaaaggacttgacttgcaatttctacctagaaatacatggacaatacccccaggcctcagtctcccttctcccatgaggcacgaatgatctttctttcctttccttttttttttttttcttttctttttttttttttttgagacggagtctcgctctgtcacccaggctggagtgcaatggcgtgatctcggctcgctgcaacctccgcctcccgggttcaagtaattctgctgtctcagcctcctgcgtagctgggactacaggcacacgccacctcgcccggcccgatctttctaaaatacagttctgaatatgctgctcatccccacctgtcttcaacagctccccattaccctcaggacaatgtctgaactctccagcttcgcgtgagaagtccccttccatcccagagggtgggcttcagggcgcacagcatgagagcctctgtgcccccatcaccctcgtttccagtgaattagtgtcatgtcagcatcagctcagggcttcatcgtggggctctcagttccgattccccaggctgaattgggagtgagatgcctgcatgctgggttctgcacagctggcctcccgcggttgggtcaacattgctggcctggaagggaggagcgccctctagggagggacatggccccggtgcggctgcagctcaccagccccaggggcagaagagacccaaccacttcctattttttgaggctatgaatatagtacctgaaaaaatgccaagcactagattatttttttaaaaagcgtactttaaatgtttgtgttaatacacattaaaacatcgcacaaaaacgatgcatctaccgctccttgggaaataatctgaaaggtctaaaaataaaaaagccttctgtgg

SEQ ID NO: 327 - protein, 1163 aa, Homo sapiens
MTRTRAALLLFTALATSLGFNLDTEELTAFRVDSAGFGDSVVQYANSWVVVGAPQKITAANQTGGLYQCGYSTGACEPIGLQVPPEAVNMSLGLSLASTTSPSQLLACGPTVHHECGRNMYLTGLCFLLGPTQLTQRLPVSRQECPRQEQDIVFLIDGSGSISSRNFATMMNFVRAVISQFQRPSTQFSLMQFSNKFQTHFTFEEFRRTSNPLSLLASVHQLQGFTYTATAIQNVVHRLFHASYGARRDATKILIVITDGKKEGDSLDYKDVIPMADAAGIIRYAIGVGLAFQNRNSWKELNDIASKPSQEHIFKVEDFDALKDIQNQLKEKIFAIEGTETTSSSSFELEMAQEGFSAVFTPDGPVLGAVGSFTWSGGAFLYPPNMSPTFINMSQENVDMRDSYLGYSTELALWKGVQSLVLGAPRYQHTGKAVIFTQVSRQWRMKAEVTGTQIGSYFGASLCSVDVDTDGSTDLVLIGAPHYYEQTRGGQVSVCPLPRGWRRWWCDAVLYGEQGHPWGRFGAALTVLGDVNGDKLTDVVIGAPGEEENRGAVYLFHGVLGPSISPSHSQRIAGSQLSSRLQYFGQALSGGQDLTQDGLVDLAVGARGQVLLLRTRPVLWVGVSMQFIPAEIPRSAFECREQVVSEQTLVQSNICLYIDKRSKNLLGSRDLQSSVTLDLALDPGRLSPRATFQETKNRSLSRVRVLGLKAHCENFNLLLPSCVEDSVTPITLRLNFTLVGKPLLAFRNLRPMLAALAQRYFTASLPFEKNCGADHICQDNLGISFSFPGLKSLLVGSNLELNAEVMVWNDGEDSYGTTITFSHPAGLSYRYVAEGQKQGQLRSLHLTCDSAPVGSQGTWSTSCRINHLIFRGGAQITFLATFDVSPKAVLGDRLLLTANVSSENNTPRTSKTTFQLELPVKYAVYTVVSSHEQFTKYLNFSESEEKESHVAMHRYQVNNLGQRDLPVSINFWVPVELNQEAVWMDVEVSHPQNPSLRCSSEKIAPPASDFLAHIQKNPVLDCSIAGCLRFRCDVPSFSVQEELDFTLKGNLSFGWVRQILQKKVSVVSVAEITFDTSVYSQLPGQEAFMRAQTTTVLEKYKVHNPTPLIVGSSIGGLLLLALITAVLYKVGFFKRQYKEMMEEANGQIAPENGTQTPSPPSEK

SEQ ID NO: 328 - DNA, 3876 bp, Homo sapiens
gtgctggacttcatcaacgccggcggggcccgcgaaggctggctcctgggcccgcgcggggaaaagggcggcggggtggacgaggacgaggagatggatgaggtgagcctgctgtccgagctggtggaggcggcctccttcctgcaggtcacgtccctgctgcagctgctgctgtcccaggtgcggctcaataactgcctggagatgtaccgcctggcgcaggtgtacgggctgcccgacctgcaggaggcctgcctgcgcttcatggtcgtccacttccacgaggtgctgtgcaagccccagttccacctcctggggtctcctccccaagctccaggggatgtcagcctgaagcagaggctgagggaggcccggatgactgggactcctgtcctcgtggccctcggggacttcctggggggacccctggcccctcacccctaccagggggagcccccgtccatgctcaggtacgaggagatgactgagcgttggttcccgctggccaacaaccttcctcccgacctggtcaatgtcaggggctatgggtctgccatcctggacaactacctcttcatagtgggcgggtacaggatcactagccaggagatctccgctgcgcattcctacaaccccagcaccaacgagtggctccaggtggcctccatgaaccagaagaggtctaacttcaaacttgtggctgttaattcaaaactctatgccatcggagggcaggccgtttctaacgttgagtgttacaaccccgagcaggatgcgtggaattttgtggcgcccttacccaatcctctggctgagttctctgcctgtgagtgtaagggaaaaatttatgtcattggaggatacactaccagagaccggaacatgaacattttgcagtactgcccctcttccgacatgtggacgctctttgaaacatgtgacgtccacattcgcaagcagcagatggtgtctgtggaagagaccatctacatcgtgggggggtgtctccacgagctggggcccaaccgcaggagcagccagagcgaggacatgctcaccgtgcagtcctacaacaccgtcacccgccagtggctctacctcaaggagaacacgtccaaatcgggtcttaacttgacttgtgcgctccataacgacggcatctacatcatgagcagagacgtcaccctgtcgaccagcttggaacaccgagtgttcctcaagtacaacatcttttcagatagttgggaagcatttcggcgttttccagcttttggacataacttgctggtttcttctctttatctgcccaataaagcagaaacatgactgaattgaattggtagatgaaaaaaacctggttcaagttttttttaaaatgtggtgtcccattccaagggagaccaattcctaaagggtaaagaagggttaaagtaggtcacatatatacagtagcagctgtaaataagcttacttgaactaattacttgaaaactggtggaaaaaagagaccaactttgttattttttaaattattgatttttaaattatgggagcaaatccatctccaaacatgatactcttgggccaatgacggatcatcaaaatgtagattcattgtgtctgtgtggtaaagggccaaagtcaataattgggacaaatggtaaagatgattttaaaatctgttgtatttaggtcccttgacatatcattagcaccttaagtgagaggttttctttttcttatcagtgtccttgacaagcattcatattaacatattcattctctcttctccatcacccatacccacacatacatctagtatgtttagggttctgtgttcagatattttgtttgcacactactttttaggaaacttataatgatggagccctacagtgaatccttaccagtgttcagtcctccccaaaacttgcataaaaatattcttagctatttttccagccttttttgcagttacaaatgctggataaatagactgataaaacctcttattttatttatgtggcaggttgcatatttatgtggacacataggttgcactgctaggcattctgtattgttttaaagaggatatattatttagaaaaatggacatatgaatattattaaaaattgagtcttaaatttaaatgggaagggaagaaaacaccaaataagaaaaaaatttgcctttaagagttacttttgttgaatgtatttgacttagttcttattttaaggctaaaaaaactttgtcatatttaagtcggcagctttctaatttaatcttagctttgtaattcatgttttgcttttgtggactaaggtaaggacagcatttaaatatttgtgctggagtgaggggaagaagctgttacagaagtggaatggtttctggtggtatttctgaagttaggtaaagtgctttacttgccttggttgttaattgaaatagaattcagctcaagcagttgttttcagtgagtgagttaacaataaaagcttctgccaatcatagatcaacattcctcaaaaatacatacactcatacttatggaaattttattttgattgaaaacactctgaaattatctgatattttgtaatggcatcagttaaactgtgagctggattccatctttctgcagtaacagcgggcagaaccatttcagttagcatgtgcctcactttaagaaagtcctgtaggggaaaaaaaaaactgtcagagcgaattcatgcattcaacaaacacttatgagtgcctggagtatgccatccactgtgcagatgtaggacaggggctaatcacttagagttcttcagtttattagaggagtgactacaggttttctttacaaccatggcctctagtatacttaaaataagcgtccagttataaaaagcctatttgcacaactttttgggaatacttctattaactaaaatgaggtaagccattattttggacatagaaacagatctttgtatcttgtcaccaaataatcttacctctagtctacttacaactttgtaagggtttctaagctatgcccatttattcccaaatattaagcccttaaaaaaataaaacctctgaaccaaaatcttcccaggaatagtacttaatagattttaatgttaatttatattcattgtagaattgaatttccagtgacctgtaatttcattacatatattttaaaatctatttattttagatggtgttaacttttcgttgctgaagagcttaactttttaaaggctttgtcctatacatttagaagatgagtcagttgaattagtactggacaaacagttggagattagtttgcaaataagcatatcatatcaaatacaatattccagccaaccagttaattctcttcctggttacattcattgggtctatttgcctaatgttgacaattagattcttggaccaagtgagggtgtactctgatccacaaagctcttttataaaccaggtttgaggttgtgtgtgtgtgtgtgtgtgggtgtgtgtgtgtgtgtgtgtgtgtgtatgtttgcatattatagctctctttaagacagacatctaaaaagattttggttattctgggctgccagcagtacgtgggaaaggtggaatgtgcaataggaacagatctgtgcattttgtgacatcgtccttcctgctgtgcacatcagctgtgatgacattttgagggtagttttaatttagctcggttctcttgttggtgccagtattacattgaagactacctatgatagaggcaatgttgctttgaaaatctcccttcaggcggaggttgcagtgagccgagattgtgccattgcactccagcctgggcgacagtgcaagactctgtcttc

SEQ ID NO: 329 - protein, 441 aa, Homo sapiens
VLDFINAGGAREGWLLGPRGEKGGGVDEDEEMDEVSLLSELVEAASFLQVTSLLQLLLSQVRLNNCLEMYRLAQVYGLPDLQEACLRFMVVHFHEVLCKPQFHLLGSPPQAPGDVSLKQRLREARMTGTPVLVALGDFLGGPLAPHPYQGEPPSMLRYEEMTERWFPLANNLPPDLVNVRGYGSAILDNYLFIVGGYRITSQEISAAHSYNPSTNEWLQVASMNQKRSNFKLVAVNSKLYAIGGQAVSNVECYNPEQDAWNFVAPLPNPLAEFSACECKGKIYVIGGYTTRDRNMNILQYCPSSDMWTLFETCDVHIRKQQMVSVEETIYIVGGCLHELGPNRRSSQSEDMLTVQSYNTVTRQWLYLKENTSKSGLNLTCALHNDGIYIMSRDVTLSTSLEHRVFLKYNIFSDSWEAFRRFPAFGHNLLVSSLYLPNKAET

SEQ ID NO: 330 - DNA, 6110 bp, Homo sapiens
ctatgatgtggtgcttgatgctatagacacaatgcagcgagtcgcctggcatatcaatgacatgaagcggaaacacgagcacgcggtccggttacaggagatacagagtttgctcactaactggaaggggccagacctgaccagctacggggaactggtgcttgagggaaccttccgcatccagcgagccaagaatgagcggacgctcttcctcttcgacaagctgctgctcatcacgaagaagagagatgacacgtttacatacaaagctcacatcctgtgtggcaacctcatgcttgtggaggtgattccaaaagagccgctcagcttcagcgtcttccactacaagaatcccaagctgcagcacacagtccaggccaaatcccagcaagacaaacgcctctgggttctgcacctaaagagactgattctggagaaccatgcagccaagattccagctaaggccaagcaagcaatccttgaaatggatgccattcatcatccaggcttctgttacagtcctgagggagggacgaaagcactgttcggctctaaagaaggttctgctccatatcggctgagaagaaaatctgaaccttcctcacggtcacataaagttttgaagaccagtgaaacagcacaagacatccaaaaggtttctagagaggaaggatctccccagctgtcttcagcaaggccgtctcctgcccagagaaatagtcagcctagcagttctaccatgatcagcgtgcttcgagcgggtggagctctcagaaacatctggaccgatcaccagatcaggcaagccttgtttcccagccgacggtccccgcaggagaatgaggatgatgaagatgattatcagatgttcgtgccgtcattttcctcctcagatctgaactctaccagactatgtgaagatagcacttctagtcgcccttgcagctggcatatgggacagatggagtccacagagacctccagctctggtcacaggattgtcaggcgggccagcagtgctggggagagcaacacatgccctcctgaaataggaactagtgacagaactagggaactgcagaacagccccaaaacagaagggcaggaggagatgactccctttgggtcatccatagagttgactattgatgacatagaccatgtctatgataacatcagttatgaggacttaaaactaatggttgctaagcgggaagaagctgaatccactccctctaaatcagccagggactccgttcgccccaagagcaccccagagttagccttcacaaagaggcaagctggccacagtaagggctctctttacgcacaaacagatggcaccctctcaggtggagaggcatccagccaaagcacgcatgaactccaagcggttgaggagaacatctatgacaccatagggctcccagatcctccgtcgctgggttttaagtgcagcagcctaaagcgtgcaaagcggagcacctttttgggtctggaggccgacttcgtgtgctgtgacagcctgaggccatttgtttcccaagacagcctccagctcagtgaggacgaagccccttaccatcaggccactcccgatcatggttatctgagtttgctgtatgactctcccagtggtaacttgtctatgcctcataagcctgtatctgataaactgtccgaagaagtagatgaaatctggaatgacctggaaaattacatcaagaaaaatgaagacaaggccagagaccgtctcctggcagcgtttcctgtgagcaaggatgatgtgccagacaggctgcacgcagagagcacccctgagctgagccgggacgtggggcgctctgtgtccacgctgtccctgcctgagagccaggctctcctcacgcccgtgaagagcagggctggcagagccagccgcgccaactgcccctttgaggaagacctgatttctaaagaaggctcctttatgagccttaaccggctttctctggctagtgaaatgcccctcatggacaatccctacgacctggccaacagtggcctgtctcaaacagacccagaaaaccctgacctggggatggaggccacagataagacaaaaagcagggtgtttatgatggctcggcagtacagtcagaagattaagaaggcgaatcaacttttaaaagtgaaaagtctggagctggagcagccgccggccagtcagcatcagaaatccatgcacaaagacctggctgccatcttggaagagaagaagcaaggagggcccgccattggtgccaggattgctgagtattcccagttgtatgaccagattgtattcagagagtctcccttgaaaattcagaaggatggctgggccagccctcaagaatcctccctcctgaggtctgtgtcaccttcccaggtccaccatggtagtggagactggcttctgcattcaacctatagtaatggagagttagcagatttctgtctcccaccagagcaagacttgaggtcaagatatcccacgtttgagatcaatacaaaaagtactcccaggcaattgtccgcagcttgctctgtgccttctcttcaaacctctgaccctctgccaggctctgtgcagagatgcagcgtggtagtaagtcagcccaacaaagagaactggtgtcaggaccatctttacaactccttgggtcggaaagggatcagcgctaaatctcagccttatcacaggtcccagtcatcttcctccgtcttgatcaacaaatcaatggattccatcaactaccctagtgatgtgggaaagcagcagctgctgtctttacacagaagttcaaggtgtgagagtcaccaggacttgctgccagatattgctgactcgcatcaacagggcactgaaaaactctcagatctcacactccaagactcacagaaagttgtggtggtcaatagaaatttacccttaaatgcccaaattgcaacacagaattatttttccaatttcaaagagactgatggagatgaagatgactatgtggaaatcaagtcagaagaagatgagtcggagttggagctatctcacaatcgtagaaggaaatctgactcaaagtttgtggatgctgacttttctgataatgtctgcagcggcaacacattgcattctttgaatagtccgcgcactccaaaaaagccggttaacagcaaacttggcctttcaccatatctgacaccatataatgattctgacaaactgaatgactatctttggagggggccatctcccaatcaacaaaatattgtccagtctctaagggaaaaatttcagtgtctcagttcaagcagctttgcttaaggttcttcataataactgcttgaatcaacttcttattttgctcataaaacgttacagatactgatgaggtgttttatgtataccagattaaaacaattttgtaagaaccagaggtgtaaaatatactttcttttacagcacaacttttggaaatggctgacgatgcagcccggattgtactgtagcacatgttggcatcaacagtatattttctcatgctgagtgtcttcatgtttcatgtaagtcaatcttacttgaaagtttttagacttttaacacgatggccataacctgacaatagtgcccacaccttaagaaatgcaataatcctttcctgttatccagaaggcccaggtagttttatcctgtgactcaaaggcagcaaggagactttttcacattttaaaaggcaacgaaagctgttgaaagaattatgcttatatctcacattttggttatatttgtggtaacaccttaggataacgtaagccagagatctgtaaattggactgcagtctgaggtgcccattttagggtttttgtgctagtattcttttatgtcattttgatgcagaaattgtgtgactgttgaaaattaaaatgtagcgggacccattttctgtacgcagaaccctttacctgtattcctggacaaggcctagagaacgagctgctcatcatgtttctaatataatttctggggtgaaatgaatgatttccttactggcttagagaaaaccaaggtcaataaaatgcagattgacttaactattagaaaagatgggatgacttctgggaaccacttaactcttcaaatgactgttgaaagagaaaaagcaaaactgaaatcccaccagaccattttgtgtgcctgtttctaatcgatacaaagttaagcatgagctaaaatcagacaaagcactttaaatttatcctttccagagcgctttgcacatgcaccctcctgagtttgggattctgccaaatgaccaacttgatcctggccctgaggagtcattggctgcaggaatagggcaagaatctatttcctaaactacacataacatgggagcctttttttcgttgttttcaggtatattaaagaatgaaatctttggttactaggtgctgactaataaataacaccttttatattctgaccatttgtcacatttcattgtgatactgtatactgatctaactccttatgaaaggcaacaaacaaaaataagacattgaataaaaagcaaaatcaaagaagctaaagagaaaaatgaaggcagatatattgcaactttataacatattctattttattgaagactgcaattaatgcagcaagaatgctttctcaagcggtggcctttgtattctcattttaatcaggtgtacattctatggcctctcccccatgctgttagtttctattttaaaagatacaataatatatgtagggaaaggggcctgggctcttcatttaaaggtaagcagtaatattgagtaagtgacataattctttttctctttgttaagtcctatgcctctttttcttaactgtaaaacatagaatatgagcgtttttatcttacaaataggtacctaaggcatgtgattttatttttaaataacaaaaaataacccaagtttcttgcttctccaaagtattcttctcatagcttataaaagaaagtccacattgaatagcatggtctgggaacattccttctttattgtgtttatttgaacatgatatgagtttccaagatgaaatgatcaaaaaagataagtaccacaagaaagtttttttgtttggttggtttttttgtttgtttgtttttttcttgagactgagtctctccctgttgcccaagttggagtgcaatcttggctcactgcagcctccacctccccggttccagcgattctcctgcctcagcctcttgaatagctgggattacaggcgcccgccaccacacctggctaatttttgtgttgttagtagaggcggggtttcatcatgttggccaggctggtctcgaactcctgatctcatgatccgtctgcctcggcctcccagagtgctgggattacaggcatgagccactgcgcccggccaagaaagtatgtttttagaggtgtgtgtaagtgcatttgtattacctatgaacaaaattacctgactcttgtcccaggaaagctgtttcgcattttcgctttttgattggtattatccagttctatgtagttcatattattgttctgtctgactctcagaaattacttcttcacgccagtgtcttgttgcatgactttgatgtcacctataggaatacacctcactgcacgtaagtgggtatcttactgtataaaaggtctacatggctttaggttttaggacaaatgtgtagatttatagaccatttctgttggccaggacacagattttgagagctgtgtgtatatatatataatcatgtttgtatttttttcctgaaagttatcaattgcttttgtttaaaacagtttgttttagaggtggggtggggatgtatataacgaggaaaagttatatgtactttaaagtatgtcaagttcttactagtttcctgtactgaaggttcaattttttttatataagtttacttttcacctgctctattctttgtggggaaaaaatgcatctagaaaaacatagtttaaatactgtatataagataatgaaagttagtaacgtccattatttaataaagtttgtaaagtacaaggt

SEQ ID NO: 331 - protein, 1113 aa, Homo sapiens
YDVVLDAIDTMQRVAWHINDMKRKHEHAVRLQEIQSLLTNWKGPDLTSYGELVLEGTFRIQRAKNERTLFLFDKLLLITKKRDDTFTYKAHILCGNLMLVEVIPKEPLSFSVFHYKNPKLQHTVQAKSQQDKRLWVLHLKRLILENHAAKIPAKAKQAILEMDAIHHPGFCYSPEGGTKALFGSKEGSAPYRLRRKSEPSSRSHKVLKTSETAQDIQKVSREEGSPQLSSARPSPAQRNSQPSSSTMISVLRAGGALRNIWTDHQIRQALFPSRRSPQENEDDEDDYQMFVPSFSSSDLNSTRLCEDSTSSRPCSWHMGQMESTETSSSGHRIVRRASSAGESNTCPPEIGTSDRTRELQNSPKTEGQEEMTPFGSSIELTIDDIDHVYDNISYEDLKLMVAKREEAESTPSKSARDSVRPKSTPELAFTKRQAGHSKGSLYAQTDGTLSGGEASSQSTHELQAVEENIYDTIGLPDPPSLGFKCSSLKRAKRSTFLGLEADFVCCDSLRPFVSQDSLQLSEDEAPYHQATPDHGYLSLLYDSPSGNLSMPHKPVSDKLSEEVDEIWNDLENYIKKNEDKARDRLLAAFPVSKDDVPDRLHAESTPELSRDVGRSVSTLSLPESQALLTPVKSRAGRASRANCPFEEDLISKEGSFMSLNRLSLASEMPLMDNPYDLANSGLSQTDPENPDLGMEATDKTKSRVFMMARQYSQKIKKANQLLKVKSLELEQPPASQHQKSMHKDLAAILEEKKQGGPAIGARIAEYSQLYDQIVFRESPLKIQKDGWASPQESSLLRSVSPSQVHHGSGDWLLHSTYSNGELADFCLPPEQDLRSRYPTFEINTKSTPRQLSAACSVPSLQTSDPLPGSVQRCSVVVSQPNKENWCQDHLYNSLGRKGISAKSQPYHRSQSSSSVLINKSMDSINYPSDVGKQQLLSLHRSSRCESHQDLLPDIADSHQQGTEKLSDLTLQDSQKVVVVNRNLPLNAQIATQNYFSNFKETDGDEDDYVEIKSEEDESELELSHNRRRKSDSKFVDADFSDNVCSGNTLHSLNSPRTPKKPVNSKLGLSPYLTPYNDSDKLNDYLWRGPSPNQQNIVQSLREKFQCLSSSSFA

SEQ ID NO: 332 - DNA, 343 bp, Homo sapiens
  misc_feature (9)..(9): n is a, c, g, or t
  misc_feature (88)..(88): n is a, c, g, or t
  misc_feature (299)..(299): n is a, c, g, or t
  misc_feature (331)..(331): n is a, c, g, or t
aaactaaanatagctgcttggggacctccttctagccttaaatttcagctcatcaccttcacctgccttggtcatggctctgctattntccttgatccttgccatttgcaccagacctggattcctagcgtctccatctggagtgcggctggtggggggcctccaccgctgtgaagggcgggtggatgtggaacagaaaggccagtggggcaccgtgtgtgatgacggctgggacattaaggacgtggctgtgttgtgccgggagctgggctgtggagctgccagcggaacccctagtngtattttgtatgagccaccagcagtaaaaagngcaaaaggttcc

SEQ ID NO: 333 - DNA, 1554 bp, Homo sapiens
aattatatatttttactctatgtttctctacatgtttttttctttccgttgctggcggaagaggcacgtgcgctgctgaatggagctggtcgctggttgctacgagcaggtcctctttgggttcgctgtacacccggagcccaaggcttgcggcgaccacgagcaatggactcttgtggctgacttcactcaccatgctcacactgcctccttgtcagcagtagctgtaaatagtcgttttgtggtcactgggagcaaagatgaaacaattcacatttatgacatgaaaaagaagattgagcatggggctctagtgcatcacagtggtacaataacttgcctgaaattctatggcaacaggcatttaatcagtggagcggaagatggactcatctgtatctgggatgcaaagaaatgggaatgcctgaagtcaattaaagctcacaaaggacaggtgaccttcctttctattcacccatctggcaagttggccctgtcggttggtacagataaaactttaagaacgtggaatcttgtagaaggaagatcagcattcataaaaaatataaaacaaaatgctcacatagtagaatggtccccaagaggagagcagtatgtagttatcatacagaataaaatagacatctatcagcttgacactgcatccattagtggcaccatcacaaatgaaaagagaatttcctctgttaaatttctttcagagtctgtccttgcagtggctggagatgaagaagttataaggttttttgactgtgattcactagtgtgcctctgcgaatttaaagctcatgaaaacagggtaaaggacatgttcagttttgaaattccagagcatcatgttattgtttcagcatcgagtgatggtttcatcaaaatgtggaagcttaagcaggataagaaagttcccccatctttactctgtgaaataaacactaatgccaggctgacgtgtcttggagtgtggctagacaaagtggcagacatgaaaagccttcctccagctgcagagccttctcctgtaagtaaagaacagtccaaaattggcaaaaaggagcctggtgacacagtgcacaaagaagaaaagcggtcaaaacctaacacaaagaaacgcggtttaacaggtgacagtaagaaagcaacaaaagaaagtggcctgatatcaaccaagaagaggaaaatggtagaaatgttggaaaagaagaggaaaaagaagaaaataaaaacaatgcagtgaatcacagatgtctcctgaaagaactcttttagatgaaatcattctactcaaatgtaccttaatttttttttttccctgagtaaaagcaagaaatttcttcctttggaaaaaatatatatattaaaaaaccacttttagatggttttttttaaaaaaaaaaaaaaaactggtaaaattacttttggcagacagtgttttatgaattatgtatcatgttgatatataatatgttaatgtgtcatgtaatttttactttgtacaaagcaaataaagatctttctcaaaaaaaaaaaaaaaaa

SEQ ID NO: 334 - protein, 391 aa, Homo sapiens
MELVAGCYEQVLFGFAVHPEPKACGDHEQWTLVADFTHHAHTASLSAVAVNSRFVVTGSKDETIHIYDMKKKIEHGALVHHSGTITCLKFYGNRHLISGAEDGLICIWDAKKWECLKSIKAHKGQVTFLSIHPSGKLALSVGTDKTLRTWNLVEGRSAFIKNIKQNAHIVEWSPRGEQYVVIIQNKIDIYQLDTASISGTITNEKRISSVKFLSESVLAVAGDEEVIRFFDCDSLVCLCEFKAHENRVKDMFSFEIPEHHVIVSASSDGFIKMWKLKQDKKVPPSLLCEINTNARLTCLGVWLDKVADMKSLPPAAEPSPVSKEQSKIGKKEPGDTVHKEEKRSKPNTKKRGLTGDSKKATKESGLISTKKRKMVEMLEKKRKKKKIKTMQ

SEQ ID NO: 335 - DNA, 4924 bp, Homo sapiens
tctcctcctaccggtcgggtgccccggggcgttccctctgccgctgcttctcggcgcggttcctacccggccgctccccgaggcgcgggctctggcggcctcgaccgactaggacgccccgtgcgccgcccgcgggccgccgcctccctgggcgcgcggggccagcatggagctcttccaagccaaggaccactacatcctgcagcagggcgagcgcgcgctgtggtgcagccgccgcgacggcggcctccagctccgacccgctactgatctacttcttgcctggaatcccatttgtttggggttggtagaaggtgttattgggaaaattcaacttcattcagatcttccatggtggcttattctaattcggcagaaagcattggtgggcaaactcccaggagaccatgaggtctgtaaagttaccaaaattgctgtgctctcactttctgaaatggaacctcaggatcttgagctagagctctgtaagaagcatcattttggtattaacaaaccagagaagatcataccatctcctgatgactcaaagtttctactgaagacctttacgcatattaaatccaatgtgtctgctcctaataaaaagaaagttaaggaaagtaaagagaaggagaagttggagaggagattacttgaagagttgctgaagatgttcatggactcagaatccttttattatagcttgacctatgacctgaccaattccgtgcagaggcagagcactggggagagggacggtcggcccctctggcagaaggttgatgaccgatttttttggaataaatacatgatacaagatcttactgagattggtactccagatgtggacttttggattatccccatgatccaaggttttgtgcagattgaagaacttgtggttaattataccgaatcatctgatgatgagaaaagcagcccagagaccccccctcaggagtccacctgtgtagatgatattcacccacgatttctagtggctctcatttcacgccgaagtaggcacagagcaggaatgcgctataaacgaagaggagtggataaaaatggaaatgttgccaattatgtggagactgagcagttgattcatgttcataatcataccctgtcatttgttcaaacacgaggctctgtgcctgtcttttggagccaggttgggtatcgatataacccaagaccgcggctggacagaagtgaaaaggaaactgttgcctatttctgtgcccatttcgaagaacaactgaacatttacaaaaaacaggttattattaacttggtagaccaggcaggaagagagaagattattggcgatgcttacctgaagcaagtgttgcttttcaacaactcacacctcacttacgtttcgtttgacttccatgagcactgccgaggaatgaagtttgagaatgttcagacactaacagatgccatttatgacattattcttgatatgaagtggtgttgggttgatgaagctggggtaatatgtaagcaggaagggatttttcgtgttaattgtatggactgcctggatcgcaccaacgtggtccaagctgccatcgcgagagtggtcatggaacagcagctgaaaaaattaggtgtgatgcccccggaacagccattacctgtgaaatgtaatcgcatctaccagataatgtgggccaataatggtgactccattagcagacagtatgctgggacagctgctctgaagggtgactttacaaggacaggagaaaggaagttagcaggagttatgaaagatggagtgaactcagcaaacagatattacctcaaccgatttaaggatgcttataggcaagctgttatagatttgatgcaaggcattccagtgacagaagatctttattccatatttaccaaggagaaagaacatgaagctttgcataaggaaaatcagagaagccaccaggaactaattagccagctcttacaaagttacatgaagttactactgcctgatgatgagaagttccatgggggctgggccctcattgactgtgaccctagcctcattgatgctactcacagagacgtggatgtgctgttactgctttctaactctgcctactacgtggcctattatgatgatgaagttgataaagtaaaccagtatcaacgactaagtctagaaaacctggaaaaaattgaaataggccctgaacccactctttttggtaagccaaagttctcctgcatgcgactgcactacagatacaaagaagcgagtggctatttccacacattgcgagctgtaatgcgtaatcctgaagaggatggaaaagatacccttcagtgcattgcagagatgctgcagatcaccaagcaagccatgggatcggatttacccataattgagaagaaacttgagaggaagagcagtaaacctcacgaagacatcattggtatcaggtctcaaaaccaaggttctttggcccagggaaagaattttttaatgagcaaattttcatctctaaatcaaaaagtgaagcagaccaaatccaatgtaaatattggcaacctccgaaagctaggaaactttaccaaacctgaaatgaaagttaactttctaaaaccaaacttaaaagtaaatctttggaaatcagatagtagtcttgaaactatggaaaacacaggagtgatggataaggttcaggcagagtctgatggggacatgtcttcagataatgactcataccactctgatgaattccttacaaattctaagtctgatgaagacaggcagctagctaactcattagagagtgtagggccaatagattacgttcttcctagttgtggtattattgcctcagcgcctcgattgggcagtcggtcccagtctcttagcagcacagatagtagcgttcatgctccttcagagattactgttgctcatgggagtgggcttggaaaaggccaggagtctcctttgaagaaaagtccttctgctggcgacgtacacatattgactggctttgccaagcctatggatatttactgccacagatttgtgcaagatgcacagaacaaagtgacccacctatcagagaccagatctgtgtctcagcaggctagtcaggaaagaaatcaaatgaccaatcaagtttcaaatgaaacccaatcagaatcaacagaacagacaccttctcggccatcgcaattagatgtctctctttctgcaacaggcccacagtttttgtcagttgagccagcgcattcagttgcatctcaaaaaacccccacctccgcttccagcatgcttgaacttgagacagggcttcatgtaactccttctccttcagagagcagtagcagcagagcagtctctccctttgccaagattcgaagttccatggtccaggttgctagtattacccaagctggattaacccatgggataaactttgcagtgtcaaaagttcagaagagtcctccagaacctgaaatcattaatcaagtccagcaaaatgaacttaaaaagatgtttatacaatgccagacacggataattcagatttagcttttagccataagaatccttccatggcttttatttaaaaatatgaaattttcacctcttggggtattttaattgtactgtctgaacccagggatcacaaattctgttcattggaaagggttttaaacggagtcggaacctgagtagatttccaaattttacagccaggactacagaagtgcatcattctagaatgtgtagacctgagtagcttatacactacagagcactttgcttatttgaaagtaattcagcaacaggtcactttgggatataacctgaacctttttttggagtggggtgggtagactacagtagacacaagggctggacatgcagatgcttaggggattagcgtttttcataatttgttctgtttgtcagttcattcctgtgtgttcttacctctacaaagtaaattacacatttagtttttagtgactttaacatgttactgaagcatttgaatataaagctattttagttttgatggcttaactgttccctgaggagttgagggttattgacactagagaaatgaattctcatttgatcctaattttccccgtattctacttgaacacattaaaaatactctgctgcctatacaatgtaaacctaggagcattaagacttgtcacacagtaaacctgatacatcagaggtgaataccagcacctattaggtttcattttgctgttttcaggaatgtaagaacacccatattggctactggaaattctagcagtcagtcaggttttaatttattccaggaggggcatcctcgacatcttatgtagatgatccacaacttcaaaatttagtctgggcctagtgcagtggctcacacctataatcccaacactttgggaggccaggagttttgagaccagcctgggaaacatctgcctctacaaaaaaatacaaaaattagctgggcatagtggtgcatgcctgtgtttctagctacgcaggaggattgcttgagcccatgagattgaggctgcagtgagctgtgatcgtgccactgacctccagcctgggggacagagcaagaccgtgtctcaaaaacaatttagtctgaaacacaattgtgctgaatctgtctgactataactctgaccacacagaaccagggctgcccctgtaatccccacagtaagaaagttgtatggcatattccaacaagtattggttcgtctggtgtctttagagctttactctgttgaagtgactgattctcaactgaacattatgtcgttactttgataagcattccacttttgttatttattagtgctatctttttttttacgtgttaaatcttgtgattattaaaataaagtaccattgtaattt

SEQ ID NO: 336 - protein, 1132 aa, Homo sapiens
MELFQAKDHYILQQGERALWCSRRDGGLQLRPATDLLLAWNPICLGLVEGVIGKIQLHSDLPWWLILIRQKALVGKLPGDHEVCKVTKIAVLSLSEMEPQDLELELCKKHHFGINKPEKIIPSPDDSKFLLKTFTHIKSNVSAPNKKKVKESKEKEKLERRLLEELLKMFMDSESFYYSLTYDLTNSVQRQSTGERDGRPLWQKVDDRFFWNKYMIQDLTEIGTPDVDFWIIPMIQGFVQIEELVVNYTESSDDEKSSPETPPQESTCVDDIHPRFLVALISRRSRHRAGMRYKRRGVDKNGNVANYVETEQLIHVHNHTLSFVQTRGSVPVFWSQVGYRYNPRPRLDRSEKETVAYFCAHFEEQLNIYKKQVIINLVDQAGREKIIGDAYLKQVLLFNNSHLTYVSFDFHEHCRGMKFENVQTLTDAIYDIILDMKWCWVDEAGVICKQEGIFRVNCMDCLDRTNVVQAAIARVVMEQQLKKLGVMPPEQPLPVKCNRIYQIMWANNGDSISRQYAGTAALKGDFTRTGERKLAGVMKDGVNSANRYYLNRFKDAYRQAVIDLMQGIPVTEDLYSIFTKEKEHEALHKENQRSHQELISQLLQSYMKLLLPDDEKFHGGWALIDCDPSLIDATHRDVDVLLLLSNSAYYVAYYDDEVDKVNQYQRLSLENLEKIEIGPEPTLFGKPKFSCMRLHYRYKEASGYFHTLRAVMRNPEEDGKDTLQCIAEMLQITKQAMGSDLPIIEKKLERKSSKPHEDIIGIRSQNQGSLAQGKNFLMSKFSSLNQKVKQTKSNVNIGNLRKLGNFTKPEMKVNFLKPNLKVNLWKSDSSLETMENTGVMDKVQAESDGDMSSDNDSYHSDEFLTNSKSDEDRQLANSLESVGPIDYVLPSCGIIASAPRLGSRSQSLSSTDSSVHAPSEITVAHGSGLGKGQESPLKKSPSAGDVHILTGFAKPMDIYCHRFVQDAQNKVTHLSETRSVSQQASQERNQMTNQVSNETQSESTEQTPSRPSQLDVSLSATGPQFLSVEPAHSVASQKTPTSASSMLELETGLHVTPSPSESSSSRAVSPFAKIRSSMVQVASITQAGLTHGINFAVSKVQKSPPEPEIINQVQQNELKKMFIQCQTRIIQI

SEQ ID NO: 337 - DNA, 2333 bp, Homo sapiens
gggccaggccgcgcccccgcgtgcgtgcgcggcccggcagagccgtgcgggcgcccgcgtactcactagctgaggtggcagtggttccaccaacatggagctctcgcagatgtcggagctcatggggctgtcggtgttgcttgggctgctggccctgatggcgacggcggcggtagcgcgggggtggctgcgcgcgggggaggagaggagcggccggcccgcctgccaaaaagcaaatggatttccacctgacaaatcttcgggatccaagaagcagaaacaatatcagcggattcggaaggagaagcctcaacaacacaacttcacccaccgcctcctggctgcagctctgaagagccacagcgggaacatatcttgcatggactttagcagcaatggcaaatacctggctacctgtgcagatgatcgcaccatccgcatctggagcaccaaggacttcctgcagcgagagcaccgcagcatgagagccaacgtggagctggaccacgccaccctggtgcgcttcagccctgactgcagagccttcatcgtctggctggccaacggggacaccctccgtgtcttcaagatgaccaagcgggaggatgggggctacaccttcacagccaccccagaggacttccctaaaaagcacaaggcgcctgtcatcgacattggcattgctaacacagggaagtttatcatgactgcctccagtgacaccactgtcctcatctggagcctgaagggtcaagtgctgtctaccatcaacaccaaccagatgaacaacacacacgctgctgtatctccctgtggcagatttgtagcctcgtgtggcttcaccccagatgtgaaggtttgggaagtctgctttggaaagaagggggagttccaggaggtggtgcgagccttcgaactaaagggccactccgcggctgtgcactcgtttgctttctccaacgactcacggaggatggcttctgtctccaaggatggtacatggaaactgtgggacacagatgtggaatacaagaagaagcaggacccctacttgctgaagacaggccgctttgaagaggcggcgggtgccgcgccgtgccgcctggccctctcccccaacgcccaggtcttggccttggccagtggcagtagtattcatctctacaatacccggcggggcgagaaggaggagtgctttgagcgggtccatggcgagtgtatcgccaacttgtcctttgacatcactggccgctttctggcctcctgtggggaccgggcggtgcggctgtttcacaacactcctggccaccgagccatggtggaggagatgcagggccacctgaagcgggcctccaacgagagcacccgccagaggctgcagcagcagctgacccaggcccaagagaccctgaagagcctgggtgccctgaagaagtgactctgggagggcccggcgcagaggattgaggaggagggatctggcctcctcatggcgctgctgccatctttcctcccaggtggaagcctttcagaaggagtctcctggttttcttactggtggccctgcttcttcccattgaaactactcttgtctacttaggtctctctcttcttgctggctgtgactcctccctgactagtggccaaggtgcttttcttcctcccaggcccagtgggtggaatctgtccccacctggcactgaggagaatggtagagaggagaggagagagagagagaatgtgatttttggccttgtggcagcacatcctcacacccaaagaagtttgtaaatgttccagaacaacctagagaacacctgagtactaagcagcagttttgcaaggatgggagactgggatagcttcccatcacagaactgtgttccatcaaaaagacactaagggatttccttctgggcctcagttctatttgtaagatggagaataatcctctctgtgaactccttgcaaagatgatatgaggctaagagaatatcaagtccccaggtctggaagaaaagtagaaaagagtagtactattgtccaatgtcatgaaagtggtaaaagtgggaaccagtgtgctttgaaaccaaattagaaacacattccttgggaaggcaaagttttctgggacttgatcatacattttatatggttgggacttctctcttcgggagatgatatcttgtttaaggagacctcttttcagttcatcaagttcatcagatatttgagtgcccactctgtgcccaaataaatatgagctggggattaaaaaaaaaaaaaaaaaaaaaaaaaaaaaaaaaaaaaaaaaaaaaaaaaaaaaaaaaaaa

SEQ ID NO: 338 - protein, 447 aa, Homo sapiens
MELSQMSELMGLSVLLGLLALMATAAVARGWLRAGEERSGRPACQKANGFPPDKSSGSKKQKQYQRIRKEKPQQHNFTHRLLAAALKSHSGNISCMDFSSNGKYLATCADDRTIRIWSTKDFLQREHRSMRANVELDHATLVRFSPDCRAFIVWLANGDTLRVFKMTKREDGGYTFTATPEDFPKKHKAPVIDIGIANTGKFIMTASSDTTVLIWSLKGQVLSTINTNQMNNTHAAVSPCGRFVASCGFTPDVKVWEVCFGKKGEFQEVVRAFELKGHSAAVHSFAFSNDSRRMASVSKDGTWKLWDTDVEYKKKQDPYLLKTGRFEEAAGAAPCRLALSPNAQVLALASGSSIHLYNTRRGEKEECFERVHGECIANLSFDITGRFLASCGDRAVRLFHNTPGHRAMVEEMQGHLKRASNESTRQRLQQQLTQAQETLKSLGALKK

SEQ ID NO: 339 - DNA, 415 bp, Homo sapiens
  misc_feature (48)..(48): n is a, c, g, or t
  misc_feature (56)..(56): n is a, c, g, or t
  misc_feature (65)..(65): n is a, c, g, or t
  misc_feature (234)..(234): n is a, c, g, or t
  misc_feature (237)..(237): n is a, c, g, or t
  misc_feature (242)..(242): n is a, c, g, or t
caggaagaggaagtcccgcctctctctcctcaggcagcagcaacgcgnatggaatngggagtganacggagagcgtagtgaccatcatgagcctcctcaacaagcccaagagtgagatgaccccagaggagctgcagaagcgagaggaggaggaatttaacaccggtccactctctgtgctcacacagtcagtcaagaacaatacccaagtgctcatcaactgccgcaacaatnagnaactncttgggccgcttgaaggccttcgataggcactgcaacatggtgctggagaacgtgaaggagatgtggactgaggtacccaagaagtgggcaagggcaaagaagaagtccaagccagtcaacaaagaccggcttacatcttccaagatgttcctgcgcggggactcagtcatcg

SEQ ID NO: 340 - DNA, 2001 bp, Homo sapiens
ctatattctatattggcttttatagataattttcaggcagctaaacaagccttggctgaggcaactgttcaggcagctggaatggctgctactggtgtaagagaactcgcacaaaggagttccagaatggcactggatattaacatcaaagccccagttgtggtcatcccgcagtctccagtttctgaaaatgtttttgttgctgattttggactaattacaatgacaaatacctttcatatgataacagagagccagagctctcccccacctgttattgatttgataacaataaagctgagtgaaatgcgactatacagatctcgatttattaatgatgcataccaggaagtactggatctactcctgccattaaatcttgaggttgtggttgaacgaaatttatgctgggagtggtaccaggaagttccttgttttaatgtaaatgctcagctgaaaccaatggaggtagaatccatacagaatgtcctggtgatgctgccaacaatctgcgagtgcccagctgccttttgaggccaaccctctaggttcattcttagtcaagaagatataacaactatttttaaaacattgcatggcaatatatggtatgaaaaagatggtagtgcctcacctgctgtaacaaaagaccaatacagtgccactagtggagttactactaatgcttcacaccattcaggaggagcaactgtggtgacagctgctgtggtagaagtacattcacgtgccttactagttaagacaacactaaacataagcttcaaaactgatgatctcaccatggtgctgtatagtccaggtcctaaacaggcttcctttacagatgttcgtgatccttctctgaaacttgctgaatttaaattggagaatattataagtactttaaaaatgtatacagatggctcaacattttcttccttctcattaaaaaactgtattttagatgataaaagacctcatgtcaagaaagcaactcctcgaatgataggactgacagttggttttgacaaaaaagacatgatggatataaagtacaggaaagtcagagatggttgtgtgactgatgcggtctttcaagaaatgtatatttgtgcaagcgtagaatttctgcagactgttgcaaatgtctttcttgaggcctacaccacaggcactgctgtagaaaccagtgtgcaaacatggactgctaaggaagaagtacctacacaggaatcagtgaagtgggaaattaatgttattattaaaaatcctgaaattgtgtttgtagctgacatgacaaaaaatgatgctcctgctttagtcattacaacacaatgtgaaatttgctataaaggtaaccttgaaaatagtacaatgactgctgccattaaagatctccaagtgagagcctgcccgtttcttccagtcaagagaaaaggcaaaatcactactgttttgcagccctgtgacttgttttatcaaactactcagaaaggtacaggtccacaagtgatcgatatgtcagtaaaatccctgacactaaaggtttcaccagttattataaatactatgattaccataacttcagcactgtatacaactaaggaaaccatcccagaagaaacggcttcttctactgcacatttatgggaaaagaaggatacaaagactttaaaaatgtggtttcttgaagaatcaaatgaaactgaaaaaatagctcccacaactgaattggtacccaaaggcgagatgataaaaatgaacattgattctatttttatagttcttgaggctggaattggtcatagaacagtacctatgcttctggcaaagtcacgtttttcaggggaaggcaaaaactggagttccctaataaatctgcactgtcagcttgagctagaagtgcattattataatgaaatgtttggtgtatgggagcctttgcttgaacccttagaaattgatcagactgaggattttagaccatggaatcttggtatc

SEQ ID NO: 341 - DNA, 2480 bp, Homo sapiens
atggccgggccgcgcgcgtgcgcgccgctcctgctcctgctcctcctcgggcagcttctggcggccgccggggcgcagagagtgggactccccggcccccccggccccccagggcgccctgggaagcccggccaggacggcattgacggagaagctggtcctccaggtctgcctggtcccccgggaccaaagggggccccaggaaagccggggaaaccaggagaggctgggctgccgggactgccgggtgtggatggtctgactggacgagatggaccccctggacccaagggtgcccctggggaacggggaagtctgggacccccggggccgcccgggctggggggcaaaggcctccctggaccccccggagaggcaggagtgagcggccccccaggtgggatcggcctccgcggccccccgggacctcctggactccccggcctccctggtcccccaggacctcccggaccccctggacacccaggagtcctccctgaaggcgctactgaccttcagtgcccaagtatctgcccgccaggtcccccagggccccctggaatgccagggttcaagggacccactggctacaaaggcgagcagggggaagtcggcaaggacggcgagaagggtgaccctggcccccctgggcccgccggcctcccgggcagcgtggggctgcagggcccccggggattacgaggactgccagggccactcgggccccctggggaccggggtcccattgggttccgagggccgcctgggatcccaggagcgcctgggaaagcgggtgaccgaggcgagaggggcccagaagggttccgcggccccaagggtgacctcggcagacctggtcccaagggaacccccggagtggccgggccaagcggagagccgggcatgccaggcaaggacggccagaatggcgtgccaggactcgatggccagaagggagaggctggtcgcaacggtgctccgggagagaagggccccaacgggctgccgggcctccctggacgagcggggtccaaaggcgagaagggagaacggggcagagctggggagctgggtgaggccggcccctctggagagccaggcgtccctggagatgctggcatgcctggggagcgcggtgaggctggccaccggggctcagcgggggccctcggcccacaaggccctcccggagcccctggtgtccgaggcttccagggccagaagggcagcatgggagaccccggccttccaggcccccagggcctccgaggtgacgtgggcgaccggggtccgggaggtgccgaaggccctaagggagaccagggtattgcaggttccgacggtcttcctggggataaaggagaactgggtcccagcggcctggtcggacccaaaggagagtctggcagtcgaggggagctgggccccaaaggcacccagggtcccaacggcaccagcggtgttcagggtgtccccgggccccccggtcctctgggcctgcagggcgtcccgggtgttcctggcatcacggggaagccgggagttccggggaaggaggccagcgagcagcgcatcagggagctgtgtggggggatgatcagcgaacaaattgcacagttagccgcgcacctaaggaagcctttggcacccgggtccattggtcggcccggtccagctggcccccctgggcccccaggacccccaggctccattggtcaccctggcgctcgaggaccccccggataccgcggtcccactggggagctgggagaccccgggcccagaggaaaccagggtgacagaggagacaaaggcgcggcaggagcagggctggacgggcctgaaggagaccaggggccccaaggaccccaaggcgtgcccggcaccagcaaggacggccaggacggtgctcccggcgagcctgggcctcccggagatcctgggcttccaggtgccattggggcccaggggacaccggggatctgcgacacctcagcctgccaaggagccgtgttaggaggggtcggggagaaatcaggctctcgaagctcataaaattcaacgtgaggaagcaagtgacaaggacgcccgaagcacagtggacggtcatgaaggagcgggggtgtggcaggcgggtgacgtccaggagagggagcgcccctggctgcccctcggccgccgactggacgcgtgggccttgccagcgagcaccctcattgggctgtcgcctgacagcatacctcaaaaggccctagctaataaacctgtaagcccagcatttgagagaaggtagggtgtgtatatataaaaggttgtgtacaactccacgaggtgaaaaatattcagtaacttgtttgcatagcatttgtgtaaagactatgatctcatcccaataaaatgatatattaaatcttcagattaatgactggctacagagtaacaaaaaataaacaatttaatgtacagtaaattctctccca

SEQ ID NO: 342 - protein, 684 aa, Homo sapiens
MAGPRACAPLLLLLLLGQLLAAAGAQRVGLPGPPGPPGRPGKPGQDGIDGEAGPPGLPGPPGPKGAPGKPGKPGEAGLPGLPGVDGLTGRDGPPGPKGAPGERGSLGPPGPPGLGGKGLPGPPGEAGVSGPPGGIGLRGPPGPPGLPGLPGPPGPPGPPGHPGVLPEGATDLQCPSICPPGPPGPPGMPGFKGPTGYKGEQGEVGKDGEKGDPGPPGPAGLPGSVGLQGPRGLRGLPGPLGPPGDRGPIGFRGPPGIPGAPGKAGDRGERGPEGFRGPKGDLGRPGPKGTPGVAGPSGEPGMPGKDGQNGVPGLDGQKGEAGRNGAPGEKGPNGLPGLPGRAGSKGEKGERGRAGELGEAGPSGEPGVPGDAGMPGERGEAGHRGSAGALGPQGPPGAPGVRGFQGQKGSMGDPGLPGPQGLRGDVGDRGPGGAEGPKGDQGIAGSDGLPGDKGELGPSGLVGPKGESGSRGELGPKGTQGPNGTSGVQGVPGPPGPLGLQGVPGVPGITGKPGVPGKEASEQRIRELCGGMISEQIAQLAAHLRKPLAPGSIGRPGPAGPPGPPGPPGSIGHPGARGPPGYRGPTGELGDPGPRGNQGDRGDKGAAGAGLDGPEGDQGPQGPQGVPGTSKDGQDGAPGEPGPPGDPGLPGAIGAQGTPGICDTSACQGAVLGGVGEKSGSRSS

SEQ ID NO: 343 - DNA, 523 bp, Homo sapiens
tttaataggactctaggaacaccagggaaccatggactggagacagtggacaaagccctgttactctgtttggattcttgcaatgaaaactagctttcgcttctctctacactggcatccacatgtacttacttgcaccctgtgatgttacaagtgtgttttatttcctaagcttctgcatgtcatcagaggtatacaaggagtagggagatgcactgaacaaacctccccccaaggtgttattggcagtcagctcttcccattttccagatcagtctgccctgcacataaaatccacagctgctgactgcagggcctgtcactgttaccagttctgcctcttcatcacacagtcagcatgacttttttgctcaatcaaacttaccccaacttggattgttccattggagtggtctggttgctgctactgcgatttcccagctattaacatagacattacagcgctccaaccactcaaagactgcagcaacacagtcatcctggatagcagccacttcaggga

SEQ ID NO: 344 - DNA, 1378 bp, Homo sapiens
ggtagcagcatccaccgggcgggaggtcggaggcagcaaggccttaaaggctactgagtgcgccggccgttccgtgtccagaacctcccctactcctccgccttctcttccttggccgcccaccgccaagttccgactccggttttcgcctttgcaaagcctaaggaggaggttaggaacagccgcgcccccctccctgcggccgccgccccctgcctctcggctctgctccctgccgcgtgcgcctgggccgtgcgccccggcaggcgccagccatgtcgatgctgccgtcgtttggctttacgcaggagcaagtggcgtgcgtgtgcgaggttctgcagcaaggcggaaacctggagcgcctgggcaggttcctgtggtcactgcccgcctgcgaccacctgcacaagaacgagagcgtactcaaggccaaggcggtggtcgccttccaccgcggcaacttccgtgagctctacaagatcctggagagccaccagttctcgcctcacaaccaccccaaactgcagcaactgtggctgaaggcgcattacgtggaggccgagaagctgcgcggccgacccctgggcgccgtgggcaaatatcgggtgcgccgaaaatttccactgccgcgcaccatctgggacggcgaggagaccagctactgcttcaaggagaagtcgaggggtgtcctgcgggagtggtacgcgcacaatccctacccatcgccgcgtgagaagcgggagctggccgaggccaccggcctcaccaccacccaggtcagcaactggtttaagaaccggaggcaaagagaccgggccgcggaggccaaggaaagggagaacaccgaaaacaataactcctcctccaacaagcagaaccaactctctcctctggaagggggcaagccgctcatgtccagctcagaagaggaattctcacctccccaaagtccagaccagaactcggtccttctgctgcagggcaatatgggccacgccaggagctcaaactattctctcccgggcttaacagcctcgcagcccagtcacggcctgcagacccaccagcatcagctccaagactctctgctcggccccctcacctccagtctggtggacttggggtcctaagtggggagggactggggcctcgaagggattcctggagcagcaaccactgcagcgactagggacacttgtaaatagaaatcaggaacatttttgcagcttgtttctggagttgtttgcgcataaaggaatggtggactttcacaaatatctttttaaaaatcaaaaccaacagcgatctcaagcttaatctcctcttctctccaactctttccacttttgcattttccttcccaatgcagagatcaggg

SEQ ID NO: 345 - protein, 284 aa, Homo sapiens
MSMLPSFGFTQEQVACVCEVLQQGGNLERLGRFLWSLPACDHLHKNESVLKAKAVVAFHRGNFRELYKILESHQFSPHNHPKLQQLWLKAHYVEAEKLRGRPLGAVGKYRVRRKFPLPRTIWDGEETSYCFKEKSRGVLREWYAHNPYPSPREKRELAEATGLTTTQVSNWFKNRRQRDRAAEAKERENTENNNSSSNKQNQLSPLEGGKPLMSSSEEEFSPPQSPDQNSVLLLQGNMGHARSSNYSLPGLTASQPSHGLQTHQHQLQDSLLGPLTSSLVDLGS

SEQ ID NO: 346 - DNA, 340 bp, Homo sapiens
ttttttttagaatcagaatgtatgatttattccgcttgttttacagatgagaaatctgagggccagagaggtcaagaccattcaacaagctagggtaggagccagagcttccacccaggcctctgggctcccaggtgctatgtgctccttccacaacacccaatatgagccagtcagtcaacaggtatatgtttagtgctactcaagttctgaccacttagagtggactcgagatagaaagataagctcttatttattcagggcagcagacatgccccagttatcatcacctgaccgtaacacagttctcaaaaacaccggatctggaatgggagggaag

SEQ ID NO: 347 - DNA, 366 bp, Homo sapiens
gctcgaccatgggcctatcatgggaggagtccggtcaatggaatgaatttccttaggactcgctcctggccagggaggaccatcatgccagggcaccgcgtgtgcaaggagcccagctgcagttagaggaagttcagactcggaggagaggcggcacgaagtccacctggaacacgtgtccgcccgcccgccgtagagaagttcaacgaaagagccctacatctttcgtcataccatttgcacattcaaacgtcagtaagcctttcgggaagactgtgtttacagccacactaaaatcccgatcacattttccctgaacaatacctctccccacggcaggaactattcagattcaagagttaaaaa

SEQ ID NO: 348 - DNA, 327 bp, Homo sapiens
  misc_feature (292)..(292): n is a, c, g, or t
aaaagccctgggtcccagcagcagagagacaggacagaggggatgcttgggcggggagggacggtaacctgcagaacagattccatttttatagaacgagtacacgtttgctaaaacagtcctgctttcccagactggattcccaccacagggacagtcggaactcaggactagctccagcgaacatctttcctccgaattcaagccttctatcacaatgtcaaaacagctatttataaagccattttcattgtacttggataacagcacgagtcccaaaacttttaggaanttaaaatagggacattgggtttgattggaaaagag

SEQ ID NO: 349 - DNA, 430 bp, Homo sapiens
  misc_feature (301)..(302): n is a, c, g, or t
  misc_feature (338)..(338): n is a, c, g, or t
gcagttccaccagctgaggccaggcagcagaggcagtttgtctttgctggccagaagatggtgctcatggccatactctggccttgcagatgtcactagtgttacttctagtgactccagattacagactggccccccaatctcaccccagcccaccagagaagggggctcaggacaccctggaccccaagtcctcagcatccagggatttccaaactggcgctcactccctgactccaccaggatggcaactttcaattatcactctcagcctggaaggggactcgtgtgggacacagannggaacacgatttctcaggctgtcccttcaatcattngcccttctccgaagatcgctcctgctggagtcggacatcttcatcttctacctggctcaagctgggccagagtgtgtggttctcccaggggt

SEQ ID NO: 350 - DNA, 209 bp, Homo sapiens
  misc_feature (150)..(150): n is a, c, g, or t
ttcattggagacaaccatgtttagtatttgagcattggttaaatgctaaagaaaaatcgccgttaaagcagttttctttttcactgtctttttcttttcgcggggaacccagctgttcctgcgagggccacctcctcaggaagaccccgnagctctcccgcggcgcttcttcaggaggcagcgacagtttcgagaacccgggccttccc

SEQ ID NO: 351 - DNA, 1736 bp, Homo sapiens
gctgggtcaatagtacttgccgcagtactcttaaaactagcgatggaggcttcgacatgggctttagggagtcataagtggagtccggaaagaggtatctgtactataaaagctattgtgtaagctagtcatattaagttgttggctcaggagtttgaagtccttgagagaggattatgatgcgacgtgagtgcgttcgtaatttgagtctgcttggcagatagtaatgaggatgtaagcccgtgggcgattatgagaatgactgcgccggtgaagcttcagggggtttggatgagaatggctgttactacgagggctatgtggctgattgaagagtatgcaatgagcgattttaggtctgtttgtcgtaggcagatggagcttgttataattatgcctcatagggatagtacaaggaaggggtaggctatgtgttttgtcagggagttgagaaactgtggcacaaggcgagagctggtttcctctgccctgttagagctgggggactcttcagagtcaaaggccagagagcatggagctgagtggagccaccatggcccgggggctcgctgtcctgctagtcttgttcctgcatatcaagaacctgcctgcccaggctgcggacacatgtccagaggtgaaggtggtgggcctggagggctctgacaagctcaccattctccgaggctgcccggggctgcccggggccccagggccaaagggagaggcaggtgtcattggagagagaggagaacgcggtctccctggagcccctggaaaggcaggaccagtggggcccaagggagaccgaggagagaaggggatgcgtggagagaaaggagacgctgggcagtctcagtcgtgtgcgacaggcccacgcaactgcaaggacctgctagaccgggggtatttcctgagcggctggcacaatatctacctgcccgactgccggcccctgactgtgctctgtgacatggacacggacggagggggctggaccgttttccagcggaggatggatggctctgtggacttctatcgggactgggccgcatacaagcagggcttcggcagtcagctgggggagttctggctggggaacgacaacatccacgccctgactgcccagggaagcagcgagctccgtgtagacctggtggactttgagggcaaccaccagtttgctaagtacaaatcattcaaggtggctgacgaggcagagaagtacaagctggtactgggagcctttgtcgggggcagtgcgggtaattctctaacgggccacaacaacaacttcttctccaccaaagaccaagacaatgatgtgagttcttcgaattgtgctgagaagttccagggagcctggtggtacgccgactgtcatgcttcgagcctcaatggtctctacctcatgggaccccatgagagctatgccaatggtatcaactggagtgcggcgaaggggtacaaatatagctacaaggtgtcagagatgaaggtgcggcccgcctagacgggccaggacccctccacatgcacctgctagtggggaggccacacccacaagcgctgcgtcgtggaagtcaccccatttccccagccagacacactcccatgacgcccacagctgcccctttgcccccagctcagtcaagccgtcacatgcccacaacctcaccagagggagaattatgtttctaaatatgtttacttttggggacagaaaaaaaaaaaaa

SEQ ID NO: 352 - protein, 326 aa, Homo sapiens [sequence omitted]

SEQ ID NO: 353 - DNA, 332 bp, Homo sapiens
  misc_feature (324)..(324): n is a, c, g, or t
  misc_feature (331)..(331): n is a, c, g, or t
caagtgaattttttgccaaacttagtaactctgttaaatatttggaggatttaaagaacatcccagtttgaattcatttcaaactttttaaatttttttgtactatgtttggttttattttccttctgttaatcttttgtattcacttatgctctcgtacattgagtacttttattccaaaactagtgggttttctctactggaaattttcaataaacctgtcattattgcttactttgattaaaaaaaaaaaaaaaaaaaaaaaaaaaaaaaaaaaaaaaaaaaaaaaaaaaaaaaaaaaaaaaaaaaaaaaaaaaaaaattnaccaaanc

SEQ ID NO: 354 - DNA, 465 bp, Homo sapiens
ttgaatttatgtgacactatagaagagctatgacgtcgcatgcacgcgtacgtaagcttggatcctctagagcggccgcctactactaaattcgcggccgcgtcgacgtctcaaaataaggaattttgtagtggttttcaaaaataattcaacaaagaaacaatacaaaaagtgggtagaattacctatcacatttcccaatcttgactattcagaatgctgtttatttagtgatgaggattagcacttgattgaagattcttttaaaatactatcagttaaacatttaatatgattatgattaatgtattcattatgctacagaactgacataacaatcattttattgattcttatgtcgacgcggccgcgaatttagtagtagtagtcgacccgggaattcctgaccggtacctgcaggcgtaccagctttccctatagtgagtcgtattagagcttggcgta

SEQ ID NO: 355 - DNA, 5413 bp, Homo sapiens
gaagagggatagggccagcaaggcagggatcgaacgagtgtctggcagccgggagcccagcgaagagagcgagcaagcttaggaaaacgagcgaagtaaagggagtaggggagactgagactgaccggtagccaggcaggcggacggacgcacgcccggacagactgagcaggcgccggagaaccactcacaggttccccccgcctttccctttgaaagctaggattttgcctttcccgtggcgcccgagagagaatgctggactctgccgacttcagcgcaagctaagatttctcagctagggacaaacgatcagcccaatcctgagaaggggggaaccaagcaccccgtccccatccccctcccctcccccgactaaactcgggcgccaaacccagcccttctctaaccaccctacttcctcctctcctttctagcatggtggctgtatggacagtctgacagaacagagactgacatctcccaatctgccggccccccacctggaacactacagtgttctgcattgcaccatgaccctggatgtgcaaactgtagtcgtttttgccgtgattgtagtcctcctgcttgtcaatgtcatactcatgtttttcctgggaacgcgctgaatggagtccagccacctgagctgtcgcgaactctcgctttgatttcatcccgagagccaccgagaaaaaaaaaaaatcacagacagagacagggaaagagagagaaagaacaagctttcttactcaggggggaaaacgttttgagcttcaacatggcctcgctgtgatatgtatgacgttgctgatcactggagattccatcgttagtgctgaggcagtatgggatcacgtcaccatggccaaccgggagttggcatttaaagctggcgacgtcatcaaagtcttggatgcttccaacaaggattggtggtggggccagatcgacgatgaggagggatggtttcctgccagctttgtgaggctctgggtgaaccaggaggatgaggtggaggaggggcccagcgatgtgcagaacggacacctggaccccaattcagactgcctctgtctggggcggccactacagaaccgggaccagatgcgggccaatgtcatcaatgagataatgagcactgagcgtcactacatcaagcacctcaaggatatttgtgagggctatctgaagcagtgccggaagagaagggacatgttcagtgacgagcaactgaaggtaatctttgggaacattgaagatatctacagatttcagatgggctttgtgagagacctggagaaacagtataacaatgatgacccccacctcagcgagataggaccctgcttcctagagcaccaagatggattctggatatactctgagtattgtaacaaccacctggatgcttgcatggagctctccaaactgatgaaggacagccgctaccagcacttctttgaggcctgtcgcctcttgcagcagatgattgacattgctatcgatggtttccttttgactccagtgcagaagatctgcaagtatcccttacagttggctgagctcctaaagtatactgcccaagaccacagtgactacaggtatgtggcagctgctttggctgtcatgagaaatgtgactcagcagatcaacgaacgcaagcgacgtttagagaatattgacaagattgctcagtggcaggcttctgtcctagactgggagggcgaggacatcctagacaggagctcggagctgatctacactggggagatggcctggatctaccagccctacggccgcaaccagcagcgggtcttcttcctgtttgaccaccagatggtcctctgcaagaaggacctaatccggagagacatcctgtactacaaaggccgcattgacatggataaatatgaggtagttgacattgaggatggcagagatgatgacttcaatgtcagcatgaagaatgcctttaagcttcacaacaaggagactgaggagatacatctgttctttgccaagaagctggaggaaaaaatacgctggctcagggctttcagagaagagaggaaaatggtacaggaagatgaaaaaattggctttgaaatttctgaaaaccagaagaggcaggctgcaatgactgtgagaaaagtccctaagcaaaaaggtgtcaactctgcccgctcagttcctccttcctacccaccaccgcaggacccgttaaaccacggccagtacctggtccccgacggcatcgctcagtcgcaggtctttgagttcaccgaacccaagcgcagccagtcaccattctggcaaaacttcagcaggttaacccccttcaaaaaatgatacctacagggaggcagataattttaaaataaagtaaataaaattatatttatagatggaccttttttcggagaagcactgttgaaatttatacacacacacacacacagagacccttgagtacacatacacacacacacacacagacacacacacacacacacacacacacacacacacagagagataaggaacaaaagtgttttctgttgttttggggaagtgaaatatgtggttggtaggaagaggtaccaatgacttccaaacatgtgattccgtcttaaaagttttccatttttaccctgtcccccttccctttgctttcagaagttgacatttctattcattgcttttcttgttaagataatctctttactcccctgtgagtgattcactgccttgtcattattacgatagatgtgtttgtattgttttttttctgatgatactgatgttgatgaatttttaattttatttgatgtggtagagttgggaggtttcagggttttttcccctcttttactttccattgaggaagggaatgagctcctttctcctctccttcagccaatcattatcaaatgttccttcagccctgcagttgccccaaataaccttttttcagcatcctctgtcctcagtcatgccagtctggacatgctctgttgtgccctgtgacaaaactgctcagtattcctattgcttttactgtgttttaggtactgtgaagggatcaaaaaaccaaacagaagcaagggagtatcagactatgatgatgctggagtggacttctgttcagggaacattttgcattcaggctgtttcttctatcactggggtttcccatgttgcagcacttctgggtcgttgcaattttgcatctaggagttagtttgatcgagttattctcttttttcaagtcacttttgttataggtctccccctaggcctgtctctcccttagcccaaaagatctgaactggaagcagaggttgagattctgcctcccaggagagggatttacctgccccctagtaccagataggtttagggcagtgatctctacagcaatcagttcagtgtcctggttgtccctgctcccatttacagatgtttgggcagcattgatagaagtatggaggggttcaagacagagcccacctgatcaagatcatcagctaccttcaaattattgacctggacagggtccaagtctgatagtaaccttttacaagaaagaacagggatgggaatggaaagagatagccttgatccacagtattgtacctgcattttctaccaccctaaaattgtgtgagacttctcccattgttaacagattgcatggacaatcttccctggcttctttctttccctctctctttcttctttctcctgccatcctagcacaggaggatttttggtattgatatagttaaagctgttctggcactcaaagaaggccgtgtttccaacatcctctcatcccaggacatttggggcaagtgagttaggggcccaggggcaattttccctctgaataacgtgtctgaggcagggatgctaccctcaggctcgcttttggccagctttttgcttgggaaaatctaacttctttcacaaggaggcaggcttcctatggatgttggagtacctgtttttcctccacacatagcccttttcatggatagaccttgaacaacaaaaagggtataagggaataaggatgaactctgctgtgaagagcaagccactgtagtgaggaatgtggagactgggagtctgtcctaaaccccatgggagaagacttcatcatgacaggacttcagcttaccaagcagcagccatagctgtgtggaggcttcagcatagctagcatgtttactgctctatgcctcctgatccagaccaggcattgcccagcctgggaatcttttctttgtgggaatcaaattacaagctatttaagtttatattccatcacaaccaagtcagacttgtattataagtcaaggatgagcctgatctggggagagggccggggctcgggactggccaccactgttcagcacatgacctaactacgtaagcctctttggcaagggtcctggtgcccagcacccaggctaaaatatcctgtctggcagagtgttttggtagctatgcaggcctcccttcagtgtacctctttttccaacttctcactcctccttactaggcttggccttgacatgcttcttcgagggttggcagcacaccgggaggggatgcttggacaagtttctgggcctacatttcttgactaggccctctcatttcctccctccttggggcttctgcccagggctccaggatcagggatattacttctcaacccgcacttctcctctactgaacccactggcatcacctgatgccactaatttgtgaacaacaagaaatcatttccccattggttggagtattccctcagcctatagcatcaaagcagaccagtggccaacagccccaaggggagcccaattaaatacctgggttcagtatcctaacctgttatgtcctgacagcaatggtaaccccagtaattctgtaatgttgtaatttccgcatggccctgagctcccttttcctcaactcagtgaggccaggatttgctctccaaaaggctttgctagtgtgttcaatgggacctgctgtggggagtcctaagacagacatctaattattctctctttttccccccctctctatgtgtatatttctaatggatctataagaacagcaacaagagagttctaacaattctagtgtgaagccaaatagtgatcttttagtgctttggggatggggtgggctggggtggatggatgggcaacagtgactttgattacccttgctgctctgcatttgccagtttattcttttgtttcttttatctgactgactctgtcaaacaagtgtcaaagttgtgtgttaaaaaatgtttaacaaaaaaaaatgttgtaatgacacaaagccttatgaaaatatttatggagttcaataaaagaagtaaaaagac

SEQ ID NO: 356 - protein, 516 aa, Homo sapiens
MTLLITGDSIVSAEAVWDHVTMANRELAFKAGDVIKVLDASNKDWWWGQIDDEEGWFPASFVRLWVNQEDEVEEGPSDVQNGHLDPNSDCLCLGRPLQNRDQMRANVINEIMSTERHYIKHLKDICEGYLKQCRKRRDMFSDEQLKVIFGNIEDIYRFQMGFVRDLEKQYNNDDPHLSEIGPCFLEHQDGFWIYSEYCNNHLDACMELSKLMKDSRYQHFFEACRLLQQMIDIAIDGFLLTPVQKICKYPLQLAELLKYTAQDHSDYRYVAAALAVMRNVTQQINERKRRLENIDKIAQWQASVLDWEGEDILDRSSELIYTGEMAWIYQPYGRNQQRVFFLFDHQMVLCKKDLIRRDILYYKGRIDMDKYEVVDIEDGRDDDFNVSMKNAFKLHNKETEEIHLFFAKKLEEKIRWLRAFREERKMVQEDEKIGFEISENQKRQAAMTVRKVPKQKGVNSARSVPPSYPPPQDPLNHGQYLVPDGIAQSQVFEFTEPKRSQSPFWQNFSRLTPFKK

SEQ ID NO: 357 - DNA, 4147 bp, Homo sapiens
ccgcgcgcggcggcccgaggcggcggcggggacgcggggacgcgaggacgcggctttgtgcaggcgggtcgcggggcgcccatggcggagtgcggccgggggggcgccgccggcggggccctgcccacctccccgggcccggccctcggcgccaagggcgccctgaaagccggagtgggggaaggcggtggcgggggaggtcgcctcggccacgggcgggcgcgctatgacagcggcggggtttccaacggagactgcagcctcggcgtgtccggggacgaagcccgggctagccctaccaggggaccccgcggcgttgcgctcgccccgacccccagcgcggtcgtctgtaccctcccccgggagagcaagccgggcggcctgccccgccggagcagcatcatcaaggatggtacaaaacagaagagggaacggaaaaagacagtctcattcagcagcatgccaacagagaagaagatcagcagtgcaagtgattgtattaattcaatggttgagggttcagaactcaaaaaggttcgctccaactctagaatttatcataggtactttttactggatgctgacatgcagagcctaaggtgggagccatctaagaaggattctgagaaagccaagattgacattaaatccatcaaggaagtgagaacaggaaaaaacacagacatattccgcagcaatggcatttctgaccagatatctgaagattgtgcgttttccgtcatatatggagagaattatgagtcactggatttggttgccaactccgcagatgttgcaaacatctgggttacaggactgcggtacctaatttcttatggaaaacatacacttgatatgttagaaagtagccaagataacatgaggacttcttgggtttcacaaatgtttagtgaaattgatgtagataaccttggacatataactctgtgtaatgctgtgcaatgtatcagaaacctcaatcctggtttaaaaacgagcaaaattgagcttaagttcaaagaattgcataaatcaaaggacaaagctggtaccgaggtcacaaaggaagaatttattgaggtttttcatgagctttgtactagacctgaaatttatttccttttagttcagttttcaagcaataaagaattccttgataccaaggaccttatgatgtttcttgaggcagaacagggtgtggcacatataaatgaggaaataagccttgaaattattcacaaatatgaaccatccaaagagggtcaggaaaagggctggctctccatagacgggttcactaattaccttatgtcacctgactgttatatattcgatccagaacataagaaggtctgtcaggatatgaagcaacctctgtctcattactttataaactcatctcataatacatacttaatagaggatcagttccgaggtccctccgacatcacaggatatattcgagctcttaaaatgggttgccggagtgttgaattagatgtatgggatgggccggacaatgaacctgtaatttacacaggccacaccatgacctctcagatagttttccgcagtgtcattgatattattaacaagtatgcattctttgcttcagagtatcctcttatcttgtgtttagaaaaccactgttccattaaacaacagaaggtaatggttcagcacatgaagaaacttttaggagacaagctctatacaacatcacccaatgttgaggaatcttatctaccatccccagatgtcctgaaagggaaaatactaattaaagcaaagaagctgtcctcaaattgctctggggtagaaggagatgttactgacgaagatgaaggagcagaaatgtctcagaggatgggaaaagagaacatggagcaacccaataatgtgcctgtgaagcgatttcagctttgtaaagaactgtctgaactggtcagcatctgcaaatcagttcagttcaaagaatttcaggtgtcgtttcaggttcagaagtactgggaagtctgttcctttaatgaagtgcttgccagcaagtacgccaatgaaaatccaggggactttgtaaattacaacaaacgttttcttgctagggtttttcccagtccaatgagaattgattccagtaacatgaatcctcaagatttttggaaatgtggttgccaaattgtagccatgaactttcagacaccaggactgatgatggacctgaatattggctggtttaggcagaacggaaactgtggctatgtcctccggccagccatcatgagggaggaggtctccttcttcagcgccaatacaaaagactctgtcccaggggtctcacctcaacttcttcacattaaaatcatcagtgggcagaactttcccaagcccaaaggatcaggtgccaaaggtgatgtggtagatccttatgtctatgttgaaatccatggaatccctgctgattgtgcagaacaaaggacaaaaacagtgcaccagaatggagacgctcccatttttgatgaaagctttgaatttcaaatcaacctgcctgaactggccatggtgcgctttgtagtgctggatgatgactacattggggatgaattcatcggccagtacacaattccctttgaatgtttacagacgggctaccgccatgtccccctgcagtccttaactggagaggtccttgcacatgcttctttatttgtccacgtggctattactaaccgaagaggaggaggaaagcctcataaaaggggcctttctgtgagaaaagggaagaaatccagggaatatgcatctttgagaacactgtggattaaaaccgtggatgaggtattcaagaatgcccagccccctatacgggatgccacagatctgagagaaaacatgcagaatgcggtggtgtcattcaaggagctgtgtggcctctcctctgtggccaatctcatgcagtgcatgttggcggtgtctccccgctttctggggcccgataacacacccctagtggtcctaaatctcagcgagcagtaccccacaatggagctgcagggaattgtgccggaggttctgaagaagatcgtaacaacttatgacatgatgattcagtccctcaaggcgttgattgaaaatgcagatgctgtatatgaaaagatcgtacattgtcagaaggcagccatggaattccatgaacacttgcacagcataggcaccaaggaaggtttgaaggaaagaaaactacaaaaagcagtggagagctttacctggaatattaccatcttaaagggacaagcagatcttttgaaatatgctaagaatgagacattggagaacctgaaacaaatccattttgctgctgtttcatgtggactgaataaaccaggcaccgaaaatgctgatgtccagaagccacgccggagcttggaagtcatacccgaaaaagcaaacgatgaaactggagaatgaggaaacttacaataaaccattatggagtttataactctaggaccaattgtagtcagatgggacatttgctttgcactcactaatgagaataatattcgggattttaaagcacaactggaatagctaattacagtctattaaaactgtgaatgtatgtagcaatcctgcgtgtgaaggcaaataaactctttaacaggcaattatattgctggccaaaatatgctatatttgtatacaaagacattctaactcagttccagtatgaagaaagattattcactctagctccactgagaaacattttcctaagtgaaaacaatttcttaagatggaaatggattggattgtcaaattattatttattggagaaaaaaacctgatctacacatttttacttatatggggttgccagagtctctgggttctagatgattttggtggcatgcttgctgagccataattactaaagagaatgtaagtggacgggttccctgaatccccggggtccttggagagccatcgaggagaatgtgcaattggactgaagctccctggctgaagatacatgccgagtcagcacatgggtagagatgatgtaaaagcagccaatctggaaacaatacattgtaaatagtttttcattgtatgaagtagtgttcacattaaaaagatgttttatgat

SEQ ID NO: 358 - protein, 1154 aa, Homo sapiens
PRAAARGGGGDAGTRGRGFVQAGRGAPMAECGRGGAAGGALPTSPGPALGAKGALKAGVGEGGGGGGRLGHGRARYDSGGVSNGDCSLGVSGDEARASPTRGPRGVALAPTPSAVVCTLPRESKPGGLPRRSSIIKDGTKQKRERKKTVSFSSMPTEKKISSASDCINSMVEGSELKKVRSNSRIYHRYFLLDADMQSLRWEPSKKDSEKAKIDIKSIKEVRTGKNTDIFRSNGISDQISEDCAFSVIYGENYESLDLVANSADVANIWVTGLRYLISYGKHTLDMLESSQDNMRTSWVSQMFSEIDVDNLGHITLCNAVQCIRNLNPGLKTSKIELKFKELHKSKDKAGTEVTKEEFIEVFHELCTRPEIYFLLVQFSSNKEFLDTKDLMMFLEAEQGVAHINEEISLEIIHKYEPSKEGQEKGWLSIDGFTNYLMSPDCYIFDPEHKKVCQDMKQPLSHYFINSSHNTYLIEDQFRGPSDITGYIRALKMGCRSVELDVWDGPDNEPVIYTGHTMTSQIVFRSVIDIINKYAFFASEYPLILCLENHCSIKQQKVMVQHMKKLLGDKLYTTSPNVEESYLPSPDVLKGKILIKAKKLSSNCSGVEGDVTDEDEGAEMSQRMGKENMEQPNNVPVKRFQLCKELSELVSICKSVQFKEFQVSFQVQKYWEVCSFNEVLASKYANENPGDFVNYNKRFLARVFPSPMRIDSSNMNPQDFWKCGCQIVAMNFQTPGLMMDLNIGWFRQNGNCGYVLRPAIMREEVSFFSANTKDSVPGVSPQLLHIKIISGQNFPKPKGSGAKGDVVDPYVYVEIHGIPADCAEQRTKTVHQNGDAPIFDESFEFQINLPELAMVRFVVLDDDYIGDEFIGQYTIPFECLQTGYRHVPLQSLTGEVLAHASLFVHVAITNRRGGGKPHKRGLSVRKGKKSREYASLRTLWIKTVDEVFKNAQPPIRDATDLRENMQNAVVSFKELCGLSSVANLMQCMLAVSPRFLGPDNTPLVVLNLSEQYPTMELQGIVPEVLKKIVTTYDMMIQSLKALIENADAVYEKIVHCQKAAMEFHEHLHSIGTKEGLKERKLQKAVESFTWNITILKGQADLLKYAKNETLENLKQIHFAAVSCGLNKPGTENADVQKPRRSLEVIPEKANDETGE

SEQ ID NO: 359 - DNA, 1790 bp, Homo sapiens
cagcccaaacagcacgacggatcatagggctggagctggacactgagggtcacaggctttttgtggctttttctggctgtattgtctacctccctctcagccggtgtgcccggcatggggcctgtcagaggagctgtttggcttctcaggacccatactgtggatggcatagctccaggggctgtgtggatatcaggggatctggtgggactgatgtggatcaggctgggaaccaggaatccatggagcatggtgactgccaagatggagctactgggagtcagtctggccctggggattctgcttatggcgtgcgccgggacctgcccccagcctcggcctcccgctccgtccccatcccactcctcctggccagtgtggccgcagcttttgccctgggcgcctcagtctctggcctcctggtctcctgtgcttgtcgccgcgcccaccgacgtcggggcaaggacatcgagactcccgggctcccgcgccctctctccctccgcagtttggcccggctccacggtgggggcccagagcccccgccgccctccaaggacggggacgcggtgcagacgccgcagctctacaccaccttcctgccgcctccggagggcgtgcccccgccggagctggcctgcctgcccacccccgagtccacgccggagctgccggtcaagcacctccgcgccgccggggacccctgggagtggaaccagaacaggaacaacgccaaggagggtccgggccgctcacggggcgggcacgcggcgggcgggcccgcgccccgcgtgctggtgaggccaccgccgcccggctgtcccgggcaggccgtggaagtcaccaccctggaggaactgctgcgctacctgcacggcccgcagccgcccagaaagggggccgagccccccgcccctttaacctcgcgggcgctcccgccggagcccgcccccgccctcttgggcggccccagccccaggccccacgagtgcgcctcgccgctgaggctggacgtgccccccgagggcaggtgcgcctctgcccccgcccggcccgcgctctccgcccccgctccccggctgggcgtcggcggaggccggaggttgcctttctccggccaccgggccccccctgccctgctcactcgagtcccctcgggaggtccctccaggtactccgggggtcccgggaagcacctcctgtacctgggccggcccgagggctaccggggccgcgccctgaaaagggtggacgtcgagaagccccagttgtccctgaagcctcccctcgtcgggccctcctcccgccaggccgtcccgaacggcggccgtttcaacttttaaagggagcggtccacggcctccagcgtggggagcgcccgagtcctctcggccacgagctggacgctcttcaggacgtttcaccgccccctcgccccgcacctccagccttcccgactcgcagagtctcccgaggccccttttcgcctcgggtttatttattgactgtctttccccctgtcctcgacagaagagtgggaggtgagaagcccgtctcctcagtgagccagcatttcagggggagctggcggactcccactccccgctcccttccagccaagctgccttaactcgcccctcggggctcccccagagactgtgccccgggcgggccgcgcgcgctgtgtccagagtcctcgggcctcctgggtctgggacgtgcctctcctactgtgtaggagcctccgcttcccaatacagccgtgtctgcaaaaaaaaaaaaaaaaaaaa

SEQ ID NO: 360 - protein, 446 aa, Homo sapiens
AQTARRIIGLELDTEGHRLFVAFSGCIVYLPLSRCARHGACQRSCLASQDPYCGWHSSRGCVDIRGSGGTDVDQAGNQESMEHGDCQDGATGSQSGPGDSAYGVRRDLPPASASRSVPIPLLLASVAAAFALGASVSGLLVSCACRRAHRRRGKDIETPGLPRPLSLRSLARLHGGGPEPPPPSKDGDAVQTPQLYTTFLPPPEGVPPPELACLPTPESTPELPVKHLRAAGDPWEWNQNRNNAKEGPGRSRGGHAAGGPAPRVLVRPPPPGCPGQAVEVTTLEELLRYLHGPQPPRKGAEPPAPLTSRALPPEPAPALLGGPSPRPHECASPLRLDVPPEGRCASAPARPALSAPAPRLGVGGGRRLPFSGHRAPPALLTRVPSGGPSRYSGGPGKHLLYLGRPEGYRGRALKRVDVEKPQLSLKPPLVGPSSRQAVPNGGRFNF

SEQ ID NO: 361 - DNA, 4392 bp, Homo sapiens
ggactttggggctagcgtttagaaaagtctcgacctcctccggcccggtcccatcccaagaaccgactaaggctgtgagtgtccgggaaccagacccgcttggaggccacagccccgacgtcccgcgcccacgcggcagatcgggcgctgcggcctgggagcctcggggagatgcggagcaggagcaattccggggtccgcttggacgggtacgcgcggctggtgcagcaaaccatcctgtgttaccagaatcccgtcacggggctgctgtcagccagccatgagcagaaggatgcctgggtgcgggataacatctacagtatcctggccgtgtggggcctgggcatggcctaccgtaagaatgcagaccgcgatgaggacaaggccaaggcctacgagctggagcagaacgtggtgaagctgatgcgaggtcttctccagtgcatgatgagacaggtggccaaagtggagaagttcaaacacactcagagcaccaaggacagcctgcacgccaagtacaacaccgccacctgtggcacggtggtgggcgacgaccagtggggccacctccaggtggatgccacctctctcttcctcctgttcctggcccagatgaccgcctcaggcttacgtatcattttcactctcgatgaggtggccttcatacagaatcttgtcttttacatagaagctgcatataaagtcgctgattatggaatgtgggagcgtggagataagactaatcagggcatcccggaattgaatgcaagctccgtaggaatggccaaggcagctcttgaggcaattgatgaactggacctttttggagcccatggaggacgcaagtcagtgattcatgttctgccagatgaggtcgagcactgccagtctattctgttctccatgctgccaagagcgtcgacatctaaagaaattgatgctggacttctttccattatttccttcccggcctttgcagtggaagatgtaaaccttgtaaatgtgaccaaaaatgaaattatttctaagctccaggggcgttatggatgctgtcgcttccttcgagatggttataaaactccaagagaggaccctaatcgactgcattatgaccctgctgaactcaagctcttcgaaaacattgaatgtgagtggcctgtgttttggacatattttataatagatggagtcttcagtggtgatgctgttcaggtccaagaataccgagaggccctggagggaatactcatcagaggcaagaatgggatccgcctggtgcctgaactctacgctgtcccgcctaacaaggtagatgaagagtacaagaatcctcacacagtagaccgagttcctatggggaaggtgcctcatctgtggggccaatccttgtacatcctcagctcgctgttggcagagggattccttgccgctggtgaaatcgatcccttaaatagaagattttccacttcagtcaaacctgatgttgtagtacaagttactgttttggcagaaaacaatcacattaaggacttattgaggaaacacggggtgaacgtccagagtatcgcggacattcatccaattcaagtccagccgggccggattcttagtcacatatatgccaagcttggacggaataagaatatgaatttgagtgggcgaccgtatcgacatattggtgtccttggaacctctaaactatatgtgattaggaaccaaatctttacttttacaccccagttcaccgaccagcatcacttctacctggccctcgacaatgagatgatcgtggagatgctaaggatcgagctggcctacctgtgcacctgctggaggatgacgggcagacccacactcaccttccccatcagtcgcaccatgctcacaaatgatggctcagacattcattctgctgtgctctccacaattagaaaactagaggatggatattttggaggagccagagtaaaattagggaacctttcggaatttctcaccacatcgttctacacatatctgacttttctggatccagactgtgatgagaagttgtttgacaatgccagcgaagggactttcagtcctgatagtgattcagatttggtaggatatctggaagacacctgtaatcaagaaagccaagacgaacttgaccattatatcaaccaccttctgcaaagcacatcgttgaggtcctatctgcctcctctttgtaagaacacagaagaccgccatgtcttcagtgctatccactccacgcgggacatactttctgtgatggcaaaagcaaagggtttggaagttccatttgttcccatgactttgccgactaaagttctaagtgcccaccgtaaatcactgaatcttgttgattctcctcagccactcctagaaaaggttcctgaaagtgactttcagtggcccagagatgaccatggtgacgtggactgtgagaagctggttgagcagctaaaagattgttcgaacctacaggaccaagcagacattctgtacattctttatgtcataaagggtcccagctgggacacaaatctctctggacagcacggggtcaccgttcaaaaccttcttggtgagctctatgggaaagccggcttgaaccaggagtggggtctgattcgctacatctcaggccttctcaggaagaaagtggaggtcctggctgaggcctgcacagacctgctttcgcaccagaagcagctcaccgtgggcctgccgcccgagccccgggagaagatcatctctgcgccccttcccccagaggagctcacaaaactcatctacgaggccagtgggcaggacatcagcattgccgtcctcacgcaggagattgtggtttacctggccatgtatgtcagggcgcagcccagcctctttgtggagatgctgagactccggattggactgatcattcaggtgatggccacggagctggcacggagcctgaactgctcaggagaagaggcttctgaaagtttgatgaacctcagccctttcgatatgaaaaatctcctgcaccatattctaagtgggaaagagtttggcgttgaaagaagtgtgcgccctatccactcctccacatccagccctaccatctccatccacgaggtgggccataccggagtcaccaaaactgagaggagtggcattaacagactgaggagtgaaatgaaacagatgactaggcggtttagtgctgatgaacagttcttttctgtgggccaggccgcgtccagcagtgcgcattcctccaagtctgcgaggtccagcaccccatcctcgcccactggcacgtcatcctcagactcgggaggacatcacatcggctggggtgagcggcagggccagtggctgcgcaggagaaggctggatggggccatcaacagggtccccgtgggattctaccagagggtgtggaagatcctccagaagtgccacggtctctccatcgatggttatgtcctcccatcctcgacgacccgagagatgaccccgcatgagatcaagtttgctgtccatgtcgaatcggtgctgaaccgcgtgccgcagcccgagtaccggcagctgctggtggaagccatcatggtgctgacgctgctctcggacacggagatgaccagcatcgggggcatcatccacgtggaccagatcgtgcagatggccagtcagctgttcttgcaggaccaggtgtcaattggtgccatggacaccctggagaaagaccaagccacaggaatctgccacttcttttatgacagcgctccgagtggggcttatgggacgatgacctacctaacaagagcagtggcttcttatttgcaggaattgttgcccaattcgggctgccagatgcaatagggtctcacctggaaacatgatcacactctcaatctgtcacgtgccccctagccttactgggaaccttctgtcccccaagatcccctgtgctatcaggaaagcatgtcccatcagaaacactctcggggggcaatggtagcactcaccctgaaactgatgtatgttaaagccacagagatagagctgaggagtcctgtgttcccccgcaaggagcaccccgggatcattttctaggttcatttctctggaacatttgctgtagcatctggtctcacggactctgaggaggaattggaaattggtctcttttgagtgcagagggaactgagacgccagcttaaattggctcttgcagagagttacagaaatagtttcgatgagctagtgacacatcctaaagatgcaaagatcctcctggcggcagtagccttgacaagggccacctcttcacaggatgcagtctgtctgtgcaccaaactcttcaccaaatagaacacttgtgtctctctgtgg

SEQ ID NO: 362 - protein, 1235 aa, Homo sapiens
MRSRSNSGVRLDGYARLVQQTILCYQNPVTGLLSASHEQKDAWVRDNIYSILAVWGLGMAYRKNADRDEDKAKAYELEQNVVKLMRGLLQCMMRQVAKVEKFKHTQSTKDSLHAKYNTATCGTVVGDDQWGHLQVDATSLFLLFLAQMTASGLRIIFTLDEVAFIQNLVFYIEAAYKVADYGMWERGDKTNQGIPELNASSVGMAKAALEAIDELDLFGAHGGRKSVIHVLPDEVEHCQSILFSMLPRASTSKEIDAGLLSIISFPAFAVEDVNLVNVTKNEIISKLQGRYGCCRFLRDGYKTPREDPNRLHYDPAELKLFENIECEWPVFWTYFIIDGVFSGDAVQVQEYREALEGILIRGKNGIRLVPELYAVPPNKVDEEYKNPHTVDRVPMGKVPHLWGQSLYILSSLLAEGFLAAGEIDPLNRRFSTSVKPDVVVQVTVLAENNHIKDLLRKHGVNVQSIADIHPIQVQPGRILSHIYAKLGRNKNMNLSGRPYRHIGVLGTSKLYVIRNQIFTFTPQFTDQHHFYLALDNEMIVEMLRIELAYLCTCWRMTGRPTLTFPISRTMLTNDGSDIHSAVLSTIRKLEDGYFGGARVKLGNLSEFLTTSFYTYLTFLDPDCDEKLFDNASEGTFSPDSDSDLVGYLEDTCNQESQDELDHYINHLLQSTSLRSYLPPLCKNTEDRHVFSAIHSTRDILSVMAKAKGLEVPFVPMTLPTKVLSAHRKSLNLVDSPQPLLEKVPESDFQWPRDDHGDVDCEKLVEQLKDCSNLQDQADILYILYVIKGPSWDTNLSGQHGVTVQNLLGELYGKAGLNQEWGLIRYISGLLRKKVEVLAEACTDLLSHQKQLTVGLPPEPREKIISAPLPPEELTKLIYEASGQDISIAVLTQEIVVYLAMYVRAQPSLFVEMLRLRIGLIIQVMATELARSLNCSGEEASESLMNLSPFDMKNLLHHILSGKEFGVERSVRPIHSSTSSPTISIHEVGHTGVTKTERSGINRLRSEMKQMTRRFSADEQFFSVGQAASSSAHSSKSARSSTPSSPTGTSSSDSGGHHIGWGERQGQWLRRRRLDGAINRVPVGFYQRVWKILQKCHGLSIDGYVLPSSTTREMTPHEIKFAVHVESVLNRVPQPEYRQLLVEAIMVLTLLSDTEMTSIGGIIHVDQIVQMASQLFLQDQVSIGAMDTLEKDQATGICHFFYDSAPSGAYGTMTYLTRAVASYLQELLPNSGCQMQ

SEQ ID NO: 363 - DNA, 486 bp, Homo sapiens
  misc_feature (29)..(29): n is a, c, g, or t
  misc_feature (73)..(73): n is a, c, g, or t
  misc_feature (81)..(81): n is a, c, g, or t
  misc_feature (95)..(95): n is a, c, g, or t
  misc_feature (108)..(108): n is a, c, g, or t
  misc_feature (110)..(110): n is a, c, g, or t
  misc_feature (167)..(167): n is a, c, g, or t
  misc_feature (448)..(448): n is a, c, g, or t
  misc_feature (473)..(473): n is a, c, g, or t
  misc_feature (480)..(480): n is a, c, g, or t
agattcggcactagggcttggctaaaagnaagggtctcgtgctgatggccctgtgcgcactgacccgcgctcngtcgtctngaacctggcgcccncgaccgtcgccgncnctgccccgagtctgttccccgccgcccagatgatgaacaatggcctcctccaacagncctctgccttgatgttgctcccctgccgcccagttcttacttctgtggcccttaatgccaactttgtgtcctggaagagtcgtaccaagtacaccattacaccagtgaagatgaggaagtctgggggccgagaccacacaggccgaatccgggtgcatggtattggcgggggccacaagcaacgttatcgaatgattgactttctgcgtttccggcctgaggagaccaagtcagggaccctttgagggagaaggtttattccaagtccgttatgattcctngtaggtcagcagacattaggttttnggttgcntggggg

SEQ ID NO: 364 - DNA, 280 bp, Homo sapiens
agccttgccttcgccgccgttggggctggaagttcccgccaggtccgtgccgggcgagagagatgctgcccggcccgccttgttttgaggcgagagaagtgtcccagacccatttcgccttgctgacggcgtcgagccctggccagacatgtccacagggttctccttcgggtccgggactctgggctccaccaccgtggccgccggcgggaccagcacaggcggcgttttctccttcggaaccggagcgtctagcaacccttctgtggggctcaatttt

SEQ ID NO: 365 - DNA, 5595 bp, Homo sapiens
atgagtcgacagtttagttccaggtctgggtaccgaagtggagggggcttcagctctggctctgctgggatcatcaactaccagcgcaggaccaccagcagctccacacgccgcagtggaggaggtggtgggagattttcaagctgtggtggtggtggtggtagctttggtgctggtggtggatttggaagtcggagtcttgttaaccttggtggcagtaaaagcatctccataagtgtggctagaggaggtggacgtggtagtggctttggtggtggttatggtggtggtggctttggtggtggtggctttggtggtggtggctttggtggaggtggcattgggggtggtggctttggtggttttggcagtggtggtggtggctttggtggaggtggttttgggggtggtggatatgggggtggttatggtcctgtctgccctcctggtggcatacaagaagtcactatcaaccagagccttcttcagcccctcaatgtggagattgaccctgagatccaaaaggtgaagtctcgagaaagggagcaaatcaagtcactcaacaaccaatttgcctccttcattgacaaggtgagtttctctctcattgcactggtagggctgccgctggtccacttgggattggtgcagtcaaaacacagtaggtttgaacctcaagtttccatgtttacatgattaaaaggatgttttgtggaatggtctcctaggagatatgttagatgtatgcttgtgaatggtgttaatgactctctctttgacaaagggttcgtggtcgacctaaaggtgggtcagtgtgacattaacatttaagtgctttttattcagctcttgagcggaattgggactcatatctgttgaatgaagataatagaaatggggctaactgaactttccagggtgcaagtgagaaccctggaaaggtcttcctaacctagaaagggagttgagtgtgaacatagtatagagtgttattgtagcagaaaacatgtggtcagtcagtgccaaacatcttttgctgtcagaggggagctctgccttctaataattttacattggtactggatgaggctagagtttttttatactaatatctccaaaaatcagctctaaaaaactcagataaaccatttttttaattttttgcttaatcattaatagtgccaatccaaggttatccacaacaaatttcaaatccaattctgaattttcctgatatacttttgaaatgtgtgtgtgtcctggggatgcaaaccagtttttatggtaatatacctaacaaaattttggaaggcaaatctcttaaataccatgcacctatttcaaaacataattgcaataattctgtatgcgctttgctattggtatttgtttagttactcccttccaagccctctctgaattaacaagttgggttttattatgcagatgatattaacttgatcatcttcttcctatttctctgtcatggtcagaagataggaattgaggttcttttccaaatgaggcacagttctccatggctatgagactccatttatgcatcaggagtaaaggggtcttgtgtttttaggtgaggttcctggagcagcagaaccaggtactgcaaacaaaatgggagctgctgcagcaggtagatacctccactagaacccataatttagagccctactttgagtcattcatcaacaatctccgaagaagagtggaccaactgaagagtgatcaatctcggttggattcggaactgaagaacatgcaggacatggtggaggattaccggaacaagtaagggaccctgtctgggcagttcttaacttttgctgtaaaagagttccagaaagtaataagctaagatcatgaagcagcatgtagctatgtcttttcttaggttagaggcacatcagtttgacattttcagaaatcttcattttctcaggagatggaaatagtctagtggttttattgctcagtagaaagtagtggccaatatgtcctaggttcataatagaaaggcagtgataggcaatgccacctttagtttagaatgctggacttcaggtcttaccacctctgaatctcctaattgtttctgctttcctgcaggtatgaggatgaaatcaacaagcggacaaatgcagagaatgaatttgtgaccatcaagaaggtaagcaaattctgtaggacggaactcacatttgaaataaataagggaagagggtctccaattactaagcagaaagcagccatgatatggagagccaggtagtagacctggggagtatatggagtggggctatattttcacatcatcatggacctggactgatccaggcacttggcttctccatatttcccagcaccttacatagtaagtggagtggcagattctcagcaagccaggcacactcccttgatggtgctatccgggggtgggacagttagggaactgtgatttacctggggcaaaaaggagtggagtagacccaaagctcctttttttgcttggagaatcccctcacaggtaatgagagggacctgccctggagagaacgtgccttcatgatgtcccttgttcctctaggatgtggatggtgcttatatgaccaaggtggaccttcaggccaaacttgacaacttgcagcaggaaattgatttccttacagcactctaccaagcagtaagtcttccagtttcaaccaagtttatctaaatggagagtttttaagcctgaacccacaacgattcagaagaatagatatttatcttttatttcctgactgctttctctgtctaagttgttttttgttttagtgctgtaagagtcactaacctattatgtcttgcaggagttgtctcagatgcagactcaaatcagtgaaactaatgtcatcctctctatggacaacaaccgcagtctcgacctggacagcatcattgctgaggtcaaggcccagaacgaggatatagcccagaagagcaaagctgaggccgagtccttgtaccagagcaaggtgagtggctgaaagcctagccagtttccctgaaatggcttgtcttgctatcctgtgttatctcatgtatgtgtgcctgtgccatgctgagttctgcctacatttaacaaacgctatctaccatctttagtatgaagagctgcagatcactgctggcagacatggggatagtgtgagaaattcaaagatagaaatttctgagctgaatcgtgtgatccagagacttagatctgaaatcgacaatgtcaagaagcaggtatgtgctttctccttctaccactcagctgtatggaatgggggtaaccctcaggtaaagggcgagtgctttcctagttttgaatcttggcaattcatcccaaggctacattattatccctggttccttttgtgactatgctagtttccagaatgcagcctcatgctgggttctctttagggaaatctgtgagaatggcctagtagagaaagatgggatggtcaatgtgagtgatctagcctatgacccaaagtggacttaagagttggggagtgagaggaagggcagccaggaggttttagagtaggtgtttagaagaatgtcaagtctgtaagggttgtaggagccttgactcagggccaagagaggctgttgagttatccctaaggtcttttaaggaagtcaacatggtgatgtgttatctggaggtgggtgtgagatgacttaaggccaagtggttctgttggactcattattggcctcactggagtggggagaccaattgggatgaggaggcctagtggggaatgcatattatgagagggtgtcatattctttttcagatctccaacttgcagcagtccatcagtgatgcagagcagcgtggcgagaatgccctcaaggatgccaagaacaagctgaatgacctggaggatgccctgcagcaggccaaggaagacctggcccgcctgctgcgtgactaccaggagctgatgaacaccaagctggccctggatctggagattgccacctacaggaccctcctggagggagaagaaagcaggtgaggaagggacgctgggagtcgaacctcttctcatggtcttccttccttgcaagctgattgttgttgaagatgcagccatctgattgcagcttgtgctgggtatggggaaatgaaaagtacacggagcaggaggaaggacctagttttactttgggagctggagtcccaagctgtttatttttttcttctagggctgtaacatatctagaaagagctttgaggtggagcaaattattctttatctgggctgcctcagatggcagctggcctaaagtcggcatctttagagggggccttcattggctgcaaggctcttgtctcgtttatatgggaatttctccgtgtttgtactcttgctgagaaaaaatgacaggtctgggaggccagaggggattggattaagtttcagattaagtgcattggagaagacccagatggggaaagtcttcaaggtggtggagcggggaatggggaagcggtttgggaagctggagtgtcctgaggaattttcttaattttctcctacaggatgtctggagaatgtgccccgaacgtgagtgtgtgtaagtacaagtcgatttctcaggggcatgtgcaggctttgttgggctggaaacggagttgaggttgaaaataactgagcttcctcttgcagctgtgagcacaagccacaccaccatcagtggaggtggcagccgaggaggtggcggcggtggctacggctctggaggtagcagctatggctccggaggtggtagctatggttctggaggtggcggcggcggcggccgtggcagctatggctccggaggtagcagctacggctccggaggtggcagctatggctctggaggtggcggcggcggccatggcagctacggctccggaagcagcagtgggggctacagaggtggctctggaggcggcggcggcggcagctctggcggccggggctctggcggcgggagctctggaggctccataggaggccggggatccagctctgggggtgtcaagtcctctggtggcagttccagcgtgaggtttgtttctaccacttattccggagtaaccagataaagagatgccctctgtttcattagctctagttctcccccagcatcactaacaaatatgcttggcaagaccgaggtcgatttgtcccagccttaccggagaaaagagctatggttagttacactagctcatcctattcccccagctctttcttttctgctgtttcccaatgaagttttcagatcagtggcaatctcagttcccttgctatgaccctgctttgttctttcccgagaaacagttcagcagtgaccaccacccacatgacatttcaagcaccaccttaagccagccagagtaggaccagttagacctagggtgtggacagctccttgcatcttaacactgtgctgttttggttttgtacataaggtgtaagcaagttgtttttcttttgtgaaatggtcttaaactccccatttccttgttttgctgctaataaa

SEQ ID NO: 366 - protein, 644 aa, Homo sapiens
MSRQFSSRSGYRSGGGFSSGSAGIINYQRRTTSSSTRRSGGGGGRFSSCGGGGGSFGAGGGFGSRSLVNLGGSKSISISVARGGGRGSGFGGGYGGGGFGGGGFGGGGFGGGGIGGGGFGGFGSGGGGFGGGGFGGGGYGGGYGPVCPPGGIQEVTINQSLLQPLNVEIDPEIQKVKSREREQIKSLNNQFASFIDKVRFLEQQNQVLQTKWELLQQVDTSTRTHNLEPYFESFINNLRRRVDQLKSDQSRLDSELKNMQDMVEDYRNKYEDEINKRTNAENEFVTIKKDVDGAYMTKVDLQAKLDNLQQEIDFLTALYQAELSQMQTQISETNVILSMDNNRSLDLDSIIAEVKAQNEDIAQKSKAEAESLYQSKYEELQITAGRHGDSVRNSKIEISELNRVIQRLRSEIDNVKKQISNLQQSISDAEQRGENALKDAKNKLNDLEDALQQAKEDLARLLRDYQELMNTKLALDLEIATYRTLLEGEESRMSGECAPNVSVSVSTSHTTISGGGSRGGGGGGYGSGGSSYGSGGGSYGSGGGGGGGRGSYGSGGSSYGSGGGSYGSGGGGGGHGSYGSGSSSGGYRGGSGGGGGGSSGGRGSGGGSSGGSIGGRGSSSGGVKSSGGSSSVRFVSTTYSGVTR

SEQ ID NO: 367 - DNA, 11956 bp, Homo sapiens
agcgaaccatcggggcggccgggagccatgttggagcggcgggaggcggcagcagcgtcggggatgctgtggtgggggcggaaaaagccagggccgcacgccggaggggctccggccgcggagtagatggtgcccagagggcggcgggggtgcggagagacaggcggaggggcgggggcccggggcggcggcaggggcccgggagggggcccgagcggcggggccagcccaaggcccggaccggggcggggggcggtggaggccgtgcagggaggcgggagatgatggcgaggcggccgccgtggcggggcctcggggaacggtcgacccccatactcctgctccttctcctctctttgttccccctcagccaggaggagctggggggcggtgggcaccagggctgggacccaggcttagctgccactacggggccaagggcgcatatcggtggcggagccttagctctttgtccggagtcttccggggtccgggaggatggggggcctggcctgggggtcagggagcctatcttcgtggggctccgagggagaaggcaaagcgcccggaatagtcgagggccccctgagcagccgaatgaggagctggggattgaacacggcgtccagccattgggcagccgcgaacgagagacaggacagggaccagggtctgtgttatactggcgcccagaggtctcctcttgcgggcggacaggacctttgcaaagaggtagtctgtcaccaggggctctgtcctcaggggtcccgggctcggggaacagctcgcccctcccttcagactttttgattcggcaccacggtcccaagccggtgtcctcccagcggaacgctgggacaggctcccgcaaaagagtgggcaccgcgcgctgctgtggggaattatgggcaacagggagcaagggtcagggcgagagagccacgacatccggagcagaaaggacagccccccggcggaactgtcttccaggggcctcgggatctggccccgagctggattcagcaccacgcacggcgaggacagctcctgcatcaggttcagcaccccgcgagtctcggacagctcccgagccggcgcccaagcgcatgcgctcccggggtctcttccgctgccgcttcctcccgcagcgccccgggccgcgtcccccgggactcccggcccgtcctgaagccaggaaagtaacctcggcgaaccgggcacgctttcgtcgcgccgcaaaccgccacccgcagtttccgcagtacaactaccagacgctggtgccggagaatgaggcagcaggcaccgcggtgctacgcgtggttgctcaggacccggacgccggcgaggccgggcgcctagtctactcgctggcggcactcatgaacagccgctcgctggagctgttcagcatcgacccgcagagcggccttatccgtacggcggcagctctggaccgcgagagcatggagcgtcactacctgcgtgtgaccgcgcaggaccacgggtcgccgcgcctctcggccaccacgatggtggccgtgacagtagccgaccgcaacgaccactcgccggtttttgagcaagcgcagtaccgggagacccttcgcgagaatgtggaggagggctaccctatcctgcagctgcgtgccactgacggcgacgcgccccccaacgccaacctgcgctaccgcttcgtggggccgccagctgcgcgcgctgcagctgccgccgccttcgagattgatccacgctccggcctcatcagcaccagcggccgagtggaccgcgagcacatggaaagctatgagctggtggtggaagccagcgaccagggccaggaacccgggccgcgctcggccactgtgcgcgtacacataactgtgctagacgagaacgacaatgctcctcagttcagcgagaagcgctacgtggcgcaggtgcgcgaggatgtgcgcccccacacagtcgtgctgcgcgtcacggccactgaccgggacaaggacgccaacggattggtgcactacaacatcatcagtggcaatagccgtggacactttgccatcgacagcctcactggcgagatccaggtggtggcacctctggacttcgaggcagagagagagtatgccttgcgcatcagggcgcaggatgctggccggccaccgctgtccaacaacacgggcctggccagcatccaggtggtggacatcaatgaccacattcctatttttgtcagcacgcccttccaagtttctgtcttggaaaatgctcccttgggtcactcagtcatccacattcaggcagtcgatgcagaccatggggagaatgccagattggagtactccctaactggtgtggcacctgatactccttttgtgataaacagcgccactggctgggtctctgtgagtggtcccctggaccgtgagtctgtggagcattacttctttggtgtggaggctcgagaccatggctcacccccactctctgcctcagccagtgtcaccgtgactgtgctggacgttaatgacaatcggcctgagttcacaatgaaggagtaccacctacgactgaatgaggatgcagctgtgggcaccagtgtggtcagcgtgaccgcagtagaccgtgatgccaacagtgccatcagctaccagatcacaggcggcaacacccggaatcgctttgccatcagcacccaggggggtgtgggtctggtgactctggctctgccactggactacaagcaggaacgctacttcaagctggtactaactgcatctgaccgtgcccttcatgatcactgctatgtgcacatcaacatcacagatgccaacactcatcggccggtctttcaaagtgcccactactcagtgagtgtgaatgaagatcggccaatgggtagcaccatagtggtcatcagtgcctctgatgatgacgtgggtgagaatgctcgtatcacctatctcctggaggacaacctgccccagttccgcattgatgcagactcaggagccattacattacaggccccattagactatgaggaccaggtgacctacaccctggctatcacagctcgggacaatggcatcccacagaaggcagacactacttatgtggaggtgatggtcaatgacgtgaatgacaatgctccacaatttgtggcctcccactatacagggctggtctctgaggatgccccacctttcaccagtgtcctgcagatctcagccactgaccgggatgctcatgccaatggccgggtccagtacactttccagaatggtgaagatggggatggagattttaccattgagcccacctctggaattgtccgtacagtaaggcggctagaccgggaggcagtatcagtgtatgagttgactgcctacgcagtggacagaggtgtgcccccactccggactccagtcagtatccaggtgatggtgcaggatgtgaacgacaatgcacctgtcttcccagctgaggagtttgaggtgcgggtgaaagagaatagcattgtgggctcagtggtggcccagatcactgcagtggaccctgacgaaggccccaatgcccatataatgtaccagatcgtggaggggaacatccctgagctgttccaaatggacatcttctctggagaactgacggcactcattgacctagactatgaggctcgccaagaatatgtgattgtggtgcaggccacatctgctcctttggtcagccgggccactgtgcacgtccgcctggttgaccagaatgacaacagccctgtgctcaacaacttccagatcctcttcaacaactatgtatccaaccgttcagacaccttcccgtcgggcattattgggcgcatcccagcttatgaccccgatgtctccgaccacctcttctactcctttgagcgtggcaatgagctgcagctgctggtagtcaaccagaccagtggggagctgcgactcagccgaaagctagacaataaccgcccactggtggcctccatgttggtgactgtcacagatggcctgcacagcgtgacggcgcagtgtgtgctgcgcgtggtcatcatcacggaggagttgctggccaacagcctgaccgtgcgccttgagaacatgtggcaggagcgcttcctgtcaccgctgctgggccgcttcctcgagggcgtggctgcggtgctcgctacgcccgctgaggacgtcttcatcttcaacatccagaacgacacagacgtagggggcaccgtgctcaatgtgagtttctcggcgctagctccacgtggggccggggcgggcgctgcagggccctggttcagctccgaggagctgcaggagcagttgtacgtgcgccgggcggcgctggcggctcgctccctgctcgacgtactgcccttcgacgacaacgtgtgcctgcgagagccctgtgagaactacatgaaatgcgtgtccgtgctccgctttgactcgtccgcgcccttcctggcctcggcctccacgctgttccgacccatccagcccatcgctggcctgcgctgccgctgcccgcccggattcacgggagacttttgcgagaccgagctcgacctctgctactccaacccatgtcgcaacggcggagcctgcgcgcggcgcgagggaggctacacgtgcgtctgccgcccgcgcttcaccggagaggactgcgagctggacaccgaggccggccgctgcgtgccgggcgtctgccgcaacgggggcacctgcaccgacgcgcccaacggcggctttcgctgccagtgcccggcaggcggcgccttcgagggcccgcgctgcgaggtggctgcgcgctccttcccgcccagttcgttcgtcatgtttcgcggcctgcggcagcgattccaccttacgctgtccctctcgttcgcgacagtgcagcagagcgggctgctcttctacaacgggcgcctgaacgagaagcacgacttcctggccctggaactcgtggctggccaagtgcggctcacatattccacgggtgaatccaacaccgtggtcagccccacagttccagggggcttgagtgacgggcaatggcatacagtgcatctgagatactacaacaagccccggacagatgccctagggggtgcacagggcccctccaaggacaaggtggctgtgctaagcgtggatgattgtgatgtggccgtggctctgcagtttggtgctgagattggcaactactcatgcgcggctgctggtgtgcaaacaagctccaagaagtccctggacctgacgggccctcttcttctgggaggtgtccccaacctccccgagaacttccccgtatcccataaggacttcatcggctgtatgcgggacctgcacattgatggccgccgagtggacatggcggcttttgtcgcaaataatggcaccatggcaggctgccaagccaagctacacttttgtgactcaggcccctgcaagaacagtggcttctgctcggagcgctggggcagcttcagctgcgactgccctgtgggcttcggcggcaaagactgtcagcttactatggcccatccccaccatttccgtggcaacggcacactgagctggaactttggaagtgacatggctgtgtctgtgccatggtacctggggctggcatttcggacacgggcaacgcagggggtcctgatgcaagtgcaggctgggccacacagcacgctcctttgccagctagatcgggggttactgtctgtgacagtgaccaggggctcgggccgtgcttcccatctccttctggaccaggtgactgtcagtgatggccggtggcacgatctgcggctggagttgcaggaggaaccaggtggccggcggggccaccatgtccttatggtctcactggactttagcctcttccaggacaccatggcggtggggagtgagctgcagggcctgaaggtaaagcagctccacgtgggaggcctgccccccggcagtgcagaggaggctcctcagggtctggttggctgcatccagggggtgtggctcggctccacaccctctggctccccggccctgctaccccccagccaccgagtgaatgcggagcctggctgtgttgtgaccaacgcctgtgcctctgggccctgcccacctcacgcagactgccgggacctctggcagaccttttcttgcacctgccagccaggttactacggcccaggctgtgtggatgcctgcctcctgaacccctgtcagaaccagggatcatgccggcacctgccaggagccccccatggctatacctgtgactgtgtgggtggctatttcgggcaccactgtgagcacaggatggaccagcagtgcccacggggctggtgggggagcccaacctgtggcccctgcaactgtgatgttcacaaaggttttgatcccaactgcaacaagacaaatgggcagtgtcactgcaaggagttccactaccgaccgcggggcagtgactcttgcctcccatgtgactgctaccctgtgggctccacctcgcgctcatgtgcaccccacagcgggcagtgcccctgtcgcccaggagcccttggccgccagtgcaacagctgtgacagtcccttcgcagaggtgacagccagcggctgccgggtgctctatgatgcctgccctaagtccctgagatctggtgtgtggtggccccagacaaagtttggcgtcctggccacagtgccctgtccccggggggccctgggtgctgctgtgcggctgtgtgatgaggcccagggttggctggagcccgacctcttcaactgtacctcccctgcctttcgagagctcagtctgctgctggatggcctagagctgaacaagacggcactggataccatggaggccaagaagctggctcagcggctacgggaggtgactggccacactgaccactattttagccaagatgttcgagtcactgcccgcctgctggcccacctgctggccttcgagagccatcagcagggcttcgggctgacagccacacaggatgcccacttcaatgagaatctgctgtgggccggctctgcactgcttgccccagagacaggggacttgtgggcggcgctggggcagcgggcccctgggggctccccaggcagcgcgggactggtgaggcacctggaggagtatgcagccacactcgcaaggaatatggaactcacatacctgaatcccatggggctggtgacgcctaatatcatgctcagcattgaccgcatggagcaccccagttctccccggggggcccgtcgctaccctcgctaccatagcaacctctttcgaggccaggatgcctgggatcctcacacccatgtgctgctgccttcccagtccccacggccatccccatctgaagttctgcccacaagcagcagcatagaaaactccaccacctcaagtgtggtccccccaccagccccgccagagccagagcctgggatctccattatcattctcctcgtttaccgcaccttagggggactgctccctgcccagttccaggcagaacgccgaggtgccaggcttcctcagaaccccgtcatgaactccccggtggtcagcgtggctgtgttccacggacgcaacttcctaaggggaatcctggagtcccccatcagcctagagtttcgcctgctacagacagcgaatcggagcaaggcgatctgtgtgcagtgggacccacctggcctggcggagcagcatggtgtgtggacagcacgggactgcgagctggtgcacaggaatgggtcccacgcacggtgtcgctgcagccggacagggacctttggggtcctcatggatgcctctccccgtgagaggctggagggcgacctggagctgctggctgtgttcacccacgtggtcgtggctgtgtctgtggctgcgctggtgctgactgcagccatcctgctgagcctgcgcagcctcaagtccaatgtgcgtgggatccatgccaatgtggcagccgccctgggggtggcagagctcctcttcctgctggggattcacaggacccacaatcagctggtgtgcactgcagtcgccatcctcctgcactacttcttcctcagcaccttcgcgtggctcttcgtgcaggggctgcacctctaccgcatgcaggttgagccacgcaacgtggaccgcggcgccatgcgcttctaccatgccctgggctggggcgtccctgctgtgctgctgggccttgctgtgggcctggaccctgagggctatgggaaccctgacttctgctggatctcagtccacgagcccctcatctggagctttgctggccctgttgtcctggtcatagtgatgaacgggaccatgtttctcctcgctgcccgcacatcctgctccacagggcagagggaggccaagaagacctctgcactgacccttcgcagctccttcctgctgcttctgctggtcagtgcctcctggctctttgggctcctggcagtcaaccacagcatcctagccttccactacctccatgctggactctgcggcctccagggcctggcggtgctgctgctcttctgtgtcctaaatgcagatgctcgggctgcctggatgccagcctgtctgggcaggaaggcagcgcctgaggaggcaaggccagcacctgggctgggacctggggcctacaacaacacggctctctttgaggagagtggcctcatccgcatcactctgggcgcctccaccgtctcctctgtgagcagtgcccgctccggccggacccaggaccaggacagccagcggggccgcagctacctcagggacaatgtcctggttcgacatggctcagccgctgaccacactgaccacagcctccaggctcatgctggccccactgacctggacgtggccatgttccatcgagatgctggcgcagactccgactctgacagtgacctgtccttggaggaggagaggagtctctccattccatcttcagaaagcgaggacaatggccggacgcgggggcgcttccaacggccactctgccgagcagcccagagtgagaggctcctcacccaccccaaagatgtggatggcaatgacctcctgtcctactggccagccctgggggagtgcgaggcagccccctgtgctctgcagacttggggctctgaaaggcgcctggggctggacaccagcaaggatgcagctaacaacaaccagccagacccggccctgaccagtggggatgagacttctctgggccgggcccagcgccagaggaaaggcatcctgaagaaccggttgcaatacccactggtgccacagacccgaggtgcccctgagctgtcctggtgccgtgcagccaccttgggccaccgtgcagtgccagctgcctcttacggtcgcatctatgctggcgggggcacgggcagcctttcacagccagccagccgctactcttctagagaacagctggacctgctcctccggcggcaactgagccgtgagcgactagaggaagcccctgcccctgttctacgtcccctgagccggccagggtcccaggaatgcatggatgctgcaccaggccgactggagcccaaagatcggggcagcaccctgccacggaggcagccacctcgggactaccctggcgccatggctggccgcttcgggtcacgggatgcgctcgacttaggggcacctcgagagtggttgagcacgctgcctccgccccgccgcacccgggaccttgacccacagcccccacctctgcccctgtctccccagcggcaactctcaagggaccccctcttgccatcccggccgctggactctctgtctaggagctcgaactctcgggagcagctggaccaggtgcctagccggcacccctcacgagaagcccttgggccactcccgcagctgctcagagctagggaggactcggtcagtggccccagccatggcccctccacagaacagttggacattctttcctccatccttgcctctttcaactcctcggccctctcctctgtgcaatcttcaagcacacccttgggccctcacaccactgccacaccttctgccacagcctctgtgcttgggccctccacgccacgttctgccacgtctcacagcatctcggagctgtcgccagactcagaagttcccagaagtgagggtcactcctgaggggatgacggcgtggacgaggaacagctgagggcgacagaggatctaggctaacaggagagactccaggagtgggggcagatcccaaggcagcctcctgctccccagtggtgggtgccccagctctacctggtgtggcagggctgaggctccatgtgcatctgtgagcatgcgtgtgacaggtgcagagacgggggactggagggagacttttatacgttttgtacctttgtaaccagagagatgcttatgttatttttcagcttttctgtctcctggggggtttgaggctgggctgggagggggagggagatagagggagagatgcagtttgaccccatttgggtcctgagcaaaccctatgctcatctctctctccttcctggggtggactcagatgggtgggacacatgccttcctccccctattccacccccaagttgatctgagtatcgtcaggggcccaaagtacagaattgttctttgctttttattgaatgctccaaaggccaaacttctggggctgggggttggtcttggaaacaggggtcctctgacttcctcatgggggcttgctcataccgcccctcctggtggatgtgtgtgtttattatgtggagtccctgccacttactgccttatgacctaggactgatgctgtggggtgctggtggagcagctgatgtcgtgtttacagagcaaggcttccctgtctcccacggggaggggctcgggcctctagtcagacattcctgcagagggtcggtggaggggtcattcacctgcccctgcagcaagcaaaagttgtctgtggtgccatttgattccctgacactgccccctgcttgaattgattccgaagggtagggtgggaaggtgagcaaagggagcagaaacaagggaattcaagacccagaatgtaggtgccactgcctcctatgtttacaggatcctccgtggccctaggcacctgggctgcaggaagtgactccgttccactcctcctttattcccttaaaaagggaaaaatgactgttacgaccctgttcacaaaactcttacttttgctattttgtctgctgtccagaactgaagactttaaaattttgttactgtttacaagtccagattcaaaaaatgtttttactttgtttacaactcaaaactttgagttttacactttgtttacagtagataattttttttcctttgtttccaagtgaaaggtagggaaagtgggagagggacttggaggacccacctgtgaggaccctgacctggccatcttgaggggttttctaacccccaggtctcccaggccgaaggtcagccttgagtcccgtttaacagcagatccagaagaccttgagagtaggcgtcctctaaccacgggggagagtggctgtgcagggctggggggtggtctgtgcagacacctcctcacccaccaccccatgcatactcttgggaagcagcttcctgggagattagaaattctacttccctgactggagctaaatcccaccagccaggacccaaactctccttaccgagaaggaccccagctcttgaagggctgagtggcctgctgggggtgggagggtgtctttactatgtcctaggtttcgtagatgcccctctctggggttcccctcctccagcccagcggccctctttcctgtctgtgtaaattgttccgtgaagccgcgctctgttttgggaataaacttctatag

SEQ ID NO: 368 - protein, 3312 aa, Homo sapiens
MMARRPPWRGLGERSTPILLLLLLSLFPLSQEELGGGGHQGWDPGLAATTGPRAHIGGGALALCPESSGVREDGGPGLGVREPIFVGLRGRRQSARNSRGPPEQPNEELGIEHGVQPLGSRERETGQGPGSVLYWRPEVSSCGRTGPLQRGSLSPGALSSGVPGSGNSSPLPSDFLIRHHGPKPVSSQRNAGTGSRKRVGTARCCGELWATGSKGQGERATTSGAERTAPRRNCLPGASGSGPELDSAPRTARTAPASGSAPRESRTAPEPAPKRMRSRGLFRCRFLPQRPGPRPPGLPARPEARKVTSANRARFRRAANRHPQFPQYNYQTLVPENEAAGTAVLRVVAQDPDAGEAGRLVYSLAALMNSRSLELFSIDPQSGLIRTAAALDRESMERHYLRVTAQDHGSPRLSATTMVAVTVADRNDHSPVFEQAQYRETLRENVEEGYPILQLRATDGDAPPNANLRYRFVGPPAARAAAAAAFEIDPRSGLISTSGRVDREHMESYELVVEASDQGQEPGPRSATVRVHITVLDENDNAPQFSEKRYVAQVREDVRPHTVVLRVTATDRDKDANGLVHYNIISGNSRGHFAIDSLTGEIQVVAPLDFEAEREYALRIRAQDAGRPPLSNNTGLASIQVVDINDHIPIFVSTPFQVSVLENAPLGHSVIHIQAVDADHGENARLEYSLTGVAPDTPFVINSATGWVSVSGPLDRESVEHYFFGVEARDHGSPPLSASASVTVTVLDVNDNRPEFTMKEYHLRLNEDAAVGTSVVSVTAVDRDANSAISYQITGGNTRNRFAISTQGGVGLVTLALPLDYKQERYFKLVLTASDRALHDHCYVHINITDANTHRPVFQSAHYSVSVNEDRPMGSTIVVISASDDDVGENARITYLLEDNLPQFRIDADSGAITLQAPLDYEDQVTYTLAITARDNGIPQKADTTYVEVMVNDVNDNAPQFVASHYTGLVSEDAPPFTSVLQISATDRDAHANGRVQYTFQNGEDGDGDFTIEPTSGIVRTVRRLDREAVSVYELTAYAVDRGVPPLRTPVSIQVMVQDVNDNAPVFPAEEFEVRVKENSIVGSVVAQITAVDPDEGPNAHIMYQIVEGNIPELFQMDIFSGELTALIDLDYEARQEYVIVVQATSAPLVSRATVHVRLVDQNDNSPVLNNFQILFNNYVSNRSDTFPSGIIGRIPAYDPDVSDHLFYSFERGNELQLLVVNQTSGELRLSRKLDNNRPLVASMLVTVTDGLHSVTAQCVLRVVIITEELLANSLTVRLENMWQERFLSPLLGRFLEGVAAVLATPAEDVFIFNIQNDTDVGGTVLNVSFSALAPRGAGAGAAGPWFSSEELQEQLYVRRAALAARSLLDVLPFDDNVCLREPCENYMKCVSVLRFDSSAPFLASASTLFRPIQPIAGLRCRCPPGFTGDFCETELDLCYSNPCRNGGACARREGGYTCVCRPRFTGEDCELDTEAGRCVPGVCRNGGTCTDAPNGGFRCQCPAGGAFEGPRCEVAARSFPPSSFVMFRGLRQRFHLTLSLSFATVQQSGLLFYNGRLNEKHDFLALELVAGQVRLTYSTGESNTVVSPTVPGGLSDGQWHTVHLRYYNKPRTDALGGAQGPSKDKVAVLSVDDCDVAVALQFGAEIGNYSCAAAGVQTSSKKSLDLTGPLLLGGVPNLPENFPVSHKDFIGCMRDLHIDGRRVDMAAFVANNGTMAGCQAKLHFCDSGPCKNSGFCSERWGSFSCDCPVGFGGKDCQLTMAHPHHFRGNGTLSWNFGSDMAVSVPWYLGLAFRTRATQGVLMQVQAGPHSTLLCQLDRGLLSVTVTRGSGRASHLLLDQVTVSDGRWHDLRLELQEEPGGRRGHHVLMVSLDFSLFQDTMAVGSELQGLKVKQLHVGGLPPGSAEEAPQGLVGCIQGVWLGSTPSGSPALLPPSHRVNAEPGCVVTNACASGPCPPHADCRDLWQTFSCTCQPGYYGPGCVDACLLNPCQNQGSCRHLPGAPHGYTCDCVGGYFGHHCEHRMDQQCPRGWWGSPTCGPCNCDVHKGFDPNCNKTNGQCHCKEFHYRPRGSDSCLPCDCYPVGSTSRSCAPHSGQCPCRPGALGRQCNSCDSPFAEVTASGCRVLYDACPKSLRSGVWWPQTKFGVLATVPCPRGALGAAVRLCDEAQGWLEPDLFNCTSPAFRELSLLLDGLELNKTALDTMEAKKLAQRLREVTGHTDHYFSQDVRVTARLLAHLLAFESHQQGFGLTATQDAHFNENLLWAGSALLAPETGDLWAALGQRAPGGSPGSAGLVRHLEEYAATLARNMELTYLNPMGLVTPNIMLSIDRMEHPSSPRGARRYPRYHSNLFRGQDAWDPHTHVLLPSQSPRPSPSEVLPTSSSIENSTTSSVVPPPAPPEPEPGISIIILLVYRTLGGLLPAQFQAERRGARLPQNPVMNSPVVSVAVFHGRNFLRGILESPISLEFRLLQTANRSKAICVQWDPPGLAEQHGVWTARDCELVHRNGSHARCRCSRTGTFGVLMDASPRERLEGDLELLAVFTHVVVAVSVAALVLTAAILLSLRSLKSNVRGIHANVAAALGVAELLFLLGIHRTHNQLVCTAVAILLHYFFLSTFAWLFVQGLHLYRMQVEPRNVDRGAMRFYHALGWGVPAVLLGLAVGLDPEGYGNPDFCWISVHEPLIWSFAGPVVLVIVMNGTMFLLAARTSCSTGQREAKKTSALTLRSSFLLLLLVSASWLFGLLAVNHSILAFHYLHAGLCGLQGLAVLLLFCVLNADARAAWMPACLGRKAAPEEARPAPGLGPGAYNNTALFEESGLIRITLGASTVSSVSSARSGRTQDQDSQRGRSYLRDNVLVRHGSAADHTDHSLQAHAGPTDLDVAMFHRDAGADSDSDSDLSLEEERSLSIPSSESEDNGRTRGRFQRPLCRAAQSERLLTHPKDVDGNDLLSYWPALGECEAAPCALQTWGSERRLGLDTSKDAANNNQPDPALTSGDETSLGRAQRQRKGILKNRLQYPLVPQTRGAPELSWCRAATLGHRAVPAASYGRIYAGGGTGSLSQPASRYSSREQLDLLLRRQLSRERLEEAPAPVLRPLSRPGSQECMDAAPGRLEPKDRGSTLPRRQPPRDYPGAMAGRFGSRDALDLGAPREWLSTLPPPRRTRDLDPQPPPLPLSPQRQLSRDPLLPSRPLDSLSRSSNSREQLDQVPSRHPSREALGPLPQLLRAREDSVSGPSHGPSTEQLDILSSILASFNSSALSSVQSSSTPLGPHTTATPSATASVLGPSTPRSATSHSISELSPDSEVPRSEGHS

SEQ ID NO: 369 - DNA, 487 bp, Homo sapiens
gcggccgcgaccgccggggacgagcttggaggaaaaggaaccgggagccgcccacccgggggcgctctccggacccccagggtcctagcgcgcggcccttaccgagcctgggcgcccggatttcggcagcggatcgcctttccgggttggcggcccgcctgattgggaacagccggccggttgccgggggaacgcgggagtcgggcccgacctgagccacgcgggcttggtgcccacctgtgcgcgccgcctgcgaagaaggaacggtctagggagaaggcgccgccggccgcccccgtccccaccgcggccgtcgctggagagttcgagccgcctagcgcccctggagctccccaaccatgaagctcaacttctccctgcgactgcggatcttcaacctcaactgctggggcattccgtacttgagcaagcaccgggccgaccgcatgaggcgcctgggagactttctgaaccaggagagcttcga

SEQ ID NO: 370 - DNA, 372 bp, Homo sapiens
  misc_feature (209)..(209): n is a, c, g, or t
  misc_feature (236)..(236): n is a, c, g, or t
  misc_feature (257)..(257): n is a, c, g, or t
  misc_feature (283)..(283): n is a, c, g, or t
  misc_feature (304)..(304): n is a, c, g, or t
  misc_feature (318)..(318): n is a, c, g, or t
  misc_feature (352)..(352): n is a, c, g, or t
  misc_feature (355)..(355): n is a, c, g, or t
  misc_feature (360)..(360): n is a, c, g, or t
  misc_feature (367)..(367): n is a, c, g, or t
ccacgcattttccaggataactgtgactccaggcccgcaatggatgccctgcaactagcaaattcggcttttgcgtctgatctgttcaaacaactatgtgaaaaggagccactgggcaatgtcctcttctctccaatctgtctctccacctctctgtcacttgctcaagtgggtgctaaaggtgacactgcaaatgaaattggacaggntcttcattttgaaaatgtcaaagatgnaccctttggatttcaaacagnaacatcggattgtaaacaaacttagntccttttactcactgaaactnatcaagcggctctncgtagacaaatctctcgaatctttctacagagtntantcagntctacgnagaga

SEQ ID NO: 371 - DNA, 361 bp, Homo sapiens
tttttttttttttttttcaatcatgacatctttattataccgtagatgaatatttgttaaataaaaataggtacagcaagtgtacaataagaccagtagttctccttcagaactctacccatttttcagaggaaggaaacacttttccagaatacaatgctcaagaaatgtaagccagatcccgcttgtatgaggtatcttaagtagtcagactctcaaaaacagaaagcagaataatggtgccaagagctggggcaggcagggggaaggggaaaagaggagttgttcggtgggtatagaacttcagaattacaagatgagaaagttccgggggtctgtttcacaacatgcatggagttaa

SEQ ID NO: 372 - DNA, 192 bp, Homo sapiens
  misc_feature (51)..(51): n is a, c, g, or t
  misc_feature (164)..(164): n is a, c, g, or t
ccacaggggcccccagggcaccagggatccctggagccaagggcgagcttngattgcccggtgccccaggaatcgatggagagaagggccccaaaggacagaaaggagacccaggagagcctgggccagcaggactcaaaggggaagcaggcgagatgggcttntccggcctcccgggcgctgacggcctca

SEQ ID NO: 373 - DNA, 390 bp, Homo sapiens
  misc_feature (12)..(12): n is a, c, g, or t
  misc_feature (32)..(32): n is a, c, g, or t
  misc_feature (81)..(81): n is a, c, g, or t
  misc_feature (131)..(131): n is a, c, g, or t
  misc_feature (152)..(152): n is a, c, g, or t
  misc_feature (241)..(241): n is a, c, g, or t
  misc_feature (244)..(244): n is a, c, g, or t
gagcgggcgacngggacgcgtgggcggacggnggctggccagcctcggccccatgacccgctgtcctgtgccctttcccancgatgggcgtgcagccaccaacttctcctgggtgcttccgggccggctgngggactggcgctgccgcggcntccccgcccactaccagttcctgttggacctgggcgtgcggcacctggtgtccctgacggagcgcgggccccctcacagcgacagtgcngcncggcctcaccctgcaccgcctgcgcatccccgacttctgcccgccggcccccgaccagatcgaccgcttcgtgcagatcgtggacgaggccaacgcaacggggagaggctgtgggagtgcactgtgctctgggctttggccgcaca

SEQ ID NO: 374 - DNA, 294 bp, Homo sapiens
  misc_feature (39)..(39): n is a, c, g, or t
  misc_feature (46)..(46): n is a, c, g, or t
  misc_feature (74)..(74): n is a, c, g, or t
  misc_feature (198)..(198): n is a, c, g, or t
  misc_feature (221)..(221): n is a, c, g, or t
cgatggtatctagaaaacaacaagaatgccgtgtatgcngctcatnagtctacacctccccactctcctctgtnaactggtgtcaatcccacccacctcagagttgtgaggattcattacacaataaaaaggcacaaagatgtgttatttataaaatatagggcactaaacaaatgttaagacattttaataatattncactgatagaaaagaaaaatccngcaggagaaaggaactggcaacaccttgctttctttggggatccacacaaaaggactgtcacacactcacaat

SEQ ID NO: 375 - DNA, 612 bp, Homo sapiens
tcgaatttaggtgacactatagaagagctatgacgtcgcatgcacgcgtacgtaagcttggatcctctagagcggccgcctactactactaaattcgcggccgcgtcgacgtcctctgctgctatgaggcagagaaaggggctcccactcaggctggtgttcacagaaggcttccagccagagaccaggacagctggggtttgaaggaggagcaagactagtcagggaaaagatcccttctgttagagcaggaagggatggagagcaggtggaagcagcatccaagaaaacaggttttgtcagagctacagacagaaaggtctcaagcagctcagggctgcctgattgatctttgaaagcgtcatgccctctagacttaaaatgtcaggcaggtagtagggttattttgacccttgatttcttcatcacacaatacttaatcttcaaagaccctgtggagactttcctttccaacactcagtacttccattttgactggaagtatttttgtgccactcgtataattcacatctattttgagacccatcagtccccttcgaatattcagaatttcccacctcttaatatttctccaacacacaaaaagtcgac

SEQ ID NO: 376 - DNA, 5023 bp, Homo sapiens
ggcgaatagcgccggctaggtcttccaacctctaggtggggtgccagccggggcgggcccagcaccccggccgggcagtactttttttttttttgcatacaccagttctcaggatatcggaatccggtgcacagcagcttcttcaggtttgaggttccggatgcctgggggcggagaaacgggaggggaaaaacagatggcaaggtgaggcgtccatggaacgacttctggcccagctgtgcggcagcagcgcagcgtggccgctcccgctgtgggagggggacaccacaggccactgcttcacccagctggtgctcagcgccctgccccacgcgctcctcgccgtgctcagtgcctgttacttgggcaccccgaggagtccagattacatcctaccctgcagtcctggatggcgcctccgacttgcagcttccttcctgctttccgtcttcccgctgctagaccttcttccagttgctttgccaccaggggcaggcccaggacccatagggctagaggtgttggcagggtgcgtggcagctgtggcctggatcagccacagcctggccctgtgggtgttggcacattcccctcatggccactcccggggtcccttggccttggccctggtagccttgctgccagctccagccctagtgctgaccgtgttgtggcattgccagcgaggcacacttctgcccccacttctcccagggcccatggcccgcctatgcttgctcatcctgcagctggctgcactcttggcctatgcactgggatgggcagctcctgggggaccacgagaaccctgggctcaggagcccctcctgcccgaggatcaagaacctgaggtggctgaagatggggagagttggctgtcacgcttttcctatgcctggctggcacccttgctggcccgtggggcctgtggagagctccggcagcctcaggacatttgccgcctcccccacagactgcagccaacctacctggctcgtgtcttccaggcacactggcaggagggggcacggctgtggagggccttgtatggggcctttggacggtgctatctggcacttggactgctgaagctggtggggaccatgttgggattctcagggcccctgttgctctccctactggtgggcttcctggaagaggggcaggagccactaagccacggcctgctctatgctctggggctagccggtggggctgtgctgggtgctgtgctgcagaatcagtatgggtatgaggtatataaggtaacacttcaggcacggggggctgtgctgaacatcctgtactgcaaggctttacagctggggcccagccgccctcctactggggaggccctgaacctactaggcactgactctgaacggctgcttaactttgctgggagcttccatgaagcctggggcctgcccctgcaactggccatcaccctctacctgctgtaccagcaggtaggcgtggccttcgtgggtggtctcatcttggcactgctgctggtacccgtcaacaaagtgattgccacccgcatcatggccagcaaccaggaaatgctacagcacaaggatgcgcgggttaagcttgtgacagagctgctgagtggcattcgggtcatcaagttctgcgggtgggagcaggcactgggagcccgagtagaggcctgccgggctcgagagctggggcgactccgggtcatcaaatacctggatgcggcctgtgtatacctgtgggctgccctaccggttgtcatctccatcgttatcttcatcacctatgtcctcatggggcaccagctcactgccaccaaggtgttcacggccctggcactggtgcgaatgctcattcttcctctcaacaacttcccttgggtgatcaatggtctcctggaggccaaagtgtccttggaccggatccagcttttcctcgaccttccaaaccacaacccccaggcctactacagcccagatccccctgcagagccatctacagtattggagctgcatggagccttgttctcctgggacccagttggaaccagcctggagaccttcatcagtcatctcgaagtgaaaaagggtatgctggtgggcatcgtggggaaggtcggctgtgggaagagctccctgctggctgccatcgctggagagctccacaggctgcgtgggcatgtggcagtgcgggggctgtccaagggctttggcctggccacccaggaaccctggatccagtttgccaccatccgagacaacatcctctttgggaagacatttgatgcacagctgtacaaggaggtgctagaagcctgcgccctcaatgatgacctcagtatcctgcctgctggagaccagacagaggtgggggagaagggtgtcacccttagcggaggacagcgtgcccggattgcccttgctcgtgctgtctaccaggaaaaggagctctatctcctcgatgaccctctggccgctgtggatgcagatgtggccaaccacctgctgcacaggtgcatcctgggcatgctgagctacaccacacggctgctctgcacccaccgcactgagtacctggagagggctgacgcggtgctgctgatggaggccgggcgcctcatccgggctggacctccctctgagattctgccactggtacaagctgtccccaaagcctgggctgagaatggacaagagtctgactcagccacagcccagtcagtacagaacccagagaaaacaaaggaggggctggaggaggagcagagcacatctggtcgcctgctgcaggaagaaagcaagaaggagggcgccgtggccttgcacgtgtaccaagcttactggaaggccgtgggccagggcttggccttagccatcctcttctctctgcttctcatgcaagccacgcggaacgctgctgactggtggctctcccactggatctctcagctgaaggctgagaatagctcccaggaggcgcaaccctccaccagcccagcttctatggggctcttctctccgcagctgctcctcttttcccctggaaacctctacatcccagtgttcccactgcccaaagctgcccccaatggctcctcagacatccgtttctacctcaccgtgtatgcgaccattgctggtgtaaattccctctgcacccttctccgggcagtgctctttgcagcaggcacccttcaagcagctgccactctgcatcgccgcctgctgcatcgagtccttatggcaccagtgactttcttcaatgccacacccacgggccggatcctaaaccgcttctcctctgatgtggcctgtgcggatgacagcctgcccttcatcctcaacatcctcctggccaacgcggcaggcctgctggggctcctggccgtgctgggctctggcctgccctggctgctgctcctgctgccgcctttgagcatcatgtactatcacgtgcagcgccactacagggcctcctcacgggagctgcggcgcctgggcagcctcaccctgtctccactgtatagccatctggccgataccttggctggcctctctgtgctccgggccacaggggccacctacaggtttgaggaggagaacctgcgactccttgagctaaaccagaggtgccagtttgccaccagtgccacaatgcagtggctggacattcggctacagctcatgggggcggcagtggtcagcgctatcgcaggcatcgctctggtgcagcaccagcagggcctcgctaacccagggctggtgggcttgtcgctgtcttatgccctgtccctgacgggcctgctctcgggcctggtgagcagcttcacacagacagaggccatgctggtgagcgtcgagcggctggaagagtacacctgtgacctgccccaggaaccccagggccagccactgcagctgggcaccggctggctgacccaggggggcgtggagttccaggacgtggtgttggcgtaccggccagggctgccgaatgccctggatggagtgaccttctgcgtgcagcctggagagaagttgggcatcgtgggccgcacaggctccggcaagtcttccctgttgttggtgctcttccggctgctagagcccagttcagggcgagtgctgctggacggcgtggacaccagccagctggagctggcccagctcagatcccagttggctatcatcccccaggagccctttttgttcagtgggactgttcgggaaaacctggacccccagggcctacataaggacagggccttgtggcaggccctgaagcagtgccacctgagtgaggtgattacatccatgggtggtctggatggtgagctgggtgaggggggccggagcttatctcttgggcagaggcagctgttgtgtttggccagggctctcctcacagatgccaagatcctgtgtatcgatgaggccacagcaagtgtggaccagaagacagaccagctgctccagcagaccatctgcaaacgctttgccaacaagacagtgctgaccattgcccataggctcaacacgatcctgaactcagaccgggtgctggtgctacaagcggggagagtggtagagctggactccccggccaccctgcgcaaccagccccactccctgttccagcagctgctgcagagcagccagcagggagtccctgcctcactcggaggtccctgagcccaatcccacaccctgcagagttctcccctctctctgatccaggccgggcctatacagaggtgctggctgcttgtttacattctcctctggggctctacctctccacacttccccagaagggaaaagggcaccctggattactctttggaaatcactccttggtgggcagcatcctgaggcttccccagaaccaggcctctgctctggccctcttgcatctggaacgccaggtgggtttttctggcataggagcccacttgcattttcatagttttatttgataaaattccatcttacattctgtgtattaaaaaaataatatttct

SEQ ID NO: 377 - protein, 1513 aa, Homo sapiens
GSGCLGAEKREGKNRWQGEASMERLLAQLCGSSAAWPLPLWEGDTTGHCFTQLVLSALPHALLAVLSACYLGTPRSPDYILPCSPGWRLRLAASFLLSVFPLLDLLPVALPPGAGPGPIGLEVLAGCVAAVAWISHSLALWVLAHSPHGHSRGPLALALVALLPAPALVLTVLWHCQRGTLLPPLLPGPMARLCLLILQLAALLAYALGWAAPGGPREPWAQEPLLPEDQEPEVAEDGESWLSRFSYAWLAPLLARGACGELRQPQDICRLPHRLQPTYLARVFQAHWQEGARLWRALYGAFGRCYLALGLLKLVGTMLGFSGPLLLSLLVGFLEEGQEPLSHGLLYALGLAGGAVLGAVLQNQYGYEVYKVTLQARGAVLNILYCKALQLGPSRPPTGEALNLLGTDSERLLNFAGSFHEAWGLPLQLAITLYLLYQQVGVAFVGGLILALLLVPVNKVIATRIMASNQEMLQHKDARVKLVTELLSGIRVIKFCGWEQALGARVEACRARELGRLRVIKYLDAACVYLWAALPVVISIVIFITYVLMGHQLTATKVFTALALVRMLILPLNNFPWVINGLLEAKVSLDRIQLFLDLPNHNPQAYYSPDPPAEPSTVLELHGALFSWDPVGTSLETFISHLEVKKGMLVGIVGKVGCGKSSLLAAIAGELHRLRGHVAVRGLSKGFGLATQEPWIQFATIRDNILFGKTFDAQLYKEVLEACALNDDLSILPAGDQTEVGEKGVTLSGGQRARIALARAVYQEKELYLLDDPLAAVDADVANHLLHRCILGMLSYTTRLLCTHRTEYLERADAVLLMEAGRLIRAGPPSEILPLVQAVPKAWAENGQESDSATAQSVQNPEKTKEGLEEEQSTSGRLLQEESKKEGAVALHVYQAYWKAVGQGLALAILFSLLLMQATRNAADWWLSHWISQLKAENSSQEAQPSTSPASMGLFSPQLLLFSPGNLYIPVFPLPKAAPNGSSDIRFYLTVYATIAGVNSLCTLLRAVLFAAGTLQAAATLHRRLLHRVLMAPVTFFNATPTGRILNRFSSDVACADDSLPFILNILLANAAGLLGLLAVLGSGLPWLLLLLPPLSIMYYHVQRHYRASSRELRRLGSLTLSPLYSHLADTLAGLSVLRATGATYRFEEENLRLLELNQRCQFATSATMQWLDIRLQLMGAAVVSAIAGIALVQHQQGLANPGLVGLSLSYALSLTGLLSGLVSSFTQTEAMLVSVERLEEYTCDLPQEPQGQPLQLGTGWLTQGGVEFQDVVLAYRPGLPNALDGVTFCVQPGEKLGIVGRTGSGKSSLLLVLFRLLEPSSGRVLLDGVDTSQLELAQLRSQLAIIPQEPFLFSGTVRENLDPQGLHKDRALWQALKQCHLSEVITSMGGLDGELGEGGRSLSLGQRQLLCLARALLTDAKILCIDEATASVDQKTDQLLQQTICKRFANKTVLTIAHRLNTILNSDRVLVLQAGRVVELDSPATLRNQPHSLFQQLLQSSQQGVPASLGGP

SEQ ID NO: 378 - DNA, 2749 bp, Homo sapiens
gccgcccaggattccacgagggggaaggattctctattcttttttgcgacaaatctggtaacaggatttgctgtgctgttttcgtccgtgtgtgtgtgcgtgtgtgtgtgtgttcgtgtggatgcacgtgtggccccgctggggtgccccctccagtgtccccggagctgaaagatcgcaaagaggatgcgaaagggatggaggacgaaggccagaccaaaatcaagcagaggcgaagtcggaccaatttcaccctggaacaactcaatgagctggagaggctttttgacgagacccactatcccgacgccttcatgcgagaggaactgagccagcgactgggcctgtcggaggcccgagtgcaggtttggtttcaaaatcgaagagctaaatgtagaaaacaagaaaatcaactccataaaggtgttctcataggggccgccagccagtttgaagcttgtagagtcgcaccttatgtcaacgtaggtgctttaaggatgccatttcagcaggttcaggcgcagctgcagctggacagcgctgtggcgcacgcgcaccaccacctgcatccgcacctggccgcgcacgcgccctacatgatgttcccagcaccgcccttcggactgccgctcgccacgctggccgcggattcggcttccgccgcctcggtagtggcggccgcagcagccgccaagaccaccagcaagaactccagcatcgccgatctcagactgaaagccaaaaagcacgccgcagccctgggtctgtgacgccaacgccagcaccaatgtcgcgcctgtcccgcggcactcagcctgcacgccctccgcgccccgctgcttctccgttacccctttgagacctcgggagccggccctcttcccgcctcactgaccatccctcgtcccctatcgcatcttggactcggaaagccagactccacgcaggaccagggatctcacgaggcacgcaggctccgtggctcctgcccgttttcctactcgagggcctagaattgggttttgtaggagcgggtttgggggagtctggagagagactggacaggggagtgctggaaccgcggagtttggctcaccgcaaagctacaacgatggactcttgcatagaaaaaaaaatcttgttaacaatgaaaaaatgagcaaacaaaaaaatcgaaagacaaacgggagagaaaaagaggaaggaaacttatttcttaactgctatttggcagaagctgaaattggagaaccaaggagcaaaaacaaattttaaaattaaagtattttatacatttaaaaatatggaaaaacaacccagacgattctcgagagactggggggagttaccaacttaaatgtgtgtttttaaaaatgcgctaagaaggcaaagcagaaagaagaggtatacttatttaaaaaactaagatgaaaaaagtgcgcagctgggaagttcacaggttttgaaactgacctttttctgcgaagttcacgttaatacgagaaatttgatgagagaggcggctcttttacgttgaatcagatgctttgagtttaaaacccaccatgtatggaagagcaagaaaagagaaaatattaaaacgaggagagagaaaaataatattaacacaaaaaaatgccacagacaatgatttctctgagaaattattatggcaaaactgtctggactgctgacagtaaattccggtttgcatgttacttgtattccattgatggtgtgtcttcctcccacccccttatctcccatgcactcactccattttcatcttcactatgaaaaacaataccaaaagtatctggaaattgatatatatatatccacatatatatatcatatatttgccatatatatatatatatatatatatatatatatatatatatatatatatatttgccctgtctttgatcctggggaacaaaagaaaaaagtcagaaagggaaaaaattacactcattgccctaagaagacagaggtgggcagaatatgtggggaaaggaaaaagaaaacaagaccaccaaatgaaataatgaaggtacagcgcctcgctgtgccagacacagtaggcgctcaatcagtattagttcccaccattccccttttcttgtgttccttcttgttggtttcctgaagtcctatttgaagacagtggtttatttccccctctctatcccgtcaaattcaccttaaataacacccagctagatacaggcactaggtttgtgtaagatatgttgatacacacgaacaaagtttattttgactataatgtgtggactgactttcaacatttgcattttatctcacaaaggtgtatctattcaagtaacctttttttttttgtttgtttgtttcttttttgtttttttttttcttttggttgtttgtttcaattcatgtagctatttaaactgggataccttggactaagccagtctgtatcccaattcgctagcaagcctaagtttgtggggttttgtttttgtttttgttttaccttctaatttacaagaaagaggaaaagctcttctaactgaactttggtatgcggttgagctttgtaactatttgttctccatgaaaacaaaattatttatatttgacatatttttttctagtgtattaagttattttaaacaaaagatgttatctcatgacgtgttgtcagtacaaaatgtgtcgcctccaattctgttaaaccttttaaataagtgccaagttattaatt

SEQ ID NO: 379 - protein, 190 aa, Homo sapiens
MEDEGQTKIKQRRSRTNFTLEQLNELERLFDETHYPDAFMREELSQRLGLSEARVQVWFQNRRAKCRKQENQLHKGVLIGAASQFEACRVAPYVNVGALRMPFQQVQAQLQLDSAVAHAHHHLHPHLAAHAPYMMFPAPPFGLPLATLAADSASAASVVAAAAAAKTTSKNSSIADLRLKAKKHAAALGL

SEQ ID NO: 380 - DNA, 387 bp, Homo sapiens
gcacgaggcaggatggagatccctgtgcctgtgcagccgtcttggctgcgccgcgcctcggccccgttgcccggactttcggcgcccggacgcctctttgaccagcgcttcggcgaggggctgctggaggccgagctggctgcgctctgccccaccacgctcgccccctactacctgcgcgcacccagcgtggcgctgcccgtcgcccaggtgccgacggaccccggccacttttcggtgctgctagacgtgaagcacttctcgccggaggaaattgctgtcaaggtggtgggcgaacacgtggaggtgcacgcgcgccacgaggagcgcccggatgagcacggattcgtcgcgcgcgagttccaccgtcgctaccgcctgccgcct

SEQ ID NO: 381 - DNA, 6270 bp, Homo sapiens
gccctgcttccccttgcacctgcgccgggcggccatggacttgtacagcaccccggccgctgcgctggacaggttcgtggccagaaggctgcagccgcggaaggagttcgtagagaaggcgcggcgcgctctgggcgccctggccgctgccctgagggagcgcgggggccgcctcggtgctgctgccccgcgggtgctgaaaactgtcaagggaggctcctcgggccggggcacagctctcaagggtggctgtgattctgaacttgtcatcttcctcgactgcttcaagagctatgtggaccagagggcccgccgtgcagagatcctcagtgagatgcgggcatcgctggaatcctggtggcagaacccagtccctggtctgagactcacgtttcctgagcagagcgtgcctggggccctgcagttccgcctgacatccgtagatcttgaggactggatggatgttagcctggtgcctgccttcaatgtcctgggtcaggccggctccgcggtcaaacccaagccacaagtctactctaccctcctcaacagtggctgccaagggggcgagcatgcggcctgcttcacagagctgcggaggaactttgtgaacattcgcccagccaagttgaagaacctaatcttgctggtgaagcactggtaccaccaggtgtgcctacaggggttgtggaaggagacgctgcccccggtctatgccctggaattgctgaccatcttcgcctgggagcagggctgtaagaaggatgctttcagcctaggcgaaggcctccgaactgtcctgggcctgatccaacagcatcagcacctgtgtgttttctggactgtcaactatggcttcgaggaccctgcagttgggcagttcttgcagcggcacgttaagagacccaggcctgtgatcctggacccagctgaccccacatgggacctggggaatggggcagcctggcactgggatttgcatgcccaggaggcagcatcctgctatgaccacccatgctttctgagggggatgggggacccagtgcagtcttggaaggggccgggccttccacgtgctggatgctcaggtttgggccaccccatccagctagaccctaaccagaagacccctgaaaacagcaagagcctcaatgctgtgtacccaagagcagggagcaaacctccctcatgcccagctcctggccccactgcggagccagcatcgtacccctctgtgccgggaatggccttggacctgtctcagatccccaccaaggagctggaccgcttcatccaggaccacctgaagccgagcccccagttccaggagcaggtgaaaaaggccatcgacatcatcttgcgctgcctccatgagaactgtgttcacaaggcctcaagagtcagtaaagggggctcatttggccggggcacagacctaagggatggctgtgatgttgaactcatcatcttcctcaactgcttcacggactacaaggaccaggggccccgccgcgcagagatccttgatgagatgcgagcgcacgtagaatcctggtggcaggaccaggtgcccagcctgagccttcagtttcctgagcagaatgtgcctgaggctctgcagttccagctggtgtccacagccctgaagagctggacggatgttagcctgctgcctgccttcgatgctgtggggcagctcagttctggcaccaaaccaaatccccaggtctactcgaggctcctcaccagtggctgccaggagggcgagcataaggcctgcttcgcagagctgcggaggaacttcatgaacattcgccctgtcaagctgaagaacctgattctgctggtgaagcactggtaccgccaggttgcggctcagaacaaaggaaaaggaccagcccctgcctctctgcccccagcctatgccctggagctcctcaccatctttgcctgggagcagggctgcaggcaggattgtttcaacatggcccaaggcttccggacggtgctggggctcgtgcaacagcatcagcagctctgtgtctactggacggtcaactatagcactgaggacccagccatgagaatgcaccttcttggccagcttcgaaaacccagacccctggtcctggaccccgctgatcccacctggaacgtgggccacggtagctgggagctgttggcccaggaagcagcagcgctggggatgcaggcctgctttctgagtagagacgggacatctgtgcagccctgggatgtgatgccagccctcctttaccaaaccccagctggggaccttgacaagttcatcagtgaatttctccagcccaaccgccagttcctggcccaggtgaacaaggccgttgataccatctgttcatttttgaaggaaaactgcttccggaattctcccatcaaagtgatcaaggtggtcaagggtggctcttcagccaaaggcacagctctgcgaggccgctcagatgccgacctcgtggtgttcctcagctgcttcagccagttcactgagcagggcaacaagcgggccgagatcatctccgagatccgagcccagctggaggcatgtcaacaggagcggcagttcgaggtcaagtttgaagtctccaaatgggagaatccccgcgtgctgagcttctcactgacatcccagacgatgctggaccagagtgtggactttgatgtgctgccagcctttgacgccctaggccagctggtctctggctccaggcccagctctcaagtctacgtcgacctcatccacagctacagcaatgcgggcgagtactccacctgcttcacagagctacaacgggacttcatcatctctcgccctaccaagctgaagagcctgatccggctggtgaagcactggtaccagcagtgtaccaagatctccaaggggagaggctccctacccccacagcacgggctggaactcctgactgtgtatgcctgggagcagggcgggaaggactcccagttcaacatggctgagggcttccgcacggtcctggagctggtcacccagtaccgccagctctgtatctactggaccatcaactacaacgccaaggacaagactgttggagacttcctgaaacagcagcttcagaagcccaggcctatcatcctggatccggctgacccgacaggcaacctgggccacaatgcccgctgggacctgctggccaaggaagctgcagcctgcacatctgccctgtgctgcatgggacggaatggcatccccatccagccatggccagtgaaggctgctgtgtgaagttgagaaaatcagcggtcctactggatgaagagaagatggacaccagccctcagcatgaggaaattcagggtcccctaccagatgagagagattgtgtacatgtgtgtgtgagcacatgtgtgcatgtgtgtgcacacgtgtgcatgtgtgtgttttagtgaatctgctctcccagctcacacactcccctgcctcccatggcttacacactaggatccagactccatggtttgacaccagcctgcgtttgcagcttctctgtcacttccatgactctatcctcataccaccactgctgcttcccacccagctgagaatgccccctcctccctgactcctctctgcccatgcaaattagctcacatctttcctcctgctgcaatccatcccttcctcccattggcctctccttgccaaatctaaatactttatatagggatggcagagagttcccatctcatctgtcagccacagtcatttggtactggctacctggagccttatcttctgaagggttttaaagaatggccaattagctgagaagaattatctaatcaattagtgatgtctgccatggatgcagtagaggaaagtggtggtacaagtgccatgattgattagcaatgtctgcactggatatggaaaaaagaaggtgcttgcaggtttacagtgtatatgtgggctattgaagagccctctgagctcggttgctagcaggagagcatgcccatattggcttactttgtctgccacagacacagacagagggagttgggacatgcatgctatggggaccctcttgttggacacctaattggatgcctcttcatgagaggcctccttttcttcaccttttatgctgcactcctcccctagtttacacatcttgatgctgtggctcagtttgccttcctgaatttttattgggtccctgttttctctcctaacatgctgagattctgcatccccacagcctaaactgagccagtggccaaacaaccgtgctcagcctgtttctctctgccctctagagcaaggcccaccaggtccatccaggaggctctcctgacctcaagtccaacaacagtgtccacactagtcaaggttcagcccagaaaacagaaagcactctaggaatcttaggcagaaagggattttatctaaatcactggaaaggctggaggagcagaaggcagaggccaccactggactattggtttcaatattagaccactgtagccgaatcagaggccagagagcagccactgctactgctaatgccaccactacccctgccatcactgccccacatggacaaaactggagtcgagacctaggttagattcctgcaaccacaaacatccatcagggatggccagctgccagagctgcgggaagacggatcccacctccctttcttagcagaatctaaattacagccagacctctggctgcagaggagtctgagacatgtatgattgaatgggtgccaagtgccagggggcggagtccccagcagatgcatcctggccatctgttgcgtggatgagggagtgggtctatctcagaggaaggaacaggaaacaaagaaaggaagccactgaacatcccttctctgctccacaggagtgtcttagacagcctgactctccacaaaccactgttaaaacttacctgctaggaatgctagattgaatgggatgggaagagccttccctcattattgtcattcttggagagaggtgagcaaccaagggaagctcctctgattcacctagaacctgttctctgccgtctttggctcagcctacagagactagagtaggtgaagggacagaggacagggcttctaatacctgtgccatattgacagcctccatccctgtcccccatcttggtgctgaaccaacgctaagggcaccttcttagactcacctcatcgatactgcctggtaatccaaagctagaactctcaggaccccaaactccacctcttggattggccctggctgctgccacacacatatccaagagctcagggccagttctggtgggcagcagagacctgctctgccaagttgtccagcagcagagtggccctggcctgggcatcacaagccagtgatgctcctgggaagaccaggtggcaggtcgcagttgggtaccttccattcccaccacacagactctgggcctccccgcaaaatggctccagaattagagtaattatgagatggtgggaaccagagcaactcaggtgcatgatacaaggagaggttgtcatctgggtagggcagagaggagggcttgctcatctgaacaggggtgtatttcattccaggccctcagtctttggcaatggccaccctggtgttggcatattggccccactgtaacttttgggggcttcccggtctagccacaccctcggatggaaagacttgactgcataaagatgtcagttctccctgagttgattgataggcttaatggtcaccctaaaaacacccacatatgcttttcgatggaaccagataagttgacgctaaagttcttatggaaaaatacacacgcaatagctaggaaaacacagggaaagaagagttctgagcagggcctagtcttagccaatattaaaacatactatgaagcctctgatacttaaacagcatggcgctggtacgtaaatagaccaatgcagttaggtggctctttccaagactctggggaaaaaagtagtaaaaagctaaatgcaatcaatcagcaattgaaagctaagtgagagagccagagggcctccttggtggtaaaagagggttgcatttcttgcagccagaaggcagagaaagtgaagaccaagtccagaactgaatcctaagaaatgcaggactgcaaagaaattggtgtgtgtgtgtgtgtgtgtgtgtgtgtgtgtttaatttttaaaaagtttttattcggaatccgcg

SEQ ID NO: 382 - protein, 1087 aa, Homo sapiens
MDLYSTPAAALDRFVARRLQPRKEFVEKARRALGALAAALRERGGRLGAAAPRVLKTVKGGSSGRGTALKGGCDSELVIFLDCFKSYVDQRARRAEILSEMRASLESWWQNPVPGLRLTFPEQSVPGALQFRLTSVDLEDWMDVSLVPAFNVLGQAGSAVKPKPQVYSTLLNSGCQGGEHAACFTELRRNFVNIRPAKLKNLILLVKHWYHQVCLQGLWKETLPPVYALELLTIFAWEQGCKKDAFSLGEGLRTVLGLIQQHQHLCVFWTVNYGFEDPAVGQFLQRHVKRPRPVILDPADPTWDLGNGAAWHWDLHAQEAASCYDHPCFLRGMGDPVQSWKGPGLPRAGCSGLGHPIQLDPNQKTPENSKSLNAVYPRAGSKPPSCPAPGPTAEPASYPSVPGMALDLSQIPTKELDRFIQDHLKPSPQFQEQVKKAIDIILRCLHENCVHKASRVSKGGSFGRGTDLRDGCDVELIIFLNCFTDYKDQGPRRAEILDEMRAHVESWWQDQVPSLSLQFPEQNVPEALQFQLVSTALKSWTDVSLLPAFDAVGQLSSGTKPNPQVYSRLLTSGCQEGEHKACFAELRRNFMNIRPVKLKNLILLVKHWYRQVAAQNKGKGPAPASLPPAYALELLTIFAWEQGCRQDCFNMAQGFRTVLGLVQQHQQLCVYWTVNYSTEDPAMRMHLLGQLRKPRPLVLDPADPTWNVGHGSWELLAQEAAALGMQACFLSRDGTSVQPWDVMPALLYQTPAGDLDKFISEFLQPNRQFLAQVNKAVDTICSFLKENCFRNSPIKVIKVVKGGSSAKGTALRGRSDADLVVFLSCFSQFTEQGNKRAEIISEIRAQLEACQQERQFEVKFEVSKWENPRVLSFSLTSQTMLDQSVDFDVLPAFDALGQLVSGSRPSSQVYVDLIHSYSNAGEYSTCFTELQRDFIISRPTKLKSLIRLVKHWYQQCTKISKGRGSLPPQHGLELLTVYAWEQGGKDSQFNMAEGFRTVLELVTQYRQLCIYWTINYNAKDKTVGDFLKQQLQKPRPIILDPADPTGNLGHNARWDLLAKEAAACTSALCCMGRNGIPIQPWPVKAAV

SEQ ID NO: 383 - DNA, 2233 bp, Homo sapiens
gaatggggtaacctggctaaatgagaattaatgaacccacactcataagttttcattgacttagcaccaagtcgtccatcaaatatcatcagatctgagaatgctcttatggatatctgatttttagaggctggcattcatatttttaaaaactgccacctgtgaccacactgcaggccaaacagaatgtacctgctggtcagatgcagcccagagctcactgaattgcaacctctggactctcggtcagaggcaagcagcccttattccagaactccacagtcccttcacacccttccccagacctacaccaagaccaactaagtggtcaaaaggtggacaaactgagagttgtatcaaggcccttagcctctcaatttgttatcaagtttccctttctgaatctatttaccctgaagtataaatacccaagatgagccttaagagtgcctggtagagcaaacaaagatgcatcttatagggagcaaagtctatgctaacgcagtgtttctcaatcctggctgcacctttgaaccacgggagctttaaaagtgaccactgcaagggccctacccactatggatcccaatttcattggttgggagaggggccaagtttgtttccaacttccccagatgactctaatggctgagagttgcaatcaacaggtaagtgaatatccaggctgtaagatgaagaaagagggggttgtgcccaagcccactgtgcctcataaagcagatgatctctgcagcgctgcgcttctcaaagagtggtcccaggactgcctcagtcagaccacagactcctaagttcctcctcagacttcatggatccaagctctgtgaggtaattctaagcacattaaacttgtagaacagccatctggatttaatattacataatagctataatattctgctattctctaatcttcaatgtcagtttcttaaactgtcaggcctgtctttagatgcccttcaactgtgctggggactatcttgatggcagccagcaaagaaaatcagcaaaaaccccagtggagtttctgggttttacttttgttaaggaaggtgatggtttcttgacatgacaggtatctaggtggaaagggcaaagtgctaatgcaaacacaatggagacactatggaatagctctgcctagggacatgtggaagagcttctaggagacagtgtggacctttccatccctagaggtcttcacaagataaattcctacctccgtcagtattcaaaaggttttagcatcaatactgtctgagaataagacattagacttgagtcagtcccctggcttcaatcccaggatgccaagcagcctctaatggagaccgctggcttaatcgtgctcctttcctggcataacaactcactgcacccatgcctcaccaccacgaagcagtctcctcaccacccaaatgtgccttgggtgacttaaatacagccattagtatgaatggtcccctgtttttattcaacaccacaccagtctttgcttttaccttcggctaatgtggttccagccttttatcctgcactccttcttataatttaaaaaaaaaaaaaactcccctactatctttatgttaatattaacatcaactaggttcttctcaaaggacagccaggcctaactggccacgttaaaatctgcacagtgcttttgtgtcactgtctattctattagtttcaacatcatgctaaaataggacagcatgttccaaaactgaaactgaaacaggaacggagccttgctgatttagcatgaggagggaattgtaagccttgcacctggacactaaaacttttcaataagatgtatgctaagccgtacctagcaaacttaccaggtccaaagtagagtacaagcagaaagttatttttaaaggatgggcactatccttgagggacttaccctttctaatcagctttgcatggtttgttttgagacagtgtctcactctgttgcccaggctggagtgcagcggcaccatcacagctcacggcagcctctgcctcccgggctcaggcaatcccacctcagtttcccaagtagctgggactacaggcacacaccacactcagctaattttagtattttttgtagagacagggtctcgccatgttgcccaggctggtctcaaactcctggattatctccctggccctgcattaaaaaagatgtgcaacaacttaaaaaaaaaaaaaaaaa

SEQ ID NO: 384 - DNA, 368 bp, Homo sapiens
tgttcgattacacaatcatgtatacaggctgatgagggacctatgtaagataacgtggagttctggggtgggtggctaggtggctcatggtaccattcaccaagatgagaagtgcagaacaggcttggttagaaagaaaattagttcagttttgcacttacttaatcctggcagacaagcaggtataaaatggattgagctggaagacaggtcttggctatagcttagggagattttatcatattgcttatagctcaagcaatgggtatggatgaggtaacacaggcacgatgtaaaaatgagaaaataaaaataaaataataaaagtgtgattgcggcccaccaatacttggagcgtggggtaggag

SEQ ID NO: 385 - DNA, 362 bp, Homo sapiens
ctgccacgaagtgctgggattacaggcatgagccaccacgcctgacctctttcttcctttttttggaacatttccttattttctggcacaaaatcttccagactcatcttgtaccttctctgttccagttttagaactggccatttctcttataaatgaaaagctgagtgttcaggtgtgctcatggctcttagggtgctgttgcttctaggtcttttgagagcatagagccaggaagcatacacacatttttggctcctgactttttgctctttcccaggttattgagtttgccccttgctttccattcctcgtcacctcatcacagtccataccaccatcactttacacttcgtgggcag

SEQ ID NO: 386 - DNA, 270 bp, Homo sapiens
  misc_feature (13)..(13): n is a, c, g, or t
  misc_feature (76)..(76): n is a, c, g, or t
  misc_feature (78)..(78): n is a, c, g, or t
  misc_feature (80)..(80): n is a, c, g, or t
  misc_feature (208)..(208): n is a, c, g, or t
  misc_feature (235)..(235): n is a, c, g, or t
  misc_feature (266)..(266): n is a, c, g, or t
agagagagagagngagagagagagagagagagagagagagagagagagagagagagagagagagagagagagaganananagagagagagagagcgagtctgggtctcagccccagcgaacagccatttcactgagtcttcaagctttcaggctatcttctagtcaagatgagtgataagccagacttgtcggaagtggagaagtttnacaggtccaaacttgaggaaacttatncctggaggaaaaaattattctccccctcaanggaa

SEQ ID NO: 387 - DNA, 160 bp, Homo sapiens
  misc_feature (69)..(69): n is a, c, g, or t
gatctgaattctttatgtatatttgtagctatatttcatacaaagtgctttaagtgtggagagtcaatnaaacacctttactcttagaaatacggattcggcagccttcagtgaatattggtttctctttggtatgtcaataaaagtttatccgtatgtc

SEQ ID NO: 388 - DNA, 425 bp, Homo sapiens
cacgagggaaggaagtgagtgccctgtccttcctccctgccatgagattccaggaccggacctggcaagtgccctatcccagccagtgttcctggggctcttccaggcagggctatgttccccaggccaggggcattgtcctggacagtcaggaggcatacccctcgccaggtggaaccaccctgtgtatgcatgaccctgacaagcaggcgccaggacagtcaggaggccaggcccgagtgccaggcatggacggggacgctgctgctgggcacgtgccttctgtactgcgcccgctccagcatgcccatctgcaccgtctccatgagccaggacttcggctggaacaagaaggaggccggcatcgtgctcagcagcttcttctggggctactgcctgacacaggttgtgggcggccacctcgg

SEQ ID NO: 389 - DNA, 1631 bp, Homo sapiens
tttaacacccatagtaggcctaaaagcagccaccaattaagaaagccacagcacgtacacccactccagggatctgccagcaccctgtggggcccagactacaggctgatggcggaggcttcgagtgacccgggtgctgaggagcgggaagagttgctggggcccactgctcagtggagcgtggaggacgaggaggaggccgtccacgagcaatgccagcatgagagagacaggcagcttcaggcccaggacgaggagggaggcggccatgtccccgagcggccgaagcaggagatgctcctcagcctgaagccctcggaggcccctgaactggatgaggacgagggctttggcgactggtcccagaggccagagcagcggcagcagcacgagggggcgcagggcgccttggacagcggagagcccccccagtgcaggagtcctgagggggagcaagaggacaggcccggcctgcatgcctacgaaaaggaggacagtgatgaagtccacctggaggagttgagtctgagcaaggaggggccaggcccagaggacactgtccaggacaacctgggggccgcaggggctgaggaggaacaggaggagcaccagaaatgtcagcagcccaggacacccagccccttggtcttggaggggaccatcgaacagagctcgcctcccctgagccctaccaccaaactcatcgacaggaccgagtccctaaaccgctccatagagaagagtaacagtgtgaagaaatcccagccagacttgcccatctccaagattgatcagtggctggaacaatacacccaggccatcgagaccgctggccggacccccaagctagcccgccaggcctccatagagctgcccagcatggctgtggccagtaccaagagtcggtgggagacgggtgaggtacaggctcagtctgcggccaagactccgtcctgcaaggatattgtggctggagacatgagcaagaaaagcctctgggagcagaagggaggctccaagacctcatcaacaattaagagcaccccatctgggaagaggtataagtttgtggccaccgggcatgggaagtatgagaaggtgcttgtggaagggggcccggctccctaggcgtcccatctcgcttcctgggtctgcaggtccagccggctggcaccctccatgtacccaggggagattccagccagacacccgccccccggccctggctaagaagttgcttcctgttgccagcatgacctaccctcgcctctttgatgccatccgctgccacctccttttgctcctggaccctttagcctctctgcccttccactctctgaccaccgcccccgccctccccacccagctccgcttcttgttacttgggggaggaaagaaactcctgatcattggccaaagggacttacccctggagaggccaagtgccttctaggaagttaggaggttgaggcacagcctgtgcagagagggtgggtcacccccccagatccaaggggaaactgcaggtcaagggctgataacggccatgcaggatgcttgatgctgcgtcccccgctgcttgccgccccccaccccgccattttgtataataaagctccctgtgtattctc

SEQ ID NO: 390 - protein, 339 aa, Homo sapiens
MAEASSDPGAEEREELLGPTAQWSVEDEEEAVHEQCQHERDRQLQAQDEEGGGHVPERPKQEMLLSLKPSEAPELDEDEGFGDWSQRPEQRQQHEGAQGALDSGEPPQCRSPEGEQEDRPGLHAYEKEDSDEVHLEELSLSKEGPGPEDTVQDNLGAAGAEEEQEEHQKCQQPRTPSPLVLEGTIEQSSPPLSPTTKLIDRTESLNRSIEKSNSVKKSQPDLPISKIDQWLEQYTQAIETAGRTPKLARQASIELPSMAVASTKSRWETGEVQAQSAAKTPSCKDIVAGDMSKKSLWEQKGGSKTSSTIKSTPSGKRYKFVATGHGKYEKVLVEGGPAP

SEQ ID NO: 391 - DNA, 1720 bp, Homo sapiens
cccaggcccagacgcaggcttcttctcctcgggtcttggtcctgcatcctctctctcccagagcctccgttagggggtgggaaaggactttgccataggtcgctgaggccaccatctgctctcttactggccaagggcgtaaaaagatagtcctcccattagctagagagcaaaccccagaaagcctattggctgcgccgtccgcgggccttggtccgctttgaaggcgggctgcggctgcgagaggagggcgggcgggaggctagctgttgtcgtggttgctcggaggcacgtgtgcagtcccggaagcggcgaggggaaactgctccgcgcgcgccgcgggaggaggaaccgcccggtcctttagggtccgggcccggccgggccatggattcaatgcctgagcccgcgtcccgctgtcttctgcttcttcccttgctgctgctgctgctgctgctgctgccggccccggagctgggcccgagccaggccggagctgaggagaacgactgggttcgcctgcccagcaaatgcgaagtgtgtaaatatgttgctgtggagctgaagtcagcctttgaggaaaccggcaagaccaaggaggtgattggcacgggctatggcatcctggaccagaaggcctctggagtcaaatacaccaagtcggacttgcggttaatcgaagtcactgagaccatttgcaagaggctcctggattatagcctgcacaaggagaggaccggcagcaatcgatttgccaagggcatgtcagagacctttgagacattacacaacctggtacacaaaggggtcaaggtggtgatggacatcccctatgagctgtggaacgagacttctgcagaggtggctgacctcaagaagcagtgtgatgtgctggtggaagagtttgaggaggtgatcgaggactggtacaggaaccaccaggaggaagacctgactgaattcctctgcgccaaccacgtgctgaagggaaaagacaccagttgcctggcagagcagtggtccggcaagaagggagacacagctgccctgggagggaagaagtccaagaagaagagcagcagggccaaggcagcaggcggcaggagtagcagcagcaaacaaaggaaggagctgggtggccttgagggagaccccagccccgaggaggatgagggcatccagaaggcatcccctctcacacacagcccccctgatgagctctgagcccacccagcatcctctgtcctgagacccctgattttgaagctgaggagtcaggggcatggctctggcaggccgggatggccccgcagccttcagcccctccttgccttggctgtgccctcttctgccaaggaaagacacaagccccaggaagaactcagagccgtcatgggtagcccacgccgtcctttcccctccccaagtgtttctctcctgacccagggttcaggcaggccttgtggtttcaggactgcaaggactccagtgtgaactcaggaggggcaggtgtcagaactgggcaccaggactggagccccctccggagaccaaactcaccatccctcagtcctccccaacagggtactaggactgcagccccctgtagctcctctctgcttacccctcctgtggacaccttgcactctgcctggcccttcccagagcccaaagagtaaaaatgttctggttctgaaaaaaaaaaaaaaaaaaaaaaaaa

SEQ ID NO: 392 - protein, 278 aa, Homo sapiens [sequence omitted]

SEQ ID NO: 393 - DNA, 661 bp, Homo sapiens
gatgatgtcagggcggtgctggtgttgaagtcgtgcaggggcggtggtggagtgaggagttggactggccggcgtgttagcaggtgaaggaggaggaggagccgagcgggcgctggcaccgaggcctgaccatggacgaggaatacgatgtgatcgtgctggggaccggtctcaccgaatgcatcctgtcgggcatcatgtctgtgaacgggaagaaggtgctgcacatggaccggaacccctactacgggggcgagagctcctccatcacacccctggaggagctgtataagcgttttcagttgctggaggggccccctgagtcgatgggccgaggccgagactggaatgttgacctgattcccaaattcctcatggctaacgggcagctggtaaagatgctactgtatacagaggtgactcgctacctggacttcaaggtggtggagggcagctttgtctacaaggggggcaagatctacaaagtgccgtccactgagactgaggccttggcttccaatctgatgggcatgtttgagaaacggcgcttccgcgaagttcctggtgttgtggcaaacttcgatgagaatgaccccaagacctttgagggcgtgacccccagactaccagcatgcgtgacgtctaccggaagtatgatctg

SEQ ID NO: 394 - DNA, 473 bp, Homo sapiens
cacgaggattaaaggaaaaaaagaacgttctcaggttgaccagctgctgaatatttctttaagggaggaagaacttagtaagtcattgcagtgcatggataacaatcttctgcaagcccgtgcagcccttcagacagcttatgtggaagttcagaggctacttatgctcaagcagcagataactatggagatgagtgcactgaggacccatagaatacagattctacagggattacaagaaacatatgaaccttctgagcacccagaccaggttccctgtaacctcacacgagaacgaaggaacagtagatctcaaacatccattgatgccgcactgctgcccactccctttttcccactttttctggagcctccatcttcccatgtgtctccatcacccaccggagcctctcttcagataaccacgtctcctactttccaaacccaagggagtgtccctgctccagactcat

SEQ ID NO: 395 - DNA, 2152 bp, Homo sapiens
ggcacgaggcctgcgcccacaccctctcctgtccagccctcgcccgcctgggcagggcccggcgccgtccgtggatgagccacagaacctcttccaccttccgagcggagagaagtttccattcctcttcttcttcctcctcctcttccacctcctcctcggcctcccgtgctctcccggcccaggacccgcccatggagaaggccctgagcatgttttccgatgactttggcagcttcatgcggccccactcggagcccctggccttcccagcccgccccggtggggcaggcaacatcaagaccctaggagacgcctatgagtttgcggtggacgtgagagacttctcacctgaagacatcattgtcaccacctccaacaaccacatcgaggtgcgggctgagaagctggcggctgacggcactgtcatgaacaccttcgctcacaagtgccagctgccggaggacgtggacccgacgtcggtgacctcggctctgcgggaggacggcagcctcactatccgggcacggcgtcacccgcatacagaacacgtccagcagaccttccggacggagatcaaaatctgagtgcctctcccttccctttccctgtccccccgccccacgcctgccagcaaagcctcgctaaccccattacaacagctccaggacatctcagcccaggttctagcccccacgcacccagaccccaggtggaccatcctcccaaactagggccctccactctatccagggcaggccagggactccctggcctgacacatgatgcccagatttcagatttggcctccgtcacttaatccagagtacaggggctggggtcagggaaggaagatctaaagaacccactgtgggtcaggggaatgggaccagcaggacatatgggcaagctctgcaggacagacagacagacaaaccctctgatctatgaagtctctgcagggcaaggggaccagggacctggaaccctcttggccaaggggagtgggagggacagagggaaggtcacaggcaagggtgcctatctaagtggaactaattgcccgagggctcagcaaggccaagaggagacagccgtgacggtaaacttcccctctaccagcctccaagccccacgccagcgagcaggctgcctgcccaccccgtgcccccagccagctggctgtgccagggcagagccatgccacatctgtatatagatggggtttttccaatacagctggttcgtgataaactgcatgaaactcctgccgtcctgcgcctgctggggcctccaggcaaggccaagtggggttgggggtggggctggtccttctccctcccacaggcctgtgttcttggggctgctcccatgcagacaggatcacctaacagagatggaagccagggcatggatggggctttgggtcctcgaggttggaccccagcttcttgccaccttcccctccgggcagtcagctctccatccatccccctctttaatctatgaatctataggctcggtgtgtgtaacacacacacccctatcgttgtccttcaaatactcagcattaccattggttgaggccaaattcagagctttctcaaatcagatttacaatctccattttcattaacggggaaacatccccgagccactgagtgctgtgctttgtcactgaaggttagatctgaacccagggtgtcaacagctgctctcaactccccacctctgggcactgaggagtatttcccctcattctacctctctaaggctatgcaccctccccacgtcttccagctgggggatggggggagtcataggaaaagcccccatctcccatctgggatagggaccttccatcagccttaaccctgggaaatgcctgctgcccccaatgactcttggtttcgtctcccacatacagaagcagggtggaggggaagggtgggtctcagttagcaggggtccccagggcaagtcagcctcctccctccatgcctctctggtcagtgtgccttagggtggcctctcactcccaccactctgggccccttgggggaggactggggagggggccgtgggagagccctgacgctggaacctgtatacacaataaaggacagtctcacagaaaaaaaaaaaaaaaaaa

SEQ ID NO: 396 - protein, 170 aa, Homo sapiens
MSHRTSSTFRAERSFHSSSSSSSSSTSSSASRALPAQDPPMEKALSMFSDDFGSFMRPHSEPLAFPARPGGAGNIKTLGDAYEFAVDVRDFSPEDIIVTTSNNHIEVRAEKLAADGTVMNTFAHKCQLPEDVDPTSVTSALREDGSLTIRARRHPHTEHVQQTFRTEIKI

SEQ ID NO: 397 - DNA, 453 bp, Homo sapiens
ggcacgaggcgcgaaacctggttgttgctgtagtggcggagaggatcgtggtactgctatggcggaatcatcggaatccttcaccatggcatccagcccggcccagcgtcggcgaggcaatgatcctctcacctccagccctggccgaagctcccggcgtactgatgccctcacctccagccctggccgtgaccttccaccatttgaggatgagtccgaggggctcctaggcacagaggggcccctggaggaagaagaggatggagaggagctcattggagatggcatggaaagggactaccgcgccatcccagagctggacgcctatgaggccgagggactggctctggatgatgaggacgtagaggagctgacggccagtcagagggaggcagcagagcgggccatgcggcagcgtgaccgggaggctggccggggcctgggccgcatgcg

SEQ ID NO: 398 - DNA, 160 bp, Homo sapiens
atgaagtttctgtaaataacctgggtgtggactttgaaaatcacacacatcacatcaccagtgccaaaatggctgtttctgtggctgactttggcagtctctctgccaacgagaccaatggtttcatcagtgcccatgctccgaattcccgcgcgcccga

SEQ ID NO: 399 - DNA, 690 bp, Homo sapiens
aaaggcctgggtgttgaatcggccgaggcacggtccgtctgctgtcggcagcctcgccggcagctcgctcggcccccgcttggcccggcccgcaggtaggagccgccgagggacgcggcgcccggttcccggccccgcctgcgcctgcgcgctccccgctcccgccgcccgcttcgagggttctctccccttgccaccatgagcgagtcatttgactgtgcaaaatgcaacgagtccctgtatggacgcaagtacatccagacagacagcggcccctactgtgtgccctgctatgacaatacctttgccaacacctgtgctgagtgccagcagcttatcgggcatgactcgagggagctgttctatgaagaccgccatttccacgagggctgcttccgctgctgccgctgccagcgctcactagccgatgaacccttcacctgccaggacagtgagctgctctgcaatgactgctactgcagtgcgttttcctcgcagtgctccgcttgtggggagactgtcatgcctgggtcccggaagctggaatatggaggccagacatggcatgagcactgcttcctgtgcagtggctgtgaacagccactgggctcccgttcttttgtgcccgacaagggtgctcactactgcgtgccctgctatgagaacaagtttgctcctcgctggcccgtg

SEQ ID NO: 400 - DNA, 297 bp, Homo sapiens
  misc_feature (202)..(202): n is a, c, g, or t
  misc_feature (204)..(204): n is a, c, g, or t
tggtgttttttttttccttctcctcttcagcaaattctctggaacaagaacaaaaagttttctgtgaagttttgtttgcaggttcctctctgaatgcagtcagtgctgtaggtttgtggctgtcagggaggagagttctgactgtctccgagtaagagagaaggaaggagggagggagggagggagacagggagggagggananacagggtggcggggagacagacagagacagagagagaggatgggagggagacagaaacagaaaaaaaggaaagaaggggaaaaaaaaaaaagg

SEQ ID NO: 401 - DNA, 372 bp, Homo sapiens
  misc_feature (8)..(8): n is a, c, g, or t
  misc_feature (10)..(10): n is a, c, g, or t
  misc_feature (14)..(15): n is a, c, g, or t
  misc_feature (27)..(27): n is a, c, g, or t
cctcgcgntntgtnnttttcaacatanataaaataaaactttatttttaataataaaattaatgtttctagtaaggaaaagacagtatgtcattcctttagcagtacaaacaatcttttatccaaaagaatacattgggttttattgtgtcatttgtctgaatacagacacagtggaatatctaaatgataccctgctctgaactccaagttgaaagtaagtttttattatacttgagggaaacaatgggttcagctgcttattgcaaggagcaattgccaagggagagttaaactcaattactgtaaccatactgaataaaaaatactgccaagaacaaaaatacgcctgggtaaagacagccactgaata

SEQ ID NO: 402 - DNA, 615 bp, Homo sapiens
ataagcctatttagttttattctcagtagggttttttggattgtacagtgtttatatgatctgaactccttatacataagaaggtgtgtatattaatccaattatggacttaaaatattttaaaagtataaatacccttatttgctgcaaagaccagtgtgtaggcatttgctttttagcaatatttttaagtgctccattttaatgccgaggaataagtcttttggcaacacaaactggtcaataataggtaatgcaggtatgttcaggttaagccaacaatgttttgcatttttatgcttattttctgtcaacactaatgaagtcaacattgcctgaatgtctgaataatgaaacacatccctgtttaaaagtatgttactgaaaaagaaataaaaaaaaataaaagtagtttttttaaaaaaaaaaaaaaaaaaactcgagggggggcccggtacccaattcgccctatagggagtcgtataacaatacacttggccgccgttatacaacgtgcgggactgggaaaaccctcgcgttacccaactaaatcgccttgcagaacatacctcttttgccagtggcgaatatcgaaaaggccgcaccgatcgccct

SEQ ID NO: 403 - DNA, 1301 bp, Homo sapiens
ctgccttgctccacacctggtcaggggagagaggggaggaaagccaagggaagggacctaactgaaaacaaacaagctgggagaagcaggaatctgcgctcgggttccgcagatgcagaggttgaggtggctgcgggactggaagtcatcgggcagaggtctcacagcagccaaggaacctggggcccgctcctcccccctccaggccatgaggattctgcagttaatcctgcttgctctggcaacagggcttgtagggggagagaccaggatcatcaaggggttcgagtgcaagcctcactcccagccctggcaggcagccctgttcgagaagacgcggctactctgtggggcgacgctcatcgcccccagatggctcctgacagcagcccactgcctcaagccccgctacatagttcacctggggcagcacaacctccagaaggaggagggctgtgagcagacccggacagccactgagtccttcccccaccccggcttcaacaacagcctccccaacaaagaccaccgcaatgacatcatgctggtgaagatggcatcgccagtctccatcacctgggctgtgcgacccctcaccctctcctcacgctgtgtcactgctggcaccagctgcctcatttccggctggggcagcacgtccagcccccagttacgcctgcctcacaccttgcgatgcgccaacatcaccatcattgagcaccagaagtgtgagaacgcctaccccggcaacatcacagacaccatggtgtgtgccagcgtgcaggaagggggcaaggactcctgccagggtgactccgggggccctctggtctgtaaccagtctcttcaaggcattatctcctggggccaggatccgtgtgcgatcacccgaaagcctggtgtctacacgaaagtctgcaaatatgtggactggatccaggagacgatgaagaacaattagactggacccacccaccacagcccatcaccctccatttccacttggtgtttggttcctgttcactctgttaataagaaaccctaagccaagaccctctacgaacattctttgggcctcctggactacaggagatgctgtcacttaataatcaacctggggttcgaaatcagtgagacctggattcaaattctgccttgaaatattgtgactctgggaatgacaacacctggtttgttctctgttgtatccccagccccaaagacagctcctggccatatatcaaggtttcaataaatatttgctaaatgaaaaaaaaaaaaaaaaaaaaaaaaaaaaaaaa

SEQ ID NO: 404 - protein, 282 aa, Homo sapiens
MQRLRWLRDWKSSGRGLTAAKEPGARSSPLQAMRILQLILLALATGLVGGETRIIKGFECKPHSQPWQAALFEKTRLLCGATLIAPRWLLTAAHCLKPRYIVHLGQHNLQKEEGCEQTRTATESFPHPGFNNSLPNKDHRNDIMLVKMASPVSITWAVRPLTLSSRCVTAGTSCLISGWGSTSSPQLRLPHTLRCANITIIEHQKCENAYPGNITDTMVCASVQEGGKDSCQGDSGGPLVCNQSLQGIISWGQDPCAITRKPGVYTKVCKYVDWIQETMKNN

SEQ ID NO: 405 - DNA, 608 bp, Homo sapiens
tagccgtcgcggcgcgcggtgcggcctgggagagtcggaagcgcggcggccgcggagccctgcgagtaggcagcgttgggcccatgcaggacgcggagaacgtggcggtgcccgaggcggccgaggagcgcgccgagcccggccagcagcagccggccgccgagccgccgccagccgaggggctgctgcggcccgcggggcccggcgctccggaggccgcggggaccgaggcctccagtgaggaggtggggatcgcggaggccgggccggagcccgaggtgaggaccgagccggcggccgaggcagaggcggcctccggcccgtccgagtcgccctcgccgccggccgccgaggagctgcccgggtcgcatgctgagccccctgtcccggcacagggcgaggccccaggagagcaggctcgggacgagcgctccgacagccgggcccaggcggtgtccgaggacgcgggaggaaacgagggcagagcggccgaggccgaaccccgggcgctggagaacggcgacgcggacgagccctccttcagcgaccccgaggacttcgtggacgacgtgagcgaggaaagattactgggagatgtactcaaagat

SEQ ID NO: 406 - DNA, 4957 bp, Homo sapiens
gcatccccttgattaaatgtttttcctcctatgcaatcaccattagctgtttggctcccattctgtattcttctgaagcagccctgcattgcaaatcaatatctttctgaaaagacagtgtgttgtgaattgccttgacagcatatgcacggttactttggctgcaatgctgctgcagagcccggttactctgccttcgtgggaactccacagatatgtgtcacaaagatgtctacacggaactgccagggaatggactcagtgatcaaacccctggacacaattcctgaggataaaaaagtcagagttcagaggacacagagcacttttgacccatttgagaaaccagctaatcaagtaaagagggtgcattctgagaacaatgcttgcattaactttaagacctcctccactggcaaagagtcacctaaagttaggcggcactccagccccagctcgccaacaagtcccaaatttggaaaagctgactcatatgaaaagctggaaaaactaggggaaggatcttatgctacagtatacaaagggaaaagcaaggtaaatgggaagttggtagctctgaaggtgatcaggctgcaggaagaagaagggacacctttcacagctatcagggaagcttctcttttaaaaggactaaaacatgctaacatagtgctacttcatgacatcatccataccaaggagacgctgacacttgtgtttgaatatgtgcacactgatttatgtcagtacatggacaagcaccctggggggctgcatccagataatgtgaagttgtttttatttcagttgctgcgaggtctgtcttacatccaccagcgttatattttgcacagagacctgaaaccacagaaccttctgatcagtgacacgggggagttaaagctggcagatttcggtcttgcaagagcaaaatccgtccctagccacacatactccaacgaagtggttaccttgtggtacagacctccagatgtccttctaggctcaacagaatattccacctgccttgacatgtggggagtaggttgcatctttgttgaaatgatccaaggagttgctgcttttccaggaatgaaagacattcaggatcaacttgaacgaatatttctggttcttggaacaccaaatgaggacacatggcctggagttcattctttaccacattttaagccagaacgctttaccctgtacagctctaaaaaccttagacaagcatggaataagctcagctatgtgaaccatgcagaggacctggcctccaagctcctacaatgttccccaaagaacagactgtcggcacaggctgccttgagccacgagtattttagtgacctgccgccacggctatgggaactcaccgacatgtcttctatttttactgtcccaaatgtgagattgcaaccagaagctggagaaagcatgcgggcctttgggaaaaacaatagttatggcaaaagtctatcaaacagcaagcactgacaagcagcacattctcaagagcacacaggattaagttgtcatcattctgggaagaaaaaaaaaacattaatgaagaggccaataatatgaagggaatcatggatcagttttctttcgctccctgtggtggatttcacttacaagaaaattgaagctggcaagaccctgttttctctgcaatttatttaaaaccttgcacgcatttggataccttgtgatttccaagaactacgtgaagattaagctttgcttactgatacatggcatgtattcttttcagtcttttgtgtttgattttgtttgatttccctctgcagcacagcgtctctgtaaaggtttttatgctttcaccagccatgtcttaaatacattaagacaacacatttggtgttcacacttcttcagtaatgtctgaacttgaaagccacagagtggcataaaacaatgtgtgttttctttgagagcagtgcacattttgcaaccactaggaaggaaattttctgctaaagcaaacccctgttctctgacttgacaacttggccccggactgtggggccccacctgttgcttaccttttgaggtaattttgcaaatgtggtttttttacttggaaataactgcacatttatatataggatattggactctgcttagcattttcaagccacatagcatgactgttttttgaataggttggaattgaaaaaacaattatcaaacgttaagaacaaagacagggataaattgcttacatttcaacctctagagattgaggtaactttttgtgtctgggtcttgtcaacatctaatttttttccatccattctgttacactttgtattttctaactggagaaaagagtgaggaacagaatgttttaaatctggtgcaaaagaactatatctgctggatgagccttgaaagcagtcttggcctgttagggcttacaaagtaaattacaaagtgatccagttcaaagtttgcttagttacaacaaagcacctttaaaaaaaatacattttaaaaaaacattccaagccaattggaagacatcattgggttcttactttaagacatctcctggaataactgttcaaatgcaggttttagaaacaatgcaggaatcttgctttaaagatgaaaaagggaatgggccagcttcccttactcaaggagttgagggaccttggaggatgaaggcgagtatgtgacactggagaaaagtggaccaggcatgtcttttgctttgatctggagggagggctgcctgatgcaggccggctcccagtggggcaggcctcgctgcagaatgcccagtagtactgcggccaaggggacagttaggagacttcatctaaagcatgaaacctagctcctctacacacaaattcctatggaaatacctttgtgtacagtgtcttacattttcctattagtcagaaagaaggagagaatgagtgagtgcttgaaatgtgtcatactgttttaggatcaagactaggaattaggagccaggttgacaaggactttttctgagagttgggtgagggtaaagcttttctataatcaagctcaatacaccaaggaaactggatccagaattcctaaactttaaaatggtactgtctgcggagtggagtatggatggttatgtcaaagtcatagttcatcctatccagatgtagcattcatggtaaacttttaagtgctaagcaaggaattatttactgattggttttaaagagagcagaaaacacccaagtgtagaatgtctactgtttgctacctagaaatcttttccattcctctttcatacattccaacccactggaagtctttagaggtattttgatttaaagtatacttaaattaggatttcttaaagaaaacatagggagaaaactttacatgcaattaaaaatggactttcctgtgatttgtttttaatcattcatttggagaagaggcatgacctttgtatttcactaagtttaaagcaagagcaactgatgattaaatgttgctttttaataaggtttttaacttgaaaatttgaaaatatttaatgttgaaagacttcaattagggctattagagttatatctccctgtcgtaggcagcttcttcggagaagtgaaatataacattactcagtggacggagaagtctgttttgttacagagacatgcctctcagaaggtcaggaggttttgagtacctatccttgccacccatacaggaaatccaaagtttggtgtctctctctctctctgtctctttctttctctttctccccccaaacccctctcactccctccctccctctctccttcccctatttgcaatcatattctccctctgcttcttttctcttctgccctccttgtgggcagtcatgaaaatcaattcagactgtgttcattagcagatttattattctattgagaaagcactggaatgttttgtgagattatttttatatgaaggaatagcctgaactcaaacagatggtaagaatagtacaaacaccttagcacatcactgcacacacagtattctgaaaggagatttgacacttaattcccattttcttaaaataacagttttgttgacttaaaaatatgagatacataggatgtgaaaaaaaatgtttgcagtactcagcaaaaaatagggtacataaagcagggtggctgtccatccactgattctggggtgagaagcgatttctacctcgcaagagtgactagaaagtttctaggagcacctccaggcttgcaaagaaagtgaggcctcttggtatcctttcctcagtgtgtatatgacagccagtataatcaataccctaggttatgcgtctatatgatactcatctgtgaatattattggttttgtaatctttgttatataagaggatgtttaggctgtatatactggggtagattattgcctgccccttatacataggaatatgctgcataattgcgcataacttccatctcccttactggcttgtaggcagaggaaactgtatatgttactgccttgtacttttctcatacaccaaaaacacaccaaaaaaatcaataaaataagcaatcttctattctcattccttttcccacagcagcatattttagaggcacatacaaaacctacattctctagttgggagtggatttttaaagttttccttttatcttttatttttttttttgtatgatgcactgagatgtgtactttctaacaggggattggtacctaagaaacgtggtagcattattcagaaaactattatactttcaaatgacacatagtaaggagaatggaataatacatgttgcatatttgttaccagttgtaatttgtctgtattatgaaagatgtaatggtttgtcagctgtcactgttgttttcttgtaacatgatatggaataaagtatagcagaatctccgt

SEQ ID NO: 407 - protein, 451 aa, Homo sapiens
MHGYFGCNAAAEPGYSAFVGTPQICVTKMSTRNCQGMDSVIKPLDTIPEDKKVRVQRTQSTFDPFEKPANQVKRVHSENNACINFKTSSTGKESPKVRRHSSPSSPTSPKFGKADSYEKLEKLGEGSYATVYKGKSKVNGKLVALKVIRLQEEEGTPFTAIREASLLKGLKHANIVLLHDIIHTKETLTLVFEYVHTDLCQYMDKHPGGLHPDNVKLFLFQLLRGLSYIHQRYILHRDLKPQNLLISDTGELKLADFGLARAKSVPSHTYSNEVVTLWYRPPDVLLGSTEYSTCLDMWGVGCIFVEMIQGVAAFPGMKDIQDQLERIFLVLGTPNEDTWPGVHSLPHFKPERFTLYSSKNLRQAWNKLSYVNHAEDLASKLLQCSPKNRLSAQAALSHEYFSDLPPRLWELTDMSSIFTVPNVRLQPEAGESMRAFGKNNSYGKSLSNSKH

SEQ ID NO: 408 - DNA, 378 bp, Homo sapiens
ccctttatattgaaaaaagatgcagtcaaagtcttttcagacatgcccaaactttgagaatttcttcaaccatctaatgctataaagatttttgttcttcctgttcacaaccagttgtataacagaaatactagctactgttttccttcctgtgtgtgaagtaatgaatcattgattatgtgacttgttatgtattcaattaaacactaaagaataaaagggggggcccggtacccaattcgccctatagtgagtcgtattacaattcactggccgtcgttttacaacgtcgtgactgggaaaaccctggcgttacccaacttaatcgccttgcagcacatccccctttcgccagctggcgtaatagcgaagaggccc

SEQ ID NO: 409 - DNA, 116561 bp, Homo sapiens
gatcataagaaggaaccatctcagagggagagcattccaggcaggaggtatgagagcaaaggctcaaaggtggtcatgagtttggcctgttagaggaacaggaagaagatgcatggcaagggatgggaacatggcaggagatcaaggtagaaatgcaggggccagatcaggcagggccttctaggtcatgaacatatgggaatccactggagtgtttcaagcaggagaaggaaatgatctgattggtgttttaagatcatgctgacttccttatggagagtggattggtgggcagagggatggtggagaaaagtgtaaagattaaggatatgtttggtgatgaagtcaaccagatagcctgatagattagatgtcatggatgaggtaaagagaggaatcaaagatggcttctatgtgggggttgaacaactgcatggatggtgtctgttcaggctgctacatcaaaataccttagattgggtggctcataaacaacagaacttttttcttatagttcttgaatgtgagtcaaagatcaaggcaccagcagattcagtatctgatgagggctcaccctctacttcatagatggcaccttcttgctgtgtcttcacatggcagaaggggcaaacaagctccctgaggcctcttctgtatgggcactaatccccttcacctgggctgtctcctaaagtccccaccccttaataccactgcactagggattaggtttcaacatatgaattttgggaggagaaggggggccaacattcagaccataacagatggggatgccatttacagaactgaggaaggcattgggggagtgaatttggaggaaacgttgagttgttttgaacatgtcagtttgagatacctactaaacatccacatagtagtgtcaaatagacagttggatttatgagtctgcagttcttaagagtagtctaatctaaagatatagagtcagaaatattgtcattgtgcatacccacctaggccgagcacagtgcctggcatatagcagccagcctaaaatttgggtgggttggttgaatgaatgaatgaaattcttagagcttcagaatgagatagatcttggttcaaatttaaatcctggctctgctacttactaatttaaccttgaataaggtattaaacctttcagagcctcaatttcctcacctgcaaaatggagatagtgataatacttatcccatagggtggttgtaaggattatactaaataaaccatgtaaatcacccaaggtgcttagtacagtccctggtgcatagtaagcactcagtaaattggtggctgttacaatattcaaaatatgagataggccccaagaaagcaagccttggagagacactccagagggcagccccacagggtgggacaatgtagctcagctatatgtgtgaagcagtaatgcctagtgggtaggtgttgctcccttgagccaaactgtctgggtttataatcctgactcagccacttagtagcttacttaacctctatgtgcctcaggggggtttagaaattattattatttaatctctaaaatagggataataatagacctacctcatagggctgttgtgaaggattaagtgagataatccatgaaaaaggctgagaacagtgcctggttcatattaagggctcaatcaatgttaggagctattatcacagggatgtaggagggagggggatgcaaacaggcttcagctgtgcccttgacctccctccagagaagacagtattcagccctgccaggcagcagagcccgtttcatgcagctcttctctcccagcactctccttcctactcctccccggctgtggcctcccagtttttgcaactccctgaatagcttatgaacctttgccagggttggtgtggaaaaggccaactcctccagtagagagggctgcagaagctcagcctcccttcacactgggggaagtgttagccacaggctacaggcaaagggaatccagatccccaagctgcctgaagttatctagaagcagagagaaataaccaactgagacagtcccagagggccccccaagcttcttttccatttaaatgctctctttgttactaagaagcaaacctagcccatccccactggcaccagcctgcccattgtttccctaagagaccatcccaagccaagtgctggggctacctctcccttaaaggaatggcagcctggaggttgcactgcagtaagagcatcatataaccaaaattctccacaactaatggttctagaacaggacccaggtcaggtgtcatgggcagacccataaagggcccaatcactagagcatttgacctgcctcttccccccaggcttggctacctgtggtgattaatgctctgaggcctctgacatctgagcaatggacacaaggctagagcctaatcccacctacatttgatcaaaatggtaggccttgtgggtttgttccggaggtgagaaagcattaaatattccactggaaagacacaatggagagattgcgtaagtagacggttctttgggcagaagaagatggatggatctgaagtgggaagtgccagaagaaccctttctctaaccaggaggggcctctggtatccttgcagcttttagctctcagtgtgatcagtagactgtctgcttgacttacccaaactcccacttcccctcctgtcaggtatttgcttgggggctattcatctcctctgtgttcaccttccattcagctgaaaaagaggaagaggatttcccagctctgtcttcatccatgcattttttttttttgagacagagtcttgctttgttgccccggctggagtgcagtagcacgatctcggctcactgcaacctccacctcccaggttcaagagattctcctccatttcaccatgttggcctcaggtggtcctcccgccttggcctgccaaagtggtgggattacaggtgtgagccaccgtgcccagcccttattggagttttttttgtttggtttttgtttttgttttttgttttttgttttgttttgtttgagacggagtctcgctctgtcacccgggctggagtgcagtggtgccatctcagctcactgcaagctccgcctcccgggttcacgccattcttctgcctcagcctctcgagtagctgggactacaggtgcccaccactgcgcccggctagttttttgtatttttagtagagacggggtttcactgtggtctcgatctcctgacctcgtgatctgcccgcctcagcctcccaaagtgctgggattacaggcatgccttattggagttttatgagcatattctgtgatgttgaatgtctagtctataaatgattgcctagagaagacagggggcttaaggaacctttgaacgcccccactggttttggagaggtggtgagacttttggactcaaataatggctactgtgatgttaactgtgtttattgatttacagaagctacgaatggtgcagtgtacaaatcaccccgaaccttggtggcttaagacatcagcaatcatgttattacctctcatggtttctgtgggtaaggaactcaggaagggctcaggtggtagtcctggctccaggtccctcatcaggttgtaatcagggagtgactggagctaaaacagtatggggtgaggagaatggggctggagcagctggggacaggccagacacctctcacttcatgtggtctcggagatcttcacatgatctctccatgtgagtcggtttgggcttcctcacagcatggtagcagtcaaaccaatcacagggtggctcatggcttcaagtgtgattattccagcaagcaaagtggaagctgtatcctcttctacgacctcgccttggaagtcatctagcttcacttctgccatagtcacaaagctgcccagcttcagggagaaggaacatagaccctacatctcaatgggggagtgtcaaagtcatactgtaatacgctcatgcggaacagacgatactgtcacagcaattgtgggaaaatactccctactacaccaatcctacttcctgctcttccctcagctgaacctcagacaagccttttgctttcttgcttgcagctgtcagctggtccctcactctgggtgcccttctctcctctccagtgccttcaggccccaattggagtcccacctcttaaagtttccctaacggcttccataagcacaacaagcagcagttttcccttattcatagcaagcagacacttacatgtttgataggccaaagagttgctccacatttggtcagggccaatctgaccagtgggtaggtttccacatctgggccctaatacctggccaggtggaacatctagattctgaaacatcctcctcattcttccagggtctcagaacctcagggtgacatagcttctggccataaatgctaggacagagctatgttcattgtgcaatgtctcttccaaggtaggcacatgggcagatgaggctctgtgcagaaggccttggcagtcagatgagaggtggcagtaaaatgtgttggcaagagcctttggctgggaatcaggaagccagggtccccgaaccagctttctggctaatttgatgcattcatgatctgagacaaacctcccaatctccagttgacctcagtttccctacctctgcagtataaaacctagagcttgtccttcctacctgtgtggtgagcagacaagaagagagacagggctgggcatggtgactcacgcctgtaatcccagcactttgggaggccaaggtgggtggattacctgaggtcaggagttcaagaccagcctagccaacatggcgaaacccttccctacaaaaaaaatacaaaaattagctgggcgcggtggcagatgcctgtaatcccagctacttgggaggctgaggcaggagaatcactggaacccgggaagcagagattgcagtgagccgagattgcaccattgcactccagtctatgagacagagcaggactccgtctaaaaaaagaaaaaagaagagagacaggaagaacttctcaagagtagaacatgctaataattcttgtactgtatttgtttcttctctcagccgccacttcctctctagcatgtaggctccaaggtagtgggtgagtccgtaggcgcatgattatggaacagggatgggccaacagcctttccctatacacatacagtaggattcaggcaggggggtttggcaatgtggccattccccagttgctgaagggcttaccctgggtggatttggtgaggctgagcaaatggttaggcacagagctaacaattccaccctactctgctccaacacacaccccccgcccccattagaatgttctttattaggctactaattggctgtgtggcctcagggggattccttcccttctctggggcttagtttccattgaagaaagtgaacatatcaccacccctgcttctggagagaagcttgattatttcttgacccccatcatttctattgtgcaagggtggcatgtgatctctccagggctgggaagcattaagtcagaatagctgtcatcaaaacaatacatgctttcctcaaaataaagggggctcccgtaggcaccttcacctcttgggacttaaaggctggctgaggcagagtgtgggcccagaagttagcaaatctggacgtgtgaagtgaccttggctaagtcagagaatcccaaacgcgcagagctcaaaggcactgccaaaaacctcaagcccatcagctgtcagcctccagaataaatgtgtcccagatgacgttcacatggccacgtcagagtttggggcaattctccgtcagctgaaccttcatccctcttccttccactctggaaaacatatcacttctctcgacttctgagaagaacttgcacatgtgcacaaaggctggccaccgcagcactatttgtaatacagaaaactcagaacaacctaaacgtctcccaccagggggctgattcaatcaattatgggacagccatattacagaatgctgtgcagatatctttttatgtatgagacataaatgtgtggataaagttatccaagacatatttttattttattttaattggcaaataataattgtatttgtctatggagtacaatgtgatgttttgatgtacagctggccctacttattcgtgggttctacatccaaggattcaaccaagcttggatgaaaaatatttgggaaaaaataatggatgttgtgtctgtactgaacacgtacaggctttttttcttgtcaggattccctgaacaatataacaactatttacatgccacttacattgtattaggtgttatacacaatctagagatgatttgaaatataaggcaggatgtgcataggttatatgcgaatactatgccattttatatcagggacttgagcatcctcagattttggtacccgcaagcagtcttgggcccgctatatgtatacattgtacaaagattaaataaagttaattagcatatctatcacctcccatatttatcagttttttgtggtgaaaagcatattgttaagtggcaaaaaaaaaaaaaaaaaagctgtggggctgggcctggtggctcacgtctataatcccagcactttgggaggccgaggcaggcagatcacctgaggtcaggagttcgagagcagcctgaccaacatggcaaaaccctgtctctactaaaaatacaaaaattagccagtgtggtggctcgtgcgtgtagtcccagctactcggggaggctgaggcaggagaatctcttgaacccaagaggcagaggttgcagtgagccgagatcacgccactgcactccagcctgagcgacagagtgagactctgtctcaaaaaacaaaaacaaaaacaaaaaacaagctgtgggacaatatgtatgatacaatatatgtgataaaatgtacacaactatatatttctataggtactgtacatatacatgtaatgtatgcacggtatgcaactgcaaggacagaagtgtaggataccccaaaccctaacagtgttcacccccagtaaaggtactaaaatgagaaacgtgtcttaaggagttctttccaaataactaaatactttggatttttgccaacgtgagttgattcatcaatttattttctaattaaaaatgcactttcacagtaaagcatatgaaaaggggcacagaaacagattagtggctgccaagggttagggatggcttggagggaacaggtgggcatgggtgggtaggagtaacacgagggagtttattgatggtggtagttatgcaaaactatacacgcaatgaaactgcataaaactgtgcacacaaacatgcacacacaaatgggcgcatgaaaaagcttgagaaatctgaatcaggtctggagttcacttagtggcattgtactgatgttatatccctggccttgacattgtactatagttatgtaagatgttaccagcggggaaagctgcctgaagaggacatgggacctctctgtattatttttgcaacttctcgtgagtagttctttgaaaataaaaagtttactaaaaggggggcacaaaaagctttttgaatatttggaggtgatggaagtgtttcatatcttgaatgtggtagtggttacatgactgtttacctttgtttacctttgttaaatctcattgaacttgtacacatcaaagggtgaaattatgccttcataaacctgactttaaaaagtctcaggccagaactgctctcatttgttaagatgaagaaatcatttacaagcttgtgtgctttgttgtttatttcaaaattacatgcaacacacttcacaatgaccagtgatgcctgtgcccagtgggaggtccccgttagatgctcagccacctccagcgatgaggagcccatcacttaatattgcagcccatatcattgtcaggagaattgtaatagaaagttcttgattaggcctgtaatcccagcactttgggaggcctaggcggacggatcatttgaggtcaagagtttgaaaccagcctgcccaacatggcaaaaccccttctctactaaaaatacaaaaattagcagggcgtgttggtgcatgcctgtaattccagctactgggggtgctgaggcaccagaattgattgaacccaggaggcggaggttgcagtgagccaagatcacaccactgcactccagcctgggcaacagagtgagaccctgtctcaaaaaaaaaaaaaaaaaaaaagaaaagaaagaaagaaagaaaagaaaaaataaagttatttattaggctactagttagctgtgtggccttgggtagattacttcctgtctctgggccttaatttccttataagaaaagatgacctctgagatcccttctcgctctaacattctaagtctctaaaactgggaatttaagttttgacctggttttgccttctggagtcacacagaacttaaccctgtgtgttgccaacagtcagccagcccatcgtacactagaagtcagctagcagctcagctccctagggcaaacatcatcccctggcctttcccattgtcctaccaagaaatggaattgcaggatctggtgatggttaggatcacaggatcaggagtcaagcagcctggagtctgactgtggactttgccacttcccaccgtgtgaccttaggcaggtcacttgtgcaatcttcagtgtcctatctgtagaaagggaattagtagtaccagcctcctggggagagggcgtgggcattaaatgaggtaatgtgtgtaaatcaggatgtgtggtaggcaggataatggactccccaatatctgcacatcctaatccccacaacctgtgaatatattgtgttacagtggcaagaggaaattaaggctgctaatcagctgactttaaaatacggagatcagcggggcatggtggctcatgcctataatcccagcacttcgggaggccaaggcaggtggatcacttgaggccaggagttccagaccagcttggacaacatggcaaaaccttgtctctactaaaaatacaaaaaattagtcaggtgtggtggtatgcacctgtaatcccagctacccgggaggctgaggcaagagaattgctcgaacccaggaggcagaggctgaagtgagccgagatcacaccattgcactccagcctgggcaacagagcgaatctccatctcaaaataaaataaaatagagagattggggaataatgatcttggattatccagagaggcccaatatgatcacgagggtccctataagtgaaagacagaggcaggaaagtcagactcagaatgctgcaatgtgagaaagtctccaccagccattgctggctttgaagatggaaaggcatcgtgaggcaaagcatgcaggcagcctctcgaagctgaacaaggcagggaaacagatcctccccttgagcctctaggaggaacgcagacttgctgaccccttgattttagcccagtgggactcctgttgaacttctggcctacagaactgtaaaagagtacatttgtggtttggtttgtttgtggcgtcttttaggggattgtttagttttgttcttgtttttgtagagacagggtcttgctatgttgcccagacttgtcgcaaactcctggcctcaagtcatccttccacctcagccttccaagtagctaggactacaggcacacaccaccacgcctggctaattgtttttaaattgttctgtggaggtggggcacagtggctcacagctgtaatcccagcactttgggaggccaaagcgggcggatcacttgagcccaggagttcaagaccagcctggccaacatagcaaaaccctgtctctactgaaaaatacaaaaattagccgggcctggtggtgcatgcctgtagtccccactgctgaggaggctgaggcaggagaatcacttgaacccaggagtcagaggttgcagtaatctgagatcaggcgactgcactccagcctgggtgacagagcacgactctgtctcaaaaaaaaaattcttttgtggagatgaggtccttgctatgttgcccagactggtcatgaactcctgggttcgagtgatcctcctgcctcagcgtcccaaagctctgggattacaggcatgagccaccatgcctggcccatttgcgttgttttaagccactaaatgtgaggcaatgtgttgcagtggcaataggaaactagtacagatggctgctgctccctcctgactggtctccctgcacccacccttgcatctccccagtccatcccccacaacacagccaaagcaatgttcccaggaccttagtcaaactaagtcacatcccttaatacaactcgtctccctgtaccttaaatgtgcctcagggcctttgaacctgctgttctctttgtttaaaagatgtcatggtcgcctaagtaatacctaatctactttcataaactagctcaaagatgaaaatgctgcttcctcaaggaaggcttgaggaacccatctgggtcaggttctctaggtaatagcaccctgtcctcctctgtagcacttgtaggtttttaaataaatccatgtgttgatctgcttcagggcttattgcctgcctttgctaccaggcatgtaagcttcccaagggcagggacagtgtttgtcttattcacctcccttagcccagtcgctggcacaaaggaagcacttaataaatggtagctattatcattattttatttctgaatcctcatcattctgatcacctccccaaacactccctagtttgaagcgtcctttctgtaaagtggtactcctaccttggcccggtgctccaggggtggtatgaacaacaaaatgtagaagctgacagtgctgtccccacctactggggacataccacttctattcatgctgcttaaggctaccttcctttatcaccaacttcatcatactctcagctgcaacagagctggaggtcactcacacctacacacccacctgctgcaatcaggacgtctgccaagccagcttcccgccatcccgtttctgtatggttgctttttgtaacctcagtttcagctttactctcgttcctatggggtcccatcattttcttgggccattgttgtaacctgtcccaatctttccatgtccctattcagccagccattctattaaccaaccctcctggcctcgtgtcatctacaaaactgagcagtgcgcgtccctgtgcctgcttccgaatcctggccaacaatatggcgcaggacaaaggccaggagcaaggctcttgaaagtgctactggagagctcctgaggcccggtatccatctcagggggcagcagaggggggtgtttaatcagcaattcaaactgtgcctaggccaagttcttacgaggctgtgaaattgggaatgatattagtttcctagggttgccataagaaaataccaccaactgggtggcttaaaacaacagaaatatatttgcacgtatccctgtgtaacaaacctacacattctgcacttgtatcccggaacttaaagtaaaataaagaaaaacaaaataaaagaaagaaaaaaagaaaagaaatgtatttgctctgttattagaggctacaagtccaaaatcaaggtatcagcaggaaaatgctccctccaaaggctctcagagagaatccttccttgccccttccagctcctggtgactcctggtgttctttggctcgtgcagcatcactccaatctctgtcacgtggccttcctttctgtgcctgtctctctccgtcttcttataacgacacggatcattgaattgagggcccaccctactccagggtgaccttatcttacttaactaattacatctgcaaagatcttatgtcccaataagatcacaatgtgaattttggggtggacatgaatttgggggaaaacgctattcaacccactacaaatagccattctttctcacaggagcttcatgagggaccagaggataaggtagcacagggcagggcttctcaaactataagagccaagaagcacctggggatcgcattaaaatgcagatttggagccagccagcctggggtgggtctgcatttctcacaagctcccaggtgacatccttgctgcttgtcctgctttgaataacgaggatgtaagtgaaagaaagtgctttgaaaacaggtgtcaggtagggggattacatttcttttgtaatgagtttttctcacactcttatttccccacacctgaatcttgtgtgaactgtggaagaacagaaaaagtgttttcatttcagtcccctccaaaagcagacctggagacaaggacttgggttcaggtagtttattggggaggcggaaatagggaaagggagaaaagggagagaagccaatgaagtgccacattaaagagcaggttgcccttaaggcaactggagctccaacctgcgggggaccactgggaaactgtggggacactcctcagaactgtcctgtcaaagggctggggcatttgcccaccaattcccctcctccatcagttgaaagttacctgggagtgtcaactcctccacactctcccaagtgctgcagaaaaccctccctccagcagagaagttgcaggtgtccgaggtgggaaatagtggcatgctgcaaacagccctgtcccacagctaggtgacctcagctaggctgaagagatgggggagggaggggggtcgtcatcatctgctacaaaaagcttccaggatgtgcacgtcatctgtgtctctactattctattttgagtgcatgagtggctcaggcgagctcttgcttacagttgtgattatgactgtcatccagcaccagtggacaccttgctcataggggtgtcatggaagaatccgttgatggcctgctgaaacccacatgtgccccctctccgctaggcctgccttcccgttggtaaaatagtttatactatgggtgcatgtggaggagaacccaccccagagtaatgtaatcggtgcttcagggtcaccttaggaagaagatacttccctgtctcacagttcctaccttcacctagttcagttgatctgctcttgacattcagtgttacctttcatccacataacgatcctatgaggtagtggctatgattgtccccattatatagccaaggacactgaaggccagaaaaaccaatgtcacttatcgaaggtcactctgtaagtggcagaagtgggattcaatcacagtctttctgattcactagactctgtggattccataggaaaaactaggtggtaggtctcatgagatttaaatcacaaatctaactacacttctagggtgacctgctagatgagaacagcaagaactgcttttatttgtatgcagcttcttgtcctattagaacacagtgtgtccattagaagctgattctttacattaaaaaagaatttacaacaagtaaaatgtgtgtatgagtcagtgtgtatttactttttatgagtcagtgtgtatttactctgtgttggtatttactgggagggatggattcattgggatgaatggatttttcttagataattggtaaatgaatagatgccaactctaataagcaaaagatgccatggagaaatgaaataaattaattcaatgattcaatatcattagttttcaaaacgtcaccagaggatttcctcaactagggacttttcccagcacatcaaaggtaagattccactcccacaagcatgtcaggaacacacttatccacaaaatacgaaaaatccatcttcttctatatttggggccattttctctcccttactaagcagtgaacttcccgagggaaggaagggtgtaggttctttagacttccctacacattgtgtgggcagggccacaaggtgtgtacgcaaagaaatttcaacccctaaattcaggatgccagcacttgaatccacaaggctcttggagggggagggaaagagagtttttctacatttctttaattcttgatgctttgggggaggacacatttattgctcaccacggagaaccgagaaaagaagagcccccagtctccgccttgaaggagctgacagtccattggagaaacaagtggaacacgctggaaacaacccatgcatgatacaggagagctggggaagaagcggctctgactgtaagtgctgaaggggccaaggggcttgggaaagggagagatcagtgtggcctgagaggagaggaggtggaatgaaaagagcactgggctgggagtcaggagacctggcctctagaccagttccttgcctaattctctgtgtcatctgatgtgttcacttctctctctctctctctctctctctctctctctctcccccccctctctttagacggggtctctctctgttgcccagggctggagtgcagtggcggaatcttggctcactgcaatctctgccgcctgggctcaggtgatcctcccacctcagcctcctgagacactgggactataggtgcgcaccgccacacccagctaatttttgtatttttagtagaccctgggtttcaccatgttgcccaggctggtattgaactcctaaactcaaaccatccacccgcctcggcctcccaaagtgctgggatcacgggtgtgagccaccgcgcctggccatgttcacttctctcttacagatcaccctcaactatcttgcagtttagtaagatggtcagaactcctccagatgcatggcgatcccccaggagcaagaaggtccatttattcgcccaacatcttctgagcaccatatgtgccagccaccatgccaggcactgagaagcaaaagtcaaacagataagctgaaatagttgcaactccccacccagctactgtcacttttgcatctttgcttgtgttgtttcattcccctgcaccactctcctcattttgtccttctaggaaaactattgacccttcaaacccctggccaggaatcaccttgtttgtgaagacttctatcttaggacattcaggttaaacagaataccatagactgggtggcttaaacaaatatttatttctcacagttctggaggctggaagttcaaggtcagggcgccatcatggcctggttcttggtgaaggcctgcttcctggttcacaggtggccatcttcttgttgtaccgtcacgtgtctcttcttctagggggctctaatcccataatgggggctccactctcacaacctaatcacctcccagaggccccaccttaataccatcatcttgggagtcaggatttcaacatatgaattttggagagacacaaacattcagaccacgacaacttccccgagctcccgttctaccctcatgcccagcagagttacttcattcgtcctctgtgctcctgtcagtggacctgcatcagtgtccttactgtgctggactgagatggtctctggaaacccctggaggacagggaccaagacatatctttgtacctagtgctggcaaaaggcctggtccagagcagtggctccttcagtaaatgtttgtcaaatcacactgaaccaaatcaaactgaataggatcttcagctccatcagatttcaatttcatttgctttatggtcacctttgggaaaaagggagcttagaagcatttgctgactgtgacagagaggatgccgagagaggggctcggaggtgtttgatcaaatggaacattacagaagagtctataaatggagatcagggctctgctaccacccctacctcacgctccagttgacaacccaaactccagaggggcccatttaataagccaggaccaggcatcattggtgtggcaactgcaaagtttcactgggctggggatgcccatcatgctgcacatagctgtcctccctccccccagagttgtgcaaagcagcagacttgtaccacagatgagcagaggggtgaggctgatcagcccatggtgggatggcccttggcctccaccgtgtatctctcttgtacccagccccactatgggcagagggagaaggcagagaaaaataataaagagtaaatggcagagtctacacacttacatccctacttcatccttagtgaccttgtaaattggcacacagggtccaggggagagcatgtgtcacagctcagttccagctcagctatttccacccctggagcacagaaagctggggcaacatcctggggcacagagggcaacacagtctccatgttttggtcctacttttctgtgctgccttggaaatgaatcatatgtgactcttcccaaccagagaagttgtgaacaccacaggtctgccatctgtattcatccaggggcttgttggggtcagtgcagctgggataaggagaaggagcagaggagaaagccccagtggaggcctggcggcaaagaccgccccttaccatgagacaccataacactgtggccagagccggaggccagtgcaagagtgggaagaggggtccagactagaccctgctgcacactgttaatactccatccttccatgcagaaaggcccagggctgatgagttaaagcccgcaatgaggatggcaagcaggtgagtgacggagtggacacctggacaaacttctaagcaagtgtctttgcaagaaccttagcttttttctgggtacaatgttccatgtccactgccacctcagagtttaggccccagaggaggcccatgcataggattcaggctcaatctgaaacaggtctgggctcagcctcagtctgtggctggcagcccagtccagctcactgggcccgacgtggcctgcgtccatgtgcttggcttcattaacaccaagctctgaccaaccccagtgaccaacccctggcccagtctctaggaacagcttcagttaaaactttgtaagatgccagtaaatagcacagtaatgaaatccacagatgagctaaaactggactgttcagaatcagccaaggatgagatggagtctccagggggcccggcaggctagaaatatggtgaggaaataaccatgtgaaactcagcctgggaaggggccagcaaacgtcatgtgcatgctgccaaattctccccacagttagcaggaagcgggagggctgcggggagcagctgagctaagggagccagagaggcgggatgtggtaggggctcggagcgggtggccccagtccagtcatttgggagtgagtctgtagagacagtacagggaccaaagagcaggcccctgcccatgtgggcccagagaaactccaaggcaggccagcaggaccaaggagttccagggggtgcagagctttaggcgggacgggaagggtattatggatgagtcatgcatgggacagctttgtgtcaaggtaccaagatctctggtgctcacctgtccgctgtggagcccccagcaagcccagaaaatactagaggcagcaaaaacatcagtgatcaagtcagacagacccaggtccgactcctggccctgttctgaacctttaaactagttatctaactcccatcagcctcagtttcttccttccttccttccttctttctttctttccttccttcctttctctatctctctctctctctcttcttatttctttctctctttctttctttcttctcactctgtcacccaggctggagtgcagtggtgccatctcaactccctgcaacctctgcctcccgggttcaagcgattctcctgtctcagcctcccaagtagttgggattacagatgcccactaccatgcccagctaaattttgtattttttttttttagtagagataggatttcgccatgttggccaggctggtgtggacctcctaacctcaggcgatccacctccctcggcctcccaaagtgctggaattacaggcatgagccactgcgcccagcctagcctcagtttcttcatctgtaagacaaaatgttagactttcttcatatggtgtcctgaggacaaaataagataatgcttatgaagcaataagcataattgttagcacacagcatcagccaagagaaggaggaggaggaaaccaatgacccctggtgctgctggagccttgtgtccttccttgtcccttcccctcagagcctgacctccttggggctacaaaccaacctatcctctcttcagctggaaaataactgtcccctcgaaacactactctctgccaatgcctcattaacgaggcattgccactttaatagccaatcatggtcgactcttttactccatccataactcttgcatgagtggagagagcctttacctacaacaaaaatgttgaactttgagcttttcctcaaagatttataaaacaagtcctaatgtgttatttgtaatagactacatctcaacatcgaggctggttaactttggttgttgtagcccagtgagggcccacactatggattccatctgtgtggactactttccttcattctagccctacccatggcctcaaccataattgaacccaaaccttggcctcagcttgagcccccaagctctaatctgcctgcctcagatgaaatgtgaaaggctcaggccaaactcatccccaccgtagggaaaacaacctaaagacatctcatggcaatgacactggcttattggttccttctctctcaattatgagcactcggtgaaactgaagttgcatagaatagactcccccaaggaatgggagacccttggaacctgccctttaggaatttgtcatctcaagttggtaatgacaacagctaggaatccaagggcaagccacaaatgatacgatgttctctcttgttggatcaatactaaaggacctgaggggcctgctgccatggtgaggaggagccttcaggggtacccaggctggactggatgcagggagtaggctgctgctctctcatagatccaagaagtgtttgagcaccaagtctttctcctccttcaatgcccttgagttacaccaacctccagcaagagtttgacccactggtaagattcatttcctgggaacttggcccagaccccagcagagagcctggccttcatctaggctgttgttttccatgagcagttcttgtctgatactaggaagcgtcctgttggattttccaggccagctccactttcccgcatcttgtgccttagtaagaccttgtgtccagaattctggttcagaacatgtgttctgtataaataggaagcctagaaaggaaatatgtagccagctcttatcacctccatcatgtcaatgtcccctcaacacaaaggccttctctggccagctctagctggctatgttcttgctattaactttcttttaactgggtccttatgtctagctacttcacagagtaaatcctagctccccatcttctgcctaaggggctgtgtctccccatcaggctgagagttctcatgggcagggcctatcctttccgcctttttgtgttcctgtgaacaaggctcttgcacccaatggacacttttatttattcattcatccaacacgtatttgctggccgcctgctatgtgccagtctctgagttaggacattgcagtgaaaaatcaaagttccagccctcacgaacctctcattttagtggaaggcaaaggggaaggcctagaagggaaagccaagaggaggcacttgttcaaccatcaagtcttgggcacccactgtgtcccaggctttagactaggtcctagaggcacaatgccacagcagagccacttggtcaggaggagccaccagccaggccagagttctggccaccctcccagaggaaatgtttccccccaggatcctggctgaaggtggtgccactggccctggccagctgcctactaccatccccatcccttcacccttttctccaccacaagcagcacagttggctgtgctgtggagagtcgttcatcagtacatccacaaggagccacattggtgtttccttgaaagccaaggagaagaggtggttcccagctcagccttggagagaggcagcagcatccttcctttaagggttattgttaacatctccattgcctgcactgaccaactgaccagtgggggagtcaaagcccttggtccctccccagctgctcccacaaccttcttgctccaagtggacagtccagcaaggcaggtttctgggagccagggccctactgtggaactggaggaagcccaggaagattgtctggcctggggtttggctgaaaggagagaaacaattgccttgagaacaaaataccagaactgaggactgatcccaagcaagatggcaagatagtgatcccaggaggctgaagggatcatgaggtgagcatggaattgtgctgctcagatctccctccaacagaaacttctgcaggtagcagaattaactgacagtcccagctgccacacttttggatctacggtggtgttcactataggctgctcccagccaatgactaagtccggcagggataccagttccagcccattcctgcctgacatgggactcctccaacaggcaacccttgctccgggatctcccatcaatctggccagactttctcagagctgcactgcagcccaagactcttcctactccagcctcctcccttgcacctctcctttctcaagtgtcagtcccacactgtggtctgaaggtgctccctccttgctcctgcttccatcttttatcctttgcagatccccaccccttccccaccacataaaggtttaatcccatctgatgtctacttctcagaggacccaagctgacctaggaagcaaagatcccgtggatcaggatgagcaggctaacggatatgtgtgccccctgcagccccaaaggaccactacccactgccagagaacattgttttcccaggtctgtgggaggagctgagtgtgggctcctttccagtggcctagaaggggtcccagcctcacatggctcatatcctgctgagaacctgcaccaaccctcccttcaactcaggggtctccattttcctcaagcagaaagcagtcttagaaaattctcccccaacatttccaaatatttattcattttaattaaaaaaaaagaaatccaaatgtacctcaatttacccaagaactgtgtccttgagatgttaagtgcaaattaaattggggggaagtagatcttcttgtacatgctccatgggcctcgcaattaaagggagctctgcagcacatcaaacgtcagttcccatgccatgtatctgagttgacaataaaactgatgactatgggtaaatgacagtaaaactggttaactgtacagaagtcaagcaaacggcaaccacagcaggtccctggccctggggatctcccagcccaccagagagaccgacaggatctacttggagaacaaattcaatcagaccttgatggtgacagcattgctcattcactagctctgagaagcaggaaagagtttagacaagaataaccagggatgccactgaaggtgggtgcccaggcctgggctccaggcctccctaccactactacacagagctaccctcttcctgcctttccctgtctgtcccagttgctctagggtcctcctagtctgtgccctgggcctggccacatggttggctgcctggggaggccctggctttgttcccagtaccagaggttggggtgaagacatgcgggctgactggagtgtggccagccctcagggcccagctgcagggcgcagggccaagttgacaatgccagccactggagacagagtggcaactactgctgtcgcctccaaaataccagttgaggttttctcctactgtggggtttagaaactatttccatttctattatgcctttgttttgccctattttctcttttctttttaatagtgttggtggttgtgcctggaggtgagacaggggagggcaggacaagagccaagagaacgctgaagtcagcagagtgtgctctggtgcctcgcagcttctcttccagcactgcccactcccactgcagggcctgggtctcaatggcagtccctctcagggcctattctccatggacaagaatcagcagggctcttactccaccctatttttccccgatcatgacttcctgtaccgtggcccactcttagcatccatctgtctgctggtaaatgaggatattcactctgtcctgggccaccttctcctctcattgcacactgtcttcctagacagtcccacccacacccatggcctcagttaccacttacatgccataaactccacatttatttctccagccccttctcccctctgattcttagacctgcatatccagctgctctctctcccttagtggctcacaggcacctcaaactccacatggccagaactgacctcatcatcaccactctacccagccaccaaataaacacacccctcccaaaagagaaaagtatcttctcctgcttcagtcttctccatctcagtgaatggcagtaccatccttctagctgttcaagacagaaaactgggggcgatcctgaactctgccctttacttcacccatcagctatatcccatctatcagcaggtcttgtcaatcccatcttctatagagctctccatggttttgatagctccctagtcccattgtcactcttttaattaagacctccatcaactcattcatagacaacttaaattacctcttaatttgtctttctgcctcagtatttacctcttgtccagttaagagaccaccaggtggccaccagattttccttagaaacagatatgatcatgtctctcccctgtttaaaagcctctgctggaacttctacttccaaccacattggagtaaactgaaacagactttttcttctgccatttaaaaaaaccctaaaaaacgtaccaaaatacataaaacagctatttatagacattggacaataggcagtgcaggactgtgatccctgagagaaggtgaggtgaagtctatgatggcctttggtttctgcccaaaggcactttctggaccataatatgggatggggaaaccccaaaagagcatagtgatctcctggagttaatgagtaaaaatattagagtttgggagactgaggcagctggaattttcaggtcagagttctagaaaggaaagagcaacatagaaaaaaagagttccagatatctacatagggagcctcttgattgacttgctgaacactaagctatacatacatagggtgacaccctacaaatccaagcaagaactaccaggaagcgataggctgaaattcccagagtcctgacaagtataggagacatacaatttccagctagccagagtagagaaaccttatggaaaatccagggtattcagtcaaggctgccagaagagtcacacctcaccagtaaggataaactagacctagaataaatgatactctagaccttccctaatcaaccttaaaaacaagcagtaaaaggcccaggccgatatacaagaaacttaactgctttctaaaacaaaactcaagatttcttaaaggaagacacaaaatctagacactcaacaatgaaacatccccaatgtctagaatccaattaaaaaattactagacatgtaaggaagcagagaaaatgtgctgcttccatagccaggaaagaaaaaaaatcagtcaatagaaacagccagaaatggcagagatgatagaattaacaaacaaggacttttaaacagctgttataaatatgctcaaggatttacaagaaaacatggatagagtgaaggaaatataaaatatgtattaaaatagccaaatagaatttttagtggtaaaaaatacaatatttaaaataaaaatttactagatgggcgtaacagcagattagacactgcagaagaaaagatcagtgaactagaagaaatagcaatagaaactacccaaaacgaagcacagagggaaaataaaaagttatttttcttaaataactgatttaatagaggctgataaaaagttaacagaatgaatgggtaaacaaagtgcagtatatccaaacaatggaatattatctgtccataaaaagaaatgaagtactgatacatgctatcacataagtgagccttacactaagtaagaagccagccacaaaagatcacaatttatatgatttcatttattttcatttgttgtccagaataggcaaaaccatacagacaaagtagatccgtggttccttagggctagaggagtcagagggatggggaattgctaaaggatatggggtttctttggaggtagtgaaaatgttctaaaattgactgtggtgatggttgcacatattatgagtattataaaagccattgaaatgtactcattaaatggatgaattgtacagtatgtggattatatattagtaaagctgttatttaaaaaatactaatggagtttcagtgacctgtggttccatatcacacagtctaacatatgtgtaataagagttctaggaggtgctggaggcagaaaaacatttgaataaataatggctgaaaatttggcaaatctgatgaaaactgtaaactataataatccaagaaactcaacaagcctcaagaagaataaaaatgaagaaaatcaaaccaaagcacagtatcagcaaattgctgaaaaccactgataagagaaaatgttagtaccagctttagggggaaaaaaatgacacattatatactgcggaaccaaactaaagataaccacacgcttctaaaccaaaacgttgcaagccagaagacaatgaagtgatatctttaaactattcaaagacttaaactataagaaatgttaaaggaagctcttcgggttgagggaaatgataccagttggaaacacagacttacaaaaaggaatgatgagtgccagaaatgacaaacatgtgggtaaataagaaaatgcttgcttttctcaattttaaagtttttatttaaaagacaattaattgttcaatgccaatgaattgttcacttgaaaatggctaattatggccaggtgcagtggctcatgcctgtaaccccagcactttgggaggccgacaggaggatcactcgaggccaggagttcgagaccagcctggccaacatagcaaaacctcttactaaaaaatacaaaaaattagccagggctgttagtgcatgcctgtcattccagctactcaggaggctgaggcaggagaatcactggaacctgggagatggagtttgcagtgagccaagatcatgccactgcactccagcctgggtgacagagccagactctgtctaaaaaaataaaataaaataaaatggctaattttatattatgtgaatttcacctcaatacattatttcaaaaaatataaatgactgcttaaagcaaaaacaataacgatataccttgggtttatatgtagaagcaaaaggtattacgacaatagcacaaatgatgggaggtacaaaagtatgctgttgtaaggttcttacttgtccatgaagtcatataatagcatctgaggtagattgtgatggttaaaaatgcttgttttaaaccctagatcaactggaaaaaaaatttttagctaataagccaatgacagagataaagtagaaaagtaaaagatttccgttattccttgatacttatctctcaaggaggtagagcttaattcccacccccttgactgtgggctgaatttagtgacttgcgtgtaatgaatataatttctaaagggaaaagcagtaactttacagtggggaaacgtggcagacaccaccttgaccaagtggtcaaggttaacatcaccagtaagtcatgtcaatatcatatacccctgatttgatgggatgacaagggtacatcacctcaatggtattctttccaaaaatgcatatccacagaccaatcaaaagaaaatatcagacaaacccaaattgagagacattctacaaaacacatgaccagtgcttctcaaaactgtccagatcgtcaaaaaacagaaaaacctgagaaactgtcatagccaagaggaacctaagtagacatgatcatgattaattgaagtgggatcctggaatagaaaaaggtgtgaatgggaaaactgggaaaatccgaatgaagtctgtagtgtagtagtattgtaccaaggttaatttcttatgtttgagaaatatattgtgtttatgtcaagtgtttatgaaaggttggatgaaaggtctatgggaactctccatttcacaactcttctataaatctaaaattattttaaaacaaaaagtttttaagaaaataccaggccgggcgcagtggcttatgcccgtaatcccaacactttgggaggctgaagtgggcagatcgcctgaggtcaggagtttgagaccagcctggccaacatggtgaaatctcatctctactaaaaatacaaacattagccgaacattgtggtgcacgcctataatcccagttactcagaggttgaggtaggataatcacttgatcccagagacggcgattgcagtgagccaagatcgtgccattgcactccagcctgggcaacaagagcaaaactgcatctcaacaaaaataaaagaaaatactcaacccaaaagagggcaaaaatagaggaaaaagttgacaaagaatagaaaggaagaatagaaaacaaatagagaagtggatgacctaaattcaacaatatcaataacgacatcaaatgtgaagggactctaagcagtacaattaaaagttagagattgtcctactgcattaaaaagaaaattggactcaacatttgtttcaagcatatgttttaagcataaagacacagatgggttaaaactaaaatgataaagatgcaccaggagtggctatgttaatttcaaagtaagctttaagacacagaatattaccaggaatagacatgtttaatgataaaacagtcatcaggacaatataacaatcttaaatgtgtatgtccctaataacaagcttcaaaatacatgaactcaaaactgacagaattgaaataaatagacaaatttgcaactatagttggagagttcaacagttctttctcagtaactgataaaataagtaaacagtaaatcagtaagagtatataagacttaacatcttgacaggagtggtggctcacacttgtaatctcagcactttgggaggccgaagcaggcagatcacttgaggtcagaagtttgagaccagactggccaatgtggtaaaaccccgtttccactataataaaaatacaaaaattagccaggcatagtggcaggctcctaaaatcccagctaccagagaggctgaggcaggagaatcacttgagcctgggaggtggatgttgcagtaagctgagatagcaccactgaactccagcctgggtgacagagtgagactcagtctcaaaacaaaacaaaaacaaacaaacaaacaaaaaaacccacttaaacagcaccctcaatcaacctgacctaattggcatgaatagaacactgcacccaatatctgcagaatacacagtcttctcaagcacatatggaacattctccaagatagaccataagctggaccatcaaacaagtctcaataaatttaaaaggactaaaatcatgaatgtatgttctctgatctcaacagaattaaattcaaaatcaataacaaaaaagatatctatggaatccttaaatatttggaaattaatgacacacttcaaaataatccatgagtcagagaataaatcaaaagggaaattgaaaagcatttttaaatgaatgaaaatgaagacagcatataaaaatttgcgggatgtcactaaagcagtatttagggggaagcttatggcactcgatacctatattaagaaagaagaaaggtcttagatcaatgacctcagctttgttaaaagaaaaactctagacaaattaaatttaacagagttaaattcagcaaagaccaatttgcaaatcaggcagcttcctaaaccggaatagatttagagtgactccagcactgccatgtggttggagaaaatttatgtacagaaaaaggaaagtgatgtacagaaaacgggagtgtgggctgggcagagtggcttacgcctgtaatcccagaaccttgggagatcaaggctggtggatcgcttgagcccaggagctccagaccagcctgagcaacatggcgaaaccccatctctaccaaaaatagagaaatcagctgagtgtggtgacacacgcccataatcctagctactcaggaagctgaggagggaggattgatcgcttgagacccaggaggcagaggttgcagtgagccaaggttgtgccactgcactccagcctgggcgacagagtgagactctgtctcaaaaagaaaaaaaaaaaaagaaaagaaaaagaaaatggaagtgaggtacagaaccagctggattaattacagctcaatgtttgccttatttgaacacaatttgaacagttggccgcctgtgatttgccaaaactcggtgactcgtacaagagcaggttacagtttgtttacacatccagttaggttacagttcactatgcacacagaaacctttaggccgaacttaaaacacgtaaggaggcaatttcatgctaaacttaacagtttcaagcttaaaaagctagaaaaggaagaataaattaagcccaaaataagtagaagaaaggaaataacgaagataagaacaggaatcaatgaactagcaaatagatagagaagatcaatgaaaccaaaagtcagtgctttgaaaatatcaataaaaacaataaacttctacctaggcagtattagttatatgattgtatatatttatcaaactcattgagctgtatacctataatgggtgcattttattttctgttaattgtacccaaaaacatggacaaaagatttgaactgagacttcactaaggtagatgtaaaaatggccaataaacacatgaaaagatactcaacatcattagtcatcagtgaaatagaaattaaagccatcatgagatgctagtacacattcacttagaatgcctgaaaattttttaaaaataactatactaatcggatataaatcaatgaaaactctacaaagcaatgaaaattacatttctggctggagtacaaaatggtacatccattgtggaaattagtctgatagtgtctcataaaattaaacgtaagctaatgctttggcccagtaattccacttgtaggtatttatccaagagaaataaaaacatatgcccacaacacacctcataaaagagtattcatagaagctttatttatgaaaaccccaaactagaaatagctcaggtgtctagcaatgggtgaatgaataaacaaattgtgatacatccatagattggatcaatggtataccaatacaatcatacatcgcataccttataacttttatggacatacaacatatacaatggcatattaatacaatggatattcagcaattaaaaggaataagctactgatacatgttacaacatggagaacctcaaaagcattatgtaattgagaagccagacacaaaggctaagtaccatataactctgtttatttgaaattctagaataagtaaaactaacttatagtgacaggaagcaagatagaggtagtcaagggtcacgagtgggagtgggattgcaaaagtcttcaaggacatttttttgccatgatgaaaatgatgtaaatctcaatcatagcagtggcttcacatacagggccactcctaaggtgctcagaacctaggaaaatatattttgtgcaatccctgtctacacacaatatttgagtcatccaagactagtgtgtcaataccattctggttgacccaatttcatgcacttctgtcaaagatatattgctctggctagtggagcaatccacttatcatgctgctctcctggaaccgggtctcaaccaaaagtaccatagacgatcccataggtgagaatcgtggagttccttgggacatctggtgggccccaagcacaggatgggggatgtctagagactcagagtgcctggaaaaacacagaccaggtcctatgtctacgtgggacccattctgagctaaggaaagcccaacctgatgacaccactgattccggggcagcagtctcaagccgctgagcctacgtgaataaagtcaaggcaactgtagcatggtgtgctgagacaaaggctctggtttcagacattggcaggaaaccgaaaattttaaggaaagtgctgcaaagtgcagtgggttcctcctgaaatgcagggcatgggacagaagccccatctgcccaggtctaaggtagtgctggtttacatgggtgcagacatttatcaaatgaactgtacactgtatcattgaactgtacacttacaatgagtgcatgttattgcatataaattatacctcaatagagaatacttactaccaagaaagaaaaccctgtagtctcagctactcaggaggctgaggcaggagaatcacttgagcccaggagttcaaggccatagtgagctgtgatcacacctgtgaacagccacttcactccagcctgggcaacatagtgagaccccatcttggaagaaagaaagaaaggaaggaaggaagagagagtgggggggagggagggagggaaatgaaaggaaaggaaagagaaagaaagaaagaaagaaagaaagaaagaaagaaagaaagaaagaaagagagaaagaaagaaagaaagaaagaaagagaaagaagaaaaagaaagagaaagaaagaaaagagagaaaaagaaggaaagaaagagaaagaagaaagagagaaagagagaaacagagaaagaaagagaaagaagaaagagaaagagagaaacagagaaagaaagaaagaaaagaaaaagaaagaaagaaaggaaggaaggaaggaaggaaggaaggaaggaaaaagaagaccgtgtatctcagattcccaggccccattccagacaaaatcagaaagtcttctgtctggacactgagaaattttcatctgttggttctcagttgcctagagaattacatccagggtgcactttccagcccagccctgacgtgcctcctcatcctcagttcctgatactccttttcttaacgggtgctccagacacgctgaacttagaaccagtccctaaaagtgctcacacccctttgcaaaccagtgcctctacatattaggtttcccctgcttgaactcacaccttctccctgcaaggaattcctacacatcgttcaaaatccatctgaaatgtcactttttctgtatagccatctccgaccacctaacagcgttaagatggatggaggtgttatcggtggagggtgtccatgttctccgtgttttgaacaaagaattggacaaaacacacaaacaaagcaggaaagaatgaaacaacaaaagcagagatttattgaaaacgacagtacactccaaagcgtgggaacgggcccgagcagccactcaagggcccagatacagaaacttctcgggtccaaatacccactagaggtttcccattggccacttggtgttcaccccatgtaaatgaagtggtggtctgcaaccagtcttattgcaaccaatcagaggctgaagtgaagttacaaaggtcacacttttatgcaaagatctgattggttgctgtctgcaaccaatcagaggctcaagtgaagttacaatgttgcacttctatgcaaacgaagacttgacccgcaatcagtctgattggttgtggacagcctacagaggctgaagtgaagtttcaaagttacactcctatgcaaatgtctaacaaccaatcataggtactttcaatttcccatcggccacgcagaaaagctgggagcttgcaaagggagtagcctctggtccttttgttacttaggcatggaaagttagggttctcctttcaatttagttctaggaactcagcgtgaaacggccttaggttccctgcctccagaatgtattctcctgcctcagagagaggatgatccctcttcagtgaccccacaaagcttgggacatactttttatggctatgacacttgtcaaaagtggactgttggtacctgtctgggggctttccctcatatctaattgcaaattcctccagggcagggagcataccttcttcaatccagcacctagcacagtgcctggcaacataataggctcttgatacaagctgttcaatgaacgaatgaatcagtgaatgaatctcttcccctttggggactctttagtgggagccttcattgaagagtggtttcaccacagagtgacctataagcaaaaaattttaagagctgggacagcctgggttggggggtgttatttggtcagggaaatattttaaccccgaagattatgtccctgaggtatttcagcctatccaggacttgtatttatgagatggccagggtcagggctcattctgtggccaaaattaggtgttaaatacccattatcatcaccatcatcatgattatcctttatttggcatttatcatgtgtcacatgctggtataaacactcttgtatattagctcatttaatctgcacagtaactctgggaggaaggcgctactgggttgaaccataagaaattgtcaatattcaatcttttttgacccacaaaatagcattttcatatagttcaacctaagttaccgaattcttttaccaaggttcaaggaggtgagtcccttgcccagatttcaatgttcatctctctggctccagagcccttttgctattttctctacactgccagcttctatcagttgtaaaatccctgctataagccagtccacagggtctagtaagtcggacaggagcgggactggctagggtttcaaatgctcttttgcagggaagatgaactgacttggcctgaaaatgttagtcttttagcggtcgtgtttccaattttgttttagtctctcactcatccagaatccacctccctcaccacacacacacacacacacacacacacacacatgcacacacacagaagagccaagcagctgactcacacaccatgccgcagttgccttgactttgttcacgtaggctcagcagcttgagactgcagccccagaatcggcagtgtcctcagttggcacccagaggagctgttgcattctcccctttattgtggagatggctgcagcaggtgctcttgtcctgggggaagacagccattgagattggcagaggcttaagtatgaagtcaaaggcaacacctgatatcagaaagggcccaggcagcagtggggaagtcctcagctggatctttgagccttggacggaatcagcagcaggtagggcagaccccaaccccactgatatctctgctgcttgcttgccaaccctgtgagctgcccactgaggcaataggcctggcagtgctggaggctgggaagggagagacatatagtacagtaagcattgaccccccaggaaaggctcacagtgacccaccccccttcatagtatgagggcaatgacagagcattgtccggattgggggtgggcaggaaatagaggccagggaaatgcacatactcagagcctcaggcatcaggtgggcctgagaggcctggctgaggaatggggggtaagtctggacatgcagacagacttcccatgatattctaccttgagatgaatgtggtcaggaggagagtccaggctggctgggaggttgatctggggctacaagccctgggccccaggagagaggaactggaaaggcttcctccaagaaccccagaagcctctggcctttcccggcataactagaaagagaagcagacagccccaggatcttactcaatgagagcttaaaggcttgccttcctgtttcctctctcatgaaggggcagcctgagatgccacgaagagccctgggctggaagttaggaggccggagtgctagtcccattcccgcctgccagagccatcctctccctgggctacagtgttctccatctgcagaaatgatgaggcaggatgcgtcaagtggggaaggcagttggttctaccagaatcatggttttcaaacttttgcagtttggaacactttctttaaacaaaatctaacagggcaactcaacgtgtaaggtggcagatgaaaatagagctgctctcaacccattcccctccccagaggttcccctagaacctccatggtagcccagagccccttttaaagaccactgggttagagctgtgggcttccaacttgagtgtgcaccagcatcacctggagggtttgtaagaatagattgctgggcccacccctaaagtttctgactgtgtatatgggatggaactgagaatttgcatttctaacaagcacccaggtgatgctgatgttgctggtccagggaccacaatttgagaactactaggttacattctacccaagggccttcctgtgattcatgtccagtcattcaatatttacattaatccacttcagatagattttctgtgatattaaagcataggagaacacctggtattgtccctggcacatagcaggcactcggtcaaagctggtagggtccgttctaaatgctctgcctagaagtctgtttaggtgtacaatcatgttagccactggtcaagggattcacagaagcagaagctttacttttaataagtttacagtctgccatggcccctccacccaccaggaaataacacccccactaattccatcattagaagttactccatgttaaacattatcctttccagatattctctttttttccaggtaaaccccctgggaaggggtagttgttcagtccctgacccctcagcatttcttagatgttttccccatgtgaaggggacatagcttcgatcctctaggagttcttccagggcaaggaccttacctgtatcattctcccccacataccccacggctcctagcccagtgtctggtacagagtggacactcagtacaagtttgcagaatagaataaaggaagcatgggacccccaacttgacccagcccacgtgagccaccagcacccccatcatggccaaggctgctaactggggaactttggagggtacatggggagggcaggtctccagccacacgcacctgggattgctgcccgggaggttttgcaaactggctccaggaatgttcggggcctcccattccccacatcctccttttcagcctcaccacgttcttaaacaaattggcactgaccctggtgacagacttgatcatttccctttgcttcgtgattgtgttaagtgactgccaaaggcctgttcctgaatagtcagcacattcctcaggacggtgagtgggagcccatctgctcctggagcgcttcctttcctttattgtgctattttggcctcaatttcccatttggacaggagcatcttccagccggtggggaaagggagagggtggagaggggcgccacagccttccttcatttctcactcatatccctggtttctctggaaataaatcaacaaatattatactacgtgcctggcgctgctcttagctctccacatgtgtccatggagctaatccttacaacacccactatgaggaaggcacaaatattacccccattttccagatgagggaacagagactgagagaggccaagtgacttgcccaaggtcgcacaatatgtgatagagctgggatttgaacctagacaggtctggctctggagactgagttctcacccattggctctaccaagggtgtggattcttgaggctgtggatctgggcccaatggtatctgaggccatggccctttccctcttcactgtgtgtcagcaggttctaaagtcacttagattgaacacagaattccagcccggcgcggtggctcacatctataatcccagcactttgggaagttgaagtgggaggatcacttgagaccaggagttcaagaccagcctgagcaacatagcaagaccccattattacaaaaaaaattttaaaccggccaggtgtggtggcgtgtgcctgtagtctcatctactcggcaggctgaggtgagaggatggcttgagcccaacactccaggctggacaacagagcaagaccctgtctcttaaaaatttttgaaagaaaacagaattccttgcagatcagaaaaggttatcttcataccttgccactgacccactcgtttaatgcaacatttgaactcacagatgctacaccaatgtggactctacctttgggttataaagggctgatatagtaatgctaaacagctcattgtgtgctcttctccatgtaccttgcctcatttatgtctcacatcaactctaaagtaggttgtagggagaagctgaggctcaaagatcccccagccaaccacagacccagcatgtgggcaattcattactacactagatgttaaacagccaggtagcttttgctaggtgtcaggtgttgtctaaacactctccctcattgattcattcaagcctcataacaatcccatgaagtaggtactattattatccctgtctctatttcgcagatgaggaagccgaggcacagagaggtcaagtaacttgcctgaggtcacacagccagaaagtgggagatctgggatttgaacgaagtctgtcagcttagactgtggggttcctagtgtatgctcttaaccactgcactgtgctacctcttggcactgaggccacctctgggcacttgaggtaccatgataccataaccccctccatctcttctccttgtcttcctgctattccaaattgacttggtatttccaataaccataattctcagaggttctggagttcaaattacagcactgcactcactagcagggtgacctctgtttctttctgtaccccagtttcctaatctgtaaagtgggagtaatatggtaatgagcccatagggtggttgtgagcatgtaggtcaggcacagtggattccgccatcaccaccaccacctccggttgcatcttctccagcccagccccagcatcctgaagggggaaatggtgcttcacgccctttcacttatcagtctcaccctccgtgtctgtctcttcctgtctcaaatgaaaagcagccttcagttaagattccctagccttttgaaaacttggtgattacaattcctcccaggaggtcaaagaaacctatttccctagcattctaagcaggaattctattgtcatttgttaactcaaacatggccaaggtggcccagcccatctcctttcgtccacacccataggagacatagagaatagataacttgactggaacagatcccaccagcaccccatggccagagtccctgagaaagaaattcacagcaaggaaatgcaccaattgcaaataattatttggaatctgatgattccttgcaacgtcagtgactgcgagtgagcctctccctcttgccgtctttacagaaaatgttgaggtactagacagggaatataaattttccagtatctttccctatgttcctaagtgtccctgtcctataattccagtcttgcctcgttgctactggtgtcttatgtcctcagctcagtggggtagagcatagcgctacctataagcaggcagttaggattagaaaataaagtccccttcacttagctcttcatccacaaagcaagctctaaccctggccactgactgagcactaaccccagcctagaatgttccctaaacctgttcagagaatgagcctaaaccttggtaatgggctgcccttagtctcattcacagactgagtatataattgcagagtgaagaaactccaacctggagaggtaaagcaacttggccagcatcacacagaaccaattctctgtcccagccatatattgaccctgaattttagccactaagaacaagattttaagcgtgtgggtgtatcagtgcaagtgacctctactagtaagattccaactcagacaggtgagtgggcaccacatctttgtctctgagggagatgccactgttccagtcttcacggagtactggggttattaaaaagaattcttgcctagggagagtgatttgtatgatgaaagaaatcaataaattgctgttgaatgcagtccaacctcacttattcaaactaattggaggtagcctttcaaattagtgaaccatctgtattgtaggttacttgtaaagtaatgaagctttattgttttgaataattcacagtagctccaagtaagctaacaagttgtagcctaatcgaggtcttaggagacttgccttaatgaaatgaaaagaatcctcagcatcaatcatttgtatgcaaatggtcctaccaaggaaatgataaagtttgctgccttgaagtatagaaactcagtgcacagagtccatttattcaattcatttatgactttgttgagagtggacaaagtcaagacagacagggcccaagctatccccatttggtactcatggagtgtcttctaatgaggttttactgtaaaaggaaacaattggagagcagcaggtgcaatccatccactgataaaataaaagatggttttggaatactgtcacttcctttcatttttttttcctaagaagacattagaaaaaaaagttaccaatgtaagtcaagtacctcggtgctttgtcaaaacccggaacaaacattaaggggaaaaaaatctgaaggtcgaggaagggaaataaacaagaagagtaagtaaagcatgaatcatccattaccacctgatggctccttaaaaataaaaataaaactatggaaggaaatagagtccatgccacagtcaggcatgttgatagggaacctggcatggactcttatttcgcagaaagaactgacctttggcttctaatttggattgccttttcctcaaggccttgcagagcacaaggttagacgatgctcgcctagcaccggttcccaattctttcttgggcactataagtggagccaaggaaacaattttattttcatgcatttaatttaattaccccaccttgtttcccaaagactttgaggtggttaatgacaatgaaaaaataatgacaaaataaaagcagagaattaggaccagggaaaatattaatagaaagttttaaatcaagagttaaagacctgaaaggtcatataaagttgcactacaggtttctaaaaagaggcacagttgggattcaaaccagctcagtccaatggaccaccttcggaaggagcacaggatccccagatggacctatctataagtgtgatcttgggctagatacacaacttccctgagccaatttcctcatctgaatgatggacctaatcaatattgtctatttcacaagctgttatgaggactcaacgaaatggtttctttaagccattgagctccactggctagcagagaacatgtgcttaataaatggtagctatgagaatggatatgaagtctcccatgatgcaatacaaagaatttgcccataatggcatgtcatttaatcttcgcaccagctcaggccttgggcccaggatcacagagaagggagagcagaggaaggagggagtccttggggaggcttcctacagaaggtggtaccccagtcagagcttctgtaggataggtaggatatgaggagatggaactaaaggtgaagaatgagctggaagtgtatgaggacagtaagaaaacctactaaagcagatggccaggtaggaaatgaggttatagagaagaggatagggcaggatgggctcatgaacttgcttgaatcgggccagatggtgaaggaatgtggatgtcatttgacaggaaatggggagtcattgaaggattttgagcaggttgagcaggggaaggatgtgacatgtttgaagggatgttttcaaaggtggagtctgtctgctgctctctgctgtgtgcaggctgtggtgggggttgggagaaacagggactggcagaccagctgcagtgatccaaggaagggacatgataagagctcaagctaaggcaacggtgacggagaagatgggcggttcccaatttcagttagaggcacctgagagggatgatttgactttctttctagactcaaaattccatgaggacagggaccatgctctcctggttcatcactgtacccctaggacctagcaaagtgcttggcacatagcaggcgcccagcaagtgttttatgaatgaatgaataaatgaatgaatgcctctatgcagacagacactgaataagaatggttgcttgctcaataacaagcaatagtacaaggaaaacaaaatagagaatttttttaaagaaaacattactttaactgactttctttcaccatccctggactacagtaacaatgtggtataggaatgcaactcaggagaaatctagagctgactgggaaagaagccctttaaagcagaacctgtatcagcagtgacgctctataggaagcatgccaaccatatgtcccctggacagttcgcacagtgtagaaacatcacaatgcaggtaaattatagataggagaagaaaaatggcagtatttacctcacaaaaggattaactgagcttccatttaaagtagcaaactgcctttctagtgtacttaatttgagaccaggacttgacgtactgaaactgggttccatccaagacaatatagagtaattgtctatactggtaagagccttgatttgggagtacagaaacctaacctttgacctaggcaagtagcagaatgtggtggttacattcacaggccgtggaattgtgctgcctggatttgcatcctggtgcaacactgactggctgtttggccttgggcaagtggcttagcctttctgtgcttcagtttcttcttctgtaaaatgtgatgatacaacacctgatcctggttcatgaggttattgtgaggattaagtgaggtaatgcatggaatgtgttcagcaatacctagaacgtttcagtaaatattggctttcactcttaatcctaactatatgaccttaggcaagtcacttcccctctctgggccttggtttcctcatgagcctgaagcttcttttattcataccttagggatgtggcccctacctgtactacaaactcatcatctatcacacataaaagcatctccaccctctggggtccccagttgataactctgcccatagaaggaccattgggattcctagaaatgagcaaaggcccaaatagacaagactaggatagattcacttttcttagtatactttgtaaaagttccaactcactcactcagctcccacttctaaatcttagcctcctcttttcctcccaagcagccttacttccttaatcatcttcatcccaggccctaagggaaaggatgctcaagagcactgctatcctctggacagctcctctagccaaacccccatttggatcccaagtttttcctttaggtttctcctccccaaccccaactccaacccagggaactgcaatcgcaccaacctctgctgccctctgctgtctagttccagatgtgctggctccagttgggccagttatgtcagcttccaaggacctgtcagtttttccaggccctagctgccactgtgacctcaggaatacaactcagatgccctctgcaatatctgtgctctcccttaatctggacaaatgcacagtctttcctattcagactcgacagccaagccacatctggtgtagtccatgagttcagaactgttattttcagcaaagaaaggaagctgctagagccatccatactctcatctaagcccccttctcaaacattctgcaatcatttattacgcatttgctgtgtgccaggcactgtgcaaaatgctgaggatgcattcttattgaatcctggcatcaaccttcccagtaggtaaaattattattattacttccattttaaagatgaagaatctgagactcagaaaagtgaatgtcttacgcaaggtcacagagccaatgaatggcagagatggggcacaaaaacagatctacctagccccaaagctggtgttcttaaccactggccatagtgtggagggtagcttggaggggaagagagtgaaagcagactaatcatttaggatctatggcaatagtccagggcagaaagcagaggaagtgatgatctttagatacatgtaggaggtagacttgacaagacatggtgtcaaggcaagggggagggagaggtctgcaatgaccctcagaattctggcttgggcaactgggtggacagggacatgttggggcatgggggaaatgaagagatccattttgcacatatggagaaagagacatccaggtagggaaggtcagtaggcaatttttttttttttaatcttgctgtgtcgccagtctggagtgcagtggtgcgatctcggctcactgcaatctccgcctcccaggttcaagcaattatcctgcctcagcctcccgagtagctgggactacaggcacatatcaccatgcccagctaattttttgcgtttttgtagagacggagtttcaccatgttggccaggatggtcttgatctcctgacctcgtgatccgcctgccttggcctcccaaagtgctaggattacaggcatgagccactacgcccagccagcaattggttttatgagtctagagctcaggaaagagacctgggccagcaccgacttggagatgggtgagagtggagtgtaattcatcagaagaaaagagggctgaggccaggacatcaatatttaaggggaagggagaataaaagaagtgtaggaaaaagactaagaaaaagtagccacagatgtaggagaaccaggaacaattgtcaaggaagtcaaagaaaaggagaggttcaatgagggaacagttctgctaagttgactaccacagagaagtcattagccttaaaatggccctttagatttgggaagtagaaggctgttctcgttatctattgccatgtaaaaacaaaacaacaaacaaacaaacaaaaaaccttagtggcttaaagcaacacaaatcatggtattatcctatcatctcttatggtttctgtgggttagaaatttggggtgggcaaggaatctggctcagggtctcacctattgttgcagccagagaggggctggaagctagaacattgggtggcggggagctgggggctggcctggggctggctggccttctctctctctcttcctgtggtctcagggcctttccatgccacttctctgcaggggctactctgagcttcctcacagcctggaggtctccggggagtagacctgcttgtatggcaactgaagaccaagagaaagagtcccatgtgctacagacagaatgctcgtgtgcctccgaattcatatgttgaaaccctaatccccaatgtgatggtatttgaagatggggaagtttgggaggtgattagaggtcatgagggtcgagcccacctggtgggatttgtgcacttataagaagagaccagagagccccatctctgtctaccccctccctccctctctctccacctgtcatatcaggacatagcaagaagatggccatctgcaaaccaggaagagtgttctcaccagacacctgatctgctagcaccttgatcttggactcctcagcctccagaactgtgaaacataaatgttcattgttcaagccaccccatctatggcaatgtgtaacagcagcccaaactaactaatacaccatgtttctgtacatcagcaatgaaaaatccaaaaggaaatgaagaaaataattccatttacagtagtacataaaagaataaaatatctatcaataaatttaacccaggaagtgaaagacttgtatacagaaaactacaaaacattgcatatagaaattaaagaagacctaaataaatggaaagttcactttcaccacctgccattggtcaaaatactcataaaaccctgcccagtttcaaggggagtggacaaagacatccccataacctgccatctctcagtagcgaacaccacaaaggtcattaatgcctctagcaagagctcctttagtggagtggtcggggctcagatcagaccactatgggcgaggataggcatagacaactttacagaagggcatacaatacctgaatcaatgaaaagataaggtatattccaggatgtttttaaaaactcagacattttccccagattaatccaaacatctaatgcaatatcaatttgaatcataacaggaatttttataggacttgatgtgctgatcctgagatcatctagagaaggaaatatgcaatatgacagagaagtgtttaaaaaatgggcaggaagtcttccactgccagctatcaaagcacaacacaagctatagtaattaaagcagtgtaatgttggcaccgcgacatagatcaatggaacaaaagagtctagtacaaccccacgtatatgtgagactataatatgcactacataaggcattgaaaatcaatgaagaaaagatatactcgtcaataaatggttacgggacaattagtgtcaaattgggggtggggggttaaggcacaatattcttaaatctgtacctcatgtcatatccaaatacaattcccaaatggattaatgagctaaatacacgtgcactcacaaaaaaattatatgaaactgtgagaatatataggacagtatttccttgttaagtaagtcacaagtcccagaaattataagagtatcttgataggtttttggctacacaaaaaaaatttcagtctctaaaattaaaaacaaagttaaaagggagaaaatacttgaggtatataaatatttgtcaaacagataaatgaagaatgcacataatatataaaaagatctcatttttaagttaataagaaaaaaacaaacaacccaatgagaacatgggctaatgaaaggaatgggtactcaaagatgaagaaaaaaataaaaggcaaataaaacataaggaagcatagtcaacctttaccagccagcaggtaaacacaaagcagcaagagaccaattttcacccataaaattggtaaaaccttaaaccattgatgttatccagtgttgaagacattgtggaaacagctattttattggtagaagtgtgatttgctacagcttttcttggagggcagtttggcagaatctattgacatgacaaaattgtacgcttttctacttctagatatggatcctagagcaatgcttcatgtgcgtgaattttcatggcccctgtttgtaacaatgcaaagtcagaaacaacctgaaggtccatcaatcatgaaatgcaagcagggtagggatttgaggacaaggataaaggtctggaatctcccacaagggcaacagaaaatacagctgactcaggacagggaaaaggattgccaagcagcaccaagaggcctgccgaggttggacaccaaaaatttggagtgatcccaaccaacagggttgggatatattctcctgtagagaagacagatggttcaaatgccctggggtttacttatttattcaataaaaagttatgaatgcctactaagctccaggtagtgttctaggccctgagatataacagtggacaaacataaacaaataggtacacaatataatgtcaggaaaatactctgaagaggtaataatacagaataggaaataaagagtgacagaggcactgtttaaataatgaggtcagggaagtcctctctgaaaaggggacatctgaacagaggactgaatgaagcgaaggaatgagccatgttggcatctgaaaaaaagagcattcctgttagtgggaatggtatatgcaatgaccctgggatgggagcatgctttacttggggatggacattggcaggatacatggagtggaagcacaaaggaacaggagagttaaatgtgctagcaaaagcgaggttggagtgatgggttatgtagtttgagccaaatagagagggaagggaaaccaagggttgctgataagtggagaggaagagcgcagggcaaggaacaggatgttttggtgaagtcaaaaatcaggtgcagtaagagtgaaggagagaagcacaggagggtgtgttcggagaatggggggttggagttcagtatgtcaaaggacagtgatcccaagcagtggcaaggcccaagatgctactttggttgtgggaggctgaggaggagtggaggagaaagggccttgagctgaggagctttggacttgaagaaggaggacattagatgggtcattgacaggaaccttgatatgactcatggtaatggcagacatgctgcagagaggcagccatgagctagttgctgtggtcctttccacgactgaggaagtgttgaaaggcagatgacaggacctgtgacaaaggcagtaacagaactaataggggaagtcaacctcgccaggaggtcaaggaaagcttccagaccaaatgacatttgaggcaagactggaaggaagaggagttcacagagtaaagagaggaaggaagggtgggtattctgggtgaagagaaatgaacaaagaccctgttgctagaggagacactgtaagagggactcaaagaatggcatatggctagagtggagatggcaaggagaggggcataagatggctgagaagtaaagagatcaggctcctgaagaggacagaaggttgggagagtgcccaaagaccaccaaatgaagggttgagtgaaatcaactagaaccttggtgagccccagtggtgctatcgccatgcatccttatgcagtgcaaggcccctgagagggcagcataggtttgtgacatgcctggctgggctttggactcagccagggctcaggatctgacttagtctgtgaccactgaagtgaaccaagctaactggcctacacggggctctagccagatccactgggtctcactagcaaagttcctgaaccataatcactgataatgtttgaatatatgtctctttcaaatctgatgctgaaatgtaatccccagtgttggagatggggcctgggtggaggtgtttgggtcacggggcagatccctcatggtttagtgctgtcctcatgatagtcagtgagttctcaagtgatcaggttgtttaaaagtgtgtggcatctccttctccactctctctgttgctcctgctcctgccatgtgagatgcctattccctctttgccttctgccatgattgtaagtttcctgaggccctcccagaagcagatgccagcactatgctttcctgtacagcccacagaactgtaagccaatcaaacctcttttcactataaattattcagtctcaggtatttctttatagcaatccaagattggcctaatacagaaaattgatgccaaagaagtgcagcattgctataaagatacctgaaaatctggaaggggctttggaactgggtaatgggcagaagttagaagagtttggaggcctccaaaaaaagataggaagatgagggaaagtttggaacttcttagacactagttaaatggttgtgacccaaatgctgtttgtgatgtagacggtgaagtccaggctgctgaggtctcagatggaaatgaggaacttattgggaactggaacaaaggtcacctgtattataccttagcaaagaacttggctgtatcacatccatgacctagggatctgtggagttttgaacttcagattgatgatttagggtatctggtggaagaaatttctaagcagcaaaacattcaagaggtactaggctgattctaacaatctatgctcaggtgtgggagtaaaggaatgacttaatgttggaatttttatttaaatgggaagcagagtgtaaaagtttggaaaatttgcaccctcactatgtgatagaaaagaaaagcccaatttcaggggatgaattcaagcagactgtggggtaaccacttgctagagatatttgcataactaaaaaagacatttcagagatctaagaggcagcccctcccatcacaggctctgaggccaaggtggtttcatggtccaggcctagggccctgctgccctgagcagcctctggacactgcttctcgcatcctggccactccagctccagccttggctgaaaggtccccagatacagctcaggttgctgcttcagaaagtgtaagctgtacgccttggcagcttctgtctggcattaagcctgtaggtgtgcaaagtgcaagagtgaaggaggcttggcagcctctgcctagatttcagaagatgtataggaaatctgggtgcccaggcagagcctgctacaggggcagagccctcatggaaaacctctgctaggacagtgcagaggggaaacgtggggttggagcccccatgtacagtctccactgagggcactgcctagtggggctgtgggaagggggccccggtcctccaaacctcagaatggtagatccaccaacagctcgcaccctgcacctggaaaagccacaggcactcaacaactgtgaaagcagctacaggtgccgaacccagaaaagctacaggggcagagctgcccaaggccttgggagcccaccccttgtgtcagtgtggcctggatgtgagacctggagttgaaggagattattttggagctttgacatttaaagactaccctgctgggtttcaaacttgcatggggcctgtagccctttattttgcccaatttctcccttttggaatgaaaatgtttactcaatgcctatcccccccatagcatcttggaagtaaataacttgttttttattttacaggctcataggttgaaggaactcatttccagatgagactttggactttggagttaatgctgaaatgagttaagactttgggggactattgagaagagaggactatattttgcaatgtgaaaaggacatgacatttgagggaccaaggtggaatgacgtgcccctgccaaatctcatgttgaattgtaatcctcagtgttggaattggggtctggggggggatgtttgagtcatgggggtggatctctcatggtttggtgctgtctttgcattatcaagtgagttctcacaagatctggttgttagcctgaccaacatggtgaaaccctatctcaactaaaaatacaaaaattagcggggcatggtggcatgcgcctataatcccagctactcaggaggctgaggcaggagaatcgcttgaaccagggaggcagaggttgcagtgagccaagatcacgccattgcactccagcttgggtgacagagcgaaactccgtctcaaaaaaaaaaaaaaagtgtatagcaccttcccttcactctctctcttgctcccagtcctgccatatgagatgcctgttccctctttgccttcttccatgattgtaagcttcctaaggcctccccaaaagcagatgccagcactatgcttcctgtacagcctgaagaactgtgaaccaattaaacctcttttctttataaattacccaatctcaagtatttctttatagcaatgcaaaatggtctaacacaatcaccaacagatttcacaagaagaaggaggagccatgggcagctgtgagctgctgaaaaggagctgaccactggatccaccaaccacagcgaaggacgtccaaccctcgccctgaggacagaaactcccttctctgatgcctggctgtctgggtgaggtcttgggcctcatagcaccaaagatcaaatgccatgaaatgagctctttccccctgctgtgtgaccacaccctacacacacacacacacacacacacacacacacacacacacacacacagaggcagggtagctttgtatcaaagcagggcagatgtgatggatgaggcacccaacagcaccacagcagccttctggggctggaaaattgccctccattcagagtattcctttcgggttaaggatggggaggctaggccacacaatggtggggttttgcatcaactccacaaacttgtgctgagcccactctttgctgggctctgtcctggataggacctgttccaggtctaaacatttataaaaagcaagctcctgcccttggggatgggtgacctacgacagaagagttgttgagaaagaaaaaggtcaatgtcagggtttgaaaacagaagctcccataaaatgttatgggagtctccaagatgaatttgaggtgatgagggcttggtagacaagatgaattttgagctggactttgatggatggagagaatgtggacaagaagagatgaataatgttagagaggaagaccttggccactaagctgaagagattgaattctgccctgagggcagtgggagccatggaggatcttcagattggggtgactgtgaggtccaagggacagagcatgggcttttaagttccccagacccaggtttgagtcccagctctgccacaggtcagcttggacctgggcaaagccactttttttctccaagcctgtcttctcttctgcttctgagagccctgcctatctcccagcatgagatgctggaacctgatgggagggtataacgggaattcggaagcagcaatcacatgctgtgcccacaaggccaagagtccccagtccctcagcctgtgaggtcacatgaagagttagattgggcatgtgctagctcaaaagcctccttcccacctgcagaactgcagaacctcaggtatcatttcatgatttcatcctcagtaacttgggacatccccaggggatgctctgcagtgctcatagcccccttgggtctctgactttcctattgccaccggctattccagtccatggcgctgtccacctgtgcttcctcaggctgcttttcacattattgccgccagtctgcccctagactgctgtccttccctgtgaccacctcctgcaatgccatctctgcacctctactgccaagattcactccacctctctgattcctggccttcctccaggttctacccttccccggggctcccacagcaaagctgtttgtatccctggtgctagagttccttgcttgctcgtcactttatatgcattttctcattcacactcatgacattagttgttattgtgacctcagctgcgattcaggacacctagtggttgtcacctggtgggagaacatgtaagtcaggaaggtgtattctgatggaagtcaaggaggcattggtgcccagagagggcaggctcaggttggaagcctggggtggcatgagggtgcaaaataagaggcacagacaggaggtactctagagaagatcacctctgatttcagaatttggcctttaggctagctttggaccaaaaagtaaaacaagcagaagtccactgcctgagtaggccagagcgagactccagtgatgcatgcatcttccaaacaactttgatgcaaagactcggccattcaaccctccccacgttgaatcatttctttccacttcaagcctgttgccaacttgggttgaagtctctcaactgataagagtaaagacagtggtttcgagatagggagataaggaaggagctgatgaaggcaagtgaagttatctttgccaccagggctaaggctgggacccagaggtatgaaaccagagggctgagtattatgtggggaccatccctgggcagagtccggaagatgggggtggaatccccgtttagtttgtttgcttcgggggttggcccttcagctcagctgatctttgctctaacaactgctatttcagcagtgctggatgccagggagagaaagaacaaagtacagatgagactggctttatttagttctagtatgtgaattaacaaacatttgtagaacatttactcttgtctctgcgaggcatgttctgagagcatcaccaacattagcccattgaatcctcataacaaccctaagaagctagtactattattatgccaactcacaggtgaggacactggggactcagggagataaagtcacttgcccaagatcacacagctagtgggtgccagagctgggattgaaactcaggctgattggctcccaagtcagtgtttcaaggctcagttcactgacagaaagacaggaccatgtttgtcctcaaaggctatcttcaggggtcttcccctgcaaaatcccatcagctctacctgcttgcttgcccttcaggatggctactgcagcaaacagaggaggcaggagtctttgagggggcattttccagtgctctggtctctgggaataatttcattaccagtcctggaaggggtgggagagaggagcctggggaaaaggctgcgggagcttcagcagttattgaatgacagcattctcatgttctccttgtccctggtctgtcctctgaggctgtgggctcctgccctctgcttttattcctgagaatgaagttcactgggccacctcactcattttgactctgccccttcagagactcccatgaaggtccgttttccctcttcaaaatggcctattttgtcattcttgaatggatggttgaaagttgctttacacttgatgtggacataagcagactgtaaatccattaaaaatagaaacaaaaggaatggtggccaggcatggtgacacgcacctgtggtctcagctactcagaaggctgaggctggagaatcacttgagcccgggaggctgaggttgcagtgaaccgagaacatgccactgcactccaccctgggcaacagaataagaccctgtttcaaaaataaaaatagaaacaaaaggaatgggcagtttgcctctggggcctccaggctaggtgagcatccatccccattgggtctgtttgtctctctaaagcattcctctctgggaaatcaccttcctcgaacccaaagagcaagggttctgtagagcatttactaggagctgccttgaagctgccctctgattcagctgggcgtgaagacaaggcaggcctcagcttctccatttccctcattgggagttgtgttgtttacgagtgactcacacttcagggtaaccaaatccctgttctagaagctacagcagaaacagcatttccagttcaccaaattagtcttctcagagcgcccaaactcccctttctgtgtcttcttccctattcagtggcatcccccaaaccctccagataggggcatctttgggctttcatttcctcccaggtgtgagtggctctaacagcctcggttccccagagtgcaggttcagaaaatgcaggggaatgggactccccagatcccaagggaagagctggcatcacttcttcagagtgggcactcctggggggactcatcccagctcaagaaagtaactctccagtcacaaccaactttcccaaggggtacagtgggacttgccaagcactacaagaagagaggacactggcttttccagtcagcttggaggaagagagggaggaaaaaaggagggggaggaagagcaaaaaggaggaggaggaggaaatggacaaggaggaaaaaaaaaaaaaggaggaggatgaggagggaaaaggaggaagaagaagaggaagtggaggagcccagaaaaggaggggaaggaggaaaaaggaggaggagaaggaaaacgaggaggaagaagaggtggggaggaaaaggagcagcagcaggaggcaaatctccatccccacagcaaaagcagtgctggagccagagcccagagtgtgggagctaatgggaatcagcttgctggagggaaggggaccgaattaaggaatggctggggctctgccgctgagagggggctgggaaaagcaggctgattgagaccagctgttgtgcctctgtctctgagatctttggactctgcccaggatagcctcacaccctatcctacacgactaggaacttgcacagtccgcctcgggcagcccaaagctcctctgcccaccctggctcccagagccctccaaaacaaaagaccagagaagcactctccacccagcagccagacgcctccttcttgacgccagcccccaccctctgtctgctcgagcccaggaaaggcctgaaggaagaggccggggaaagagccctccctctctcccttgtccctccatccacccagcgccggcatctggagaccctatggcccgggctcactggggctgctgcccctggctggtcctcctctgtggtatgtgcatcctagcttccactggaaggcagctctgacctctcccctctgagctcagaaagggttggagtgagggttggggcccgagtctctttttctgttgcttcctctctctgacttgaggaagagacacctcagggccagtgttgggggccctcataacttggatcgagtctggtttggcacctttccattccccccgttatagaaaaaaaatattctgacactcgttaaaacggtaaggaaaacttaatttaagactaccgcattgcaatagaggagagaaatggggctcaactctgattacagaaaagacttccagggatctgtagccaaggagcagagtgagggggtcagtggatggaaaagtattaagaggagatagcaagggtagggggattcttgctaaaccgactgaacagcattcttgctgacggcaggccagagtgatcagatatcaagggtgtctaaactgacttagcaagattcttgctaagactgggtgatgcaagcctggcaagggcaggacagacacagaaggccaaggtcaaggccaagtggagaagaggctttgggggagcctaactaaactttggtcaggaagagagtctttcctctttgtcattcctgcggcaccctctctgtcctcaactaggtgcccagcccagcgctcccaccctagccttcctttctttgttgtctgtcagcagggcctgatcagtcactcaatgtccagttcctgagcacctacccagtgccaggccttgtgccagggaccacagagtcattcagctgcagagcctgctcttgggagccacagccctggcctcagagaacagcatattctggtgtccagagagacataagttggctgtgtcctcattcttatgttagcatatcagtgccaacattttgccagggatctgtttctacagaaatgggtgtttgttttcttaaatgaacagtatgggtcgcatctgatccttgagtttatgagaccaagataaaatcacacaggacgttcatggtgttgaaccccagccaccctccttgcatctgtagctcagcccactcgaaagtgtggctgggcgtggtggctcatgcctgtaatcccagctctttgggaggccatggcaggcggatcacttgaggtcaggagttcgagaccagcctggccaacatggtgaaacactgtctctattaaaattacaaaaattagccaggcatggtggcgcacgcttgtaatcccagttcctcagggggggctgaggcaggagaatcgcttgaactcaggaggcagagattgcagtgagccaagattgtgccactgcactccagcctgggcaaaagaaggagactccatctcaaaaaaaaaaaaaatgcgggcgcggggggcgttgggcgcagtggctcacgcctgtgatcccaacactttgggaggccggggcgggtggatcacctgaggtcaggagttcgagaccagcctggccaatatagtgaaacccccatctctactaaaaatacaaaaattagctgggtgtggtgggtgcatgcctgtagtcccagctacttgggaggctgaggcaggagaatcgcttgaacccgggaggcggaggttgcagtgagctgagatcgccccactgcactccagcctgggtgacagagagactctgtctcaaaaaaaaaaaaaaggagggggggcgggggagtgtaatgtctccccacactcagggccccattaccatctagggaaatccctccctaaaagacaggggggttagaggcaaggactatcagagaccgctttgtctaattcaagcccctcctttccagaggtccagagcctggagaacttagtccagtgcctggcacacagtaggcgcttaggagatggttgctcaatgaatattgggggggggtcactctcgagtcactctaaattgggggcagagcccaaactagaaactagatctccatatattctgtcccttctgtggcatcacctttttcaggcccacctctcatacttggcagagtgggaggactgaaagtgcgctcacctcttttgtattaagatggcctgggttcaaatccctgttctaccactgactcctggtggcacaagttagacaagttaccaaatctatctgggccttgacttcctcctctgcagaaagtgaacaataatttccacctcatagtgatgtcacaaatatcaaatgagatactgtagatgaattgctgcgttcagtatctggcacataatagggtgtctttaaatactaattaatccatctttccccaccatggcagactaggatttctgtctaatatattgaaaatgagcctggaatgataggcaaagatttggactgtaagaaacagtgcaagcaggccttgaattgaagtcaacccaatgtatcatacaattagatttataaaaggctaaaatgaaggtggggtgattatttagcgtgatcttctagagcatttcaaagaaaatttgataacaaaaatttaatttacacacaacttttctacttcactaaaccctgaaaagacccaattagattagaagaaaaattgatttaatgagcactaaaacccatccaaaagtggcaatcacttgtctatgaaacagatttctttgattgtgacccagggtgctatccagttcagcctgatttcctatgaaatgtgattatttttatcctcaagtagagctggccagcttcgtgcgtttcaaaggatggaggccccgtggggcgggctgagaggatactccttccctctctaggaactagctggtccccaaatgaccctggatttttctcccggcttctagcttgtgcctggggccacacaaagccagtggaccttggagggcaggatgtgagaaactgttccaccaacccccctgtgagtgccccctgccccccgcgcacggcccccctggccccacgcacccccccacccctgccccacgcacccctgcaccgcagcacccccgccctgctctatcatcttctctatccctcattgggtcagttggtagcccctcctcctaccaggctttctcctgatttccggactcttgggcccctcccccctccactccctcccctccacatcagtgccctcccctccctcccattcattcccccagcaggttatctgcttccgtcctgatctgggcctgggaaacccctctaggaggagggaggagggcaggaggcccctaactggcctttggctgaggccaggcagaggaaagaaaagacaaattctagagtgacagcaaaaagagaagcacagaagggaagagggaggaagacagaggttagaagagccaacggaggccgagcacggtggctgacgcctgtaatcccagcactttgggagaccgagccaggtggatcacctgaggtcaggagttcgagaccagcctgggcaacatggtgaaaccccgtctctactaaaaataaaaaaattagccaggcatggtggcgggtgcctgtaatccccgctactcaggaggctaaggcagaagaattgcttgaacccaggaagcagaggttgcagtgagccaagattgtgccactgcactccagtctgggcgacagagcaagactctgtctcaaaaacaaaacaaaacaaaaccaaaaccaaagaagagccaacggaagggcaagagagggaggcctagggtgtgcagacgaggaaaaggcccagcagaaggggcttgggtagtcagcttcctagctggagaccagagtgattctttctacaatcagagtagggctaaggggtaggcatgccagcagcactgtaagccatgggaaaaacgcagtacatctgctagcaatatcaactttatgggacccctggggcaggcaggtgggtgggcaaaccacattacttttatattaaaacaaacatggatatatcgtggagtagaaagcaaaacagcacaaacggaaacatgcttttcgttttaaagctaaaatgacctgtaaagaaatagagaactggtctggaaagggtctttctgggcaatatctcaaactgctgggggcattcattcactctcctctgccatttgggaccagtgggtggcaacctgaaaaagccctgccaagggaaggttgccagataaaatacaggacacccagttacatttgaattttagataacaaataagaatttagtgcaagtatgccccaaattgtgcatgttttaatataatacttacattaaaacattacacattgtttatttgaaatgcaaacataactaggtgagtgtcctgtatttttatttgctaatctggcaaccctacccccaggtagccaaagaaggactgtctgcatggcctggcccaatgccagagctcagacccctgcagttctcacccacacccatatcccagactcaggtcccattactgtcacaaggggtccctttccaaactctccaacacctccatctccacccagcccaggcatcttaatctagactaagcagtaacatcagttgccaccccatcccttcccaagccaggccagcctaacttcccccaaccgctgcttcaggagaggctgggggctcttctggaggccaggggcccagatgtcattttctctaagcaacgtgtgtatctgtttgtttgtgtctcaatgtcttcttgtcatctgtcagtaccttccagttactgtggtcaataccacaatgtcactcacagccctccgccagcagatgcagacccagaatctctcagcctacatcatcccaggcacagatgctcacatggtaagagacagcttctctcccccttgccctctctgctaccctgggtcagagaccacaaacaggagctgttaaaactcagaagatgaagacagagaaaggatctgatgggcaaagggagggaagtagagagcatggacacggtagttttagggcaagtgaaagaatgtatccctctacataggcgggcagacattgccaaacctccttaacctcaagaaattaaactataaacaacttcagaatcaattttcatcaattcccagaaggcagatccagaatgaatgtttagggtatccctgccctaggaggttagaaggtgggctggaaattgggctggaagaactccaagctcccttctggcccaggccttcccatactctgtggaatggagtagcaaaataatccaaaatcctgggttaagggagcgcggggttggttgtggaggggggcacccatcccaccgtttcccctcactagctccaccctccacaccatccacctttccaacaccagcccatttggaagagagggcatttttagtgtcaatgagcttgtttaaattaattttcccacatgctgggaagggctaagaacgttgggtaagtatctgaacttccctgagcctcagtttcctcttctgcaaagagaaatgggtctgtaatgagatctatctccaaggattatgaggatcaaaatatgataatgtgtaaagccctttgcagaagttatgatgttcccagtctactgtgcttgactcaggagggagaaggattagctggaggggaaaacccaaacgagccaaaagacaggaccctagactgcatagaatttgcagggcagggcaacaagtctcctttgcagaacagtccagtgttacactgagtccagtgtgaacagtgtgggggcgggggagttgaactgcaaaagatacggttgctcaaaggaagggaagatattgaaggctgggagagttacagagggcttcctggaagaggcacttggtgtgcttgggcttgtagctgacaaggggttggagccgacagacagaaataactgggatgtggttgggggcctttcatgtgggatctgataccacgaaaaaggctaatgatggtgttgttgatttcctagaacgagtacatcggccaacatgacgagaggcgtgcgtggattacaggctttacagggtctgcaggtgacaatcattacccagccccattgcttttgttggtagatccagaggtggtcacagaggacctaatgtggctagtgtctcagcatctgggaccccagaacctactgtagagaaaacccttctactctctctgtctccctccaccaccccaaaaccatcagattccccagggcacatatctcatagcccaccagccactttctgtgtagaaatgaggcagaggctgccttcctgtgctcattacctctgctgcaaccaggcccagtccagcactcccaggctccgtttctaaatagttgctacttctacctctaaccgctaagaacccgctgattcctttcacatgagggctcatttggagacaaagttttcctttgccggttgttttacggacaacatcacttcacatggccaaatgagacacaaacatataagcccttgatgagatcacagtgtctgaaggggcctcgcaccgtgatcctggcccattgaatgaaatccaagcttcctttcctgatcctcaaacattcctccttgggcttcaaactaccctgcctcgtgcctcgtaggctctttttccctttgccaaagtctctggattattcttgcccagcagtcctcagctgagcctctggtttagcctccctatcagccaccgagtctttacgctgagccccatctttcctgagagcgcctacatgcagccaaaagttgacctcacttctgctgaaagtccacaagcagccctcaacacaaagcagaggtgcctgattcaggacacctttctgccagctccccccacagctctttttaagatctccttcctcacttctttccaatggaggagagaatctctttccagaggccccttgtggcattctcagagccagcactgcattgcacatccatcagctaatgccacgttcctccccttcaccctcacctgcaagtttctctgttctgccccaggaactgcagtggtgactatgaagaaagcagctgtctggaccgacagtcgctactggactcaggctgagcggcagatggactgcaactgggagctccataaggaaggtagaagggccgcatggatttgttccccaagtcttgggacctggactaggttcaggaaggtataggtgagagcgtgcatgtaagaccatgctgggcctctatggggagcttaggaaatttgaggccatcactgactttcaaggctgatctcaaggaagacacacatggtaggaccatcagacagaacccctggctggagagcctggggctggccctgaaggtgacctctgcattgcttcctatctttctttcagttggcaccactcctattgtcacctggctcctcaccgagattcctgctggagggcgtgtgggttttgaccccttcctcttgtccattggtatgctcttccttcagtccctgaatttgtccatgctaacgagggtgactcagcttccctaggatataaagaaatggaccttggtagaaggaggggcggtgggactataaagatagagcatttgaaattgtagttgcagaatgttttgcaatgaggatgtattcatggattgtgtaattaaaatacatttaaaagaatcagtacaaatattttaaaattcatgagtgcagagacccaacctagaagactcagtgaatcattaaagagctagtggatgaataggccaggatgtgcttgaacccagaaccatcctctgtgccctggaaccctgccaatgatgatgctggaatcacatggtaaccctcttctggaaggtagcttagaagggtcaaaagagttgggagggcttctgagtttaaaaaaaaaagggcccctgagaatacaactcccggagttctggggcctcagacagctggcaagcccattcccccaaaggggagtcctcatgaatatgtactgaaaggcttgtgctttagaactggcttctctgccagcctgtccaatggcctgaacatcaccattccttttgactgtgacactgaagccctgataaaataattagtgcccaagagaaggaccacccacagccactggcaatgaaaaagacaagcttagccaatttgtggcagtcagtgttagagtaggctcagggcattaggcttggaaagcagaaagaggatgagaaacataccccagcgtgggcatacatgccgggggtggggggtgggcaggctgctggggcaggctccgggcagctgggctgcaaagggaggcaaagggaaccaggactaactttgcctgaatcacaattttttcctggggtgtaaatgggcaagggacaagtgactccttcttgtctctgcagacacctgggagagttatgatctggccctccaaggctctaacagacagctggtgtccatcacaaccaatcttgtggacctggtatggggatcagagaggccaccggttccaaatcaacccatttatgccctgcaggaggcattcacaggtgattcagtaagcccagtttccttcccaacttgtagcaacgcaggtcccggctgctattccgtaggtggcaaacttcatcatcagaggtaccaaagcagtggtttgcaaaccttagcatgcacctgagtcacctgggatgcttgtttaaaatgcagatttcagggccccctccccttgaggagtctgaatcaaaatgtcctccggccatatttagaaaatgttgggttaaagaatgttaggatttgaaacaagatggagcaggaagggaggaaagaagggaaacagagaaagatgagagaaaatatccaacccctttcaagagagaaaaaatcatgatatgatttgcttgcctggtggcagagactgatccataatgaatcattcagacctttacttctgaccctcttgtgatgaagaatttagatttgtgagatggctggggtcaggtgggccaggagtggacagaggaagtaaataactaagttcagagtcattctgtagcacagattacagttcaggttttgctggaccaatcaggaaggttagaaaaatataacatcaataaccttgaccccgttgacactatctaaatccatcacaaaagaacagtatgttgtaagattcctgtaagtcgtaactaaagtcctgaccaggaccagcctactgattatgaatcagtgtcttggccaccaaccagtcctatctccctgggaattctgaatgagccaatgaacttggattcctagtaacattgatcaagccaagagatccctttccgcatgcaagtccacataatttctcacttagaaaggagccaatacagcaggagggagatttcaaaatagcagccatgacgaaacaagtgaaaattgtgtccatttttctttatctgttctgatgtaacttccagaatcattctttctgcatcttgacaccatttttaaagaaatttgttatccaagactgttaaatcataaataaaactcatcttattcagataaagaaagtcaaagttatgtcgggaaggggaagggaaaaaagaaaaaccttcctggggctggaagggttttgtcacttcccaaaagtgaggggatgccgagtcatcacccgctgccagtcttcaagaaaaaggcacctggagcttgagtttggaagccgaagaacagagttcagcttcaataagcttataaagacgagagagactttccagccacttgcagattttaaaggagaaaggagagtgcaaagggcagaacatgaaaagttcgctactcaaacatacctgtacgcaccagaccattgaaatttgggttcatttggtttctcagaaaggtatcatattcctgaaccttgaaaacataattgcaagtgaaagaagccagtcagagaaggccacatattgtacaattccatttgtatgaaatatccagcactggcaaatccatagagacagaaaatagattagggatttcctggggctcaggggaggggggatagggagtgactccttagtgagtacagggtttcctttggggatgaagaaaatgttctagaattagatcgtggcgatggttgcacaacattgtgagtatgctgaaagccactgaattgtgcactttaaaaagattaaaatgatatgttttatgttatgtgtaaaatacacataacataaattatgtgtaaaatatgtagtaaaataaacctacaaaaatgtattgtacccaaagctttggtcattgttgaatagttttacctgttcacatgaaatatttttcacgacattaagttatttatgctcatatctgaacccaactaggacccttaatgtttatggccttcggccagcaaactcctagtcctgcctaggggtagactctttgaatatcttgcagggggcagggatagaagatgaaaactaaagtcatagaacccagatataagcatctgagaaaggacggtgctgtgacacagagtttaaggacagatttggagactgagaatgttatcaagacagtacggtgtctgtacagattaagagcgtgggccatgcagtcagacagaccagagttcaaatcccagctctacctcttgcatccatgaaaccctagacaagtcactttacctctctgaagcctcagtttccttatctgtaaaatgggatgggtaagaattagaacaatgcacatggagtgcttagcccagtacccgtggcttagtaaatactggggttactgcagagaaagttgaacacggccccagccctacccctttgtccttcaactaggactgctctcttgatctcagtctgcatgattatttattaatcagaaagatacaagagttactacatctcaagataccattctgtgtgctttacaaatattaattcattccatcctcatagcagccctattgaggcagatgcttattatactccatccccattttacaaatgtgcaaaatggaacacagaggggttaggtaatttgcccaaggtcacccatccagtaatggcaaagccaggatttgagccccatctgggtccagggcccatgtcattaatgagtacacaagtaagagtttgtttgaggaaagggtttcgctgctttttaagaggatgcaaaactgttaccctaaggctgaccttccaggaaccgagtgccaaaggcaaggtctgtcacttacacttttttggggctcctttgcttctagggagcacttggcaggagaaagtatctggcgtccgaagccagatgcagaagcatcaaaaggtcccgactgccgtccttctgtcggcgcttgaggagacggcctgtgagtgtggatttgcagacatgggtgggcgcctgggtctccccaatgccccaagcctcccgggccctgcagcacagagctagctcttccccaaataaccatgtgcccaccaattcttgagaactccatggccacagcccgtgggaaccaagaagggtaagggggcaggagctcatggcttcagaaaaaggacaaaaggtagccctgagcaagctgggaccagcccacaggccaccagaggaacgaactgactatggcagcaaagtgcttctgtcccactaaggggaggaggaccaggaaatgcctcccaacaacttagccactaccccagggcactcacactcccagctttagcacccagtgggactctactctttccgacatggctcaggacttcttgtctgatccctatggctgggcttcagatattccagggacccactggaactgtgtgctgactgctaagtatctgcatttttctggggggaaaagatccataactctcaacagcatctcaaagacgcccactcccccaccccccccccccggcaaaaagattgagtaacatgcagaggtagatgatacaagcatgctgttggtaatctttggaggccaaaggaaacagtggggcaaaagtgtcagaaatgcttgcctctggccgggtgcggtgactcacgcctgtaatcccagcactttgggaggccaaggtgggcggatcacctgaagtcaggagttcaagaccagcctgaccaacatgttgaaacgccgtctctactaaaaatacaaaaattagctgggcatggtggcaggcatctgcaaacccagctacctgggaggctgaggcaggagacttgcttgaacctgcgaggtggagattgcagtgagatcttgccactgcactccagcctgggtgacagagcaagatactgtcaaaaaagaaagaaaagaaagaaaaagaaagaaaggaagaaagaaagaaagaaagaaagaaagaaagaaagaaagaaagaaagaaagaaagaaagaaaggaaggaaggaaggaaggaaggaaggaaggaaggaaggaaggaagggaggaaggaaagaaggaaggaaggaaaggaaaaaaagaggaaaagaaaagcttgcctcaggcagatcagcattaaatattccttgtcaattctcttcccagggctcttcaaccttcgagccagtgacatcccctataaccccttcttctattcctacacgctgctcacagactcttctattaggtatggcttttccttagcttgctgttgtggactttctccaacttccaccctcttgatgccccaccactgatcccgccttaatatacagccctctggctgcccatcagctcggcgcctgctgcagcacgaccctttagaaaaccccctgttgtcttttcctgactctttaaacctctgtccctattgaatcccaaatctggcctgcttggctccctggggctggcttcctttgacctccaggaacagagggactgtgactgcctctggtcctttgcatccttagcagatgctcaggaccctccttgtcttcccaccccacccaggttgtttgcaaacaagagtcgctttagctccgaaaccttgagctatctgaactccagttgcacaggccccatgtgtgtgcaaatcgaggattacagccaagttcgtgacagcatccaggcctactcattgggagatgtgaggatctggattgggaccagctataccatgtatgggatctatgaaatgatacccaaggtgggtttgccaggccccagcccaagccaggcaccaatccccactctaggcctgagaagtcttaacctaaagtgaggtgaagcccctcagccattcagtcatctggtcagccaacaactgtgcagtgagttcccttcttggcctaactgggaagagccagaagaggaaacagggatggccatccagagagctcataaaattgtcaggaggctggagagtatacggcctgatctagcagagactttggagtcagccaaacttgaaaatgaattccagctctgtccctaactagctgtgcagtgactttggacaagcaacttagccaatctgggtctttttcttcacctataaaatggcaataagagtcctgacctcgcaggagtcgctcagtggagatctaaaggagatagtgtatatgactgacacatggtagtgtccaataaatggtagctgtcatgatatgtacaggaaacttacactgtcaggacagcctgtcgagtgactcaggccagactctgatccatcccagagtgctggtgggatccgaagacagggagttcattgccaagcaaggcagtgtcaatcaaggaagccttcctggaaggagagagggttcagctggacgtggaaaactaggaaagacagaaagcacacacagagtagagagcattgccacgaaatggtggcaaatctcacgtctgctgggtcctcctgccagtcctctgaaaacacccctgtgccatggagacctcctttactgtgcccccagacctgtgcccccagacctccttttctcctccctgcccccaacaggagaaactcgtgacagacacctactccccagtgatgatgaccaaggcagtgaagaacagcaaggagcaggccctcctcaaggccagccacgtaagtccacgttcaggcagacatggccttttgggagtatccagcctaatgagttagaaaggaaaggcctccagaagagcctgaagaagaccctcaatgaaacaaagaagcaagctgggcgcggtggctcacgcctgtaatcctagcactttgggaggccaaggtgagaggattgcttgagctcaggagtccgagagcagcctggccaacatggtgaagccctgtctctactaaaaatacaaaaattagccaggcgtggtggcgatcacctgtagtcccagctactcaggaggctgaggcacgagaatcgcttgaacctgggaagtagaggttgcaatgagctgagatcatgccactgcactccagcctgggcgagactaggtcaaaaaaaaagaaagaaagaaagaaaaagaaataaagaagcagacaccaaattattcctgggcgcccacatgcacctcatatccttgcccccaatatagtacagtggtttagagcacaggccctggagctagggtgccttgagttcaaaccacagctccacccaattcctaactgggtgaccttgaccaagtcattttacctctctgggcctcagttaccccatctgtaaaatgaggatcataacagtaatcttacagcatatggttgttgtgagaattcaatgaatatgtatattgctctgagcaccacctagcacattctaagtgttaaataagtgttagctataatgatttcctcacactggcaagaggatggctcaatttttaaaaaagaattcttgttaaaattaagataaaccacctcatttaaaaaaaactttgtctcataggaaattttaaacacacacaaagataaagaaaatagcatcataatctccagtgtcccttcatccagcttcaataatccttgactcatggccattcttgtcttgtctataaccccatgttcattaccaccacaaccaccccctctgctgctggattcttttaaaagtaaatcctagatagtgtgtcatttctgccgtcaacacagaactctttcaaaaacaggaacacactatgatcatatataaacactaacaagaattctttgacatcaaatagccagtgttttcaaagctccacatcctggagccgctatctgatctccatcatcttggagcctgtggctgcaaccagacctcacccggctcctctgtttccctgcttccccaactccaggtgcgggacgctgtggctgtgatccggtacttggtctggctggagaagaacgtgcccaaaggcacagtggatgagttctcgggggcagagatcgtggacaagttccgagggtgaagagccacggccgtcctttttggctgactgtcttttagtgtggcagtgggggcagggagggggaatttgtccccttacttagcagaaaggaagatcctcctcatatgcgtgctgggtgggggagggctctggagaacaaggagtgacaggttcttgggtggtcggggagttgagcagggggcgttggatgatatttcccgccccgctgaaagcaggacaactcgaagggccacaacccaatagcgtcccctagtgtctgcttcaggtacggtctgaatctccctggggggtgctgtggctcagaccaggtcagcccctggaccacttgagaataccaggtagggaggaggattcccgaaggcatgcttggcccaggtcagggccggattgtaggtttgaggtacaggatgctctcccaggactgggggagttttcagatacagagagctgggtttcttcactcctatccgtaaaatggaggtggagaggaaataatgtgtgtctacagtgtgtcctctgatcttcctctataaatgacaggtcagggcttgaggagatggaaccaggaggtgagggctgggagagccaaatggtgtccagttgagaggtagaggcagccatgaccttcattggatttgattagatatcccgggcccagcctagtccaggggcccattcattgaccatgccttgccttgtactttccagagaagaacagttctcctccggacccagttttgaaaccatctctgctagtggtctgaatgctgccctggcccactacaggtacttgaggaaaaagaattttctagggccctgttggggcatcctgttgtgtgtgtagaggaacagggtgaggggagggggatgttctgggacctgagtccacgttgaaggtccgaggcccctagccctgtgggggctgggagaggagctcagtgtggagtagggagttgccttgtaatgaaaaggcctgagagctggaggctgggggacctggaaggaagacaccgatgccattggatgcttttccctggcttcccatgtgttgcttatgttagctaatgcttaaagctcacgagttcacatggagagaggtctgttcactcagcctgaaccagccaaggtgggcccaagatacaggctagccaggtgtttggccctatagaaaacaaacccctgcaggcctgcctgatgaaaagctgaccagctgcctccgcctggcatgggcacagcagggagaggtcaatgccctccaagggagtgcctgacatgtcccagaattccctcccctggtgtcccctggtgtctcccacgccttcggctgccttgccccagcccctcctacccactcgggctagagtggcagggtgggtgctcctcggctttaccacctcttgctcagcagccccaccctggaggtatcctcccttcctgtgctctgcttcttctcagggccctctgctctcggaggcagcaggaagttagagacaaagggccggagggagcatctgggtagaggcccagctctttgccgctttaccgcgcatcctcgtgcaagccccttggcctccataggcctgcttctccttatggaaaaggagacagctgagctggggggtctctagggctctcccagctctcatattctgggctttaccctctctctcctccctggggaccagggcctggctcagccaggtgcaggattaacagacgtgtgctgaggacagcagcaacggaagctgagttctcttccagggccctttgggatagaatgacttcctccagagggactggcctggaagcccaggccccagaggtcctcccaccaaggcctcccacgtgacccagtgcagggttaggctgcccttctcaacattctctccccttctcagcccgaccaaggagctgaaccgcaagctgtcctcagatgagatgtacctgctggactctggggggcagtactggtatgtaccccgacctcaccctagcctggatgtctctgctcagacctcctgagcctgccaagagtcagccaaagctttcccttcctgggccacggattcttcgtctgaaaaaggagagatctggaatgagccccgaacatcctacccattttcacacatgggggtccctgcacagtgggaaatacacagaggctggaatagtggcaggacccaggcagcacctctgtgggaattaggaaaagactccctttgcttaagttgctgttttttgtgggttgtttgtttgtttgtttcttgacagagtctcactctgtcgcccaggtttggagtgcagtggcgcgatcttggctcactgcaacctctgcatcccgggttcaagtgattctcctgcctcagcctcccaagtagcttggattacaggtgtccaccaccatgcccagctatatatatatatatatatatatatatacacacacacacacatatatatatacacacacatatatatacacacacatacacacacacacacacacatatatatatatgtatgtattagtagagatggagtttcaccatgttggccaggctgttctcaaactcctgacctcaggtgatccacctgccccagcctcccaaagtgctgggattacagacatgagccaccatgcccagcctcaagtaaaatgttttctaagtccacgtattattacacagtctgagcaactatactcaatgtccctgcctggccacacaaacacatataccctactctcatccactagtgcacaccctggacacccccgcaccaccaacgtcatgcagactcctcagccccctcttccccatggcactgttcagggtggaggtgggggcagatgagagaagcaacccttttgatgggctacctttgtacagtgtacaacctgaatgctcagacatgacagccgtgcagaatagactaacctggccaggcgtggtggctcacacctgtaatcccagcactttgggaggccgaggcgggcagatcacctgaggtcaggagcttgagaccagcctgggcaacatggtgaaaccccatctctactaaaaatacaaaaattttccgggtgtggtggagcatgcttcccaagggaaactgaggcaggagaatcgcttgaacccgggaggcggaggttgcagtgagccgagatcgtgacactgcactccagtctgagcaataagagcaagactataaaaggaagaaagaaagaaagaaagaaagaaagaaagaaagaaagaaagaaagaaagaaagaaagaaagagggagagagagaaagagagagagagagagagagagaaagaaagaaagaaagaaagaaagaaagaaagaaagaaagaaagaaagaaagaaagaaagaaagaaaaagaataggctaaccccattccttccaaacgtgtgactgatcattcacaccagagttgagctgagctgagctgacctgaaagattttcccttctcattgaggaaggaagtgtgggaagcgtggggtgggacaaaagaagggccgtactgaactgatggaggagcaaggagtcctgtggaaatggcgaatgtgctaacgacagaggctctttgcttgttcttagcacagctctaggggatccagagtagcaggcgctcagcttagcagcctttgctggtcaggagttcgatgctgtgtgtacttgagatggccaatgagcaaaggggaagtgaatttgtgggggcgttgctggaatggggtgtgctcagagtagggtgaggccggggaaatagtcacctcacttcctcttctttccttctgaagaagaaggtcaccacaccccatgacccaaggagaagccccagggccctgggaccatttctcccctctccctcaccaaggcatgatcacaggggccatctgtggcaactgctgcagctgggagttgggagtcagaccttgggactgaggcttcacctaactggaactcagcaagtcactgggtcagatccgtgtttgccatggagaggactgtgtggagaggcagtgcttgctctaggcctggcttcactgaggttcagagagggaaacagccgcatggcctcaatggcctcatctgtgaactggggataatgaggcctcttctaccattcttcccagggagcagcaaaagtgtcctataaatggtcgacaactatctgaatatgagagtgttatgataatataatctctctggacctcagtttccccagctgtaaaaaggggacattcccctttctgcctcccaggaagcctggaagaagccttgctttcataaccagctggacccaaggaaacccagacctacagaacagccaaaatgagtgggatgggggaggagtgtgtagggtggggagtcacacttgtcagacaacttagtaacttttaacttgataggtttgcagaggcctttcacacataggtgctgaagaggggattttgattatggtagctgtcttcttcctttcgccgtccacccatcccatcccagccctgccacttgtggaaagcacacagaaagcacatggccccagtccctagccccaggcatttggcatgttggttttccttctccatagggacgggaccacagacatcaccagaacagtccactggggcaccccctctgccttccagaaggtaagcatgggcccagatttcccctcaccaccttcccccaagggggcacccaagcagtcaagatcccttccatttcagaggctaaaactgaagctcagagaggttaagtagtttgcccaaggtgacaccactggtgccggaaaacccagtgctccctgctgcttccccggggatatttcaggccactgacaaggcctcagcccaagctgagcctcatcctattctggtaaatcagtgcacaaatatttttttgttgttgcctgtgtgcctggccctgtactcagcagaaaggagaaagaaaggcatcccaagtggaggaaaacggcacaagtgaagcctccgcggtggaaaggagccagaggtgttcaggaaacatcgagggctggccagctggggcagaggcgagggcattgtctctgtgcaccagagggccctgggggtggagcagcgagctgccgtcatgctgcatgcagcaggccgactatggggcagacattgtgctggaaacacagagaggggaacaaaatgctgtccaggtctccaggagctcacagtttagcggcggagtctgctgcctctggctgtcctgcccaaagtgacaagcctgtgaacctgtgtggtgatggagattgaccacatcgcctctggaagtgaccagaagaggccactgtcaggccacctccctccgctgacagaggaaggctaagctgccaagtcagcaaacctcaaccctcatgaaaggccttaagaaaactcagcagccgtcacaaccacaggaatgagtgtgctaaacttccgtgaagcatgcacgctgttggcagcaccttctgtacattagtctgcctgcctctcccaacaaccttaggagctaggtcctgttatcttcccatcgcagataaggaaactgaggcacacagcagttaaagtcgcctgcccaaggtctcagagtgagtggctaagtcaggattcagcccagggagtcacagcctcggttcaccgccaccaagtgtctcctgcagatattgtaatgatcctcatagaccagccagagggaagcacgtgatggagccccagctttgggaaggccctcctcagcctctgctggccatcttccagaacccgggcagccacacataacgatgagactccccccaccctgcctacacacacccaggcctgggccctgcaccgtgtatccataggccaagcagctggatactcctctggctcctcctcccgtcctccatatcacctcttcctctccccatcaggaggcatacacccgtgtgctgataggaaatattgacctgtccaggctcatctttcccgctgctacatcaggtgggtttcagaaaccagtctggacacagcctcaggccctgatttcacaggactcagaccatcaccctgggaggctggtggggcaaggattttgtcatcatcccatcccttatgtagatgagaaaatccagcctagagagagaaagtgacttgcccaaggtcacacagaaggttagcgggagatccaggccttgaacctgagtttcctgcctcttaatctaacactgttgctcagaggtgggagagatcagtgggccacagcaattatgggaggattcttagaggaattaggtgtcaaagtgcaaagccctgacagatggggagaaattacagtagaggcatcaattcaggtaatggatacaatgtatggtaagctggagatagtgatgggctggtctggcgagggaaccactaactccatccatcagccctcctccatcccaacccaacatcattgcatcagtgcatgcttagcggcctctcaggggcccctcttcttaggcaccactctgatagtgaagcaagaaggggcaaggtggacagtcttcggtaaagccatctgactggggtcaatctctcttcccttccagggcgaatggtggaggcctttgcccgcagagccttgtgggatgctggtctcaattatggtcatgggacaggccacggcattggcaacttcctgtgtgtgcatgagtgtaggtgtctcctcagcactccccaggccaccccccttttattataccctctatgaaggtagagaatttcacaggtatggaaatgacaaagacccacaaagatgccatgatctacccaaggttacccagctccacagggtaagtgaggaatgccagcagcaggccagtcctgctggctgcttggcattcaagagggcaccagaaagagggtcaagccctagtgactaacttatatagaccccagagaaataaaagccagagccagctgcatgtggtgactcacacccatagtcccactgctttgggaggccaaggtgggaggatcacttgaggccaggagtttgagatcagcctgggaaacacagcaagaccccgtctctacaaaagaaatgttttaagtatccaggtatggtggcatgtgcctgtagtcctggctactcgggaggctgaggtgggaggatcccaggaggtcaaggctgcagtgagccatgatggcgccactgcactccagcctgggcaacacagcaagacccctctcaatacctaaataaataataaaagccagagccaatctggtgtgtgccaggcccaggcagacaatgatgtgatggacctgtgctcatagagatgctctgggatcctcacttatctgctcttcctcggaagctgctcacttccaagctggtgagtataggagaactgataccatgtttatgtcttcctttctagggccagtgggattccagtccaacaacatcgctatggccaagggcatgttcacttccattggtatggccctcaggcccctctacctcaccaccccatcccagagcaggactagcccaggactgcagtctagagtgtaccagacttcagaggagcacagcaggcactagtacagctcgggactcacctccccattcccaccgctacgcccagccccaaatggcttgtcccaccctaattccagctcccctcagcccagaccctctttttgctcttgggagttgtttcccagctgtatattcagacgagatcaggtgcgttcagggtggtatggccgtagacccagctgtatattcagactctggagttgccaaatgctggagtaacaggacagtggcatccagggagatgggagtaccttcaggacccaagtgggtttttagggcttccctgctgggctacagggaagagagagtgagtcagagatgcccctgtgggggatctgaggcctgacagggatgagttgcctctgcttagccaacaaacatctaaccagttgtggggctgccagagtcaacagccaggggacagccagacagccagtccctccagccactcatcagtaggtacaggaagcctgggcttgggccctctcccagcttaatgccaccagcatctctgtgtctcccagaacctggttactataaggatggagaatttgggatccgtctcgaagatgtggctctcgtggtagaagcaaagaccaaggtaaactgccaccaggatgggctggaggtgtgggcagcatgtcagtgactttgggctgcatgggaggaaagtggggaggaagatcaaaggagaagggcatttagtgtgcaggcatgaatttatctggagtcttccttaggaattccataagtcagacttttcaaactcgcttgcacatttgaatcacccagagagctttctggtgctttaaatgcccatgcccaggccccattccagaccaagtgaatcagtatccctgccctatatcattggttctcaatgcacataataatcgccaggggagcttgttagaaataaagattctgtataatagcagccaacaagataaaatacctagatgtaaacttaaaaaggcttacatggagaaactctctactaagggacataaaaaagatttaagtaaatggtgctctctggagagaagcctcaatattatgaagatatcattactctctaaattaatctataaattcaagataacctcaattccagtgctaactggatacttttgtaacttcacaaaatgatagtaaagtttatttgtaaaaataaacatgcgaagatagctaggaaaattctgaaaaagaagagcagggccaggtgcagtgcctcatgcctgtaatcccagcactctgggaggccaaggcaggaggatcgcttgagctcaggagtttgagagcagcctgggcaacatggcaagaccccatctcaacaaaaaatacaaaaaaaaattagctgcacatggtgtcatgcacctgcagtcccagctactcgggaggctgaagtgggaggatggtctaagcctagggaggttgaggctgcagtgagctgtgaccacgccactgcactctagcctcggtaacagagcaaaacccaatctaaaaaaaaagcaataagaaaagccagtcctctcaaatttgaacacaaactaccataactaaaacagtatgacactggagatgaaatagatagctgtaacaatgaaacagaacaatcagtccagaagtaaaccctcttattcccataaacaacatgggaatttagtttacaagaaagctgattttgcaaaaaagtaagaaaaaaatgattattcagcaaatggacagggggaacaaatggctaatcatttggggggattaaactgaataacctccaaaataaaattccagatggaccaaagttttaaggtgagcaatgagaccacaaaagatgtagaggaaaacctatatcaattcatttataatctcagggtggaaaagagtctttctgtgcaagaccagaagccatgaaggaaaagattaataactctgactaaatagaaaatggaaacaatgtttatggaaacaatgccataaacaaagccaagagatgtgtgacaaatatctcttggctttgtttatggcattgtgagagggtgagttttcttattttaccatgagctttttacaaatccgtaagacaaaaatagacaaaacaggaaaaaatagggcaaaggacatgaaaaggcaattcactaaaattaacaccaaatggtccacatgcatgtggaaagatgctcaagttcatccttaaagaaatacaagaccgggcgtggtggcttatgcctgtaatcccagcactttggaaggccgaggctggtggatcacctgaggtcaggagttcgagaccagcctgaccaacacggagaaaccccatatctactaaaaatacaaaattagccgggtgtggtggtgcatgcctgtaatcccagctactcatggggctgaggcaggagaatcacttgaacctgggaggcggaggttgcggtgagccaagatcatgccattgtactccaacctgggcaacaagagcaaaactctgtctcaaaaaaaaaaaaaaaatacaaatcagggccaggcatggtggctcacacctgtaatcccaacactttgggaggcagaagtcagcggatcacttgaggtcaggagttcaagaccagcctggccaacatggtgaagccccatttctactaaaaatacaaaaattagccaggcgtggtagtgtgtgcctgtaatctcagctactcaggaggctgaggcaagagaatcgcttgaacccgggaggtggaggttgcggtgagccaagatcacaccactgcactccagcctgggcgacagagcgagaatctgtctctaaaaaaagaagaaggaaaagaaagaaaagagaagggaaaaaaaagtctctttcttgctcagtttccttcctgagaacatttcaggcacacacagcgtatgtatctatctatgtatatattttgaaaatacaaacaaaatggattctactgtacatacttttctgcaccttccttccctgccccgctgccccttacttaatagtaaacctaggagagtggtctgcaatagcgcagggagatctacctcattcttttgaagggttgtcgaagagcctatagtatgtggatgtcccatgatttatttaaccaaccgtggatattgaggctgtttccaaatttttactatatttgccatcaatgctacaaatcactgtataaacatcttggtgagcttttgggactatatccagaaggtacatatctggcgtagggatttccaagacaaaaagtacaagcatttttaataggtaatttgatagatattgtcaaactgccctccagaaaggttgcaccaattgtactttctccaacagtgtgtgagagtgcccatttcctcacatactcactagcactgagaatcatcgaagtcactaatttttccaatctgataggtgaaacatggtattctattgttgttttgacttgtatttctttttttctttctttctttcttttttttttttttttttttttgatggagtctccctctttctcccaggctggagtgcagtggcgagatcttggctcactgcaacctccgcctcccaggttcaagtgattctcttgccttagtctcttgagtagctggaattacaggcacacaccaccacgactggctaatttttgtatttttagtagaaacagggtttcaccgtgttggccaggctggtcttgaactcctgacctcaggtgatgcacctgccttggcctcccaaagttctggattacaggcgtgagccaccacacccagccttgaatttctttaaggatgaacttgagcatctttccacatgtatgtgaaccatttggtgttaaattttagtgaattgctttttcatgtcctttgccttattttttcctgttttgcctatttttgtcttatggatttgtaaaagctcatggtaaatatgaaaattcaccctctctctgtgatatgtgctatatttgtcacacaactcttggctttgtttatggcattgtttccataaacattgtttccattttctgtttagtttagtcagagttattaatcttttccttcatagcttctggtcttgcacagaaagactcttttccaccctgagattataaatgaattgatataggttttcctctacatcttttgtggtttcagcctcccgagtagctgggactacaggcgcccaccaccatgcccaactaatttttgtgtttttagtagagagtagagacggggtttcaccatgttggtaatgctggtcttgaactcctgacctcaaatgatccacccacctcagcctcccaaagtgctgggattacaggcgtaagccatccattgcacctggcctctttttttttttttagagacagggtctcactctgttgctgaggctggagtgcagtggcacgatcacagcccgctgcagcttcaacctcctgggctcaggtgatgctcccacccttccacctcagactcccaaataactaggactatagatggacaccaccatgctcagctaatttttgtgtttttttgtagagactggtgtattagtctgttctcacattgctataaagatactacccaagactgggtaatttttaaaggaaagaggtttaattggctcacagttcccacatgcctggggaggccttgggaaacttataatcatggcagaaggcgaaggggaagcaaggatctcgacatggtggcaggaaagagagagctaacaagagcagggaaaactgtcttataaaaccatcagatcagccaggcgtggtgggtcatgcctgtaatcccagcactttgggaagctgaggtgggtggttcacctgagcttaggagttcgagaccagcctagccaacatggtgaaacctcatctctacaaaaaatacaaaaagtatctgggtgtggtggtgcccatcaataatcccagctacttggaaggctgaggtagaaggatcacctgagcccaggaggtagaggctgcagagggccgtcatcgtgtcactgctctccagcttgggtaacagagggagatcctatctcaaaaaaaataaaataaaataattgaaatttagatttctgggccctgccctaaggattctgcctccagtaggtttgggaggtgggccctggaatctgcatatttatcatgctccctaagtgctgttgatgtgcgtactttgaaaaacacaaacctaagtctaaatttccagaatcaggagggaagcaccaaaggtggagcactaagtggcagacaagggggctggccaagagaagggactctagaaggctcaggcctagccagggtgtccagggttgatgaggcccagctccttgtgtcctccgggtggagtgctccttccttcccttcagcccagttcctcctcctccctcactgtcctgcttacccggcttctattctgggctcccagtacccagggagctacctgacctttgaagtggtatcatttgtgccctatgaccggaacctcatcgatgtcagcctgctgtctcccgagcatgtgagtgcccctcagcattgccttctccctgaccctgggcctttcctgcctctgctacctgccaccacatcctctgtccctgcccctcctccaggagggtccacactggtggcacctgcagacacacactggggcattcctccccagctcatcagagaccccagagcttctagaactttccagtcagaccagcctgcccaaccccaggtagtgaataactggaggaatctgagattgggcctctgagctcggccactacaaggcctggaactataagtgatcccttctattcttttgcctcagtctcctcttttgtaagctgaggataagaatgcctgcccagcttactcccattcccgggcctgaaatctacccaccccaccgcccatgaacatcaccatgacatgaaacagccagccaggggaactgcctctgaaaagccccagagaattcctgaagcctgatgatggtgggggacctgtggccatctggactatggtgacagctggagtaccacaacaggggactgggcgtcaccaagacttcacctcttggcagcttggcttagagaggctgtcaccccttctatccttcgcagctccagtacctgaatcgctactaccagaccatccgggagaaggtgggtccagagctgcagaggcgccagctactagaggagttcgagtggcttcaacagcacacagagcccctggccgccagggccccagacaccgcctcctgggcctctgtgttagtggtctccacccttgccatccttggctggagtgtctagaggctccagactctcctgttaaccctccatctagatggggggctcccttgcttagctcccctcaccctgcactgaacataccccaagagcccctgctggcccattgcctagaaacctttgcattcatcctccttctccaagacctatggagaaggtcccaggccccaggaacacagggcttcttggccccagatggcacctccctgcaccccggggttgtataccacaccctgggcccctaatcccaggccccgagataggaaagccagctagtctcttctcttctgtgatctcagtaggcctaacctataacctagcacagactgctacagctgctcccctcccgccaaacaaaaccccaagagagcaatgcccctaccacccaagggtgccatggtcccgggagagcccaaacctatcaccacctgttgggcatagccagagctgttcccacccagccagggcatgaaacatcaaccccccacatgtgaacccatcattcctaaaccctgggtaggctccatgccaagtaacagcagagggagttaagccataggaatttggctgtggagtaagagggaatgcggtgaggcactctggaatatgaccctaccagaggttggagaacaaacttgggcagccggaacccgtcactattctagacttccctggcattcgaggagccctttgaactttccaaagtgcagccacagctacaatgctgttaaatcctcccacattcttggatgccccttcaccttgtgtggacagtgtctggtttctccattttacagacaggaaaactgagcttcagacagggggtgggctttgcctaaggacacacaaatttggttgggagttgatggggccagatgagccagcattccagctctttcacccttcagcaacatgcagagtccctgagcccacctcccagccctctcctcattctctgaacccactgtggtgagaagaatttgctccggccaaattggccgttagccacctgggtccacatcctgctaagacgtttaaaacagcctaacaaagacacttgcctctgggttttgcattgtgtctgctgtgttgccggagactgctgtcacctgtggcttttgtggtgggggaggaagaagagagggtgaggtgggggtggggacatgaggctcctagaagctcagtgggggagcacgtgggcttgagagtatgtgtgtgagcatgcatatgaatatgtgtgcgcatgtgcacagatgcacgtgcacaccacgcccaaccagccaacctccagcctgtctaaaaaggtattgtaaccttgtggaagggacagaaaggagccctacactggggaacttgtcaaatgtaatccagaaaagttggggctggcacctttgccaagcagcgcacagttggtggaaggaaagaaccaaggtgcagggtgccaggcaaaggcaccaggcagagaagtctcctggcctgaaaccatcaggcctagtctgctgagtgtgagggtgacctgtgatggttaccatcaccagtgcttgcatccagaggctccagccctgaccaagccttactgagtatccaaagatgggcctctgtttgctaaataatttgctccctcacctgctcaccccacaaagacaggtactactaataaaattaaagtcatcatcaccctcatcatcatcaccatcatcatcatcatggctgccatttactgagtgtttatgtgccaccgtgcaagaagctttacatgcattttctcatttaatcctcacaacctctgagaaggcccttttcttattcccattttacaagtgcaggaactcagtgaggcccatagagatttatcaagtgactcaaagtcacttttttcattgggtaaatgaaaaaaagccagatttaaaccagtcagaggactctagaatccactctcaagaaagggcaagtcctggccgggtgtggtggctcacccctgtaatcacagcactttgggaggccgaggtgggaggatcacatgaggccaggatttcaagagcagcctgggcaacatggtgaaaccccatctctactgaaaatacaaaaattagctgggtgtggtggcgcacacctatagtcccagctactcgggaggctgatgcaggagaatcgtttgaacccaggaggcggaggttgcagtgagctgagatcgtgccactgcactccagcctgggcaacagagcgagactccatctcaaaaaataataataataataaaataaagaaaaataaagggcaagtggtatggctttcatcattttactgacaagaaaactgaggctcaagcaggagaagcagatccacaccatagtgcctccccagaccctgccagacctttgcctttgcaccctgacacttgctcctggggttctggcaggtcatgggtggcaagaccaggcacctgaccaacaccctcacacaggcctttcggaccgaggcagctcgtgcttttttcctcagtgcgagacccaggactccacctcatctctgaatccccttaactgccccttccagcctaccattctgggaggaagaacccagccctggaacgtggctggaacgagggctcacagtcaccccagctcttccctcccctgggacccagatggccagacttgaccattcctgctttaagggattaactctgggtcaggcagggaaacagggcacatacaccagggctgatacacagggactcttgtgacatcgttaggaatgaaagattgttaggaactgtccccttgggctctagtactttgttttaatgttggaggatggggcttagcaaacctctcctcgcctgctgattgcctggggagccggccatgtggaaaagccccttttcctaggagttaagattctggggtttgagtcccatttgtgccagctgtgtggccttgggcaagtcacttctccctggtcttcagttatcctttctggaatctcccatgctgccttcttggtgaggttacagcgagaggctcatgagacccggatgtggcagcactctaaaccaggaagccacacagacaagaaatgatattgctgttatttgcccagcacaagttcaattcagcttcacctttgcaggtaggtaagaaaaaggtctggaacccaagttttatatataaatagccaaaattagaaaggctctagagcaaacatctaatttacgtctttccaactatgctcccgggagcctgagatgcctcagaaacaccacaggggctgtcgaggaaaacagagctgctgcacgaagtagccctgacgggcttcccgtaaaattgtacttgaagtagttgcagggccagcttcacgggtgtaggacctgtgcagtccctcaagactttgtgcttacaagggccccatgcttggtttaatgctcgcctgtcactgtctcaaaattcttgataatttttaagcaagaggcaccgggcattttcattttgcacaaggcccgcaaaattcaagagccaatcctgaataggagctccatgaccaaacacacacacacacacacacacacacacacacacacacacacacacacaaaacctggtgcagtcctttcagtgtacagatgggaaaacttcaacagcaacccaggaagaggaagggacttgtccaaggtcacacagtccagtggggccagagcaaggactaaatccgcagcatactgactcagctccacaatggctccgctctcgctttcagtgtgtgcttctgtcactcccttactgcctctaatgacccactgaggcccaaggagacctgttgaaggtcacacagctgtgacaacaatggtgacggcggtgttgagccacgttccttcaagcttcaaatctgaatagaaaagggcataggtaagatgataggtagataggtacatacacaaatcatctaaatagctccttttgttttttgtttttttttttagagagagggtcttgctctgtcacccaggctggagagcaatggcaccatcatagctcaccgtaaccttgaaatcctgggctcaagtgcttctcccgcctcagcctcctgattagctaggactacaggcatgcaccgccatgcccgattaattttttttttaatttttattttatagagatgatgtctatgttgcctaggctggtctcaaatttctggcctcaagcaatcctcctgccttggcctcccaaagtgctgggattacaggtgtgagacaatagttcattttttaaaatgataactaactcagcctttgctggtttgccagtcagctggttccagctgtgtgtgagttgggacctcagaaggggctgggctggctactcttcagccagctaaaccacgtcagcagtgaattttaccaactcactgggtgcttcctcaaatcagtggttgggcactcttggcaccaaaaaatatatatatatagaagtgcgaaagattcagtagcaaccgtttcctccctgtccgtccctgctcctcatggctcgtcacagccaggagggggaggtgctccccaaaccccaagccagctagcctttgcccagaggccggcccatctcttcacttccttgtttctttgtgaaacaggaactgagcaagcagcttaagtcgggtaggatgggtggttgagaaagccccagtggtccgtggcaagtccacgaagctgaaaagctggtttctctcccagcgggtcccaggcagcttcaggccctcttgtttgtcacacctcttgtgttctagaacaacttggggtgagggatgcactcttgacaaggtggagacataggatatgggccacagggtcacgtagcagagattcagatgcggacctcaagagacatagaagcaggtgccaggccgggcatggtggctcacgcctataatcccagctctttaggaggccaaggtgggtggatcacctgaggtcaggggttcgagaccagcctggtttggcaacatggtcggcaacatggtgaaaccctgtctctactaaaaatacaaaaaattagctgggtgtggtggcaggcgcctgtaatcccagctactcgggaggctgagacaggagaatctgggaggcgaaggctgcagtgagccgagatcttgccactgcactccagcctgggccacagagtgagactctgtctcaaaaaaaaaaaaaagaagaagaagaagattccaaggggacactaagggagaaagcggcagctcctaacggtcaccaaggccttcctggatttagcaaggggagaaactccaggtggagtctgaagtgaactgatgtggagtcactcaccaggtacccagcactttccactagctggggcactgggctgagagcactccctctatgcatgtcacctgagtagtaaccctagtcacacacacccacaagaaaggcccacattatcactgttaccatcttcactaaggctcattgcaggtgaggtcacttgcccaaggttatgcagccagtaggtgaccatacaacaatctgaatccaatcaggacaacctgactccatttctgagaggtgttctgttcctcctcttccctggagccctggacaattgtccccatgggggaggggcccactgatcagagaggtttgtccttgtaaccttgggacagagatttatgcagagtagcccagcccctacttgtcccccatagaaagtgcacccccccaccagtgagtcatgagtgtgttttaatctgagcaccaaagtccagcctcctcttctgatggtaattgacagagctaccagcaggtgttttttgttttgttttgttttaaaaccaagaccttatcacgagttcagagttccaaagatcactgtctttccctcccctcccatcagcccctgccaccagatgcccactctgtgtgtgttgtatgtgggcatgaggaatgggcgcaagagtcacctgcccttgtctccttgctttcctctgcccgccttctccctcctgcaattttgctctttctgccctccctgcctaaaatgaccaccattaaatttgctaatgggccgggctactaaagtgggcttcaccttggaaatgtccaggtattttcaagaaactatgtggcctctgcttggatatttctttttcttttctttttttctttctttttttttttttggttgttttgttttgttttgttttgttttgtttgagacagagtttcactcttgttgcccagcctggagtgcagtggcgtgatcttggctcacagcaacctccacctctcaggttcaagcgattctcctgcctcagcctcccaagtagctgggattacaggcatgtgccaccatgcccgcctaatttttgtatttttagtagagacgggtttcaccatgttagtcaggcgggtctcaaactcctgacctctggtgatccactcacctgggcttcccaaagtgctgagattacaggtgtcagccaccgtgcccggcctacttgaatatttcaagagatggggagatcattacttaccagagctgaactagtgccatctgaatagccaaaatttgttccttggaatatactaaaaccttccatttatctgttccccatcattcataccacttgcttccccaccccaatcacctaggctaaatgtgacaggagtttagtacttcacacgttgacgacttccctatacttcacccccgcttaatcgaccctagctattgcagctttgcagatgtgatgcgacttccagatgtcctccccatcctgttcactcccctctgggcctgcttcaaggtggctctgtggcacctagtgtggcacccaaaccagcatcaggtgccaagagaaggctgcaagccgagggctccataattctctcacctccccgttcaggaactccgcatcagaggcacttcagctgagtggttagttgtgtgggccctggccaagaccagacctgcatttaacgctgggctccactgcttactagctgtgtgggcaattcacttaactcctctgggcctcagcttcctccctggaaaatggggataacaatagtgcctgacttaccaggttgttgtaaagcccactgcctgccatgaagtataataattttcagctagatgtggggactggggggaatggaaataagaatctttgggggccgggtgcagtggcttacacctgtaattgcagcactttgggaggtagaggcaggaggatcacttgaggccaggagttcaagatcagcctggacaacataggcaaaaaaaaaaaaaaaaaattagccaggaatggtggcacgtgcctgtagtcccaactacccgggaggctgaggtgggaggatcatgagccccaggagtttgaagctgcagcgagctgtgaccacaccactgcattccagcctgggcaacagagggagaccctgtctcaaattaattaattaattaattaattaattaattaaaacttaaagaatcttttgggaggtttttccagatataagtatctctcactatccaaactcttactatctcaaattagaaatatatccattcagagagtgagagatgcttttgtacatggtctggatcttacctgccccaaatatcccactcatgatcatctactaaataagaatttcttggctgagtgcagtggctcacacctgtaatcccagcactttgggaggccaaggtgggcagatcacgaggtcaggagatcaagaccatcctggctaacatggtgaaaccccgtctctactaaaaacacaaaaaataagccaggcatggtggcatgcgcctgtagtcccagctacccaggaggctgaggcaggagaatagcttgaacccaggaggtgaaggttgcagtgagccgagatcgcgtcactgcactccagcctaggcaacagagtaagactcaaaaaaaaattaaattaaattaaatttaaaaaaatacttggagtgtgctggtgtgggagctgctttatctgaatgtggcctacgatgacctttgtgtctttggtagtcctacatccaccctctgagggttcaggttgatttcactatcagtggaaccccaaaacacacacacacacacacacacatacacaccctgcaatcctgcagtattggcgctaaatcaaggttcttctgccccaaatctatacttctggatacgtctttatattaaactactcgcctccaggggttgtggtgggattaaacatctgtcaagtgcttaatgtagtgcttggtaaagaacaagtgctgggtaaatgtaagcttgccactccacctaggatgtcagctcccaggtacaaggggccctgatggctatttattttgtacctcctcccgaggcctagcacaaggctgtgcccacagcaagttcctaggttctgcctgccggcccattatcaagtttaaggtgaccttgttccctgaactactgactcgtatcacttccttagctgagagctctgcgtacctcaaacaacataacctgtaaaatgcaaatatgttacccagaagggaaaatctattaaacacatgtttaagggtcattagccagcaaggacctggcctattgggattcagccagggcaatctgttggaagagaaaagctgggggaaggcaagtcccgatggggggtcctggacaccccgcctccactggccccggtccccaggtggcggggaggaggtgttcctgaacagaggagacagatctgaaaaggagaacgaaggaagccgttgaaaacacttgctcccttctgtcctgggagctggtcacctctccatatttctctccaaggcaccctcacctccctctcgctgccttttcccaagcctcgccagccctgtgccctggtttgctggccgcctttgaaggttctgcggttagtgtgtgatcttctgtcgctgccggcgctgagcaaacaggaagcgggcacatcctgcgaggcggccagggacgcagccgctgcgcaggcccggaagattctgcgacctgcttcctccctcacggctctggctccaggtgccccaggccactacagcggcgtccccaatcccagaaccctctggggctgccctcctgctcctggtcacgcagagccccaaaggcccgatgggtcccctacacggctgccaggctactgtatatgccgaaaagccttaaccagttaccgcgcttgctagtgaccctgggccgcctgggagggactttcagggtggaaaacacaggccagtgggaaggagatctggggtgtggaatcttttcatgagtctgcctggccgactgagtaggccaaagaatgtatggtttcagcttagggaagaaagatcttatcttccctgagctcaccctgaaggttggatggtcagagggcataaagcagaatcggagaggaagtcacgagaacatcttgggaacaggggtggacaagcctagtatttcacaagtaccacagaattgaaagccttaaaaatgtgcatacctttgaccccagcaattcctcttctggatatttcccctacagaaaaaaaactatggatgtgaatatttaccataagtatgttcaatgaataatttaaaaatttaagccaacccaagttcatcagcaagggcttggtgaaataagcacggcacatccacacaatgggatgttccacagccgttataaattacgtagttgaagactatttcatagcatgagacaatcttgatactgtgttcagctggacgtagtggctcacgcctgtaatcccagcactttgggaggatgaggcaaagaggtcacttgagaccaggagttcaagaccagcctgggcaacatggtgaaaccctgtctctacaaaaaatacaaaaattaaccagggtggtggtacgcacctatagtcccagctacttgggaggcagaggcacaagaattgcttgaactcaggaggtggaggttgcagtgagccgagatcacgccactgcactccagcctgggagacagagtgagagactccatctcgaaaaaaaaacaaaaaagatactgtgtttagtgtgaaaagcagacaccaatagtgtgaattatgaccttttttaattaaaaaattttaaacagctttattgaggtataatggagctacaataaactgcacatatttgaagtatacaatttgatacgttttgacatgtgtattcccccatgaaatcatcaccacagtcaagatagtgaacatattcatcactcctaaaagcttcctgttaccctgtgtgatgtctcccttcccttctctcccctccccttctccccaaaccaattatctgttttctgagcagtatgatttttgtaaaaagaaaaaaaatgtttatagacagagagtagatagatgcttaaaacagtgtagaggacaatgatgggaaattttgaaattttttttgtttatgtgtttgtgaaattgtatgacaaatacaagttgcttttgtaataccaagaagttattaaagttattaaaatctgccacagacaacccacaaattgaatatactgcataggtgtttgataaatgcctgttggatacttgctagaggtgtggagttggctgtaagtgcttttcagctgtggtggtgataaatatactcatgatggctgaggggtactgactggaggggtgactgctctagtgatgatggctttaggtgtactgatggctgtaggagtgatggctgcagggctgatggctgcacggatgtgatgatggttgtaggagagatgactgtagggacgatggttataggggtgagagggtcatgagtgcggttggctgtaatgtccagaagggtgacagctgtaaggatgatggctggaagggtgatagcagcaatggtgatgactgtagaggtgatggctgaaggatgtcaactgtagaggtgattaccatagtgacaatggctataggtgtgctgatggcagcggggatggctgcaggcctgatggctgtaggggtgatggctgtatggtgatggctattgataggagtgatggtagcagtggtgatggtcacaggggtgatggtagtggtagtgatggcagtgacgaccttgaagacgtgagttgaccgggagcattgatccaacaggcagccagatggtccaacttctggtttctggattctggtcagtgagataaagggcttgggtacgccatataatgtcgagctgattgtccacctctaggaagatggagcagaaggactgatgatgatcgacatgagacaacaaggtagggactttctctgactgttcaacccaagagccgtctgcatcagaatctctggagactgaagcttggacttccttcctccctaggggccggcaggggctgcgattgctgtaagagtaggtcacgtggcagggcttcctgtatgctgctgctgccgggtgtccatggcccgcacccccaagctgccactgcagcagtcagagtggcagctgaaggctcggttcatgccgtgcccccgggcagttctggtgaggctaagcaagaggcctctgcatcttgacacctaggagagcagggacggagtctcccagggtggaggaccatgctgcgccgcaagccctccaatgccagtgagaaggagcccactcagaagaaaaaggtgaggagcattttgggaactcacatcttcctttcctctgcttgctcgacccatcccttccaagactcttggaagtgggaagagccaaaggccatatgttgagtctgtaggtgagggccactcacctagaaggcaacgggacagggacccaaaggttaacagaagtacagaagagatgtttaaaattctggagcaacagagttacagaatagatccttagaaatctagagtcatgcaattcaaccctagaagaatgggaaaaaagatctaaaattaggggccagaatcttagactagaatttgagaataacaaaatacaatgcttaagctgaaccctaagcttgtacttaactatctctcctctacgctggtcctgctgccacttctgccccggccacggcctctcaggagccatctcactcaaagggccctgctgggctgcccagcttggagccatgatgctcacaggactgccaccccctcctccactttggccatggcccagaccctgcccacttggctcagctctgtggtagctcccaggccctacccgagatggagccaacctggagatgggggcctgaggccattccagtcttgggggaaaaggcatccggaagtgcagtgggatgcagggggcatacaggttcttcctgggtggggaatgagaaattaagttgaggtggtgagtaggagtgaaggctgaggagggaggattttaaaggccaggaggaaaaacagctgtcatggatggctgaggtgttcatccccctggggcagagaccggactggaagaatccttgaaggctgtgccagatctaggattttgtggttgaatttgaggatttccagatttctttggttgggtttgaggatttctagacctaattctttaattcaattgaaggattctcccagacaatcagcaagtatatcctacacatccaatgggatgctaggacagtcccaaagcaggcctgaactaggtccaagaggcccaggctatcccccgccaattttccctggaactcagcccaggtgccctatggtggatcccccttgtcaggggagtagctcagagatggaggccaaggcagctgaaagactgagactcggggcagtggggtgtgcatcctgccccagctctcaggtcctggggtggctgccacttccggctgtattctccccaccccagctgcttctctaaggttgcagtggtggtgggcgggggaggggggaggttcatgaatcttcacacgggctctgtcatccccgtccaaaccctgcagggtgctaggcccagcaggactgccattggctgccactcctaagagagcagggccacttccccttgctctctggctggtgggggtgggaaacagagattgctctatagacactgctaggcctcaaaccacaggggcgctgagctggaggaaagtgtgagaaagagctgacactttgacactgggaccctgtgccacatcaggaagacgtacctaggggcacacagaagccagaagtcccctttttctttcccagcttcaattacccagattctgtgttcggcaggcaagtgggcccctgggatttccccaggtctctcccaggagaaggggtcctttcggggagagtagtccaggcaaaccccaccccaacccctgccagagccggtgccagcctccagagctgggatgagcttgcctccacacactctgctagccccagactatggaaatgtcccccagaagccaagcttccagaaggtacagagcatcttccccaggcccagaggcagcgggctggctgaatcactgctagtcccttcttctcagaggctgagatgacgtggtggagaggaaagcacaaaggcaagagaggcctctttctcctgcccctgcttctcctcttgggcctgccaatggagaatgtgccagacagggggcaagaaagctgagctggaatcctaccacgctctagctgtaggaccttggacagctcattgactttctttgggcctcagtttcctcgcctctgaaaaggaggataactcctaatctgcccccctcaagaggttgtacagatcacccaaaagaatagatgtgagagtaccctgtcacaagtgtgcacgtgcataccacacaagggggtgcctgctgtaggcatgggtggggatagggagacactgcaaagaagaatgagccatgcccccagtgctggcacagagaacacaagacttaatagtactaagagccaccacagagtgagagctcatgggatgccaggcacggtgctgtgcatctcttaccttgttcactccccacgacaacctggtgaggtaggggcagatattgtcattatccctatttgacacttgaggctcacagaggtgaagcaacttgctgaaggtcacacagctgggaagctgccgagcagggatccaagccaagatttgtctgactccagaatcttgaccccttctctctccactctcttgtccccttgttgatctcaaaggcgctagaagagtctgatgagcataaaagattcaacccatcagcaggagagctccgtggggcagacccagatagctgtggaatgagtgaccttccagccagcagagcagaggagggtgcgggccctctagaatggtagggctaggacatggcgcctcccatggatcgtgaaggattggagaggccccagggttgggagacagacctcttagctgccctttggagactttcacttccttcaagttcttgctctgcaagccctttgatctgatttcacccaaaggccagtgttggggtataggaagtggagagggatttttcctggacttggttcccctaaggatgctcctactctaccacatccccactttctccatggctcccttcctacagcacacctctagtatgacccccacaccctgccagcatgcactttgtattttcagtggctcctcactgcccacaggatacatgcccttggcctggcgggcaagagccttccatagccttttctactcccccacccaccatcccatcatcaggctctcaacgtctctaactttcattcttgttcaaacccttccgagctccacctggagaaatcctgcctcccctgcatggcccagctcagatatacctcctccacaaagccccgccagagcccttccccctctgcactcccacctgctttcctaggagctctgttcaaaaaccacctgcatgccatcaccactacactcaatccactgctaacttctacactggtggggcggggcaacagcatgagctctgaggtagcacgagcacagcaacatacttgggtttccagagtcatagacctgggtttggaggcttgctcttcctaagaccagctgcgccaccctgcctagggcacttcatttcgcatcttggtctcctctgcttcgaggtgcgaatatgatgcggggctgcgatgaggctggagtgagctggcacacaggaagtgcttggcaggacacgggcatgcgggaggagtttagaccctcattgctggattctcacacacacagaggtagggcctagagctcacagggtgctcagtatatgcctgataccctgaaggagcagagggggtagctcaggagaccactggggaaagccaagtttgctcaggaagtaagggaagaggatgctggctggggcagtgtggacctctgagagattgatcagggcatggtttctgcatggatgctgccttttaagctggaattgaaaaatctttccatagaagtataatatccatacagagaagtggataaatcataattgcgccaccgaatgagtttctataatgtgaacatccccatgtagacagcacttagatcaagaaacaacactctcagaagtctagaagcttccctcatgcccctgccagttactacaccccccccttcccccagggcaaccgctatcctgacttccaacagcacaggtgagctctgccaggctttgaacttacagggggaaccatatcgtgtatatatactctttggtggccagcccctttactcaaccatatgtttgtgacactcatccatactgttgggaacagttgtactgtctcctacctgggtactattcttttgtgtgactctgccacaattaatttatccattctacagatgatgggcatttgcgggttttccacttaaattggaagggtgagaaactacggctgacagagagaagggcagagtattccaggtggggaaatgcccagggtaagaggctggaggtggggtgtaggaaagagtaagcataaacctacattccacaagggactgccgtgtcagacaatgttccaagcactgtaggcgtactcgctcatttcatcctcacaacagccagatgaggtcggtgcttttgtcttcattccactaatgaggaaacagaaacctagagaagttaagaaacatacccagtttacacaatcagtggcagaaccaagatgggaacacttgccctgatgtgaagtgggcttcagagaggttcgataacttgccggaggtcacaaatccagagttgaacttctgagaaagcttccctcatgcccctgcctgtcactacatgccccctttctcccacagtaaccactatcctgacttacaatagcataggtgagttctgccaggctttgaactataattatacagggggaaccatatggtgtatatatactctttggtggccctacatttcaaatgtattgtatattacatttgaaatatatattgaaatatatattgttgagtatactcaatgtatatttcaaatgtaatatacaatacaatacatatatacaatacaatacatatatactcaacaatatatatttcaatatatatttcaaatgtaatatacaatacatatatactcaacaatatatttagtatatttcaaatgtaatatacatttgaaatgtagctctttccaagaggcccacacattcccctgagccatgaagtgaaaagggggccaacagtgtatggtaccacctcccccgtcaggcacgactcccaggaagtcctcactccaaagggaagccagcagaaaagccagccaggctcaagaatttcaactcaaccctgaatgggggtcacctctctctgaaaggcggtcaagatacttggggctgtccctgaggttggaggtaggcttggcaaaatgccaccctggagggccctgaaactcgatcacccaaagaacatgtgtttgtcctttccatctccctgggctgagagtagccaactgggcccaagacccagcaccatctctatagtcctttgtgattatctcctcccactttggactaaaactgagacagagggaccctcgcacaagggtctgggagccaaaggcctttcctcccagcccccagactgcagattaatgacaggaaaaggccttgggaaagagctgcaattagagggcaggcaggcagtgaatttactcttccccaacaaagccgacttccggccccatgcctgccctcctgcttgctttccagcctcaccagtccccagggtttcaggggcgactcttagcctcctggtctgcagatcaggctgagggttggtggagagaaggccacaataggccccatcggcctataaatagcagcccagcctgccctccttgggcccaggccagcccgatgcccaccctctctccgttccctcttttccatgcaataagaggaggaagttatccaggcagctgcatcctagccatacaagaggaggaaataaatggaaggtggaggagagaaggggaaagaaagggagaaaaagaggaaagaatagtgggaggggacaaccaagaaaggaagatggaggagatgcaggtgaaccagagtggtcaccctgtggtcatgcttcccctcccccacacccacctatggcccccttttcagctccccagggcaacacagaggaggctttctgacagaggctgcaggcaccccacccatcaggccccaatcgtgctagcgtctgcttggcctgaccactgacctagtttctcatcaactaccttgctgtgacttttaggaatgtgtgacccctgacccccaattgctgacttggctttggtcaagacccatcaagagtactaaactgctacactgcagtccccaggagttggggccaattatttgtgtgtgtgttggtgggggacaggtgatattgcccctgccctgggagtttgtcactggacacacacaacccctttagtaggaaagaggatgtgaaaccttcaacgttgtgtgggtttggggcttcagttcctcaagcccttatctcgggtgtctgcagtctatcccactctatctgtctggccatctgtgaaccctggttcctgtgtgtatcttctggtcttgactgtttatcttgatacaggctcagccttaacttcttgtgtcgagggcctgtcccccttacctgccttgccctggtttctggctgctaccttgcatgtgcatgcatatatatttaagaaagctcactagactgggctcggtggctcacgcctgtaatcccagcactttgggaggctgaggcggcagatcgcgaggtcaggagatcaaggccatcctggctaacatggtgaagcctcgtctctactgaaaatacaaaaaattagccgggcctggtggcaggcacctgtagtcccagctactcaggaggctgaggcaggagaatggcatgaacctgggaggcagagcttgcagtgagcagagatctcgccactgcactccagcctgggtgacagggcgagactccatctcagaaaaaaaaaaaaaaggcaagctcagccgggcatggtggctcacacctgtaatcccagcactttgggaggccgaggtgggcagatcacctgaggtcaggagttcgagaccagcctgaccaacatggtgaaaccccgtctccactaaaaatacaaaaaataataataataaaataaagctcatatcctgaaaaacatctcatcaacacagaccacaaacaataataggtcatgcctaaaagtccaaacactggcaaacgtcactattgccagctcatcacattagtggctaagattaaaagctgagaagaaaaagaaaatggtgtctttcttctaccaaattagccccaatcacgtatgtcctaaatctgtgggccccttctgtgaataagcctctactgtgcttttccagaaagtgtcatgccaggtcttgctggcttctagtcagattgtcttgctcttcttgggacacaaattcatcaggctggagaccccagtgtgtttgttcctatcactgtgactggggacctggctcagagtacacccaggacatggaggccagagccacgggttttgggagggatttgctcagttacacactgggcgatgtgctcatggatgctgaggtatgtctctagtagtagatacacatttactctgactcatgtagtctttcactccaggattctggggaccaaacttgaggaactggtggaatttcaggctaagtctgaggcccgattgaggtgtgaagctcttgaggtcaggaacttggtctgtggccagggctggggtgaagaatggaatgaaaccaggtagccccaagaacatcgaggtgcgtcacccattagcctggggctcccatggcaatgtggctctgtcagctctgggctgtgggtattgtgtggtggggggaggcgagtatgtgggccctcgggcagccatttagcccactgattgcaacacccaccctttttccagctctcccttcagcgctccagcagcttcaaggattttgccaaatccaaacccagctcccccgtggtgagcgagaaggagtttaatctggatgataacgtgagtttcagggcatccttgtgggatctggctgcaggccctgggcaggggggtgggggtgggagggaagagggtgaagaggagatagaattgttggggcgaagccccctttaacacagagggtccacctctccccacaccaagcactcccctgcattcctttcaattatacattaaatagcaaactatttataaatttatagggctaaggacatggctggggttaagaggggaggggatgggggcctctcagttccaccccctccagcttctgctgtgaccccaaggcctcttttgcctcaagtcccggacctaggcaggaccaccagggtccctggatcgcctcttttgttgtcacagattccagaagatgactcaggtgtccccaccccagaagatgctgggaagagtggcaaaaagctggggaagaagtggagggcagtgatttcccgaaccatgaacaggaagatgggcaagatgatggtgaaggccctgtcagaagagatggtgaggcctgcagatataggggatggggtgtccagggggcctggggaccgctctggcagaatgtgagcatgaccacctcaatagccactactcaggccggaaggccctatttgatgcaagaaggaaggtcacatgggaggggaaactcacttgcagccacggacaggcagccaggcaatcttgacggggcaggaggctggcgggggaaggggtggagtttgagaagggatgaaagtctgggcaacagggctggacatggtggctcctgcctataatcccagcactttgggagactggggccgatcacttgaggtcaggagtttgagaccagcctggccaacatggcaaaaccccatctctactaaaaatacaaaaattagccaggcgtggtggcacatgcctgtaattccagctactcagagactgaggcaggagaattgcttgaacttaggagacagaggttacagtgtgccaagatcgtgccactgcactccagcctgggcaacagagcaagactctgtctcaaaaaaaaaaagaaagaaagaaagaaagaaagaaagaaagaaagaaagaaagaaagaaagaaagagaaaaaaaaaaaaaagaaaagtctgggcaagggatgcttcttgaggaggcgggcctgggacaggggcagcttgagaaagatgaaatggcctgaggcaatccatccacctcaaagctttgctttggaacttccccgggattgggaaggcctattttctctcatagaatccctatgagagaaaacagattgggcacagtggctcacacctgtaatcccagcactttgagaggccaaggcaggtggatcacctgaggtcaggagttcgagaccagcctggccaacatggcaaaatcccgtctctactaaaaataccaaaacaaattagccaggcgtggtggcaggtgcctgtaatcccagatactcgggaggctaaggcaggagaattgcttgaacccgggaggtggaggtttcagtgagccaagatcacaccactgcactctggtctgggtgacaagagcaaaactccgtctcaaaaaaaagaaaaaaaaagagagaaaacagagaaggctggcttcagcccagggaggaaagttggcacaggcagctgtggggcaggcatgacccaagaagcttaaatcacacagtgggtttgggttgccatggctctaaaaggagccactgaggcagtggtgtgctggagttggctcgtactgggcttataccagctcacaagagcagttggtcaaactgtcaaaaattgtgcaagccagttgttaaacacaaccattattaaaaatcaaattaaagaaacttacaattcagttaattatatttttttaaaaaggtaaactgggcatggtggtgtacacctataatcccagctactcaggaggacgaggcaagatgattgcttgagcccagtaagagtccagcctgggcaacatagggagactctgtctctaaataaataaatttaaaaaaataaaattttgtaaaaacgaacaaaggtaatacagtaaatcttcaaaactcatcacttcctaattcttgtactaccttttactcttatcaatgctgctgaggttacgtgcatccatagcatcttcatggtggcaatagcctcaccctcatttcagacaacacgtccagtgatgtcaaaatggtagcttgacattggccgtggaggggagtgtttacaacacaggaattggcaactcatcagggccagctgttaaacagttatcacctcactgaggtgtggtgaggtagggggagctctggagtctggcttggttgtgggttgccttgggacttgaacctgaattcccttggcctgagtttacagatgaggagtaagtaacccttgggccttactcctcatttgtaaactcaggccaacaataccacttaccttcaagtgtcactgtaaggattcagtgaaatggcaggcaggcctggcacacagaaacacaggcaaaagtagtttcctctctagcgacattgtctgcccagttgtgcggtagcaatggttgagtccaggttgtgccaccgtggtcttttctgtatgtacatcggcacttgaggctgacaaaagcacatccacatggtgccctggttgaacctgtttctgtgaggtaaccagggcaaggactgtcactctcatttttacaaaaggggaagaaactagggctcagagagtgccattcagcctataagtggtagagttggggtttgagccagcccctagctcttcactaagcccaggcccatttcttcagcttcatgcacaccccagcaaggctccttaaagcttcccgcctaccctccctgcaggcagacactctggaggagggctctgcctccccgacatctccagactacagcctggacagccctggccctgagaagatggcgctggccttttctgagcaagaggagcatgaacttccggtgctcagccgccaggcatcaacaggtgagtaggggatgcgggggacacctgccgaatctggaggaaaggactgggttacagccgtgctggtggcacactgtctgggcggggggtaagagaaatgaatgcttactctttgcctgctgggaacattctcagtcctcttcacattaaatcttctcaacaacctcatggggccagtactgttatccttgctttattgatgtggaaacagggtcttagggaggttaagtgacttgcccaagatgacccagtcttgaactcagatgtaccgtagaggaacttccacttgctatcctcaggccccggagaggcccacgggcagaggaagagtctcagtcaccctcttggaccagcccgtccccacctttccaaggggagctagaggctacagatccctgggcctctgatgccccagtcgggggtgggcgtatgaggtctccagctgtgaagagtcagcctcttgaccctagaccatagttgctgggctcagggcatcacctggcatcttctagaagtccatgggacaggacaagaggtgccagcagggaactcgtccaggcaggggctttgggttctgcagccccattcagcaccgcctttcttgcccctcaagtccactccaagtttcctgctttctctgcctccacagacacttccctgcccccgactgaaaatcattcaaaatgcccactactctgtacttcccagggagaaggagcccaactgagtttctatgtgacattgtaactacacattgagttaagcagggaaagtcaaatatgaatgcagggcatagcttcctgggtggagggagcgttggagtgggtatcagggaacatggagtctaatggactgactcagtgctgccagttataaaatgagaagccttgagcagttcacttggtctgtgtgacctcagatttccgcatctgttcattggagtgttggcccagttgttctctagaggccctcctaatttgcccattctttggtcagtgagccatttctcctcccattgccaactcttttcatgtccaagggcccagaggtgaagccgtgctcctggtcggtagccaagggggtggttcagaatcccttctgcagtgtaaagcttgccagagcccagctgccttcccggtgtatacccttgggatttctaggcaggtcccctggaaggcacctgctaggcactgtctcagctgttctaggacaaaggtgagcctcctccctgccccatctcctgcaggcagtgagctctgcagccccagcccaggttctggcagcttcggggaggaaccacctgccccccagtacacagggcctttctgtggccgggcacgagtccacaccgacttcactcccagcccctatgaccacgactcgctgaaactgcaggtaagatcagcatccgggcttctctggagcctggcaggctgtgcccaaaaaggaagctggactgaaccaggctatgacagtgtcagtggaggccaaggccccccatatcctctctcccttgctcccttctcctctcctctcccccaacagaaaggagatgtgatccagatcattgaaaagccacctgtgggcacgtggctgggcctactcaatggcaaggtgggctctttcaaattcatctatgtggatgtgctgcccgaggaggccgtggggcatgcccgccccagccgccgacagagcaagggcaagaggcccaagcctaagaccctgcatgagctgctggagcgcatcggcctggaggtttgagcttggtcctcactagtatctagtatcagggaggcacaactgccccagggatggggaccaggaaatgacagctatgcgtagttggggaggacctaggcaggggtggctggtaagcagctgtgccgatggcctgcctctgcctacaggagcacacatccaccctcctgctcaatggctaccagacactggaagacttcaaagagctgcgagaaacacacctcaatgagctgaacatcatggatccacagcaccgggccaagctgctcacggccgccgagctgctgctggactatgacagtgagtggctttaggagcggcctggtgagggtgtgtgcccaccggcattccagggaggggaggcttgccctggccttgccttctgtccacgctctgccctaggactgctctgcagtggaaaggtactttccacttgaattagaatttcagggaaagtgtacgggagaaaggagttgtagggatgattgggcccaacctcctttggatcaaaggggacccttaaggccaaagaaggcaaagccttacttgaggcctcaaagctgagtaataacagagccaggattcaagcccactgcctggctccagcttagtgctaaagaagtgtgagctcctggactgcagagctggcctggaaacaactcctaccagcttctaagctggaagcagtgaggagaggggcagggcggtggcaggtgcccagaaggagagactgcctatggtgtatttcccaaggtccctacctccacccccatattctgtctccctctctcgtccctggcagctggcagtgaggaggctgaagagggcgccgagagcagccaggagccagtggcacacacagtgtcggaacccaaggtggacatcccgcgcgactcaggctgctttgagggctcggagagcgggcgcgatgacgcagagctggcaggcactgaggagcagctgcaaggcctctccctggccggggcaccttgaggtggcggtggcaataggccaaggctgggacccagctgcaaaggctgtaggagtgggcccagcctcccgtggtggcccaggtcctgaggactggcactgagcctggccctgcttccccagggacacttagggccacagaggccaggccagggccctacaggttccaggctcagctggagtggttggggagtcgcccaagggcacatcccacctgcctgagccccgccctccaccagcgactgacagcgcagcccctcctggcaccaactgctcccctgccatggccacggccacagcaagtggggcactgggaaaccctgcccatgtccctcaccaacaaggcctccaaatcctcctcacccccacaccacctacccctgtcgcactgctcctgaaaagggggccaagtcaatgtttcaggtcagtctaaaaaccctagggaagctggccatttaaaagaacccaaactgaccatgggtaaatccagttcccctaaataaggcctgaagaaatccacaggtaccattcccactttccttctccctagctttcttagaggtttggccactaaatcttatgagacttgaaccaagtggcttcctctttctaggcttaggacgggttggggttagaaagggtgatcactgaaggccttgcctgctctgacattctgtgacattaaatgtctattctcctgttacctgtggcctgggacaccagtggggtttatcgaggggaccagaggggcctcaggctttcagatgaaatggctcctcctactcacccactttattcctctccatgtaattcaggacaagctgcaacttcccccagcttaacacaatgcccatacctcatacgatatgcgccctcccgttccatccctggccccctcaaacgagacttctcacaaggctgattacagatggtcaaacctggcttccaaggacagaattgcctctcggaagccagctgtggatctgagtccagagttggccacttgtgtgggtcctcacaagcaaagagagcactaaacttgacattgggggtccaccactccaactttgctttctgaaggttttggtgtacattgagccccagaaggaaaggagagtatctgtgagtgggggcctcccttgaccccagtacgaagtctatgccctgaatccccagagtagcccttcctggtgcccaactggcctggggacaaacagcgtccactacatctaggactgccggctaagtggacacacttcttgacctcctaccaggaactttggtaaaagctagctttggggaaggggttgggtgtaaatatgagagggtggagggagaccagctggtagcaataaacatgggtagaactaaattaccgtctccagttatcttttctatggagagagtgttgtggggaggggcagaccggtctccttcaaagctggcctcagcaaagtgtccctcactgtcctttcaggtccatctttcccttcccttaaatgttcagtgcccttgactctgctgacctaaagctccagtctgaagccctagctggctctgccctcccctctaaccagccctcctcagaacaaggctcaagctcccatgaccacgggctttgctggggtccaagaggtgtaggggggaatggctatttccctcatccaataactgttcattttaacagggcccttaaagaccttcacccgtgtgaagaaaggcctgcactgaggagctgtccaggatctaagagggggagatttggggtcagcatggcctttcctctgaagtcaccttttcctggcccccaccctgtacccactaaagcagtgccatctcctgggaggtaggatggagatgaagacctctagcttcctttctgtttctgccagaattaactgcattgggcattgggaagggggttactggagagagagctgccaccagagtgaggacgaggccacttgacttccaggccttgttctcagttgcattcatcccaccacccttagtgactgggggtgccaggaaactgcaagcatgatcctcaccaaagatataagagccctaacagcctcaaagccccaagggtactgaataattgcagtcatttaaggagcacctccacttgtgccaggcactgagcactttacatatagcatctcctgtaatcctcacagtgtccccctgaggtgggtgccctcatcatcccagtttacagaggaggaaactgagggttggggaggttgaagaagttgactagaaagtaacagagcaggagtcttcctgactgcagaacccatgttcttaactcctatgctacaatgcttctccaaaggcctcatccaacaagcattcaaaagtcctgggcactttggagggcaagctgactctctgacccagccatttcccttctagaatttaatcagccacataagtgcagaaacagccacataagtgcacaaatacctatggacaaagatatctacaacagctctgtctgtaatagtaaaaaattgaaaacaatgcaaatggggaattaaatgctttatggtttgttcatataccacgcagccatgacacatgatgttgtagaaaaatatttaataacatgaggaaaatctttgtgtttttttattctttgattctatttatttttctagagacagggtttcgctctgttgcccaggctggagtgatgtggcacaatcatagctcactgcagcctcgaattcccaggttcaggtgatcctcccacctcagtttcctgagttagctgggactagaggcatgcgccaccacacccagctaatttttgtttagtttttgtagagatgaagtgtagttatgttgcccagttgcccaggctggtctcaaactcctgggctcaagcaatccgcccgcctcagcctcccaaagtgctgggattacaggcgtgagctaccacacccagccttcaatttcaaatttgaaaattacacaaataatgtataaacattttagttgtaaaataaatttgtgttatagcaaggggaaaagcaaatcctaaaacattattaataggatgattccatttttattttagaaaaggagaacatatacatagaataaagactatgaagatctgcaccaaatgactactactggtgatcttgtgaggcgtgtggggtgggactaggggagtgagggagaaaaatgctcactttctacattcttcttttatttgcacttcaaaagtattatttttatatctatgaagaaaaggaaactgcatttcaatttttgaaaaaaaaaataaaactaaattaacaaataaatagggcccacgcctctggcctccaatacgggacagtagcagcaaaatcattatcctgctgccttttggtacacggttctggaaagatgagaggtgaataatggccaaagtgcttaaaatccatgcatgccagggtgcacctatcagaggagattcctaaaccttttaaaacccctgtgtaataggtattgctctaagctggggaaaggaaaagatcagaaggagatgaatgcctgggaacatgatgtttggaaatcctctcctaccctggggaggcagctcaggggtggtgtgtctcagatatcaggcccagtttggcatataggatgattacaggctggaggtaggtagctgtgcaaggaccccaaggatcacagtagtttgggaggggcaggtaaggcggggcatcaagggaatgtagaacaggccagggcccaaggggcaagaaaggcagtgctgaggagggccacagggcccaaagctcctcctccaggcagggctgctgacacctattgtcctgccccatgtacttctagaagatgccaagtggtgccctgaatccagcaaccaaggtctagggtgcaaagagctgattcttcacagctggagaccttacacgcccaccccagcctgggatgtcagcagcccagagagctgtagcctctagctgactccccttcgaagggtggggacaggctggtctaaaagggtgatgaggcaagctcttcttctgcccgtgggcctctccagggcctggggagagcaagcagaagcttctctagggtagttgaggcctagcacttaggagctcaggcccacctgagttcaagtcttggctgtgtcacttcctagctgggtcaccttagacaagtcatttaacctccttgagcctccgtttccacgacaataatgtaggaatactagcactagccccatggggctgttatgaagatttaatgtactagcataaagtcctttgcacagtgtccagcacaaaataaatgctcaaggagtgatagtgtgtctggctgcctcgatttgctccatcctgctacctccatttcactcctttcaaggcccatctgacctttgactcccagttagtatagtgaagtgaccaaaagcaaaaggccttggagttcaaataaagtgttttcaaactcttgctacaccacttactagttatatgacattgggtaaagtacatacatatacatttcttttctgtggaacaggaataatgatctaataatacctacctcttgggggtcatgagagaaatcaatcagataactcgtacaaagttcctggcacataggacattaaatggcggctattcgacttttttgtaaactccaaggcactgagctcaagactgggcacaaaggccatgtcggtacatgcttgtctgaggactgactgatgttcagacctgtcatatcccagacaccactgatgtccaggtccccaggaggtgttgggattcaggggtaaagggtgccaactctggtacccagagaggctggtgatgaaagaaaacccacttgaggagcctggggcagccctggctctgcccagtccacagcaagttgatcagccctgggcattagacttactttaggcaactctcttggacttccaggagctgctagaaagaagagaataaagaccagatttcagaagaaagagttgagtctagccagctcctcaccagttcagagttagagccaccttctgtgtctccttcctatcaggagaagcagctggaggcaccagcacagcccaactgaaccatgtcctctctcacttgcttcctctgtatctcacaacctgaccttagactaccccagcaggttctgatccgccccccaaaggcctctgcaaattccctctcctaaaccccaaaccctatggcactgtgatctgatacatggcactgaggccccagcccctatgagtcagtttctcatttcctactcacagagctccccgcccacagttgggccatgagagacctaggcattaaaacaaaggctaaacgaggtgttttacgggaaaaataggcactgatcaccatcgtctcaacaaggcccaacaaggcccttcccccctcccaagtcaggaaattcaggatgaggtatgaggtttcccactggggaaaagaagtggctctcccacctctccttcacaatagaggctaccatagcttctcacacaacattggccatattacatattattcagccaacaacacaatcaagtgggaaggaactgcctcccctctagactcagccaagactcctcctccaggaaggacctaaataaatggaattctatagcacttgatatgtaggcttcaccttttcctataacttcacagtaaccaatatagcatttgtataccattgcctctgggacctgccagggatagcgtcagaaagagcccagagcaatggccctcacaaagggacagccaacttgactgtgggaacttagcaaggcaatttcctgactttctgtgctaaagaaaccacatcatcagttcaacctaaatgcaggggtctggagagagacttaagagagttaagttgaaaacaaaaatccaacaaccagcctcatatcagcccgactatatataagtcctctgtatgcctaaaatggagagcttatcagtaatattcatcccaaatggcaaataatcctaaaaatcattgctgtttctcaacttacgagggttggtactgcaatttctcctaaagttaaccctagcatgcagtcaatcttcaacaagtatttattgaatgttaaataaatgaaagcttcatttcattcaagtgtcatttgcagttattctaactcttttatccatctacacctgcttgacagaggaccagtcggttatgccagaaagctctctagactgggagccagtacatctgggttctggtcttggctctgacagtaactctctatgtgaccctaagttacagtatttaatttgagggagaaagagagagagagagagaagcatagactacatgatcaatatgttcctttaagctatgtcgttcaacagaatctgtgttttatgacgaataatcatcatgtctcgtatttgggcagaaaaccccaacccttttaaccaagttggaacagctaaacagctggagatgggcaggggctggcagaaaaagcagtgagaaggcaagtgggggagtgaagaaagtgaagggcttggaatgtcagggaggtaattctactctagattctaaagttgtaaagccacttctaaatcaagggccccttcatttcctggcccgtggtgaagtgtgagctctaagttctaatttattaatcaatcagaaaaccccttaatgcctgaagaaaaatagacaaaagattaggacagacaatttacagaagaaatacaaatggtaataaacataaggcagaggagaggtgcagaaagtgtttaacttcactattaatcaaataaatataaactaacactgagatataagtttacaactatcaaattaccataggtttaggtcgggcacggtggctcacgcctgtaatcccagcactttgggaggccgaggcgggcagatcacttgaagtcaggagttggagaccagcctggctgacatggcaaaaccccgtctccaataaaaatataaaaattagccaggtgtggtggcgcacacctgtagtcccagctaatgaggaggctgaggcaggagaatcacttgaacccgggagggagagaatgcagtgagccaagatcgtgccactgcactccagcctggatgacaaagcgagactctgtctcaaaaaagctaaaataaaaattcgaaaggtttaaatgacatgggttgattagagtcttctctgatacactgctggcaaaacaaacagggacggcctttcaataaagcaatttggccacatttatcaagagcctttaaaagagcattccctttgactcaataattccacttctaggaatctatcctaaagaaatactcacagacacacccatatttaaggaagttcatcacagcattatttgtaataatgaaaaattagaaactcttaaatgcctgacatgtacacattacaaagtcattaagaagtatttttgagccaggcgcggtggctcacgcctgtaatcccagcactttgggagtccgaggcaggtggatc

SEQ ID NO: 410 - DNA, 5015 bp, Homo sapiens
gcgctccgcacctgggcactcccagcgatgcgcagcggggcagcgccggccccgccgatggagctgctgttgctgccgccgccgccgcccggagcgccccgctccgcccgcgccccgtgcgcctgagcaccgagctcgcccctcctccgcgctaactccgccgcccgctccccaggccgcccgcgctccccgcgcgcctcctcgggctccacgcgtcttgccccgcagaggcagcctcctccaggagcggggccctgcacaccatggcccccgggtgggcaggggtcggcgccgccgtgcgcgcccgcctggcgctggccttggcgctggcgagcgtcctgagtgggcctccagccgtcgcctgccccaccaagtgtacctgctccgctgccagcgtggactgccacgggctgggcctccgcgcggttcctcggggcatcccccgcaacgctgagcgccttgacctggacagaaataatatcaccaggatcaccaagatggacttcgctgggctcaagaacctccgagtcttgcatctggaagacaaccaggtcagcgtcatcgagagaggcgccttccaggacctgaagcagctagagcgactgcgcctgaacaagaataagctgcaagtccttccagaattgcttttccagagcacgccgaagctcaccagactagatttgagtgaaaaccagatccaggggatcccgaggaaggcgttccgcggcatcaccgatgtgaagaacctgcaactggacaacaaccacatcagctgcattgaagatggagccttccgagcgctgcgcgatttggagatccttaccctcaacaacaacaacatcagtcgcatcctggtcaccagcttcaaccacatgccgaagatccgaactctgcgcctccactccaaccacctgtactgcgactgccacctggcctggctctcggattggctgcgacagcgacggacagttggccagttcacactctgcatggctcctgtgcatttgaggggcttcaacgtggcggatgtgcagaagaaggagtacgtgtgcccagccccccactcggagcccccatcctgcaatgccaactccatctcctgcccttcgccctgcacgtgcagcaataacatcgtggactgtcgaggaaagggcttgatggagattcctgccaacttgccggagggcatcgtcgaaatacgcctagaacagaactccatcaaagccatccctgcaggagccttcacccagtacaagaaactgaagcgaatagacatcagcaagaatcagatatcggatattgctccagatgccttccagggcctgaaatcactcacatcgctggtcctgtatgggaacaagatcaccgagattgccaagggactgtttgatgggctggtgtccctacagctgctcctcctcaatgccaacaagatcaactgcctgcgggtgaacacgtttcaggacctgcagaacctcaacttgctctccctgtatgacaacaagctgcagaccatcagcaaggggctcttcgcccctctgcagtccatccagacactccacttagcccaaaacccatttgtgtgcgactgccacttgaagtggctggccgactacctccaggacaaccccatcgagacaagcggggcccgctgcagcagcccgcgccgactcgccaacaagcgcatcagccagatcaagagcaagaagttccgctgctcaggctccgaggattaccgcagcaggttcagcagcgagtgcttcatggacctcgtgtgccccgagaagtgtcgctgtgagggcacgattgtggactgctccaaccagaagctggtccgcatcccaagccacctccctgaatatgtcaccgacctgcgactgaatgacaatgaggtatctgttctggaggccactggcatcttcaagaagttgcccaacctgcggaaaataaatctgagtaacaataagatcaaggaggtgcgagagggagctttcgatggagcagccagcgtgcaggagctgatgctgacagggaaccagctggagaccgtgcacgggcgcgtgttccgtggcctcagtggcctcaaaaccttgatgctgaggagtaacttgatcggctgtgtgagtaatgacacctttgccggcctgagttcggtgagactgctgtccctctatgacaatcggatcaccaccatcacccctggggccttcaccacgcttgtctccctgtccaccataaacctcctgtccaaccccttcaactgcaactgccacctggcctggctcggcaagtggttgaggaagaggcggatcgtcagtgggaaccctaggtgccagaagccatttttcctcaaggagattcccatccaggatgtggccatccaggacttcacctgtgatggcaacgaggagagtagctgccagctgagcccgcgctgcccggagcagtgcacctgtatggagacagtggtgcgatgcagcaacaaggggctccgcgccctccccagaggcatgcccaaggatgtgaccgagctgtacctggaaggaaaccacctaacagccgtgcccagagagctgtccgccctccgacacctgacgcttattgacctgagcaacaacagcatcagcatgctgaccaattacaccttcagtaacatgtctcacctctccactctgatcctgagctacaaccggctgaggtgcatccccgtccacgccttcaacgggctgcggtccctgcgagtgctaaccctccatggcaatgacatttccagcgttcctgaaggctccttcaacgacctcacatctctttcccatctggcgctgggaaccaacccactccactgtgactgcagtcttcggtggctgtcggagtgggtgaaggcggggtacaaggagcctggcatcgcccgctgcagtagccctgagcccatggctgacaggctcctgctcaccaccccaacccaccgcttccagtgcaaagggccagtggacatcaacattgtggccaaatgcaatgcctgcctctccagcccgtgcaagaataacgggacatgcacccaggaccctgtggagctgtaccgctgtgcctgcccctacagctacaagggcaaggactgcactgtgcccatcaacacctgcatccagaacccctgtcagcatggaggcacctgccacctgagtgacagccacaaggatgggttcagctgctcctgccctctgggctttgaggggcagcggtgtgagatcaacccagatgactgtgaggacaacgactgcgaaaacaatgccacctgcgtggacgggatcaacaactacgtgtgtatctgtccgcctaactacacaggtgagctatgcgacgaggtgattgaccactgtgtgcctgagctgaacctctgtcagcatgaggccaagtgcatccccctggacaaaggattcagctgcgagtgtgtccctggctacagcgggaagctctgtgagacagacaatgatgactgtgtggcccacaagtgccgccacggggcccagtgcgtggacacaatcaatggctacacatgcacctgcccccagggcttcagtggacccttctgtgaacaccccccacccatggtcctactgcagaccagcccatgcgaccagtacgagtgccagaacggggcccagtgcatcgtggtgcagcaggagcccacctgccgctgcccaccaggtttcgccggccccagatgcgagaagctcatcactgtcaacttcgtgggcaaagactcctacgtggaactggcctccgccaaggtccgaccccaggccaacatctccctgcaggtggccactgacaaggacaacggcatccttctctacaaaggagacaatgaccccctggcactggagctgtaccagggccacgtgcggctggtctatgacagcctgagttcccctccaaccacagtgtacagtgtggagacagtgaatgatgggcagtttcacagtgtggagctggtgacgctaaaccagaccctgaacctagtagtggacaaaggaactccaaagagcctggggaagctccagaagcagccagcagtgggcatcaacagccccctctaccttggaggcatccccacctccaccggcctctccgccttgcgccagggcacggaccggcctctaggcggcttccacggatgcatccatgaggtgcgcatcaacaacgagctgcaggacttcaaggccctcccaccacagtccctgggggtgtcaccaggctgcaagtcctgcaccgtgtgcaagcacggcctgtgccgctccgtggagaaggacagcgtggtgtgcgagtgccgcccaggctggaccggcccactctgcgatcaggaggcccgggacccctgcctcggccacagatgccaccatggaaaatgtgtggcaactgggacctcatacatgtgcaagtgtgccgagggctatggaggggacttgtgtgacaacaagaatgactctgccaatgcctgctcagccttcaagtgtcaccatgggcagtgccacatctcagaccaaggggagccctactgcctgtgccagcccggctttagcggcgagcactgccaacaagagaatccgtgcctgggacaagtagtccgagaggtgatccgccgccagaaaggttatgcatcatgtgccacagcctccaaggtgcccatcatggaatgtcgtgggggctgtgggccccagtgctgccagcccacccgcagcaagcggcggaaatacgtcttccagtgcacggacggctcctcgtttgtagaagaggtggagagacacttagagtgcggctgcctcgcgtgttcctaagcccctgcccgcctgcctgccacctctcggactccagcttgatggagttgggacagccatgtgggaccccctggtgattcagcatgaaggaaatgaagctggagaggaaggtaaagaagaagagaatattaagtatattgtaaaataaacaaaaaatagaacttatttttattatggaaa

SEQ ID NO: 411 - protein, 1523 aa, Homo sapiens
MAPGWAGVGAAVRARLALALALASVLSGPPAVACPTKCTCSAASVDCHGLGLRAVPRGIPRNAERLDLDRNNITRITKMDFAGLKNLRVLHLEDNQVSVIERGAFQDLKQLERLRLNKNKLQVLPELLFQSTPKLTRLDLSENQIQGIPRKAFRGITDVKNLQLDNNHISCIEDGAFRALRDLEILTLNNNNISRILVTSFNHMPKIRTLRLHSNHLYCDCHLAWLSDWLRQRRTVGQFTLCMAPVHLRGFNVADVQKKEYVCPAPHSEPPSCNANSISCPSPCTCSNNIVDCRGKGLMEIPANLPEGIVEIRLEQNSIKAIPAGAFTQYKKLKRIDISKNQISDIAPDAFQGLKSLTSLVLYGNKITEIAKGLFDGLVSLQLLLLNANKINCLRVNTFQDLQNLNLLSLYDNKLQTISKGLFAPLQSIQTLHLAQNPFVCDCHLKWLADYLQDNPIETSGARCSSPRRLANKRISQIKSKKFRCSGSEDYRSRFSSECFMDLVCPEKCRCEGTIVDCSNQKLVRIPSHLPEYVTDLRLNDNEVSVLEATGIFKKLPNLRKINLSNNKIKEVREGAFDGAASVQELMLTGNQLETVHGRVFRGLSGLKTLMLRSNLIGCVSNDTFAGLSSVRLLSLYDNRITTITPGAFTTLVSLSTINLLSNPFNCNCHLAWLGKWLRKRRIVSGNPRCQKPFFLKEIPIQDVAIQDFTCDGNEESSCQLSPRCPEQCTCMETVVRCSNKGLRALPRGMPKDVTELYLEGNHLTAVPRELSALRHLTLIDLSNNSISMLTNYTFSNMSHLSTLILSYNRLRCIPVHAFNGLRSLRVLTLHGNDISSVPEGSFNDLTSLSHLALGTNPLHCDCSLRWLSEWVKAGYKEPGIARCSSPEPMADRLLLTTPTHRFQCKGPVDINIVAKCNACLSSPCKNNGTCTQDPVELYRCACPYSYKGKDCTVPINTCIQNPCQHGGTCHLSDSHKDGFSCSCPLGFEGQRCEINPDDCEDNDCENNATCVDGINNYVCICPPNYTGELCDEVIDHCVPELNLCQHEAKCIPLDKGFSCECVPGYSGKLCETDNDDCVAHKCRHGAQCVDTINGYTCTCPQGFSGPFCEHPPPMVLLQTSPCDQYECQNGAQCIVVQQEPTCRCPPGFAGPRCEKLITVNFVGKDSYVELASAKVRPQANISLQVATDKDNGILLYKGDNDPLALELYQGHVRLVYDSLSSPPTTVYSVETVNDGQFHSVELVTLNQTLNLVVDKGTPKSLGKLQKQPAVGINSPLYLGGIPTSTGLSALRQGTDRPLGGFHGCIHEVRINNELQDFKALPPQSLGVSPGCKSCTVCKHGLCRSVEKDSVVCECRPGWTGPLCDQEARDPCLGHRCHHGKCVATGTSYMCKCAEGYGGDLCDNKNDSANACSAFKCHHGQCHISDQGEPYCLCQPGFSGEHCQQENPCLGQVVREVIRRQKGYASCATASKVPIMECRGGCGPQCCQPTRSKRRKYVFQCTDGSSFVEEVERHLECGCLACS

SEQ ID NO: 412 - DNA, 151 bp, Homo sapiens
  misc_feature (30)..(30): n is a, c, g, or t
cacgattccagagctggctggacccaagwnrgtgaagagagcacttttcagccccaggaagggcaaagaagagagaaaatcagcctgtctgctctctccttggctcaacaaggcctctaacagtctctgtcctctattcgcacacggcata

SEQ ID NO: 413 - DNA, 691 bp, Homo sapiens
gctagaattgcatttaatcactgtgaaaagactggtcagcctgcattagtatgacagtaggggggctgttagaattgctgctatactggtggtatggattatcatggcattggaattttcatagtaatgcagatccaatttctttgtggtacctgcagtttacaaaataatttgacttcagtgagcatattggtatctggatgttccaatttagaactaaaccatatttattacaaaaagatattaatccctctactcccaggttccctttatatgttaagatataatggctttgaggggggaaaaaataaacctaggggagaggggagtttcctgtagtgctgtttcattagaggatttcagtaaattaaattccacagctaattcaataaataatggtacatttaagtgttctgattttaataatatatttcacatttatccacacagtaacaatgtaatatgttaatgtaaataaaattggttttgatactcagaaataacaagaatttaattttttaaatttgtttacagtcctgggaaaagtaagaattatttgccaaaataagaggaaagaaaaccttagtattattaatgagtttaccatagaattgttggaaatactgaagacaggtgcaatttactaaaactttgtttttaaactattgtagaggctgcattagaagaaatg

SEQ ID NO: 414 - DNA, 3224 bp, Homo sapiens
gtcccacatcccgcatccggcatcccagcggccgggcatgtagcagcggcagcaacggcggaatatgggcgggaaccactcccacaagccccccgtgtttgacgagaatgaggaagtcaactttgaccattttcagattctgcgggccattggtaaagggagttttggaaaggtatgcatcgtgcagaagcgagacactaagaaaatgtatgcaatgaagtacatgaacaagcagaagtgcatcgagagggatgaggttcggaatgttttccgggagctgcagatcatgcaagggctggagcaccccttcctggtcaatctgtggtactccttccaggatgaggaggacatgttcatggtggtggacctgctcctgggaggcgacctgcgctaccatctgcagcagaatgtgcatttcacagaggggactgtgaaactctacatctgtgagctggcactggccctggagtatcttcagaggtaccacatcatccacagagacatcaagccagacaatatcctgctggatgaacacggacatgttcacattacagacttcaacatagcgacggtagtgaaaggagcagaaagggcttcctccatggctggcaccaagccctacatggctccagaagtattccaggtgtacatggacagaggccccggatactcgtaccctgtcgactggtggtccctgggcatcacagcctatgagctgctgcggggctggaggccgtacgaaatccactcggtcacgcccatcgatgaaatcctcaacatgttcaaggtggagcgtgtccactactcctccacgtggtgcaaggggatggtggccctgctgaggaagctcctgaccaaggatcctgagagccgcgtgtccagccttcatgacatacagagcgtgccctacttggccgacatgaactgggacgcggtgttcaagaaggcactgatgcccggctttgtgcccaataaagggaggttgaactgcgatcccacatttgagcttgaagagatgattctagaatccaagccacttcacaaaaagaagaagcgattggcaaagaacagatccagggatggcacaaaggacagctgcccgctgaatggacacctgcagcactgtttggagactgtccgggaggaattcatcatattcaacagagagaagctcaggaggcagcagggacagggcagccagctcttggacaccgacagccgagggggaggccaggcccaaagcaagctccaggacgggtgcaacaacaacctcctcacccacacctgcacccgtggctgcagcagctgagcccacacttgttgctgctcaacaggactgcactcgtctctgccctgcccacccagagcccctctttgtgccctgatggtccctgtctcacccctgaaaacatcagatgcagaaaaagccctggacttggagctgggaagcctgggttctggtcccatctccatgactgattcacgtgtgacctcagacaagtcacgccctctctgtgcctccgttttctgcatctgccaaaggggttaaacacttctgccccacttcaaattacaagattatggggagaacccaattaggtaggaaacatgaaaaacctttgatatttataaaatcatttttacgtgcaaaatataaccttaatatttgaagtgacccccattccccaaagcaatcaaaccgtcatgactttgcaatttggcacatcctagcttgttagagggcacttccgaaaaacacagccctgacagcaaaataaaggtctgatatgttggccccttctatggaaacaacgctgccaaatcctggagcaaaacctgaagtgtcttcatgtgcattctctggcaggccacagtcctgagcttgtaagatggtgcagcatgcagaccagacttgtccccaaggtctcagcgctgcggtctcactcctcccctcatttaagaagactatccttaccttttagtttcagcagtcctcaccaccaccatatccccagtgctgggatggcacacaggtgtccattcagatgagagttgggtcgctgagcattggttactcctgcagagtgtaatcagcaccccatccaactggcccgaaagcccagacctgcagcagaactctccaactctctatcagctttcagggttttctctcctgggaagggtgtaaaatcagcttgtcagattcttcttacagagagtatccaatcggtattggtggagcggctccctatttatacaataggaagcatgggtgcttagaaagtttatttcaggaggaaaatgggttcacacaaaaagcaaactacattctgatctgctcagggagaagcttgcctttgaactggaagatgttgggatgagcagggaaagcttagactttggagtcaggtttgtgttcagaatccagccctgctggctactaactaactgggagaccttaggcaaagcatgcaatcgctctgaatggcagtttcctcatttttaaacagggataataaaactaatattgcaggggagttacagggttaaataagatcctgtgtgtaaccccaagcattggatgactcatagaatggccttttttgtcagcataatcgtcatcattatttagatactttcttccttcactcacccagcaggtcagttttctgtgcaaacaaacctgtttaggattcttccaaatgttcttcctggggtctttgatatttgtttgttacatcctgctgaagttcgactgtgtttttattttttcatccaacttccatttttcactttttacatgattactcaatccttggggctgtccatgtcatctcttagatttcttaaaagacattttaatgtatggttaggttttatatttttattttttaaaaaagaaatagtcagtgttttcctcctttcaaccgagactatttctggattgtgtgctcctcgtcagttgacttgttttgcacacttttctttacttcatgtccccatcaacaaccgtcctgctccccacctcccccaggaaataaggggcctgctcctctccctactgtgaccctggaggctcttaagatgatgatggttttttttattgggctgagttcacgaattaggggcaggagctggaagtcgccctaggaacaccagatttcctggttctgttcaagttggcatttcttgtttggaataaactatttcttggacattccttc

SEQ ID NO: 415 - protein, 414 aa, Homo sapiens
MGGNHSHKPPVFDENEEVNFDHFQILRAIGKGSFGKVCIVQKRDTKKMYAMKYMNKQKCIERDEVRNVFRELQIMQGLEHPFLVNLWYSFQDEEDMFMVVDLLLGGDLRYHLQQNVHFTEGTVKLYICELALALEYLQRYHIIHRDIKPDNILLDEHGHVHITDFNIATVVKGAERASSMAGTKPYMAPEVFQVYMDRGPGYSYPVDWWSLGITAYELLRGWRPYEIHSVTPIDEILNMFKVERVHYSSTWCKGMVALLRKLLTKDPESRVSSLHDIQSVPYLADMNWDAVFKKALMPGFVPNKGRLNCDPTFELEEMILESKPLHKKKKRLAKNRSRDGTKDSCPLNGHLQHCLETVREEFIIFNREKLRRQQGQGSQLLDTDSRGGGQAQSKLQDGCNNNLLTHTCTRGCSS

SEQ ID NO: 416 - DNA, 5533 bp, Homo sapiens
cttgactcaatcctgcaagcaagtgtgtgtgtgtccccatcccccgccccgttaacttcatagcaaataacaaatacccataaagtcccagtcgcgcagcccctccccgcgggcagcgcactatgctgctcgggtgggcgtccctgctgctgtgcgcgttccgcctgcccctggccgcggtcggccccgccgcgacacctgcccaggataaagccgggcagcctccgactgctgcagcagccgcccagccccgccggcggcagggggaggaggtgcaggagcgagccgagcctcccggccacccgcaccccctggcgcagcggcgcaggagcaaggggctggtgcagaacatcgaccaactctactccggcggcggcaaggtgggctacctcgtctacgcgggcggccggaggttcctcttggacctggagcgagatggttcggtgggcattgctggcttcgtgcccgcaggaggcgggacgagtgcgccctggcgccaccggagccactgcttctatcggggcacagtggacgctagtccccgctctctggctgtctttgacctctgtgggggtctcgacggcttcttcgcggtcaagcacgcgcgctacaccctaaagccactgctgcgcggaccctgggcggaggaagaaaaggggcgcgtgtacggggatgggtccgcacggatcctgcacgtctacacccgcgagggcttcagcttcgaggccctgccgccgcgcgccagctgcgaaacccccgcgtccacaccggaggcccacgagcatgctccggcgcacagcaacccgagcggacgcgcagcactggcctcgcagctcttggaccagtccgctctctcgcccgctgggggctcaggaccgcagacgtggtggcggcggcggcgccgctccatctcccgggcccgccaggtggagctgcttctggtggctgacgcgtccatggcgcggttgtatggccggggcctgcagcattacctgctgaccctggcctccatcgccaataggctgtacagccatgctagcatcgagaaccacatccgcctggccgtggtgaaggtggtggtgctaggcgacaaggacaagagcctggaagtgagcaagaacgctgccaccacactcaagaacttttgcaagtggcagcaccaacacaaccagctgggagatgaccatgaggagcactacgatgcagctatcctgtttactcgggaggatttatgtgggcatcattcatgtgacaccctgggaatggcagacgttgggaccatatgttctccagagcgcagctgtgctgtgattgaagacgatggcctccacgcagccttcactgtggctcacgaaatcggacatttacttggcctctcccatgacgattccaaattctgtgaagagacctttggttccacagaagataagcgcttaatgtcttccatccttaccagcattgatgcatctaagccctggtccaaatgcacttcagccaccatcacagaattcctggatgatggccatggtaactgtttgctggacctaccacgaaagcagatcctgggccccgaagaactcccaggacagacctacgatgccacccagcagtgcaacctgacattcgggcctgagtactccgtgtgtcccggcatggatgtctgtgctcgcctgtggtgtgctgtggtacgccagggccagatggtctgtctgaccaagaagctgcctgcggtggaagggacgccttgtggaaaggggagaatctgcctgcagggcaaatgtgtggacaaaaccaagaaaaaatattattcaacgtcaagccatggcaactggggatcttggggatcctggggccagtgttctcgctcatgtggaggaggagtgcagtttgcctatcgtcactgtaataaccctgctcccagaaacaacggacgctactgcacagggaagagggccatctaccgctcctgcagtctcatgccctgcccacccaatggtaaatcatttcgtcatgaacagtgtgaggccaaaaatggctatcagtctgatgcaaaaggagtcaaaacttttgtggaatgggttcccaaatatgcaggtgtcctgccagcggatgtgtgcaagctgacctgcagagccaagggcactggctactatgtggtattttctccaaaggtgaccgatggcactgaatgtaggccgtacagtaattccgtctgcgtccgggggaagtgtgtgagaactggctgtgacggcatcattggctcaaagctgcagtatgacaagtgcggagtatgtggaggagacaactccagctgtacaaagattgttggaacctttaataagaaaagtaagggttacactgacgtggtgaggattcctgaaggggcaacccacataaaagttcgacagttcaaagccaaagaccagactagattcactgcctatttagccctgaaaaagaaaaacggtgagtaccttatcaatggaaagtacatgatctccacttcagagactatcattgacatcaatggaacagtcatgaactatagcggttggagccacagggatgacttcctgcatggcatgggctactctgccacgaaggaaattctaatagtgcagattcttgcaacagaccccactaaaccattagatgtccgttatagcttttttgttcccaagaagtccactccaaaagtaaactctgtcactagtcatggcagcaataaagtgggatcacacacttcgcagccgcagtgggtcacgggcccatggctcgcctgctctaggacctgtgacacaggttggcacaccagaacggtgcagtgccaggatggaaaccggaagttagcaaaaggatgtcctctctcccaaaggccttctgcgtttaagcaatgcttgttgaagaaatgttagcctgtggttatgatcttatgcacaaagataactggaggattcagcaccgatgcagtcgtggtgaacaggaggtctacctaacgcacagaaagtcatgcttcagtgacattgtcaacaggagtccaattatgggcagaatctgctctctgtgaccaaaagaggatgtgcactgcttcacgtgacagtggtgaccttgcaatatagaaaaacttgggagttattgaacatcccctgggattacaagaaacactgatgaatgtaaaatcaggggacatttgaagatggcagaactgtctcccccttgtcacctacctctgatagaatgtctttaatggtatcataatcattttcacccataatacacagtagcttcttcttactgtttgtaaatacattctcccttggtatgtcactttatatcccctggttctattaaaatatccatatatatttctataaaaaaagtgtttgaccaaagtaggtctgcagctatttcaacttccttccgtttccagaaagagctgtggatattttactggaaattaagaacttgctgctgttttaataagatgtagtatattttctgactacaggagataaaatttcagtcaaaaaaccattttgacagcaagtatcttctgagaaattttgaaaagtaaatagatctcagtgtatctagtcacttaaatacatacacgggttcatttacttaaaacctttgactgcctgtatttttttcaggtagctagccaaattaatgcataatttcagatgtagaagtagggtttgcgtgtgtgtgtgtgatcatactcaagagtctaaaaactagtttccttgtgttggaaatttaaaaggaaaaaaatcgtatttcactgtgttttcaatttatattttcacaactactttctctctccagagctttcatctgatatctcacaatgtatgatatacgtacaaaacacacagcaagttttctatcatgtccaacacattcaacactggtatacctcctaccagcaagcctttaaaatgcgtttgtgtttgcttatttgttttgttcaagggttcagtaagacctacaatgttttgtatttcttgacttattttattagaaacattaaagatcacttggtagttagccacattgagaagtggttatcattgttaatgtggttaatgccaaaaagtggttaatattaataagactgtttccacaccataggcaataatttcttaatttaaaaaatctaagtatattcctattgtactaaatatttttcccaactggaaagcacttgattgtacccgtaagtgtttgagtgatgacatgtgatgattttcagaaagttgttgtttttgtttccatagcctgtttaagtaggttgtaagtttgaatagttagacatggaaattattttataagcacacacctaaagatatctttttagatgataaaatgtacacccccccatcaccaacctcacaacttagaaaatctaagttgtttgatttcattgggatttcttttgttgtgaaacactgcaaagccaatttttctttataaaaattcatagtaatcctgccaaatgtgcctattgttaaagatttgcatgtgaagatcttagggaaccactgtttgagttctacaagctcatgagagtttatttttattataagatgtttttaatataaaagaattatgtaactgatcactatattacatcatttcagtgggccaggaaaatagatgtcttgctgttttcagtattttcttaagaaattgcttttaaaacaaataattgttttacaaaaccaataattatcctttgaattttcatagactgactttgctttcgacgtagaaatttttttttcttaataaattatcactttgagaaatgaggcctgtacaaggctgataacctatatgtgatggagatcacccaatgccaagggcagaaagcaaacctagttaaataggtgagaaaaaaaataataatcccagtgccatttgtctgtgcaaagagaattaggagagaggttaatgttacttttttccattttggaaataattttaatcaagtaactcaaatgtgacaaaatttatttttattttttgtggttatattcccaacaacattaaaaaatactcgaggcataaatgtagttgtctcctactctgcttctcttactatactcatacatttttaatatggtttatcaatgattcatgtttccctcaaatagtgatggtttacacctgtcatggaaacaatcctagagagctcagagcaattaaaccactattccatgcttttaagtagttttctccacctttttcttatgagtctcactagattgactgaggaatgtatgtctaaattcctggagaagatgatatggattggaaactgaaattcagagaaatggagtgttcaatagataccacgaattgtgaacaaagggaaaattctatacaactcaatctaagtcagtccactttgacttcgtactgtctttcacctttccattgttgcatcttgaattttttaaaatgtctagaattcaggatgctaggggctacttctccaaaaaaaaaaaaaaaaaaaaaaaaaaaa

SEQ ID NO: 417 - protein, 930 aa, Homo sapiens
MLLGWASLLLCAFRLPLAAVGPAATPAQDKAGQPPTAAAAAQPRRRQGEEVQERAEPPGHPHPLAQRRRSKGLVQNIDQLYSGGGKVGYLVYAGGRRFLLDLERDGSVGIAGFVPAGGGTSAPWRHRSHCFYRGTVDASPRSLAVFDLCGGLDGFFAVKHARYTLKPLLRGPWAEEEKGRVYGDGSARILHVYTREGFSFEALPPRASCETPASTPEAHEHAPAHSNPSGRAALASQLLDQSALSPAGGSGPQTWWRRRRRSISRARQVELLLVADASMARLYGRGLQHYLLTLASIANRLYSHASIENHIRLAVVKVVVLGDKDKSLEVSKNAATTLKNFCKWQHQHNQLGDDHEEHYDAAILFTREDLCGHHSCDTLGMADVGTICSPERSCAVIEDDGLHAAFTVAHEIGHLLGLSHDDSKFCEETFGSTEDKRLMSSILTSIDASKPWSKCTSATITEFLDDGHGNCLLDLPRKQILGPEELPGQTYDATQQCNLTFGPEYSVCPGMDVCARLWCAVVRQGQMVCLTKKLPAVEGTPCGKGRICLQGKCVDKTKKKYYSTSSHGNWGSWGSWGQCSRSCGGGVQFAYRHCNNPAPRNNGRYCTGKRAIYRSCSLMPCPPNGKSFRHEQCEAKNGYQSDAKGVKTFVEWVPKYAGVLPADVCKLTCRAKGTGYYVVFSPKVTDGTECRPYSNSVCVRGKCVRTGCDGIIGSKLQYDKCGVCGGDNSSCTKIVGTFNKKSKGYTDVVRIPEGATHIKVRQFKAKDQTRFTAYLALKKKNGEYLINGKYMISTSETIIDINGTVMNYSGWSHRDDFLHGMGYSATKEILIVQILATDPTKPLDVRYSFFVPKKSTPKVNSVTSHGSNKVGSHTSQPQWVTGPWLACSRTCDTGWHTRTVQCQDGNRKLAKGCPLSQRPSAFKQCLLKKC

SEQ ID NO: 418 - DNA, 3267 bp, Homo sapiens
cgcgggcttgcgggcaggggctgcagggaggaggagaggacccgcgcccgcgggggctgggcggaggcggggccgggcttccggacagaggccaatcgctgccctcggggcctccagcgccggctctgggccgaggcagccagagcgcggaagaggcctggaaatccacgcggattcccggagacggcgcctctgctctgcgggttcgtggcgaggaagtccacccactgctcccgggcgcaggtctgcaggtccgcgcccactgcccgcggcgccactgaccatgtcggagacagagtttcaccatggtgcccaggctggtctcgaactcctgaggtcaagcaattcacccacctcagcctcccaaagtgctggaatgacagtgactgatcaggcttttgtcacactagccaccaatgacatctactgccagggcgccctggtcctggggcagtcactgaggagacacaggctgacgaggaagctggtggtgttgatcactcctcaggtgtccagcctgctcagggtcatcctctcgaaggtgttcgatgaagtcattgaagtgaatctaatcgatagtgccgactacatccacctggcctttctgaagagacctgagctcgggctcaccctcaccaagcttcactgttggactctcactcactacagcaagtgtgtcttcctggatgcagacactctggtgctgtccaatgtcgatgagctgtttgacaggggagagttttctgcggccccggaccccggatggccggattgcttcaatagcggggtgtttgtcttccagccttctctccacacgcataaactcctgctacagcacgccatggaacacggcagctttgacggggcagaccaaggcttactgaatagtttcttcaggaactggtcgaccacagacatccacaagcacctgccgttcatctataacttgagtagtaacacgatgtacacttacagccctgccttcaagcaattcggttccagtgcaaaggtcgtccactttttggggtccatgaaaccttggaactacaagtacaatccacagagtggctcggtgttggagcaaggctcagtgtccagcagccagcaccaggcggcattccttcatctctggtggacggtctaccagaacaacgtgctgcccctttataaaagcgtccaagcgggggaagcacgcgcgtctcctggtcacacactttgccacagtgatgtgggggggccgtgtgcggattcagcctctggtgttggagagccgtgtgaaaattcaacacccagtgcgggcgtgccgtgtgcaaattcaccactgggttctaaccagcctgctcagggccttccggagccgacccagatagtggatgagaccctgtccctacctgaaggacgccgttcagaagatatgatagcttgtcctgaaactgagactcctgccgtgataacgtgtgacccactgtcccagccttcccctcagcctgcagacttcacagagactgaaaccatcttgcagccagcaaataaagtcgaaagtgtctcatccgaggaaaccttcgaaccaagccaggaactccctgctgaggctctcagggaccccagtctgcaggatgcactggaggtcgacctggccgtctctgtttcccagatctccatcgaagagaaggtgaaggaattgagccccgaggaagagaggaggaagtgggaggaaggccgtatcgactacatggggaaggacgcgtttgctcgcatccaggagaagctggaccggttcctgcagtaatccggcagctggtgggcgttgtgtgtagttagacaatgtcctgttgggtggtcctgttgcgtggagatctcctctggtcctttcaaagggaaacgctgttgaaccttgtgcctctatttatgcttaatccatttgagtgcctcacacaaaaaacgtagagtatagaaatccaccttaaagcccctcgccccaacttctccaccaacgccttctgggctttcttcagaggtcacttctacccttgaagctgtcggcaaaagcgagcagtaataacattctagtagactctcgatggtggtctccgctcttgcccgaaggacctctgaagtacgctggatctgtgttgtacaggtgctgtgagacctaccctattcagaattaaacctcactgcaaatttcctcccatcacgaagctaacaacactaatatacgtatttagcacctctgaggctttgccatggagaccatttctgtagggctaaggaaacatttagacgtggtgactgactttcatttggacttggcgaagtgtatctgagaaacacctcggctgtggtctctctgctttaaatcctaacaggacttcctagagcgttgacagaaattctactcgtggacgttgggaagaaagattgtaggtggcttggggaatgtgggtggcttagaggatctaaaccgattcacttcctggttgagaagcaacgagggcttgctctaaatcgtttagaggataacaggatctagagatgctctctgcttgacaacaaaagtcagggtgcagtcggtccacccttgactgctcttggcttggtctctaccctcactacctcagttctcaataacttagtgaatcactgccctcctcaaagccatttccactcagctctttccagagaattctcagttttatgagacgggaaactttatttcacgagaaagcctcattgtcagaagtatcttcattcaatgggcacaatatgctgtgtatctcaccaggtagctgtcaggggccaccgagagtgtcgttaaaaatgggcatcgttgtaataaaggaggaaagtgcgacttttgaaatgtttggaaggtttatttctcatgcacattccagggaaaagcagagagtaaattagagacgggataggaaggccgtgggagaactcgatcctagcctgtgtcagctggatgtgtttacgtggagaggcgtggccactttttaggtcacctgaagcagtttagcctttggatagaggaacctgcctgaatttatggcattagtggtggcatttttttgtgtacaagatgtgggtgatggaggggctgtttctttttccgtgtgggtggttaataatcgtcagtctcggagggcgatgctcgtaggatatttcaggtgagtcagggttggatggtcatcggctttcagagggagaccacgggaatgttcagggaaacaatgtcagcttctctgaggaccagaattc

SEQ ID NO: 419 - protein, 501 aa, Homo sapiens
MSETEFHHGAQAGLELLRSSNSPTSASQSAGMTVTDQAFVTLATNDIYCQGALVLGQSLRRHRLTRKLVVLITPQVSSLLRVILSKVFDEVIEVNLIDSADYIHLAFLKRPELGLTLTKLHCWTLTHYSKCVFLDADTLVLSNVDELFDRGEFSAAPDPGWPDCFNSGVFVFQPSLHTHKLLLQHAMEHGSFDGADQGLLNSFFRNWSTTDIHKHLPFIYNLSSNTMYTYSPAFKQFGSSAKVVHFLGSMKPWNYKYNPQSGSVLEQGSVSSSQHQAAFLHLWWTVYQNNVLPLYKSVQAGEARASPGHTLCHSDVGGPCADSASGVGEPCENSTPSAGVPCANSPLGSNQPAQGLPEPTQIVDETLSLPEGRRSEDMIACPETETPAVITCDPLSQPSPQPADFTETETILQPANKVESVSSEETFEPSQELPAEALRDPSLQDALEVDLAVSVSQISIEEKVKELSPEEERRKWEEGRIDYMGKDAFARIQEKLDRFLQ

SEQ ID NO: 420 - DNA, 554 bp, Homo sapiens
ggcacgagggtaaacagagggcctgcccccgacagcttctgcttccgggtcacgccttgacagcggctttcaacccccacctcagcccagcaattcggcagtttggagcatgtgaacaccttgagccttgatgagttccagtatgtggtatattatgcagagcattcagagcaaatactctctctccgagcgcttaatccgaacaattgctgccatccgttccttcccacatgataatgtagaggacctcatcagagggggagcagatgtgaactgcactcatggcacactgaagcccttgcactgtgcctgtatggtgtcagatgctgactgtgtggagttacttctggaaaaaggagccgaggtgaatgccctggatgggtataaccgaacagccctccactatgcagcagagaaagatgaggcttgtgtggaggtcctattggagtatggtgcaaaccccaatgctttggatggcaacagagataccccacttcactgggcagcctttaagaacaatgctgagtgtgtgcgggctctcctagagagcgggg

SEQ ID NO: 421 - DNA, 331 bp, Homo sapiens
aatagtgattaaatttctctagaaagaagttaacagctcattagaaaagttttaacctgtgaaataagtatttttctcaacattctttaaagtttttatataagttaacactaggtaaacattctgcatactagaagtcagtttattacaaatacatgtcaaaaataaagattatacaaggcaccaaactactagatttggcattaaaacaaatgtttatttctaatcacaacaaaattataatgaataaatgttcttgctttgtatggaaatacaattctttattaaagttaacagaaaggaacttgattcgtttgtaccagtaaaagag

SEQ ID NO: 422 - DNA, 525 bp, Homo sapiens
ttttttttttgctatttttgttttctctcctctgtgttggtcgcctgtctcgctccctctcatgctctctttctctcctctattttgtctctcactattcgtgttttgtgtttgtttctaggtttggctcaattggtaagggtgggattgaatttgctgagccccctagtgtaacagtcttctgcctttgtgggtaaagagtggagagggggagggggacgacagacagacatcccttcttcccacccccctccccacctgccccccggcaaccgagggtgcccatttggtttggtttctattgtacagacatctcaggatggctcacataggcgggaaggagggaagtcgtcacagggcagttttcttggctgtgacctccttccccacccctccctggctggtgttctggaggggaaggctgtggaaaggtgttaattctcgacaggaggaaggagaggaggaaatcccctctgcacctccacctgctccatccaggaagaatgggactctggagctttaagt

SEQ ID NO: 423 - DNA, 515 bp, Homo sapiens
  misc_feature (477)..(477): n is a, c, g, or t
  misc_feature (484)..(484): n is a, c, g, or t
  misc_feature (504)..(504): n is a, c, g, or t
agccgctcaacaccctgcagcacctctgtgaggaaatggaatacagcgagctcctggacaaggcttcggaaactgatgatccatatgagcgcatggttctcgttgccgcatttgcagtttcaggatactgctccacctatttcagagcaggaagtaagccattcaacccagtccttggggagacttatgaatgcattagagaagacaagggattccgctttttctcagaacaggttagccatcatccacccatttctgcctgtcactgtgaatcaaagaattttgtgttttggcaagatatcagatggaaaaacaagttctgggggaagtcgatggaaatcctgcctgttggaacactgaatgtcatgcttccaaagtatggagattactatgtgtggaataaagtcaccacttgcatacacaacatcctcagtgggagaagatggatagaacattatggagaagtaaccatcaganatacccnaagcagtgtttgcatttgcnaactcacattg

SEQ ID NO: 424 - DNA, 435 bp, Homo sapiens
tcaggaatgaaatagtcaatggcctgattaaggcaagcagctacaggctagcatggacactttttaaaaattttatcttgttctttttcttgctcagggctggtaggttggatctgaaccattaaaatcaaatggtccactaggcgtatgatctctttgagccaaatcagttcctgaatataaaggaggaaatgatgaggatgtactgaggcaacggggaagtatagaaacatccaaagacaaaagccaagggatgcaaaggcagagacacaggtgctttttggtgaaccagtggatatggcaaccagtgtaactggcatacaagaaaccctaggagcaaaaccaacaccaatcattctcaacactaagagatttcacacaaggaaaaagtgtcttaaaaccatgtatacatcagtaattttatagtgagagtca

SEQ ID NO: 425 - DNA, 1119 bp, Homo sapiens
attccagcctcattgtaacacacattctacgcctagcctggctttcttgctctccctcatctcattgtttcagcggaggccaaatctgaagtcctttccagggagtggctctgttcatcttattcgccagccaaagtaggaacagcgtaagaggagagagacacattcagcagccaaaggactcggtggaaagagcagaacaccatagacaatatgtcgctcttgggacccaaggtgctgctgtttcttgctgcattcatcatcacctctgactggatacccctgggggtcaatagtcaacgaggagacgatgtgactcaagcgactccagaaacattcacagaagatcctaatctggtgaatgatcccgctacagatgaaacagttttggctgttttggctgatattgcaccttccacagatgacttggcctccctcagtgaaaaaaataccactgcagagtgctgggatgagaaatttacctgcacaaggctctactctgtgcatcggccggttaaacaatgcattcatcagttatgcttcaccagtttacgacgtatgtacatcgtcaacaaggagatctgctctcgtcttgtctgtaaggaacacgaagctatgaaagatgagctttgccgtcagatggctggtctgccccctaggagactccgtcgctccaattacttccgacttcctccctgtgaaaatgtggatttgcagagacccaatggtctgtgatcattgaaaaagaggaaagaagaaaaaatgtatgggtgagaggaaggaggatctccttcttctccaaccattgacagctaacccttagacagtatttcttaaaccaatccttttgcaatgtccagcttttacccctactctctactttttcacccaaactgataacatttatctcattttctagcacttaaaatacaaagtctatattattgcataattttgctgcttctcaatatcatagacacagtgaatagatgatgactatatggcttatatacaaacattctatgtacaatttcaagggagactaaactttaggctaataatctttactattgaatctgtctgatatagatcttagggttgaagaagctatctttgtct

SEQ ID NO: 426 - protein, 173 aa, Homo sapiens
MSLLGPKVLLFLAAFIITSDWIPLGVNSQRGDDVTQATPETFTEDPNLVNDPATDETVLAVLADIAPSTDDLASLSEKNTTAECWDEKFTCTRLYSVHRPVKQCIHQLCFTSLRRMYIVNKEICSRLVCKEHEAMKDELCRQMAGLPPRRLRRSNYFRLPPCENVDLQRPNGL

SEQ ID NO: 427 - DNA, 402 bp, Homo sapiens
cgagaattggtcaacttcattctatagattgaaggtgtgactcaatccctaaaatctgagatttgcaacctattccaaactgagcactcaggattaccctcgtgggtgtcaagtgcctaaggagaatgttccatgtttgctagaattagaaaggggaggtaataattcttagggcctagagaaggttgggctagcccaatgaatattttcttttttgaagtaatggattatttctgaataattcaatattatgttaggaaacactttattccaggtcagtagaaggttgtctacctaagtgcccagatgttaaataagagtagtctgtcccatagaacaacatcacatagctcttcagaaaagacttccagaaaatctgagtaacttgaatgagcactcttg

SEQ ID NO: 428 - DNA, 321 bp, Homo sapiens
gctgctcgcccgccgagtacaagtccagcaggcgccgcgcggggccacccccggggccgcgcaggtcccagtggagcacgcgctggcggtcgtgcagccggtcctgggtccacaccatgcgcgggctctggcagcgcagcaccgcccgggcgcccgcctcccagctcaccgcggactcggacaccacggagctgccagcagcggcgggtaccgaggaccctgagtgcaggagaacagcagagctctgcagaagcacaagtttccaaagcaggattcgggatggcagcgccatggcccccgcccagccccaggctttgtccc

SEQ ID NO: 429 - DNA, 3164 bp, Homo sapiens
cacatttcttagcttctctgagcctccatttcagcatctgtaaaatgttactacctactttataggttttctgatgaggcttaagtgtggttgtgcatgtgaccatcttagcatagtgtgtggcaatggtaagcactcagtgctgtcagctgtttttaccgctgttattatattactgtgttttcccatgtcattaggtctgtgatccaggcttcagcagacaatccaggctgatgcttttgctgagtgcgctaagggatgctggcctggcgggatggtgaactggaagcagaaacgtcatcctctctcttccttcttgccatgcaggtgtggatgtgtgggggccgcatggaggacatcccctgctccagggtgggccatatctacaggaagtatgtgccctacaaggtcccggccggagtcagcctggcccgggtaagaaccttaagcgggtggccgaagtgtggatggatgagtacgcagagtacatttaccagcgccggcctgaataccgccacctctccgctggggatgtcgcagtccagaaaaagctccgcagctcccttaactgcaagagtttcaagtggtttatgacgaagatagcctgggacctgcccaaattctacccacccgtggagcccccggctgcagcttggggggagatccgaaatgtgggcacagggctgtgtgcagacacaaagcacggggccttgggctccccactaaggctagagggctgcgtccgaggccgtggggaggctgcctggaacaacatgcaggtattcaccttcacctggagagaggacatccggcctggagacccccagcacaccaagaagttctgctttgatgccatttcccacaccagccctgtcacgctgtacgactgccacagcatgaagggcaaccagctgtggaaataccgcaaagacaagaccctgtaccaccctgtcagtggcagctgcatggactgcagtgaaagtgaccataggatcttcatgaacacctgcaacccatcctctctcacccagcagtggctgtttgaacacaccaactcaacagtcttggaaaaattcaataggaactgagccctcatgtccccttggcaggccccccagggtctggcactcactgcagacttcctctttcaagggaggcagggcccctgtgggcactaggtgtaaaaggtgctggccaaatggttcagggtgaagagggctcttgattcaggggctggggtctgcctggtccttgagcccctgagttgtgggggtagggtgaagagcatatcccacaagaggccccacagggagcagagactgctttaatccctgctgacatcacggaaaagcaacagagccttttcaactttgtcactatgtccccttgaacattatgtgggagaacaccaaggtagcctaggccacccaaaagtgagtcctgcgaggttgcccagccctcagatggctctcctacatgatggtgctttagaaacaaaggtaaaatttgcctgtttggggcagcttttagtatcgatgccactcatctgcagcagaagagaaagaagtcctcttggggctttttagtttctgccgtcctggggggaacattgcagttactgcacagcttctgttctctgtcacaaccccaggtgatttggtccggtcaaaggccatacttggggccctaagagtgttcagtattgaatgctgatcagctgccaggtgaggagtcagaagagggagcccccctagacatttctttgcagctatggacatgcgggatatctccccctgctctctgggtatttgaaatgtcaattttagcactctccaggcacaaggacagcccagcaccagctttacagggcagtgtttcagatggccctgagcccacggaaaaggccaggtagacctccaaactagaaatgctggctgatttgccctgatccatgcttccatttccctgtctctcttccccaggcaattactggcctcaaaagaggaacagaggtgctgcgaggtgctcacctcacagagtctggaggcctccaggatcaactgtgggcaaagtgcctgcctctgacctcatcatggttctagttctcatacagaactccagaatttttaaagaactctataattggattgcaaactaggatgctacataggattctggtattccacatccaatatggatttctagaatgctgtgattaaaggagccagccaggtgtaatacagtcaaggcagcccccagcctagagacaatctgtgaaatccaaagttggtggtgttgggaaagcagggggacatgtgtccctcagctcagcagaggctgtggtacaacatggtccttggtgaagacctgcacccctggaacctcccaccatcatcacaactgtagtctcatttgcagtggagaaaagaacccgacgtcccacagccagatatacacccagctccatgccagcccttcatgtttaccttttgctttgttaattacatgtcagactcctagagggcctccagactaataggaagcatttctgtaaccaacctgccacccactgattcagaaatggaaatcacattccacaatctatggcttccaccagctagcccaggaaatacttgaaatcagcattccaattagtgttgagtctcttgattgtgtcatttaccaattaaataactgagacctaagtctgggaacagagccacgaatctgcctttgagatgctggcagatctcaaggccatcaattattgggggagggagggacaaacactcccaatcatccaccagtcagactgaatgtgtagctggcgaggaattacttccacttctggcccagcacaagccctgctttggccacctgtctgcaagagaggcggcccctgtgcttgcaacgcttacgtgttgatcccagtgtccttttccaaatgagtgctgtagctttagaagtggccctctatagaaagaagtcaaaagatgaggccccttctagaatctaggataacaagagtgttgacagtttgaggagtcgaattgagattcatcatcaaagagcaatgcagcgtcgttaaaataaaaactgtgccttttaaaaagaaaaatgcaaatatagagcaaatccctaaacttgaaaaaaaaaaaaaaaaa

SEQ ID NO: 430 - protein, 276 aa, Homo sapiens
MLAWRDGELEAETSSSLFLLAMQVWMCGGRMEDIPCSRVGHIYRKYVPYKVPAGVSLARVRTLKRVAEVWMDEYAEYIYQRRPEYRHLSAGDVAVQKKLRSSLNCKSFKWFMTKIAWDLPKFYPPVEPPAAAWGEIRNVGTGLCADTKHGALGSPLRLEGCVRGRGEAAWNNMQVFTFTWREDIRPGDPQHTKKFCFDAISHTSPVTLYDCHSMKGNQLWKYRKDKTLYHPVSGSCMDCSESDHRIFMNTCNPSSLTQQWLFEHTNSTVLEKFNRN

SEQ ID NO: 431 - DNA, 3000 bp, Homo sapiens
caggccacaccggtggtctgggctggggaccgcgggtcgggtccggtttccagggggttcctggtgctcgaggctggcggcgaggaaggaccagatggcctttgaggatgtggctgtgtacttctcccaggaggagtgggggctcctggacacagcccagagggccctgtaccgccgcgtgatgctagacaacttcgcacttgtggcctcgctgggactctccacctctcgacctcgtgtggtcatccaactggagcgtggcgaggagccctgggttcccagtggaacggacacaaccctgtccaggaccacctacaggaggcgcaaccctggttcctggagtttgacagaggatagagatgtttctggagaatggccacgagctttcccagataccccacctgggatgactactagcgtcttccctgttgccggtgcctgccacagtgtaaaaagcctgcagagacaacggggtgcctccccatctcgggagagaaaacccacgggggtgtcggtgatctactgggagaggctcctgctaggctcaggcagtgggcaagccagcgtcagcctgcgactgacctccccgcttaggcctcccgagggcgtccggcttagggaaaagacactcacagagcatgcgttgctggggaggcagcccaggacgcctgagcggcagaaaccatgtgcacaggaggtccctgggagaacctttgggagcgcccaggacctggaggctgccggcggtcggggacatcaccgaatgggtgcagtttggcaggagcctcatagactcctcggtggccaggagccctcgacctgggacgagctgggcgaggctcttcacgctggggagaagtccttcgaatgcagggcgtgcagcaaagtgttcgtgaagagctccgacctcctcaagcacctacgcacccacaccggggagcggccctacgagtgcgcccagtgcggcaaggccttcagccagacgtcgcacttgacgcagcaccagcgcatccacagcggcgagacgccctacgcgtgccccgtgtgcggcaaggccttccggcatagctcctcgctggtgcggcaccagcgcatccacacggccgagaagtccttccgctgctccgagtgcggcaaggccttcagccacggctccaacctcagccagcaccgcaagatccacgcgggtgggcgtccttatgcttgcgcacagtgtggccgccgcttctgccgcaactcgcacctgatccagcacgagcgtacgcacacaggcgagaagcccttcgtgtgcgcgctctgcggtgctgccttcagccagggctcctcgctctttaagcaccagcgcgtgcacacaggcgagaagcccttcgcctgcccacagtgcggccgcgcctttagccacagctccaacctcacccagcaccagctcctgcacacgggcgagcggcccttccgctgcgtggactgtggcaaggccttcgccaagggcgccgtgctgctcagccaccggcgcattcacacgggcgagaagcccttcgtgtgtacgcagtgtggccgcgccttccgtgagcgcccggccctcttccaccaccagaggatccataccggcgagaagaccgtccggcgatccagggccagcctgcacccccaggccaggtctgttgccggggcatcatcagaaggtgcgccagcgaaggaaaccgagcccactcccgcctcgggcccagccgccgtctcgcagccagcggaggtctgaggtcacaggttgcagccctggccttctgtgaatcccttccacagctaaagggcatatgtcctctgcagatccacagcagagaaaaagtcccgtgcttgctagtcagggacaagggaggccctttggctgtgatttcatttgcacgtggggacaggatttgccagttcacccacagatcacacctccatccccaaagaggtagcactgcagcaacatcagggggaggacgtggtggctgaactctagtggggccgagactattcagagccagtaggaggccgacagtcacagcactgcactgtggtgcggcttcatgtgatatgacagtggatgctaaggtgagagggatgcaggcatgggttgggggtggcccagagaaacttatgacagctgtacacaaactggccgctggagagatgcccgctgagggtattctcccctcaacccactgcctctgttcatccaagacttcctaggggccagcctagcagacaagagaccacaagggactggggatcagggtctgggctctgtcagccgccacctctgggaaagagaaaaggtttgggtccactgaacatcatgtttgtagacgctgacaggtggggtcctaatgagagccaacacatgctcactgccagctcctgtcctgagtactgggaagtttctcctgaagccctgtgagatggctctgtggctggtatcccgacttggaagatgaggaaactgaggcacacggcctggcctggcttcacacacatagccgactcaggagagggatgcccatgggggaacatgtgactctcagcattggaaggacagagctaggatgatggctttccggtggcactcgttcaggtttttgcccaagtctcagcttggccaaggcctgtcactgactggtttaccaaagtcgatgtgaggaggaggctttatacctgaggggatgatgttaacttcagacaagatggagctgctcacttttgccgggtttggtggccacttcacccccaaccctgtctcacccccattatccctcctcaattggaggctggacagagctgaataggaaagacttgctattgcctaaggctatgtgtgacaccctcctgaggacctccccaccccagtgtaatggcccttcatggcagggacagaaaggtggactgggggccatttgcttcctgtggccttcagcagaccaggccctgtccctacctggagcctcacctccaaggaaattc

SEQ ID NO: 432 - protein, 553 aa, Homo sapiens
MAFEDVAVYFSQEEWGLLDTAQRALYRRVMLDNFALVASLGLSTSRPRVVIQLERGEEPWVPSGTDTTLSRTTYRRRNPGSWSLTEDRDVSGEWPRAFPDTPPGMTTSVFPVAGACHSVKSLQRQRGASPSRERKPTGVSVIYWERLLLGSGSGQASVSLRLTSPLRPPEGVRLREKTLTEHALLGRQPRTPERQKPCAQEVPGRTFGSAQDLEAAGGRGHHRMGAVWQEPHRLLGGQEPSTWDELGEALHAGEKSFECRACSKVFVKSSDLLKHLRTHTGERPYECAQCGKAFSQTSHLTQHQRIHSGETPYACPVCGKAFRHSSSLVRHQRIHTAEKSFRCSECGKAFSHGSNLSQHRKIHAGGRPYACAQCGRRFCRNSHLIQHERTHTGEKPFVCALCGAAFSQGSSLFKHQRVHTGEKPFACPQCGRAFSHSSNLTQHQLLHTGERPFRCVDCGKAFAKGAVLLSHRRIHTGEKPFVCTQCGRAFRERPALFHHQRIHTGEKTVRRSRASLHPQARSVAGASSEGAPAKETEPTPASGPAAVSQPAEV

SEQ ID NO: 433 - DNA, 1885 bp, Homo sapiens
gcaggaattccgggcactgctctgggccattccccaatcccccctcccacttgagcccctaactcagaatctgggacccaggggcccctccctaccccagmtaacctcttctggaccaggagagccaacccagatcccactacctccatgagtgctacagacaggatggggcccagagctgtgccgggtctgcggctggcactgctgttgctgctggtgctagggacacccaagtcaggggtacaggggcaggaagggctggacttccctgagtacgatggtgtggaccgtgtgatcaatgtcaatgcaaagaactacaagaatgtgttcaagaagtatgaggtgctggcactcctctaccatgaaccccccgaggatgacaaggcctcacaaagacaatttgagatggaggagctgatcctggagttagcagcccaagtcctagaagacaagggtgttggcttcgggctggtagactctgagaaggatgcagctgtggccaagaaactaggcctaactgaagtggacagcatgtatgtattcaagggagatgaagtcattgagtacgatggcgagttttctgctgacaccatcgtggagtttctgcttgatgtcctagaggaccctgtggaattgattgaaggtgaacgagagctgcaggcgtttgagaatattgaggatgagatcaaactcattggctacttcaagagcaaagactcagagcattacaaagccttcgaggatgcagctgaggagtttcatccctacatccccttcttcgccaccttcgacagcaaggtggcaaagaagctgaccctgaagctgaatgagattgatttctacgaggccttcatggaagagcctgtgaccatcccagacaagcccaatagcgaagaggagattgtcaacttcgtggaggagcacaggagatcaaccctgaggaaactgaagccggagagtatgtatgagacctgggaggatgatatggatggaatccacattgtggccttcgcagaggaagctgatcctgatggtttcgagttcttagagactctcaaggctgtggcccaagataacactgaaaacccagatcttagcatcatctggattgaccctgatgacttccccctgctggtcccatactgggagaagacgtttgacatcgacttgtcagccccacaaataggagtcgtcaatgttactgatgcggataggctatggatggaaatggacgatgaggaggacctgccttctgctgaggagctggaggactggctggaggatgtcctggagggcgagatcaacacagaggacgatgacgatgatgatgatgactagttgctatggcaaccatctttcagccccactggtcttttcatgctctctcctgccttcccttgtccttccctgagttcctccagggagactaggttattctctgccatagagctaactgggtctatatgctgggtgctgagacactgatccccctcatttgatgagcaaatgagctacttttccctagacaccaggccagctctctcttatctgacttctgtttcttatcccataacttacttgtatctattatgtgtcacttccaacactctccatactcattcttgtgattctcctctagccatatatatgggccccatcactgttctgttccctccatctatgcacaagctttaccccactctctctaaacctgtaactttctgactgtcctgtccttggccagaaggaagggagaatactgtgtttgggactgtatctcagcaatcacttgttaatgtatttgggtcaaatgagaggcctcaataaagacatctggggcagcatgaaaaaaaaaaaaaaaaaaaaaaaaaaaaaaaaggaattc

SEQ ID NO: 434 - protein, 390 aa, Homo sapiens [sequence omitted]

SEQ ID NO: 435 - DNA, 1332 bp, Homo sapiens
gctgcagccctcagaagtaagcaaggtttcctgccgggagaaaaggatttgaagcattccagccaaaatgacggacagaagccccttcgaaaccgacatgctcaccctgacccgctacgttatggaaaaggggcgtcaggccaaagggactggggagctcacccagctgctgaactcaatgctgacggccatcaaagccatctcctcggctgtgcgcaaggccggtctggcccacctgtatggaatcgcaggaagcgttaacgtgacgggagatgaggtgaagaaactggatgtgctatccaattccctggtgatcaacatggtccaatcctcctatagtacctgcgtcctggtctcagaagagaataaggacgccatcatcaccgccaaggagaagcgggggaaatacgtggtctgctttgacccactggatggatcttccaatattgactgcctggcctccatcggaaccatctttgccatctatagaaagacctcagaggatgagccttctgaaaaggatgccctgcagtgtggccgcaatattgtggccgcaggttatgcgctgtacggtagtgcaaccctggtggctctctccacagggcaaggcgtggacctcttcatgcttgacccggctcttggtgaatttgtcctggtggaaaaagatgtcaagattaagaagaaaggaaagatttacagcctgaatgagggctatgccaagtattttgatgcggccaccactgaatatgtgcagaaaaagaaattccctgaggatggcagtgctccctatggggccaggtatgtgggctccatggtggctgacgtgcaccgcaccctggtctatggaggaatcttcctgtacccagccaaccagaagagccctaagggcaagctccggctcctgtatgaatgcaatcccgtggcctacatcattgagcaggcaggaggcttggcgaccacggggacccagcctgtactggacgtgaagcccgaggcaattcaccagcgagtccccctcattctggggtcaccagaggatgtgcaggaatatctcacctgtgtgcagaaaaatcaggcaggcagctagcgagtttgaccccacatgccctcttctgtttgttttgcaccttgtctaaggaccctaaatgaacgataaacagagatggtagctatgagtatacaaaaggtaaatccacttaatcacatacagaagagcaacaacaaactgcttacgacaggtttggaagccacaggcgattctatggtcaatgtgaaggactagaaataaaaacccacatgtggaaaaaaaaaaaaaaaaaaaaaaaaaaaaaa

SEQ ID NO: 436 - protein, 339 aa, Homo sapiens
MTDRSPFETDMLTLTRYVMEKGRQAKGTGELTQLLNSMLTAIKAISSAVRKAGLAHLYGIAGSVNVTGDEVKKLDVLSNSLVINMVQSSYSTCVLVSEENKDAIITAKEKRGKYVVCFDPLDGSSNIDCLASIGTIFAIYRKTSEDEPSEKDALQCGRNIVAAGYALYGSATLVALSTGQGVDLFMLDPALGEFVLVEKDVKIKKKGKIYSLNEGYAKYFDAATTEYVQKKKFPEDGSAPYGARYVGSMVADVHRTLVYGGIFLYPANQKSPKGKLRLLYECNPVAYIIEQAGGLATTGTQPVLDVKPEAIHQRVPLILGSPEDVQEYLTCVQKNQAGS

SEQ ID NO: 437 - DNA, 6799 bp, Homo sapiens
ctagatataatgggaggtgctttatagaaagtgcagcatatcctttgtctgattccaaacaaatgtagaagtctacgctagctagtagtaatggcagctgggaggtgcaggttctctccacccaggctcattttccacgctttgggtcatgggggacagctggtcctggactgtggcactaagaaagcatgactcctgccccgtcttcccttgaggggcagaacagggcagagtctgcacctgtgcccgtgcccagcatcacgcccaccccgctgcctttgcaggcacatggtgcttctgaaggagcagtacgggcagcaggtggtcgtgaaccttctgggaagcagaggcggagaggaggtgctcaacagagccttcaagaagctgctctgggcttcttgccacgcgggcgacacgcctatgatcaattttgacttccatcagtttgccaaaggtgggaagctagagaaattggagaccctcttgaggccacagttaaagctgcactgggaagacttcgatgtgttcacaaagggggagaacgtcagtccacggtgaggctcgctgcgcactgtgccgcgtcttctgctggggggaagcgtcagtccacgttttcagaaaggcactttgcggatgaactgtcttgactgcctggaccgaaccaacactgtgcagagcttcatcgcgctcgaggtcctgcatctgcagctcaagaccctggggctgagttcaaaacccatcgttgaccgctttgtggagtccttcaaagccatgtggtctctgaatggccacagcctgagcaaggtgttcacaggcagcagagccctggaagggaaggccaaggtggggaagctgaaggatggagcccggtccatgtctcgaaccatccagtccaacttcttcgacggggtgaagcaggaggccatcaagctgctgctggttggggacgtctacggcgaggaggtggcagacaaagggggcatgctgctggacagcacggcgctcctggtgactcccaggatcctgaaagctatgactgagcgtcagtccgaattcacaaatttcaagcggatccggattgctatggggacctggaacgtgaacggaggaaagcagttccggagcaacgtgctcaggacggcggagctgacagactggctgctcgactcgccccagctctcgggagctaccgactcccaggatgacagcagcccagctgacatatttgctgtggggtttgaagagatggtggaattgagcgcagggaatattgtcaatgccagtactaccaacaagaagatgtggggtgaacagcttcagaaagccatctcacgctctcatagatacattctgttgacttcggcacagctggtgggcgtctgtctttatatctttgtacgtccataccatgtcccgttcatcagggacgtagccatcgacacagtgaagacgggcatggggggcaaggcggggaacaagggcgccgtcggcatccgcttccagttccacagcaccagcttctgcttcatatgtagtcacctgacggccgggcagtcccaggtgaaggagcggaatgaagactacaaggagatcacccagaaactctgcttcccaatggggagaaatgttttttctcatgattatgtattttggtgtggcgatttcaactaccgcattgatcttacttatgaagaagtcttctattttgttaaacgccaagactggaagaaacttctggaatttgatcaactacagctacagaaatcaagtggaaaaatttttaaggactttcacgaaggagccattaactttggacccacctacaagtatgacgttggctcagccgcctacgatacaagcgacaaatgccgcacccccgcctggacagacagggtgctgtggtggaggaagaaacatccctttgataaaacagctggagaactcaaccttctagacagtgatctagatgttgacaccaaagtcagacacacctggtctcctggtgccctgcagtattatggtcgtgcggagctacaagcgtctgatcacagacctgtgctggcgatcgtggaggtggaagttcaggaagtcgatgtgggtgctcgggagagggttttccaggaagtgtcctccttccagggccccctggatgccactgttgtagtaaaccttcaatcaccgaccttagaagagaaaaacgagtttccagaggacctgcgtactgagctcatgcagaccttggggagttatgggacaattgttcttgtcaggatcaaccaagggcagatgctggtaacttttgcagacagtcactcggctctcagtgtcctggacgtggacggtatgaaggtgaaaggcagagcagtgaagattagaccgaagaccaaggactggctgaaaggtttgcgagaggagatcattcggaaacgagacagcatggcccccgtgtctcccactgccaactcctgtttgctggaggaaaactttgacttcacaagtttggactatgagtcagaaggggatattcttgaagacgatgaagactacttggtggatgaattcaatcagcctggggtctcggacagtgaactcgggggagacgacctctctgatgtccccggccccacagcactggctcctcccagcaagtcacctgctctcaccaaaaagaagcagcatccaacgtacaaagatgacgcggacctggtggagctcaagcgggagctggaagccgtcggggagttccgccaccgttctccgagcaggtctctgtcggtccccaaccggcctcggccacctcaaccccccgcagagacccccccctccaaccggtttaatggtgaaaaagtcggcttcagatgcgtccatctcctccggcacccatgggcagtattcaattttgcagacggcaagacttctaccaggagcacctcagcaacctcccaaggctcggactggaataagtaaaccttataatgtcaagcagatcaaaaccaccaatgcccaggaggcagaagcagcaaatccggtgtctcctggaagccagaggaggtgcctccgaagaagccctaagtgccgtggccccaagggaccttgaagcatcctctgaaccagagcccacaccgggggcagccaaaccagagaccccacaggcgcccccactccttccccgtcggcccccacccagagttcctgccatcaagaagccaaccttgagaaggacaggaaagcccctgtcaccggaagaacagtttgagcaacagactgtccattttacaatcgggcccccggagacaagcgttgaggcccctcctgtcgtgacagcccctcgagtccctcctgttcccaaaccaagaacatttcagcctgggaaagctgcagagaggccaagccacaggaagccagcatcagacgaagcccctcctggggcaggagcctctgtgccaccacctctggaggcgccgcctcttgtgcccaaggtacccccgaggaggaagaagtcagcccccgcagccttccacctgcaggtcctgcagagcaacagccagcttctccagggcctcacttacaatagcagtgacagcccctctgggcacccacctgcgcgggcaccgtcttcccacaaggggactttctcagcacttcatctgctacaagccccgacagcgatggcaccaaagcgatgaagccagaggcagccccacttcttggtgattatcaggaccccttctggaaccttcttcaccaccctaaactgttgaataacacttggctttctaagagctcagaccctttggactcaggaaccaggagccccaaaagagatcccatagacccagtgtcagctggcgcttcagctgccaaggcagagctgccaccagatcatgaacacaaaaccttaggtcactgggtgacaatcagtgaccaagaaaagaggacagcactgcaggtgtttgacccactggcaaaaacatgactgagcagctttgaaggctgcagtcctatagaatgcataccttcctccctctagacatccctccaccagaagagacatctatttaaaggcacactggccaaaacgtttgtgcatctgtcactctcgtgtagtttacaaaaatcgtgtctcttattcagtaagatggttactcagccaccaaaatatatttcactcaaggcttgtacatctgaagtttgctcttcaaggaatgggaaccttcctgttaaattcggtgtatggattttaagaaaggaatctagccaatgaggtccaagaagttctcacccattgaatttttaaatggctgttcagttcatgttgtacgtgatggagatttgtcttttgttttatttgcattttacagatttggtataacattttggggagccacctgaaggttgatgtataaagtaaggattagagaaagaggtcgttgtgaccattagtagctgtcctggcccacttaaacaaggttacaaaaaatcagagtcggaagcagccaaataggtcaacctaatgactagactgtacattcccatgagccttcatgtttaagtgtgtacatgtgcgttaaccttgatgatgcgtgaatcccgagggagccggtggcatacaccgttagcttaaccttagcttaaactagctgaaggctcctgtgccatgtcttagacattgcatgccctatcaattactataatcctgagccatggtgtgctactgaaaccaatttttatccaccatctagtccttattaaatgaaacctcacggatcctttgttccgcttatattccatgcataccacataaaagcacacagtgcgaaaactcttgctgatacgcgatattgattctcattgttagaatatggagagtgtttcagcctcgtctgtccggctggagcttcgggatggaaagtgctatgtgtccctgcatataagaatcaccaggccagtgtttctgggtttgcttgtctatatgtttgtctatattttttgcctatacatttttcccacgtttccaacagcacttctcacctattcaataactgaaaaagacattaccatagtgctttacatttttaaagtaatgttacaaggtctggaatccatttggagcagataccgtgttttcgctatttaataagaagttcagtagtgaaatcttactgtaccgcctgttgtatctgggagcctcgtacagaggctcgcacagcagtgatcaggtgtcatcccttacgtgactgggggatgtctgtcctaaaagctgactgctaggatagtaaggatcatcttgcctgggctatgccactgtcttgttaccaattagacatctggaatttcataattagttttcattgtcactgtcaagatatattgcagattacttaaatatggccatcaaaacaaaagttacaacacgtatctcttttcatctgaaaactaatacctggaaaaggataaaaaaaaaaaaaggaatccgtgacccacagagctagacagataagatgcatagttgaccagtcataaaaggcggtgtttaggtgatcaggatgccgttggtggcatttacgtgctttatatgatttttacctccgtaacaaacacaagaaataaacagaatggtccttaacagagtttgggggagagagcaagatgggttccttggagaagctgatttgccaagatgcacatcgctattaacagccagagtcataaatgaaatgaaattgaagaattcattcaaatgctcttttccctataacctcttttctcaccaaaaaggagataaatttgaaaacagataaatgtaacaaccagtcaaagaagcaggggaaaagtaagctcctccaaagttgcttgcagtgctggaaatagatctcatttttaggttttctcttcgttccagataccaaataaatgggacagagaataaaatttttgttaaaatatgtgctcatctcctaagtagctcttcagagtctgaccgtaagtaaaaacacacagaattgtgttgactgggggaggtgaatcacaaaaaagttacgaggagtttaagagttaaatattatttgatcgtggctgtcaaatttagtgaacaacatagattggatttggagttggtagtaggtatggttctcataccagaattctcttaaaaaaaaaaaaaaggacaattggaattgccttatttatttttaaaatcaatgcttactagttggtaggattcccaggtcagcagcagggttgattaaataatcttgacaatgagcagctgccatcttgggggattttcattctgtggttttttaaatgtttcgtctttgatgctaccatccagggcttcttattgtgaccttgtagcctattttgttcctgctgttctctaacatggtgcagttcacgcagactggtttaggtacttcacaactcaccattgtctctctgaccccaagcctagtcccttttacatcaccatcttctcagacttcttgcctattcttaaaatatgttttggttaatgattgaattaggacatcagcttaagcaattcctgtaacggtttaacgttgttgaagttcaaggcacataataaaattctccctgatgtgtgtgtaagtataaacaaagtaatgtatcaaagcgttcactttataatgaagtcatttcattgggaaggaaagctgcaaagattattgggggactagtgattaataaaatcctgtaatatttttgaagtgaaaatttgtactgaaattgtacatgatacctattaaatgtttttgtcttttttcaaaaaaaaaaa

SEQ ID NO: 438 - DNA, 448 bp, Homo sapiens
atttttgtgttttttatttattccaacagaagaactttaaaaaaactttcccatgacagcatcccatcacaatcataaggagaaaacccatagtgttaaaatttgtgaggataattctcaaattccttgtccataaacaaatatactagaagacagtagtagtaacttttgctttctaacaaaaatactccacattcggtaacagcaataatgttacaatgccttcgtaaatattccacaatcaattttatttatgcttcatgatctatttttaaaagtaatcacatttttaaacatccaaaaaagtatacggaataccagctagagtatgtttaccatgaaccagagggctttgtatagctcaacttaatctatatatatatcaaccctatagaattggctttattagcatctttatcttacagatgagaaaactaagccacagaat

SEQ ID NO: 439 - DNA, 2112 bp, Homo sapiens
cggctttcaaagccaatttgaataaacaactcttccctctcaaatgggcaagagtaactcttcagcaccatggagaggtccgggcagcgtgttacaacgtgggactgtgaccagggcaagcactctgacagtgattaccgagaggatgggatggatctaggcagtgacgccggcagcagcagcagcagcagccgcgccagttcacagtccaactccaccaaagtgaccccttgctccgagtgcaaatcttcatcgtcgccggggggcagcctggacttggtgtctgccctggaggactatgaggagcccttcccggtctaccagaagaaggtgattgatgagtgggcgccggaggaggacggggaggaggaggaagaggaggacgagcgcgaccagcgagggtaccgggatgaccgctctccggcccgggaaccgggggacgtaagcgccaggacccgcagcggcggcggcgggggcaggagcgccaccaccgccatgccgcccccggtgcccaacggcaacctccaccagcacgacccccaggacctcaggcacaatggcaacgtggtggtggctggccggccgagctgttcccggggcccccgccgggcgatccaaaagccccagccggctgggggccggcgcagtggccgcggcccggcggctggggggctctgccttcagcccccagacggcgggacgtgcgtccccgaagagcccccggtgccacctatggattgggaggcgctggagaagcatctggccgggctgcagttccgggagcaggaggtacggaaccagggccaggcgaggaccaactccacctccgcacagaaaaatgagagagagtctatcagacagaagttggcacttggaagcttctttgatgatggcccaggaatttataccagctgtagcaaaagtgggaagccaagcctttcctcccgactgcagagtgggatgaacttgcagatatgctttgtcaacgacagtggcagtgataaggacagtgatgctgatgacagtaagactgaaaccagcttggacacccccttgtctcccatgagcaaacagagttcttcctattctgatagagacactactgaagaggagtctgaatccttggatgacatggacttccttacaaggcaaaagaaattgcaagctgaagccaaaatggcccttgccatggccaaaccaatggccaaaatgcaagtagaagtggagaaacagaacaggaaaaagtctcccgtcgctgatcttctgccacacatgcctcatataagtgaatgcttgatgaaaagaagtttaaaacccaccgacctgagagacatgactattgggcagctacaagtgatagtcaatgatctccattcccagatagaaagcttgaatgaagagttggtccagctgcttctcatccgagatgagctgcacacagagcaggatgccatgctggtggacattgaagacttgaccagacatgctgaaagtcagcagaagcacatggcagagaaaatgcctgcaaagtgaaaagaagccattcaaccagagaacaagctagaatttattttgcttctgtggttgtaaaaatgctgttgctaaaggtggcgcagaaacaaatatcagtgttagtcattgataatgtctgaagcttaatgtccagtgattggcctttgcttcttaatttattttaattttttacttgtgccacttaatatcaggcattttaataaaatattgttacaaaaaatgtacagtactgacaccaccacaaatcatggttaataaaagagagtagttttaactttatttttatttgtttagagattttaagttggaacagtattttcccattgactacttttcattcttcactgtagttttaaagaagaactgtaaatgacggtgctatacaagtcaaaaaatacatgcctgcctcgtagtgaagttgtagctctccgtaatatgtatattttactcagttttcaacattttgtgaatgttgactacctgaagttcctttttagatgtgctattaacattctgttggattcagagggttccttgaaagttttatgtataaatatgtaaaataaaaattaaaacccg

SEQ ID NO: 440 - protein, 487 aa, Homo sapiens
MERSGQRVTTWDCDQGKHSDSDYREDGMDLGSDAGSSSSSSRASSQSNSTKVTPCSECKSSSSPGGSLDLVSALEDYEEPFPVYQKKVIDEWAPEEDGEEEEEEDERDQRGYRDDRSPAREPGDVSARTRSGGGGGRSATTAMPPPVPNGNLHQHDPQDLRHNGNVVVAGRPSCSRGPRRAIQKPQPAGGRRSGRGPAAGGLCLQPPDGGTCVPEEPPVPPMDWEALEKHLAGLQFREQEVRNQGQARTNSTSAQKNERESIRQKLALGSFFDDGPGIYTSCSKSGKPSLSSRLQSGMNLQICFVNDSGSDKDSDADDSKTETSLDTPLSPMSKQSSSYSDRDTTEEESESLDDMDFLTRQKKLQAEAKMALAMAKPMAKMQVEVEKQNRKKSPVADLLPHMPHISECLMKRSLKPTDLRDMTIGQLQVIVNDLHSQIESLNEELVQLLLIRDELHTEQDAMLVDIEDLTRHAESQQKHMAEKMPAK

SEQ ID NO: 441 - DNA, 294 bp, Homo sapiens
  misc_feature (55)..(55): n is a, c, g, or t
  misc_feature (122)..(122): n is a, c, g, or t
  misc_feature (187)..(187): n is a, c, g, or t
agagtgggtggctgaagccatactattttatagaattaatggaaagcagaaaagncatcacaaaccaagaagaactttggaaaatgaagcctaggagaaatttagaagaagacgattatttncataaggacacgggagagaccagcatgctaaaaagacctatgcttttgcatttgcaccaaacagnccatgctgatgaatttgactgcccttcagaacttcagcacacacaggaactctttccacagtggcacttgccaattaaaatagctgctattatagcatctctgactt

SEQ ID NO: 442 - DNA, 2565 bp, Homo sapiens
tcgcgatgctgctgcgcctgttgctggcctgggcggccgcagggcccacactgggccaggacccctgggctgctgagccccgtgccgcctgcggccccagcagctgctacgctctcttcccacggcgccgcaccttcctggaggcctggcgggcctgccgcgagctggggggcgacctggccactcctcggacccccgaggaggcccagcgtgtggacagcctggtgggtgcgggcccagccagccggctgctgtggatcgggctgcagcggcaggcccggcaatgccagctgcagcgcccactgcgcggcttcacgtggaccacaggggaccaggacacggctttcaccaactgggcccagccagcctctggaggcccctgcccggcccagcgctgtgtggccctggaggcaagtggcgagcaccgctggctggagggctcgtgcacgctggctgtcgacggctacctgtgccagtttggcttcgagggcgcctgcccggcgctgcaagatgaggcgggccaggccggcccagccgtgtataccacgcccttccacctggtctccacagagtttgagtggctgcccttcggctctgtggccgctgtgcagtgccaggctggcaggggagcctctctgctctgcgtgaagcagcctgagggaggtgtgggctggtcacgggctgggcccctgtgcctggggactggctgcagccctgacaacgggggctgcgaacacgaatgtgtggaggaggtggatggtcacgtgtcctgccgctgcactgagggcttccggctggcagcagacgggcgcagttgcgaggacccctgtgcccaggctccgtgcgagcagcagtgtgagcccggtgggccacaaggctacagctgccactgtcgcctgggtttccggccagcggaggatgatccgcaccgctgtgtggacacagatgagtgccagattgccggtgtgtgccagcagatgtgtgtcaactacgttggtggcttcgagtgttattgtagcgagggacatgagctggaggctgatggcatcagctgcagccctgcaggggccatgggtgcccaggcttcccaggacctcggagatgagttgctggatgacggggaggatgaggaagatgaagacgaggcctggaaggccttcaacggtggctggacggagatgcctgggatcctgtggatggagcctacgcagccgcctgactttgccctggcctatagaccgagcttcccagaggacagagagccacagataccctacccggagcccacctggccacccccgctcagtgcccccagggtcccctaccactcctcagtgctctccgtcacccggcctgtggtggtctctgccacgcatcccacactgccttctgcccaccagcctcctgtgatccctgccacacacccagctttgtcccgtgaccaccagatccccgtgatcgcagccaactatccagatctgccttctgcctaccaacccggtattctctctgtctctcattcagcacagcctcctgcccaccagccccctatgatctcaaccaaatatccggagctcttccctgcccaccagtcccccatgtttccagacacccgggtcgctggcacccagaccaccactcatttgcctggaatcccacctaaccatgcccctctggtcaccaccctcggtgcccagctaccccctcaagccccagatgcccttgtcctcagaacccaggccacccagcttcccattatcccaactgcccagccctctctgaccaccacctccaggtcccctgtgtctcctgcccatcaaatctctgtgcctgctgccacccagcccgcagccctccccaccctcctgccctctcagagccccactaaccagacctcacccatcagccctacacatccccattccaaagccccccaaatcccaagggaagatggccccagtcccaagttggccctgtggctgccctcaccagctcccacagcagccccaacagccctgggggaggctggtcttgccgagcacagccagagggatgaccggtggctgctggtggcactcctggtgccaacgtgtgtctttttggtggtcctgcttgcactgggcatcgtgtactgcacccgctgtggcccccatgcacccaacaagcgcatcactgactgctatcgctgggtcatccatgctgggagcaagagcccaacagaacccatgccccccaggggcagcctcacaggggtgcagacctgcagaaccagcgtgtgatggggtgcagacccccctcatggagtatggggcgctggacacatggccggggctgcaccagggacccatgggggctgcccagctggacagatggcttcctgctccccaggcccagccagggtcctctctcaaccactagacttggctctcaggaactctgcttcctggcccagcgctcgtgaccaaggatacaccaaagcccttaagacctcagggggcgggtgctggggtcttctccaataaatggggtgtcaaccttaaaaaaaaaaaaaaaaaaaaaaaaaaa

SEQ ID NO: 443 - protein, 757 aa, Homo sapiens
MLLRLLLAWAAAGPTLGQDPWAAEPRAACGPSSCYALFPRRRTFLEAWRACRELGGDLATPRTPEEAQRVDSLVGAGPASRLLWIGLQRQARQCQLQRPLRGFTWTTGDQDTAFTNWAQPASGGPCPAQRCVALEASGEHRWLEGSCTLAVDGYLCQFGFEGACPALQDEAGQAGPAVYTTPFHLVSTEFEWLPFGSVAAVQCQAGRGASLLCVKQPEGGVGWSRAGPLCLGTGCSPDNGGCEHECVEEVDGHVSCRCTEGFRLAADGRSCEDPCAQAPCEQQCEPGGPQGYSCHCRLGFRPAEDDPHRCVDTDECQIAGVCQQMCVNYVGGFECYCSEGHELEADGISCSPAGAMGAQASQDLGDELLDDGEDEEDEDEAWKAFNGGWTEMPGILWMEPTQPPDFALAYRPSFPEDREPQIPYPEPTWPPPLSAPRVPYHSSVLSVTRPVVVSATHPTLPSAHQPPVIPATHPALSRDHQIPVIAANYPDLPSAYQPGILSVSHSAQPPAHQPPMISTKYPELFPAHQSPMFPDTRVAGTQTTTHLPGIPPNHAPLVTTLGAQLPPQAPDALVLRTQATQLPIIPTAQPSLTTTSRSPVSPAHQISVPAATQPAALPTLLPSQSPTNQTSPISPTHPHSKAPQIPREDGPSPKLALWLPSPAPTAAPTALGEAGLAEHSQRDDRWLLVALLVPTCVFLVVLLALGIVYCTRCGPHAPNKRITDCYRWVIHAGSKSPTEPMPPRGSLTGVQTCRTSV

SEQ ID NO: 444 - DNA, 327 bp, Homo sapiens
  misc_feature (64)..(64): n is a, c, g, or t
  misc_feature (223)..(223): n is a, c, g, or t
  misc_feature (245)..(245): n is a, c, g, or t
  misc_feature (273)..(273): n is a, c, g, or t
gcggctataaggggcggaggctgggcggcgttgctctgcgctctgggctgacggcgcttttttntccggtgagttttgtggcgggaagcttctgcgctggtgcttagtaaccgactttcctccggactcctgcacgacctgctcctacagccggcgatccactcccggctgttcccccggaggtccagaggcctttaagaaggagaaggcagctctgtttctntgcagaggagtagggtcctttnagccatgaagcatgttttgaacctctanctgttaggtgtggtactgaccctactctccatcttcgttagagtgatggagtcc

SEQ ID NO: 445 - DNA, 2804 bp, Homo sapiens
tcgcagagccgccgatgcgtgtccagtgacccggacagcaaggcccgcgcgcggcgggggcggcggcagacgcctggtcaccgtgaccccgattttggatttaccgcttgggggctggggggatcctggatttaactggcgactgttttgggggacgccggacgccatgttgtggaaaataaccgataatgtcaagtacgaagaggactgcgaggatcgccacgacgggagcagcaatgggaatccgcgggtcccccacctctcctccgccgggcagcacctctacagccccgcgccacccctctcccacactggagtcgccgaatatcagccgccaccctactttccccctccctaccagcagctggcctactcccagtcggccgacccctactcgcatctgggggaagcgtacgccgccgccatcaaccccctgcaccagccggcgcccacaggcagccagcagcaggcctggcccggccgccagagccaggagggagcggggctgccctcgcaccacgggcgcccggccggcctactgccccacctctccgggctggaggcgggcgcggtgagcgcccgcagggatgcctaccgccgctccgacctgctgctgccccacgcacacgccctggatgccgcgggcctggccgagaacctggggctccacgacatgcctcaccagatggacgaggtgcagaatgtcgacgaccagcacctgttgctgcacgatcagacagtcattcgcaaaggtcccatttccatgaccaagaaccctctgaacctcccctgtcagaaggagctggtgggggccgtaatgaaccccactgaggtcttctgctcagtccctggaagattgtcgctcctcagctctacgtctaaatacaaagtgacagtggctgaagtacagaggcgactgtccccacctgaatgcttaaatgcctcgttactgggaggtgttctcagaagagccaaatcgaaaaatggaggccggtccttgcgggagaagttggacaagatcgggttgaatcttccggccgggaggcggaaagccgctcatgtgactctcctgacatccttagtagaaggtgaagctgttcatttggctagggactttgcctatgtctgtgaagccgaatttcctagtaaaccagtggcagaatatttaaccagacctcatcttggaggacgaaatgagatggcagctaggaagaacatgctattggcggcccagcaactgtgtaaagaattcacagaacttctcagccaagaccggacaccccatgggaccagcaggctcgccccagtcttggagacgaacatacagaactgcttgtctcatttcagcctgattacccacgggtttggcagccaggccatctgtgccgcggtgtctgccctgcagaactacatcaaagaagccctgattgtcatagacaaatcctacatgaaccctggagaccagagtccagctgattctaacaaaaccctggagaaaatggagaaacacaggaaataaaattggaacgaagaaaggttaggagagtagggaaggaacaggactgcaaaaatccttctccaccgcacagactgggaacccctcctggcctgggggaagagtttgttacctaccttactatttaaagagccttcactggttctgcatcacccgcccctggacttcttagttgtttctctagcgctgagctatctcctaactttggacctattatcagaaggtgacaagtactggctctttattcattaagctttttttttttgaaccccattctttccttctctgaaagtggtgctataagttttagaatcttttaaatacattccctgggccaacagacccacacacttagccattgaaatgtcaaattgatgtgccctagatcaacagatcaacaataccttttttttcagtgttaaggtaatggttggtttttgtgtccgctaaatatttaccttgaaaaaaagaaaagtgtgtatctagcttcttcagagatcaagtcctctggtaggaggcaaaggttctatctgcttagcaactagttaataagtggtatctgacacactctaaaccccgtgttcaaacgggggccttctggttttaggaaacttgtagaaacgaagcctgctgattgatttttttctcctttttttttttttttttttttaactttgaaagttaactcttcaaatgggagactctttgaaatgacatgttcccttaaggtactgaagctttatttgcatatttatttcagatgtttcgagtaaacttgaaaagggtaggcacgaagcaatttgttgctgcttgtcacccccaagtccccgtggaggttctgtattttaagaaacagtgcgttgagtgtacagattttatttatgcgtaatttaatggggtctgtaaatactggtgcacttcttacgacttttttgagacatgggatccaattttaatattaacttttaatggtgatggggtaatctataacacatcataaggttttattcatatatatacagggtattaagaattaagaggatgctgggctctgttcttggcttggaagattctatttaattgaaactctctgttcagaaagcaataactttgtctcgttcctgttgggctgaaccctaaggtgagtgtgcagtacagtgtgtgtgggtgaaatggagatttggaattgaactctctgcctgtaaatgttccccaaataattgttgtgtgtatgatacgtgtataataaaagtattcttgttagaattgaaaaaaaaaaaaaaaaaaa

SEQ ID NO: 446 - protein, 450 aa, Homo sapiens
MLWKITDNVKYEEDCEDRHDGSSNGNPRVPHLSSAGQHLYSPAPPLSHTGVAEYQPPPYFPPPYQQLAYSQSADPYSHLGEAYAAAINPLHQPAPTGSQQQAWPGRQSQEGAGLPSHHGRPAGLLPHLSGLEAGAVSARRDAYRRSDLLLPHAHALDAAGLAENLGLHDMPHQMDEVQNVDDQHLLLHDQTVIRKGPISMTKNPLNLPCQKELVGAVMNPTEVFCSVPGRLSLLSSTSKYKVTVAEVQRRLSPPECLNASLLGGVLRRAKSKNGGRSLREKLDKIGLNLPAGRRKAAHVTLLTSLVEGEAVHLARDFAYVCEAEFPSKPVAEYLTRPHLGGRNEMAARKNMLLAAQQLCKEFTELLSQDRTPHGTSRLAPVLETNIQNCLSHFSLITHGFGSQAICAAVSALQNYIKEALIVIDKSYMNPGDQSPADSNKTLEKMEKHRK

SEQ ID NO: 447 - DNA, 551 bp, Homo sapiens
tcctagaatttgagaacccgcatgttaccagcaacaacaaaggcacgggctgtgaattcgagctatgggactgtggtggcgatgctaagtttgagtcctgctggccggccctgatgaaggatgctcatggagtggtgatcgtcttcaatgctgacatcccaagccaccggaaggaaatggagatgtggtattcctgctttgtccaacagccgtccttacaggacacacagtgtatgctaattgcacaccacaaaccaggctctggagatgataaaggaagcctgtctttgtcgccacccttgaacaagctgaagctggtgcactcaaacctggaagatgaccctgaggagatccggatggaattcataaagtatttaaaaagcataatcaactccatgtctgagagcagagacagggaggagatgtcaattatgacctagccagccttcacctgggactgccacatccccagtgaaatcagcatgtttctcggtgcagatctgaaatcacatccagctcctgatgttttcttctccctctgactgcagagg

SEQ ID NO: 448 - DNA, 601 bp, Homo sapiens
ttgatggttatgcaacttcttatttattaatatataataacaacaattatacagctcatatctgcaactgttaggtctttgttatgtcttggtcactttgtctggactggccgtgaccttcagctccagggtctgggctaggaagacgttccagtgaccttcgtgggggccagcgagcagtcggaagtgctgtgcctctttctggaagtcttgcttcctgactttcttgatctgagtcaagtggaagattctggctgtgtggccttgggccaggtacttcacctctctgagcctcagtttcctcatcttttaccagcttccagaggtagatctccaccaagtccgaggcctcgtgttccagggcaaagcgacgcaggttgtctgggcttggggataccgatgtgtggacgaggacccggcccggtgccttgggacacctggtagaactgatctcactgtggccagggtctgctttgtcctctgggcaaatcttgcagcacttcccagccactatctcagggtgacggcaggggtacttcgtgggacaggtcacacgcttgcagtcctggcggccatcctcacaggtgcataggatgcatgg

SEQ ID NO: 449 - DNA, 605 bp, Homo sapiens
  misc_feature (306)..(307): n is a, c, g, or t
ggcagtggtgatgaagggggtgcaccacaggcctcatgaagcagttcccacatgggcgtgtggctggggcgtggcaccacagagcacatggctgtgtctaggcgcacgactttagcagtatctgtttacatgcgcaaggatcaagccgactacctgtgctgtctactgggacagcagtctccgagctactccgtacctccctctgccaggtcgtggagttaggccccagtccctacttgtcactggttcccactgtgctcctaactgtgcagcacctgggagctctggcctggggctggaggctgnngtaggagctgcagttggaggccgttctgtgcccagcagcggtgaggggctcccatgggccctgtgtctgcagggagccagggctgcggcacatgtgctgtgaaactggcacccacctggcgtgctgctgccgccacttgcttcctgcagcacctcctaccctgctccgtgtcctccctctccccgcgcctggctcaggagtgctggaaaagctcacgcctcggcctgggagcctggcctcttgatatacctcgagcttcccctgtgctccccagccccaggaccactggccccttggc

SEQ ID NO: 450 - DNA, 539 bp, Homo sapiens
tttgtaggcaatgatccctttaattagatcattgagcaataaaggatatgaaccattagtataaatattcaattcagtctttccggattgtgttgttagataagaatacatccaaaaagggccacagatcgagggagaaaccaaggaggggtgaggtcatggttgagtgtaaattggttctgtcatgtggaggccggagtgagggactgtggtgggacatcatctggtgccagccccatcctgtacctcagataggtctccgtgaaaaggagggacatcagtgcaagcagtggggctaaagaccagcacagcaacagagactagaaccttggatgcaagtattttgggcaaagaggaataattagtaatctttggtataatttaaggcacatcaaaaaaatcccctattctcaaatatctgacctacaccttgaaattccacccttggacattctttggatttaagcctttaactaacaaatggccttatcccatcggctcaaatatggcaattccatctgggaggggctgctcattat

SEQ ID NO: 451 - DNA, 96276 bp, Homo sapiens
gatctgaaaaaggtccaagataaaaaaggtccatagctttccaaagctatggaaacctcgtcatcaatgccttgaggtcccccgaggaggtagcaccactcagtaggagtaccacgtgctccattttctgaggctctcctaatttcaaatattctgtccactgtaagtccatccatgcttctcagaccccatgtccctgtggaatgaaagtgcccatggggaccataaggtggggagcttccctcctgctcccaggaagcgcccaaagaccagtgtccccagcagatacaattagccaatgcattctgccacctggaccccaccccatactgcagcattcgtttaaaccatacctttcactcgcctgtctttggaagagggtgtaagtcactcagccctccccccaccagcacactacagatgctcgcctgctgggggctctgccagcataacttccgtgaactctcggcaaccttggacgcagccttcatcctgtcctccttttaagcttgaggaaatttaaggggtcagattatttactcaaggacacactgcttagagcagcagagatgataacattccaagtaggcatttcagtcaaaattctgcttttaaatactaagttggccaagaggccagcgcggtagctcacgcctgtaatcgcagcactttgggaggctgaggcgggtggatcacaaggtcaggagttcgagaccagcctggccagtatgttgaaaccccatctctactaaaaatacaaaaattagccaggtgtggtggcgggcgcctgtagtctcagctacttgggagactgaggcaggagaatcccttgaacccaggaggcagaggttgcagtgagccgagattgtgccactgtactccagcctgggagatggagcgagactgtgtctcaaaataaaataaataaaataaaataaaataaaataaaataaaataaaataaaataaataaaataaaataaaataaatattggctgagaggtgtggttcacacctgtaatcccagcactttgggaggccaaggtgggaggattacttgagcccaggagtttgagaccagcttgggcaacacagcaagactccatctctatttttaaaaatagacaaatattaaattatccattgtgtttatttcctttagatactaccatttactaattagaactaaaattataaagttattcacaacaaaatactcatttcacttaactcagaggatgggggtggatggcttattacctttttttctacatactgttatttgaggtataaggagaaaaagggaattaaaagatagtgaacgttgctttttggtaaatagaacatcccgattttgactaaggtggtgtcttgaaccaacagggctaggatagacaattgaataaatgctgttgagctcatttgctgtccatttgcaatgaaaaatgaagggcagagttctgtttcaaacctccacctcttcatacccccacctttatacccccaccttcgtatccccaccttccatacccccaccttccttacccccaccttccataccccactttcatacccccaccttcatacccccactttccatacccctaccttcattccccaccttttcatacccccaccttcataccctacctctttatacccccaccttcatacccacaccttcataccccaccttcatacccccaactttcatacccccaccttccataccccaccttcaaacccccacttttgtacccccaccttcatatccccacctttcataccccacctccatactccaccttcatacccccaccttcataccgcacctcttcataccccacctcttcatacccccaccttcataccctcaccttcgtaccccacctcttcataccccacctcttcataaccctactttcatacccccaccttcataccctcaccttcataccctcaccttcatacccccaccttcataccccaccttcatacccccaccttcacactcccaccttcgttcccgacctcttcataccccctcttcataccccaccttcatacccccaccttcattccccaccccttcataccccaccccttcataatccacctcttcataccccccaccttcgtacccccaccttccataccccaccttccttacccccactttcatacccccacctcttcgtttcatatccccacctcttttttttttttttttttttttttttttttttttttttttgagacggagttttgctcttgttgcccaggctgtagtgcagtggtgcaatctcggctcacagcaacctctgcctcctgggttaaagagatgctcctgcctcagccttccaagtagctgggattacaggcatatgccaccatgcccagctaattttgtatttttagtagagatagggtttctccaagttggtcaggctggtctcaaactcccgacctcaggtgatccacccgcctcggcctcccaaagtgctgggattacaggcgtgagccactgcgcccggcctcccccacctctttgtgctcctcctctcaccactcctcagcctttgggtaaatttgtggaaaaaaaaaaaaaaaaagctgtcctctgggcacattccttagcctgcagaaggtgcctcaggcagacagagccaacccagggtatagtgcttaacaggctgggggaacccagctctggccatgttgtagttgttccttgctctctagtcctgactttgcaccatgcacaaaactaaattccagatgaatgaaaggactacaaataaataaatacatcatatataaacaggcaaagctgtatatactgtataagtcttagcagaaaataaaggagactttattacttcaagatgaggaacttctttctaggcaagggccaataagcaatggccatattgaaaacttggataaatttgattctatcatcattaaaagcttaagaaaatttaaaaggcagaaaaacaatgaaagagatcatatgtgaaacatatcagacaatggattcatatacacaaccaacttatgcaacttaattttaaaaaatcaagaaaccacaaaataggcaacagatgaatgaaaaggcaattccttgcaagaggaaatagaaataaacgataaaaatataatcagggcaaagcaaatgaaaacaaaaattatttctgctcatcagattggtctgcttaaatgtttgataatatcaatcattgacaagcagcgtggacactttcacagatggcaggggcagtgcagaagggcacagccacccggggagcaatgtggcaccagctcagaacctgctacatgcataggctccagcattttctctgaggtttcacacagtgcacaagggaacacacacacaggtgaccatcacagccctgcctgtgatagcaaaactctggaaacaactaagcctctatcaaaatagaatggatatgtggattgtggtatatccctatggtggaaaaccgttcccacttacaacaaatgaaccagggcttcgtgtatcagtgtggataaacctcattacaatttgtcgagtgaaattagtaagccagtacaattcctttggttggagaaaacacagatgataccattcaaggatgatacacacaaaactgataacagtggttacatctgagtaggtgaaggagattatgggtgatggtcaagggagattacttttaagtacaatcatttattttctttaattaaaatatattcatttgtgacatttgtaattacaattaaatatcaaaaatataaatgcaaacacccttgggaggagtaatacacaaagttaaaagaaaagaagcaatgttctccaaaggtgtgcttgcatcattgtccaggtgcccctctgcaagtgaaggggaaaagcctccattacgtttttgttttccaggtgacagttcctgggggcaaaggtcatttgaaagtttggaggaagctcattattttccagactagtttagaaaaaccccaacatgagaggtacccaccacaccaggaggctcctcagccaagcagaagcacatggtcgagggaactgtttgggtaatgcggtttttttaggatctggaggtagatctgataccgcagagctgattcccggattataaatgcttaccacacctcaaggccaagttgatgcacttggggaatggaaattccatagctgggagccaaggacttgacttttcccacaccctaagtttcaagtcttcaacatatcagcaacacatcccttttcaaaccactgataacattcctgaatgagacttggaatttgaagagcgctgtatcaggacttgtgctataagcactttcttatttgacttttacttgaccttcaagagaatttttctccttttatctaaccctaaaagaaagaaaacaagacttggggttcctcccttttccctcctccctgcagcttcctatgcatgcaaagaagcatacaacaacttttctctctattaggggaaattcagcgcctagtgggcaaatctctaggttagaggcttctgagcagacaggcaggaggagattggactccgcggacattgtttctttgtagtcccaggtctctgctgctggtgattaaatggcctctttccaggaggggaggtacatgaatccattttaagtgtcttttagtatcagctctctggttaataacaattgccattaatataaagagataatttgttacttatttattttaagagatggggtctcactctgttacctaggctggagtgcagtggcaccgtcatggctcactgcagccttgaactcctgggctcaagtgagccaccttcctcagcctcctgagtagctgggactacaaggcacatgccaccatgcctgggtaattttttttttctttttggagatggagtctcactctgttgcccaggctagagtgcagtggcgtgatcttggctcactgcaacctctgtctcccaggttcaagtaattctcttgcctcagcctcctgagtagctgggactacaggtgcatgccgccatgcccaactaattttttgtattttagtagagacggggttccactgtgttgcccaggctggtctgaaactcctgagttcaggcaatctgcccaccttggcctccaaaagtgctaagattacaagcgtgagccaccacgcccagccaattttttacttttttgtagagccaaggtctctctatgttgcttaggctggtctcaaactcctgggctcaagtgatcctcctgcctcagactcccacagcactgggattataggggtaggctactgctcccggccaagagatcatttaaataggaagaggattagagagtatttaggtgcctattgaagtgttttgttttgtttttgagatggagtctcactctgtagcccaggctggagtgcagtggtatgacctcggctcactgcaacctccaccacctgggttcaagtgattctcctgcctccgccttcggagtagctgggactataggtgcacaccaccatgcccggctaatttttgtatttttagtagagacagggtttcaccatgttggccaggctggtttcgaactcctgacttcaggtcatctgcccacctcagcctcccaaaatgttgggattacaggcgtgagccactgtgcccgacctgttgcagtgttttaatctcattgtcctttttattcctccaatgaccttcccttgacatcatcagccctagctttggggatttaaggatgagggcacccaaatgggtcgcccaaggcgacccagccaaccggggcccgagacaggatttgaagacagatttttctgagccaaaagctggtatgcctacccctactcccagctgtcaggtcaccagtcagagcttcaggccacaccgcctcgaaattgcacaagttgctgcctgaagaatggccccttggatgaggtccccgcctactgagaaattatgcagaatgattacaaaatggtacaaattactgtagactcctgcaccagactggaactcagcaggcccagccttgcccaggcccagccctgggtgtgacctcaaagggctgggaaagaacttgggccttctccagttattctcttgcccttggccaggatgccagctcttatgcaggagcactcaggtgaacacctcaggcttctcaaggtgtgttatgcacgaatgcaggacgagggagtggacccaacccctgacctgccttcctctccctcttgtggtcaccagcaccccctcttcttccctggaagtccccagccaggccagcagcccactctctcccagcttctaaaggcaacacatcacccctctgtcctgctgtacatgcctgcagggaaaaacaaacacaggcaatgccccggcaagacctccgttgaggtctgctgtgctgtataaggataggtggctatcccttgggttggggtctttgtcactgcttgtgggattttctgggaatgatgcagctgtgctgggtgtttgatgtaagaaccatggtctcaccaactttgtgccttgtcagccttgtcctatctgaccctctggctgcactgaatcacaggtggctctgccaccactttcccaggtgtccacagacgagcaggggtgtagtgagcagcactcactcaccagctttgcagatgtttagacagcccctccccatgcttgcaggaattctgcacaggtacagggatgtgttagaggctgggattgtgtaagtgggtctggagaaacttcagttagtagcaccagttttttgtgtttttgtttttgggttttgtttgtttgtttgtttgtttgttttggtctggtttgagacagagtctcgctctgtcacccaggctggagtgcagtggctcaatctgggctcactgcaacctctgcctcccgggttcaagcgattctcctccctcagcctcccaagtagctggaattataggcacatgccaccatacccagcgaatttttgcatttttagtagagatgggattttatcatgttggcgaggctggtttcaaactcctgacctcaagtgaaccgcccacctcagcctccggaagtgctgggattacaggcatgagccaccacactgggcctgtagcaccaactgctattggctttgtcatgggaaagctgacattaaaactggcctcctttgttgggtgacaagttatttctgccctcaaagaaggaaattttgaagaagcaagtgtaagggatgagattgaaagtctgtgagaattagaaacaaacaaataaatcaacacaaacttgtccaaaaacaacttcaaaaaaacacccaaaatcccttcagtgggacaaaatccaaccgtcagaggggaggaagtgttttgtgatgctaactgctgctggcggagggcccagtgggtatatacacatgattctgagaggcaggactggccctggaacactaaactctggtccatttgtgagattaaatccctctgcactctgggacaagtgagtcaggactgaatggaaggggagggaaaagttgctgggggctggggctgggggggatgcgagggaccaaaaaaaagtccccacatccagcagggaagggtccacagcgatccagccaagtgcaacctctgtgcttgtccaccctcgtgccttggggtcatggtgccttcctctgcactagagataggtggcatggcaatggtgccttcctctgcactagagataggtggcatggcatgattggtgacttggcatgggagtgccgctaagtgacagccacagacaccgtcagcttcttgtgtgtggccagatgtagagaaggaattgaggaggaaacttggaggtctggagatccagccaacagcatcggcaagagcggtacccagacaaaaacagcctggctgaagggaatcaactgatgcccattctgatgagaatcaaggccatttggggtttttatgttcaaatcagtatgatggttgtgaaggtaaccaaagtgtggagagggaaatgtacccagtgacggggcttcctgctggggtgggagtcctctctttgaggtttgccagaggctgtggccggccctccctcacaaggccttctgcttctgataggtgtgtggctctcctgtttggggccacagccacggtccagaatgaagcagggcctagtcccagggtggtggggcttcagcagacgtacccaaactcccctcaaccccttccttgcttctacctttttagtcccttcactccttccattttcatacacaccaccctttctttttcttgttttcctaaaattttgtttacaaagtactttaagcatacagaaaaccacacaccatattaaaatacccatcactcagcactgtcaaatgtcatcatttcgccatttcattttaagaaataaaatctttccaggcacggtggtgcctatctgcaatcccagagctttgggagaccaaggtgggaggattgcttgaggccaggagttcaagaccagcctgcacaacatggtgagaaagtgtctctacaaaataaatacataaataaaatctcacacgtgaccgagcccattgacctgtgaacactttcatccatttctcctgtctagaggtaaccactatcctggattaggattataaccccatacatattaggatagcctttgtgtctatgtgtgtatctataaacatacagtacagttttgcatgcatttataattttaataatataacatgtaacagtattttatttttaaaaaaactttttatagagacgatctcactatgttgtccaggctggtctccaactcctggcctcaagcagttctcccaccttggcctcccaaaatgctgagattacaggcatgagctaccacatctggcctaataatatattttaaaacctaacatagacgaaatagtattctttcaacatgttatcaatataaacattatatggatacattttatttgttaatttgttatgtcatagttgtacatattttggggtgtacaggtgatattttaatatgcaatatgtaatgagcaaatcagggtaactgggatatccatccatgtatctttttccttgtgttgggaacgtttgcatggttttaaacttcacatgctgtatataatgcttctcgatttgccttttttttttttttttctgctttcaaaaaaagccttttgggcttttatgtttatacatgtgttcatacatacagttctggttcattaatttttaactgctatgtagcattttatactcaattaatgtatccattctcctcttaatgaacccttaggtgttctcacaaataatggtgcaacaaatattcttgcaaaggtatctttgggcccacgtgcaagtttagtctctaaagtacacatataggtttgtgtatctttaaccctacaagatgttgccaaattgctttccaaagtagctctgggggtaatattcctccagcagtgtaagaggtgccatggtttgaatgtcacctctaaaactcatgttgaaatttaattgccattgtaacggtcttaaaaggtgagacctttaacagatcattaggtcatgagggctctgccctcacaaatgaattaatgccgttatcttggtagcgggttagttttcaaagacgtggtttcctgacaaaaagaatgagcttggccgatttcctctccctgtctccactcacttctgccttccgccacgggatgactcttaccagatgccagagtcatgctctcggactttccagcttccagaaccatgagccaaataaacttctgttcttaataaattagccagtctgtagtattctgttatagcaacaggaaacagagaaagacaagggggatcctgttttcccacatcctagagtatttggcattgtcagactttttaaaaaaactttgccacagagatatgtataaaataggatctcctaatcatttcctctctcgaggccccagtgcttctggaagctccccctctggtccttactgcagtcacaggcaccgaggggatggatcaagcatgaagggcttggctggcttcccttcttctgacctctaagtcctgggagtgtccagagctatctgctgggcccccttctccatcgacctctctccttagataatctctccctgccacagtgctttagaatgccagccacacatgccagtgacttccaaacagaaaaatctccatccagagtgtcagaagctacttcacagatttatttgatggctgataaacaactgaaataaatttaatctgcccgaagttcaatgcagtttccccctcaagtctaattcttccccattgctcccatctcagtcaagggcaatgccatttattaattgctcaaaccaaacacttcggagccatccttgattattctctttctaccacccccacattcaatccatcaaattatatcaatttctatgtcaaattgttcctaaattcccccgttctttctagttccaccactaccacctcggtccaagctgcatcatctcttgcctagaccactgtagttgctcctaactggtcttcctgtttctcatcttgccctttccaaccacctcagtgccaaggtgatcggtttagaccataaaacagatgtaaaatggctttctcctacttaaggccttccaatggttcttatcatggaagactcaaggtggtgaataccatgatctacaaagttggcaagatctgatccctgcctgcctctcctcctgcacaccttcctggcctccagaactttctctccatgtggagggctcttcctttgatcttttcatggcattcttgtcattcaaggctctatcgcttaaaaaagacttgccctgaccaacccgccctgatctgtttggcccctttgttgctcccacagcattaccttcacctgtcttcattctggaactgctcagtgcttggttctggtgtctttctgccccaccagaatctcatctccatgagaactgagatcttctcagctccactccccatttgcagtacctggcatgaagcgggagcccataaaagtttgtcgaaatagtgagtgaatagatggggtcacattttagaacaagctttaagcgcaagtgaagtttccctcccagagtctgggtgggataaaagctacctgagacaagacaacatttctctttagtgagaacagtgctcaaatttcttagcctcaggaccccttgatgctctttaaaattattattgttgttgttatttttttgagatggagcctcactctgtcgcccaggctggagtgcagtggcatgatcttggctcactgcaacctccatctcctgggttcaagtgattctcctacctcagcctctggagtagctgggactacaggcacgcaccaccacgcctggctaatttttttgtatttatgtacagatggggttttaccatgttggccaggctggtcttgaactcctgacctcaagtgatctgcctgcctcggcctcccaaagtgctgggattacaggcaagagccgctatgcctggccaatgctcttaaaaattattgaggatcccaaagaacttatgtttgtatggatcatatctataaatagttgccatcttagaaattaaaatgaaggaatttaataacgcttattttaaaacaataatggacctgttacctgttaatgtaaataacgtttgtatggaaaattactatgttttcaaaaaatagtgagcagagtggcacccttgagaacagccactgtacacttacagtgcctagtacgcgccaggaaagactctgttgaatgagtgaataggagggtgaaagattttagaccagcctgaagggtcagatgcaggtgcatggataggtggggatctgagatggggccgccttttcccctagatggccctggggcccactcccctcctccccactcatccaccccagcctcactcagtcctttctcttccctttccccaacaatcttctctccacagcagtgcaaagaatagaacaagaaatcattttgatgtcgtcagaaatcaatatgtaagctggatatatcttttaaataaactcatttctataacaaaataatcattgtatgaatttcagtccttcaaagggggttcctttggagggtttcccttgccaaatgaatattgaggcccggttttgccaggatgtatttattcccgtctatattcatgttgagaaagctaactgggtgttatattatcttccttattacaatactgaaacctaacaaactgggtgtcatattcttttccttattacaataccgaaacctaagttcttcccctttctaaggagaagctgcctcctccccctttattttttcctctggctagaggaaattcacagagccaagattaaaaaaaaaaaaaaagaaatagaaaaagatggtcatctctgttcctattgaaaagcctgagttccccgggcgctgtgggcatgccacgcctctccacttcctgacgtcatactatttttgtctttgaatagctcattgacacaattgcctcggagatcggagaactgaaacaggagatggtgcggacagatgtcaacctggaaaatggcctggaacccgctgaaacccacaggtgaccagagacacggttaggtgatgggtgcgagaaagggatcgagtgaaccctggcactgccaagggctgacttgcagtcactcctcagaagtctgggagctgggagtgtggtagcagctctagatgaaatcctctgtaggaggtgggagtggcctaggaactagttgtctgcttgtttattttaatcactttgaaggcacttgaactttatactctctcaattcctcctggcaccagaacccggaaacctaaaattgtctgtgccatatccacctactcccaatgatggaaacagtaatgcagcaagatccagcgtgtgcaaagtagaattcagtgtagccgtgtgagtctccagaaggcttacaggggagcagctaaagaggatggactcattttgcattctcaggtcagagaaaaaccccagcagtctccaaaaaaccattaacctgaaaagccgtgcagtgattggaaactggatgtggttgtaaattcgatacaaagggaaggcggcgtgctgtgctgttgaaggcgatacctgtgcacatactgcacaccgtctgaataggaggcaagggactggtctgtacctggagaaagggggtgcaaaggtcggggggtggtgggaagttgaaggtgacttcttccaactttgatgctaacaagataacaatataatggctataaaaagacacagacacttcgtgccttagaggccagatttgttaacagcttcccctttctcccagaaagtggggctgagcctgcctggagcagtgtgaggctgagatttatggagtaggttttgcctgcaagtcatgcaacaggcaggccagccagatggttctggttgtccaggcaagtttcaaaccagcccgactagttccgccatacgctgacgggagagagcaacatcccagggaggcacttgcagctggaaggtggtactttgatacccgatgtctctgggggaacagcactcacccttaattctctgtgccttcctttcctttccttctctacaaaacgatgggggtgaaccagatggtccccctgctccttgcagcacacccagcattctatgattgttcttgacctcagtgtgaaagtcttattttttccccataaactagacaaatgcacaatgattttcaggtagtgactctctgcctcacctccagagtagtttcaaacatcgtggaactttagccagggaatttctctatcctgtgccttgttgagctaaaatttaattgggagtctaggctgataacaacagaaaagagagctttggtagcactgatttctttcatagccaggaaaggcggctctgtgagatcaaccccaagctccacagatgacagacacccagacacagagcggcggaaacctttcccctgcatataagcacaggggattttgggggtgtgagaaggacgttctgaacatgtgaggggccctcaagatcttgttttctgactccggtgggtattagagtgagagctgggtggttgcttaatctttaacatttccttccatcttttccttttcagaggtaagaataactgtaagcagtccacaacagccttttttcccagatgaatgtcactttgaatgctatgttgcttaattcatgaatttatacatttgcaaaggcattttatttggcttttttttaacagaaaagaaagaggaaaaagcaagatgagttgtctttatttaacaatatagatcatgttggccatgtggcaacactgttcatattaaactactgttctaagtcgcttatagcgactaacttacggaatcttcctagcacttccaggagggaaagctctttagggcctgcatttgactgatgtggaaactgtgtgctgtggggaaaaagctacacagttttggcttctgtgctggagtgtcttgctgattttttagaagtagtgagtttggttttaatttctccattttgtccaatggagctgtcaggagggccagttcagttatttctaagatcaaggaaaagcatagctgtggccacaattcagcctggcacagagcagcagccaaaggggagaggagggaagaggaaagcagaccagtaggtagcagagttgctttcagcaaaacccctggagaaagaagtggcgagcaccgcccgggcccctggctctgcacgtctgacggctgcaggaaatgcaccgccgtcagcttcctctgcagcttcgtactctgtgagtgtgagctgggatagggagtcgcctatcccaccacagccaccacgaaatgtctatggttccttagttgatggaataccagattaagcaccaagctagtccctaggttaggaatcactattactctagctgtgttagtgtttggttgctctttcgtgcttaatattgagataaccttgatctttaactttgtcttgtgccatggactccttctctgaataatcttttgaatgcataaaataacatatataggatgtcatgggaaaaacaattacagtgaagtccagtgatcagaatgtttcagtgtgtgtttcagcatgtgcttccatggcataggtgcttctgttttacatgtgacagataggcataaatgacacaatctctgtaacagctgtgacaacggtgaaacctctgtggtttctgttggtgacaaaatcacaggtcgtgatactactactgtggtttgttgcctacaatcaaaatggaaggaagttcattcagaatgaggctatggaaagtgaagatgtcagtttttggcccgatggccagtgcccacctcccgtcctgtctcctgtcagcgtcgtctgccatggtccatctgccctcctttttgggacatttgcttggcttggcttctgggaccccacacctccctgggatcctcttagctgtcctgctgctgcccccagtgccctggctggttcttctttatctccctgaactccagccctggagaacccagagatcacactttgatcccctccttttctttttttgtttgtttggtttttgtttgtttgttttgagacagagtctcactctgttacccaggctggagtgcagtggcacaatcacagctcactgcagccttgacctcctgggctcaagtgatcttcccgcctcagcctcccaagtagttggaagcacgggtgcccaccaccacacccagctaatttttttttttaatttttggtagagattggggtctctctgtgttgcccaggtgtgtctcagacccctaggctcaagggatcctcccacctcagcctcccaaattgctgggattacaagtgtgagccactgcgcctggctgagccactccttttcactcttcacacctttccttttctctctcccactaactttgtacaaggtactttaaaaaatatctgtgcctcagtgttctcctcattaaaatgggaataataacagagttacctcacagtgttgttgggaagattaagtgagttaatagctgtcaaggactcagcacagtgcctgacacgtggtaatagccacactatatgtagttttaaaaggtggtctgtggagtaatttcctaggttatcccacccagtcttgtggctctgataccatctatacattggttattcccaacttatactcccttggccaatcctctctttgagtccagaggttggtaaccaactgcccactcaggaagtgttccttcataggttcattccttcctgggtcttccccgtcccagtcaccatgcctccagcttcttgggccttgtactcatcaatggtgcctctattcctgtcataactgccctcctcccatccatctccaaatccaggcagctctaccttttatttttctttgagacagaatctcgctctgttgcctagagctggagtgcagtggtgacacgatctcagcctcctgcaacctctgcctcccaggttcaagcaattctcgtgcctcagcctcccaacatagctgggattacaggcatgtgccaaaatgcctggctaatttttgtaattttagtagagatggggtttcaccatgttggccagtctgatctcgaattcctggcctcaagtggtccacctgtctcagcctcccaaagtgctgggattacaggcatgagccaccgtgcttggcctctacctttaaatagatccaggatggaaccacttctcaccagcaccactgcagtagcccctgcctggtgcctctgcttctaccagttccactttctccaggctattagccaagcagcatggtgaaccttttagttcacctaagtccaagacacatctctcctttgttcaaagccttttgataattttgcatctaaaaccaaaattattaccatggccttcaagactctataagatgtgacaccccagcacccctctcctctgccatctcttctctagcattctctccccatcactcagctccagtcccactgacttccttgccaatgtggcccctgcctcctggcctttgtacttgcggttccttctgtctggcacatccttcccccaggaagccttcacccttgagccctccttttcttctacctcattacctggctttatgtttcttcatagaacttgtacacacaggacatatattcacttgcttcctgtccattctttcttttttttttttttcttggaaacagacttccactctatcgcctaggctggagtgcaatagtggtgtgatattggctcactgcaacctccacctcataggttcaagcaattcttatgcctccagcctcctgagtagctgggattacaggcacgcgccaccaccaccggctaagtttttgtattttagtggagacatttcatcatgttgcccaggctggtctttaactcctgagttcaggcaatccgcccgccttgacctcccaaagagttaggatcacaagcgtgtgccaccacacctggcctatctgtgcatttcctgcctcccaccactagaaggtaagctctgtgagaccagggactgggtctgtccttcaccctgggattgcagtgccagggacagtatctggcatagagcacgcactcgcaagtatttgttgaatggataaaggaaaggtgccaagccccttagtgattttaaagtattcttgcctcagagacctcttgcaggtggccaccaaccggtgcataaaaaaataaaaagttgaaaatgtgtgacaggcctaaggcttcctccctagcaaagaaatagggcagaggcccttcccccagtctccagttgtgcctccctgaccagttctaccatgagctattttaatctttggccaatagagtaggagctgattaaatctccctccatgcctctgctgatctaccaaatggaagcccgtaagccaggggcgagactgagggcttcttgctcctggttttctgctctctcccagtgtggtttcctgcttcctctcttcccactgcatccctgcaaagactggagagtatgggaacatgaaggcatttcactcccctctccctcccacatgattccacagtccattttcatttggcggaagcaggcctcttttgggtaggctcaccaggcctgaggtaggttccaccctcatcatcacttgaacccatcccctctaggctgagacaagtctctaaagatcactttatcctcaggcggaacagagggatccacagaacaacctccccagctattgtctgggcccaggctgcctctgcaggatccctggcatcctggctagagcaggtcagtgagaactgcagctcatcccttcctccactctcctgtagctgtcactcctgctgccacttcgctggtgtcctctagcccaagtggattgctgtgagatgcctgcggtcccatgtcttcactcctcctgccccaccacagaaccagacatgacacaggaaattcaaaaattccttggccagctcttctcaatgttacaatgtagcagctggtcatcacctttggcctcttctgggaagctctgagcttcccagtggctatgtgacagcattgacattataaccacaggaaacccagaaggctcctcccttgtacaattgttcacttcttcacttgcccagaggtgagaactgaagatgagaagggaagaatggtggccgcagcctggggaaagatgcccagagttccacttccttaagtctcaagagggacagttgtgaccacattagcgactctgtggctttttgaaccagatccaccttcacttggtgctgctttttaaataattttccactgaagtaaaacataactcagcaaaattgcacaaataagtatccagctagatgaaaatccacagagtaaacacatcacacatcgatggctttgctcacaaacctgttactgctacagggcaggccgtgtagcagcaacaggtttatggtgagacattttccggctatgtcactgaggattctctactatgattactttgatcaatttacccccaatcccctagaatatttccatatttcaactcaaccaggagtgtcctgaacatgatttcaatgaattctatgagggttgaccaactcttcgctacactatcaccaatgtagcaacaactaaactcaaattaaagaaaatatttaagccgggcagggtgactcacacctgtaatcccagcactttgggaggctgaggtgggtggatcacgaggtcaggagtttgagaccagcttggccaacatggtgaaaccccctctctagtaaaaacacaaaaattagccaggcgcagtggctcatgcctgtaatcccagctactcaggatgaggcaagagaattgcttgaacctgaaagatggaggttgtcatgagccgagatcaagccactgcactccagcatgggtgacagagtgagactctatctcaaaaaaaaaaaaagaaagagaaagtatttattcagtggatcatatttaccaaaataccatgagagtggagcctgaagatttacacaacctaaggagggaaaaaattgtaaacaagtgagtatcatgtaacgaaatgggacataatagaatacgtcagatgaacagaggaggacagcagatgtcccaagaacctcaggtgggaagcaggtaattctaggtcagaggtacatcaatttcattaacgaataagaagtgtaagataaaaaatgccctaaagagctgttcagtctatcttgactggtgatatctgttatctttgggaagttttttaaaagaaacatttaagatttctttttttgatagccaaaagtaaaacgtgtacatggtggaaaaagcacaatgcagaaaataaaaataaacaacaccctgaccccgaccccacccccactccaagatagaatcatttttgattgtttgttgggttggctgatttaattctttgctttgatgtgtatccttctgatgtttttgcatgacaatccatttaaatggtagatcatgcatgatttttcactgacctacaaggtgtttttgatcatcctagaaatgcagtttcctagaaattgattctgtttttgttgacgggtagcaccttccaatgtagtggctagcttatctgtttacagtaaaccttggccacacaatgtcaccagcagcatactccagagttggagctattttgaccttggccacacaatgtcaccagcagcatactccagaattggagctattttgtgctctgtaggctttgcattgctgctatattggcaattggttctgccataaaatatctgcttagttagaattcatctgctaggaaataacaccagtgtaacccagagcaattaaatactagaaactgccaatccatggaacacttgcctttccgtgaagcagggtgcatgccccgggcttgaagggcatcgggaccaagactggagcccgcctggctccttcttctgcctgttttcagctccaagggcaaccaggacaacaggttctttgttcctctttcttatttttacaggaacaaatgaaagcctctgccagcattcgctctgtatctggccttctcatctctagctggagagtcaaccagaggaagttcctgggcaaaacagctaccactttttcttacctcccgaaatggcagcgtctccctggaggcagacatgagcttttgttcccatttctgtgtcctcttctgctgggcctcagttgatagaacttaaaaattaccaaaggccctaaaggtttttcagaatagtcctactgtgacatgctcttacaaatcttttttgaggaagttggggctccaccctcaaaaagcagcagcccttcgccatggaggaataaaatctgtaaccccaaatatgctagtgattctttttccttttagagtttaatgggacaaaaaaaggccttgaggaattaagtatgaacttgcttgctctagggaaactccctaagtcggaaaactggacctaggaccagttttatcaatttctagcattttgatctcaaataaggagataaactggatggcctctgatagcccttaaaacttggctaaatatgcaggggtccttctaagacaatccatttccccatgcctctctgcccaccactcttcccatgctgggtggtgggtaaaaggtttcttctgctcacctggcaatttccatgctgtcaactgtgttagccaggccagggtcctgccgtgtccagaataatggattggggtttcccttcttctccagactaatagaatattacagagacatgtttaattccatttcaatatcctttttttttttttttttttttttttttacctataactagactcaagttctgaacttcaaaattctaaagaaatatttttatgtctgaaggtgttaagaaatcattggatatcaacttctatgtatttttgaagttgaagtttttctgggaattttttgtttgctctgtgtgtgtgtatgtctttaacacaaattggaatttgtcctgtgccaaagatttttagttgatagatatcttcagtatgggccattattttctgtctctctacataaggggcctctggtactaatattcttccacaagttgttgatcccagacccaccacctctcttctcccaaccccgctaagtcctggcttcatctcccacctatccaggcatcttggctgcagcttggcatttgaggtgtatatttgtgttccttttgatacatggtcaaggatctactgccccaagatcaggaccatggtgggcacaagactcttgacttctgtctcatccttgattcataagatgacccctgcattggcctcttgtagctagaagcctgggccctccggcaatgccacatcccagggtgtatctttcttgccattgcagctggttaagacaacagcctggaaaaagattttagtctggcatgcagctgaagggaagctcctggagaagcatgatatacatggaaattttaacacaaaaatatcaagagaagtggcttttttttttctttttccatctgaaagttgaggatggcaataccagagtccaggttgagcctagacactaatggtagatggagaactctcctgcttccaggacctgctggaagctggcctgtagaagctttggggttttgctttctcccaggtcacatgaaatgctgccaaaacaagctccagagttgtgttaataccacaggatttgtcagtcctagaatggaaacacattgccttgctttctttttgtgactatccaaaaattagaagacggtaagaagtcatcctgaaaactcccatggagcggaaccattactcatagtttcaaagacagtccaggcacttagaatcagaagttcttttcaggttctgtttatttgttttgctaacagattccttttttcagcaagaatccatttttagacacagggaaactgagattaaacagtgcatggtaatgggtgcaggcctcacagtgatgaaggggcagtgctgaggctctgattcaagtctgacttggagtcctctttccacctaaccgctgaagattaggaggctgagggagactagaatcagggttgattccattgaaactatgacatgccttaccaaaaatagcattgtgatttcagtgcactcacatgggcaggaggtgggtggctttgattccggataaattgatgactgaatgtgaaagcccctgaagctgtgtgtggggttcccactggggtttcttcagacctcatgcactgcacctgcctttatccaagagcactttcctgccaggactgtctaccctctactttctcctgcactcagcaggccacttttgttggaatcctaaatctcattctccgtgctggaataaagcattctgtatttggagaccttggatggagcactggtctccaatgtctggtattggtgggcatagaattattgtaattctacactaaagctcatcactgacttttctttttatctttcttatcattttttttttcactatgtagactgcaggaacatcattgacttttacaaccaaagccactcaaagcccactccttgctagttgacttgagcttagaaggggtgtccatgggagaaattaatgagcaataaggaaggatttgtttttctggaaggattggagctgcctccttttcttgccccagagatggccaaaggccaggtggctcttggtagctgtggtgatttttgccgcccatttcctgataagcacagaaacaagaacgctttgtctcctgaggctggagctgagcagcggattctatttgttagggggcctcagaaagaaactgcccagtgcccctaagaatatttctccctgcccgctaagctcctcctcttccgtaaaccttgctgtctgcagatcacctcctcctcaggcccctggtcatgcctaaagcagaccttttattaattcctgcacagggctaggcctgaatatgggctggggatgaggccaggctagtaagggagagaagtctgaccagagtggaatggggtaggggccctggaggtgtggggacagtagggaaggaatgtgatgggccacagattacttgcagctgaaagagataagggatgaggatttgaacccagtttgacaggtaggtaggtaggagccagatatggcaggagacattccaagtagcttgaactcagtaatgaggaagctgagcaacagcatgtagatgtatctacaggatgatcttcccaggccggcgccggggttcacacctggaatcccagcaccactttgagaggccaaggtgggaggattgattgagaccaggagttcgagaccagcatggccaacatggcgaaaccccgtctctactaaaaatgcacatattagtctggcatggtggcgcttgcctagctgctcgggaggttgaggcacaagaattgtctgaacctgggagacagaggttgcagtaagccgagattgtgtcaccactgcactccagccctgggtgacagagcaagattctatctcaaaaaaaaaaaaaaaaaaaagggaaaagcaaattcagctgggtgcggtggctcacacctataatcccagcactttgggaggccgaggtgggtggatcacctgatgtcaggagttcgagaccagcctggccaacatagcaaaactctgtctctactaaaaatacaaaaattagctggacgtggtggcgcacgcctaaagtcccagctactcaggaggctgaggcgggagaattgctcgaacccaggaggtggaggttgcagtgagccgagatcgtaccactgcactccagcctgggtgtcagactgtcttaaaaaaaaaaaaaaaaagcaaattcagtatctttaccataattaggaaacacactgaatacatataaccattaaaataagtaatggccattaaaattaaaaccatgcctccatggattaccttgatgtatccatcactttttgggaaacattgtcagtttctaacaacattgagatattacaaaatatcaaaattgggctaggcatggtggcttgtgcctgtagccccagctactcaggaagctgaggctgaggcaggaggatcacttaaggccaggagtttgagaccagcctgggaaacacagcaagaccccatctctaaaaaagtattttttaaaattaaaaatttaaatatcaaaattaacctacacttttccaccattagagctttattttgtttttgagttttccacttagtagcaaaactacagttctttatgtttgggagacaaacaaggtaatgaatcttaaaccataatttagtcagagtcaaaagtaatatggaacctgagttctgcttttgttgttgtttttgtttattgataagaacttatcacatgataattagcccattgtcttcattctgtaaccacttattaaacacttaccatgtaaacaatgagaaactttgttttcataaaagtctaggagattcccggaaaccttcagggaacgagccctcaggcttcaagaaaagccaggatttttcgtaaagactgttttcagggagtgcctggccagaaaggtgagacttgcaaggagagacatgggcggagcctgccgctcactccttcaaatcccaggtctggggcagtccttgtagattccaccaggattggcctgggaaagccggcaaagcaagcaggtgttgctcttccaagaggagagttctccataccttgtggagcctgacatgggagagaaagtcctgtctagggccagggtttggggaactgagatacaagccgaaagccaagctgcttttgagaaactgtgataatccttcctccaactaactgctgacccagtcatcccagtgtctccagatgactcatgtaagtagaagcaaacagggtaccttgataaaacacaagggtagaccacagatggttccagctccaaggcagatgtgatactgacagtgctgagacacagctgctcgcacagacacacggaagggagccagagaactatggaacttcccctaggaaagcatcatttgacttacgggccacaaccaccttatttatctccataggggacttgccattcattctatgaggggttttcagatattgttaattaactaaaccaatcccatcctagctgaattatgatctaacagtctgctatagactggaaaaaaatatatacatatacatatttttttggagacgcagtatccatctgtctcccaggctggagtgcagtggcgtgatctcggcttactgcaacctccgcctcccaggttcaagccattctcatgcctcagcctcccgagtagctgggactacaggagcgcgccaccacacccagttaatttttgtacttttagtaaagacagggtttcaccatgttggccaggctggtggaaaaatcatagtacattttaaatatttgtttgaaatcacttttgttcttaaaaaaaatcaggcacatcttaccatagatgatattaaattgtccatttaaaaactccagtttctcgggaacactccccaaggcaacttggaagtatgccccagacaaaagtgattgtcttgaatgattttaattttaattttatttatttatttattgagacaaggtctcactctgttgcccaggctcgaatgtagtggcatgatcacagctcactgcagcctcaacctcctaggctcaagcaatccacctccttctgcctccgaaaatgctgggattataggtacaggccactgcaccaggccgtaattttactttaaaaaaaaaaaaatctaggctgtacaccgtggctcacgcctgtaatcccagcactttgggaggccaaggcgggggattgcctgagttcaggagttccagaccagcctggacaacgtggtgaaacctcgtctctactaaaaaaaatacaaacattagctgggcatggtggtgtgtgcctgtaatcccagctacttaggaagctgaggcaggagaatcgcttgagcctgggaggcagaggttgcagtgagccaagactgcaccattgcacttcagcctgggtgacagagccagactccgtctcaaaataaataaataaaaatctaattgctcggcttagtgaaggtgtggttttacacacatagaggaggtttagggggctttttgttttacttgtttatcctcatgtcctgccactgagggcagagccacacagggcacagcacacctgctgccacccacagcctaatggatgtgcaccatccttggttgacagagtaagaatttgtcattttgccttgaactttatttttgctatttaacagccaaactaggtttcttatatctagaaagttgttcactttatttactcagtcagtaagttttgtcacagaaatggcctcgcatcacatttctgtgtatttttgccttattgtctctcatttgcaaggtcaaagtgtacatttcagatgtatggttggggatgcagctcgcgggagcgggtgatgtagggggaggtgcaagggaggcttcatagcatgctttgtctagaccctggtcactaggactggtcattaggggctgcgctggtagactgtaatgtcttctggaattctgaattaggacaagaaaaggcatgcatcgtttggaagttctgctctgtgtcgatggtttctctgaggtgaatctgattctggcaatgttagtaaaactaacccttgtctgcctggttgtcctactcagaaagagctttctgcaatcacttactctcccacctgctcaggcgactaatgttgggccatgggaaggaaggaaatccagcccagtggaaaggcttctctcatcccatactccaaagaaccttaacctggttgtcacgagagcaggacaggtgctggagagccctgcccttccaaagtggatggaatatccacccatctgcttcaaagccatgaggcccaggtttggttgtaattggaatgggtggaggctgtgacttttgggtgagtgtttgttctctgcccctagaggcaccttatactttgcgggccattctatggtttgcccattgtattcacatgtgggtctcactgtatctgtacctaagttttatctccccatgatagcagccctagacacctagacatagtgggaatggctgcacaaataaatgagttttatagttataaaaactcagtgagatggtagatattattacttctcctccaacctattattttgagaaatttcaaacattatggaaaagttgcaaagatagcactgttcagttaattcactaagtgctgaaattttgctacattttctttatctccctattttttttctttttagggggagctcatcatttgacactttctttctttctttcttttgacactttcaaacatgtttatactttgcccttaaatttttcagtatgcatgtcctaagaataaaagcatttttcctttgtaagcataataaaattatcacacttaaggaaattctccattttattttattttatttttgagacagggtcttgctctgtcacccaggctggagtgcaatggtgcagtctggctcactgcaacctccacttctcgggttcaaacagttctcctgccttagcctcctgagcagctgtggctagaactgtaggcacaccccactgtgcctggctaacctttttttttttttttctttttttgggacagagtctaactctgtcacccccgctgaagtgcagtggtgccatctcagctcactgcaacctccacctcccaagctcaagcaatcctcccgcctcagactcttgagtagctgggaccagaggaacgctccatcatgcctggctaattcttttctgtatattttgtagagactgggttttgccatgttgcccgggctggcctcaaactcctgaggtcaagcgatccatacaccttgccctcccaaagtgctgggattacaggtgaaattgtcctttatagatctttttatactgatgccatatatgagttccaggctatgcactccatgtagttaccacatctctttattcacctcgaacctgtattaatcctacagcctgttaaaattcataacattgacatttttgaagttttggccattggttttgctgtcactgaaatttggatttttctgattgttttctcctgtatacattcaggtgagtcatatttgggagcaggaaagacacctaggtgacatggtaccttctcagagcctcacactgggggcacttgatgtcagggcagctcatttttggaggagttaacacagatcacttggttaaggtgacatctaccagtttcctccattgccagggtaccttttcattttcacaagtcattaagtgatctgtgaggtgatattttaagactatgactatcctatttcctaagtcttttgccttctgattttagcatccactcaatttttgcttgcattgattactacctggtggtgaaggtattgttatttactattttcagatcaaaagggcgaggctcagaaagggacctgagcaaggtctcacatgcccagctgagctaggagaggaacctcatgcttcctgccctgagcttggctctgtggccattccactatgaccatgtttttattggaatctcctggattgtatcacagtgttttaccttttatgaacctctgttcactgccttccctcctgtttgcatgcagacacctttcttagaaatcgctagtttctatgaatctcatcaagttctgtcataggttgagttccctggaaggagagcctgatttggggcttcttgtgcaagtgattcagaagcagcctgccaaggagtgagggatccaggatgggaaagggaggaggcaaggcaaagacgtgggctctgcctggtcccacagggagctcagcagcgtgaatagccccccagagttgtctcaactcaaggctagaaggccactcttctccatctcacatatgtagaaagtacatatcagtatgtcactggcagtgagtctgctctcagggagaggatgtagcttcctgggcatttccaggagaagaggggcagctgtgagctttccacagccaacactcgcagcagatggggcatgggtgcctgccctagaggaggggctctaggtggagcaccagtagcatcccctacatgttcaatgttctcacattagttttttcctgaaggttgttcctgataaaagccaatttgtcctgtaataatatgctataaacctcaagtggctggctgaatcaaggtgtcagcttagtcatttgcaaaggcaagggataattatggttgctgttttataaggccccatgaatcttattcaccatcttcctgtctgggccctgctttttaggctgaggtcacttgtcagaacaaaggcttttcagctccttgaaaccacagaggagtcacaggatgcgcccttctagggaaggaagatatgtcaacgtgtttactttcagcacacatgagcatcacgattgtcatgttagacactgtccaatttggtcttggcaaaatatggccaacctgagatggcagtgataaaatatttatttagtcgccaagaattcttttagtggcatggtacccatcccgcgcccgcagcccctagcaaaacaaaaccaaacccctaattgatctgagttaatatgcatgttttacacttggatctcaggcaaatgttccttacagtgttgtcctcagattggtcactgagagcttgttagaaatgcaatgtctctggctcaccccacacctgcagaagctgtgagtctgaaaccaggaatctgtggcttaacaaaccccaggtgactttcacgcaggctctcaagtttgacaaatactgatccaaagtagtggttgtaaacttggttgcacgttgggatcccctggggaatttttttttctttttttggagacggagtcttgctctgttgcccaggctacagtacagtggaaggatctcggctcactgcaacctccacctcccatgttcaaggctgcctcagcctcctgagtagctgggactacaggtgtgtgccaccatgcccagctaattatggtatttttagcagagacagggtttcaccatgttgaccaggctggtcttgaactcctgacttccagtgatccaaccgcctcagcatcccaaagtgtgctgggattacaggcgtgagccactgcacctggcttttcttttcttttcttttctttttgagacagggtcttgctctgttgcccagcctggagtgcagtggcacgatctccactcactgcaacctccgcctccccaagttcaagcaattctcccgccctagcctcctgagtagctgggactacaggcacccaccaccactcctagctactttttgtattttagtagagacagggattcaccatgttggccaggctgatcttgaactcctggtctcagatgatctgcctcccaaagtgctgggattacaggctttagccaccatgcctggcttttttaggtgatttttatcagcagccagggttgagaatcacttgtctaaagctggctcttttaccttctatgaaaggaattttaacaccagcttcactttgaagagtatgtttttttaactgcaaatattcacttcccaatacctgcaggccctggaatggcatttgcagaaggagaaactattctttttggcacagagtctcctacctggaaatttgtagcagaagttgagcaaagctttcacatatttgagaagaaataaaaagataaatcttgaatgaatgagtgagattccttaggcctgcagaaagtcacgaaggtgatggagagaagttaggacgggggtctctggccagtccacatgccaacactgggtattattattgagtctgcacacccaaaaatgatcggcataggttggcttcttctaaattcagtcccacctcttaggagtagagttgtccatgtggaaatatcacacttccttcctttaatttcctttttataactcatcatacattcagtttcattatccatccttctcagtgctaaatacattatctagttcacacagttgagttcctttgggtttagaggattgaagaccatatgtacccgaatctaaacctgcttgtttggacatgaatggtcaggtctggtgtcccttggctgccccaggatagggcttgatgacctgctccttgagagccaggttaagtgtcagttctgagtttggtaaagggtgagagaacccagagcgaagctgccttggatggaaatgtcagccccctctctctgaccaggggcttgaccttgagcaagatcctgacctgagctaagactcctggtcctctctgtaaaaccgggatcatggtgcctgtggtccagggctgccaagaggagtaaatgagagaatgtaggtaaagggcttggcacacaacagccgctacatggatacaaactgccctgtgcccctcacccctgtgtccctcacccctgtgcccctcacccctgtgtccctgacctgacttggtacccacaacattggataaataccagagcatgtgtaatttctagttctgctgtttcaaggctgttatcactcaggacagctcagtaacttcttaggcctcggtcttctcattggtaaaatgggaattaaacactcactgacagaaccagtattggcaccaaaaggatgtcaatatggtttggtcattaagacgtaattcacataccataaaattcacccttttaatgtgcatgattcgcgggttttagtaccttcacacattgtgcaattatcaccactctctaataccagaacatttccatcaccctggaaagaaacctggtacctgtttgcaatcgctccccattctcttttctctcccccattctctggagcccactgatctactttgtgtctctgtagatttgcttgttctggatatttcatgtaaatcgagtcattcagtatgtggccttatgtctggcttctgtcactgaacaagatgctttccaagtatatccatgttgcagcatgcgtcagtgccccattcctttttatggctgaataatattccattgtaagaatagattactcttttttttttctttttttgagacagggcctcactcctgttgtccaggctggagtgcagtggtgggatcatggcttactgcagccttaaactcccaggctagagccatcctcccacctcagcctcctgagtagctgggactacaggtgcgcatgaccacacctggctaatttttgcatttttagtagaaatggaatttcgtcaggttccacgggctggcttcaaactcctgggttcaagtgatctgcctgcctcaacctcccaaagtgctgggattataggcgtgagccaccacacttggccacattttgttcatccactcatcagctgacagacatttgggttgtttccgcttgttagctattatgagtaatgtcgacatgattttacgaatagcacagcatcactcctctgtgaggttttattataaataatgtcagtaataaaaatgcttagatttgtgagaagaaataaaatccaatcattcaggtacaaaataaatctgtgtgagtgcatttgcctttagactggggcatggttgtgcttatgagaaatgctactgagcattaggaactcacggttaccatccatgctatttcgcatttagggttctgtcctcaaagttagaaatgttttatattggccaggcagggtggcttatgcctgtaatcccagcactttggaatgccgaggtaggcggatcacctgaggtcaagagttcaagaccagcctggccaacatggcgacaccctatctctattaaaaatacaaaaatttagccgggcattgtggtgtgcgcctataatcccagctactcaggagactgaggcaggagaatcacttgaacccaggagacggaggttgcagtgagcccagatcgcgccactgcactccagcctgggcaacagaataagactccatctcaaaaaaaaaaaaaaaaaaaagaaaagaaaaagaaaaaaagaaatgttttatgtcggaagacaaagcctgaataaatggcatttaggatgcttagaacttttgaaaatggggttaggaatagaaggtcaggtctgcccagtgcaaagtgttctttttaatattagagatagagggtaaaataaaacattgtgtctgccctcagaaagctttcagtctggaagagaagatgattaagggggcgatcacaagatggggtatgtgcggtggcaagcctggcctatgaacttgtagggacggtctccttgttagggaaatggtactgcagccagctgaccgtgccgcttctctttctcctagcatggtaagacacaaggatggtggctattccgaggaagaggacgtgaagacctgtgcccgggactcaggctatgacagcctctccaacaggctcagcatcttggaccggctcctccacacccaccccatatggctgcagctgagtctgagtgaggaggaggcagcagaggtcctgcaggcccagcctccgggggtaagactcagaacctcgggaagcaggttgaagcaggcaggactgctgccggcttaaagaaaaacacttggagttagttccagaaatttcttcctagcttgtaaggagcatgtctcttgatgtgtaactggttttcaatgcagaaatattctgtaaacccaggaacagagcccttcacgatgtgtctttctgtctttatctgctcagttaccatgggaggtacaaggatccagcagagaactgagcatctgggtagcgagtaggggccactggccagaagcctgggtctgacctcttgagcctggacactgaggatgagcctgggtctgagatccttggtggcctctgctaccttcctctccttctgagcctgggagccctgccaaggtccagccatccaacttgggacccagccttcaaaagttctgtgtccacagacttgcctgctctgtagtcctcttttccctgggctttccacacagactaaagtctaatatggtttcctcagctactgtctatccaagaccactgtccgtcccatccagaccactccacgacttgtggaaggtcctcaaaaaagtgactggagccgggcacggtggctcacgcctgtaatcccagcactttgggaggccaagacggacagatcacttgaggccaggatttctagaccagcctgggcaacacagtggcaccctatctctactaaaattacaaaaattagcccggtgtggtggcacacgcctgtaatcccagctactcaggaggctgaggcaggagaatcacttgaacacaggaagtggaggttgccatgagcagagattgtgccactgcactccagtctgggcgacagagcaagaatctgtcccccccaaaaaaaaaaagtgattggtatctctagtgctatccaatatggtagcttcttgccccatgtggctgtttaaatttacatgaattaaagcaaataaaattagaaattcagctcctcagttaccgtagccacattttaagtgctctctggcctcggctggctgccatattagatggtgcaaaatttggaacattgtcattgtagtacaaagttatagtggacggcatttgtgtacagtgtctacttccaaaggataaatacaataagtcacagataaaataatacttaacacgcaacacaagatagaaactaagaactagatggagaagcaaggagaaaatcccattagtagctagctgaggaatgtcataagaattgggcactaaatacctttttgagtttcctagcagtcagagtctgtctgttctcactttttaaaaaacatatgaatctttctttattcctcatcaggcagaaacaggtagaactaagacgtctgctagaacatgctcaggggaacaaggcacggtgctttctcatctttgcagagaatcccttggccataacacagagctgctgcctctagttttgttctataggatcaggatttcctcaccttctgtgaagcctaactttcagccagttgaattgtctgctcttgcatttctgcaaaacattccaaagacagaagttgctgcagagctaggcaacagcctgcccagctccccctcccaaggtagggcacgtccactcttgctgaaacctgcatgggaaacaagccaggcatgttctctccatccacctgcctgatccctgcacagggcctgcctgatgagattgggcaggttgagggcagggccaggacaggagtaacgtggaccaggacagtcaagaataacgaagggagaggccaggcatggtggctcaggcctgtaatcccagcactttgggaggccaaggcgagcagatcacttgagatcaggagttcgagaccagcctggccaacatggcgaaaccccgtctctactaaaaatacacaagttagccagccatggtggcacgcacccataaccccagctactccagaggctgaggcaggagaattgcttgaacccaggaggtggaggttgcagtgagctgagattgcaccactgcactccagcctgaatgacagaccaagactccatctaaaaataaaataattaaataaaataaagaagagagagaaaagcaggtggctaaaagtgtgtgaaaaaggaggatttgagagactggccatggtggcatgagtgaagtgggctcttggggtgcccatccttaattattctacaatctaagatagaggtccacagactgtttctgtaaagggcaaagtaaactatttttggctttgcaggccatagagtctctgtcacaactactcaactacactattgtcatgcaaaagcagccatagacaatatgtaaatgatcgagcgtggctgtatttcactacaactttactcagaaacagatggcaggatggatttcgtctgcaggccagactttgccaacccctgatataacgtaaggctgcagtcctccaaaaaataaggcctagaggttgcactccccaaccccaaggctcagggagatctccacttggaaaagggagtgttacttcctctcctaacaaccaacagctgcctctccacagtgctttggcctcttacccccctggatgctatttaggaagcatctgcttcagttttagggtgtcccagaggcactgactcccagaacctgctactggatgagtcctatggatgcatccccatggtgccaggagaaaagagaactcacggtcttccagcttcattcttcaccagatacccaagtcccatacccatcttcccaccccccaaataaagtatcttatgagatatcaactggagataaagagaggagcaaagattaggcagggaaaaaatgaaaggctatagaaaggtaggggagagaataggtagagagtaaggtgtttaaatgcagaggaaagagaagtagctaaagaagcatgacagacagaataggagaagggccatgctccacagaagggaaccaggactcagctgggctgccacacgccatactccagggagagtcacttcatttgtaggctaggtgaatggtgcctcctggagttgtgcagtgcacggcctacacaacagtacacagcatacttaactctgcagtgatgagggacagaatggtgtcctgagatcagcactaggaattgaactgttttaaagcatgtgtctaaagacaatattaggatcttgagggaactggtagaatgtgaagtgagtcaggaataaatggacagcctccatgtccaccggggtgaacttcagagtgcatccacccaccacccaaatggaacagccatttttcagctccagtagattgttgcctggtcttgctatatcatctcattttccaagaggagctagaaattcagatttcaatttgaaaacaaaaaacaaagcaacttctgctttttcactgttggccacaaacttaaatttctattgtaaatatcctcataagccaagttaaccaatgaaatgccaattcctatggtttagtcatgttacctgtgtttagaatttaggtttcaccaaccaagatatataagacaggggctacagaatataactcatataagacaggggctggagaccgtaactccagcagtaaaacagtcactgaactgaaaatgcttatgcagactaggggagttcttagccccatggagaagcttctgtcagagggaaagcaggattcttttggaggcagtaatgaacaaaggtgtctgcagcctgtgctctgagcacccctttctatggcaggagagtttcctgcagggagccatgcagtgtggatatgaagggattctattcattgagtgtgagggaaaccagatgcttgggttccaacattctagatatttcctaaagcttgtatttcttttccctccactagatcttcctggttcataaatctaccaagatgcagaagaaagtcctctccctccgcctgccctgtgaatttggggccccactcaaggaatttgccataaaggaaagcacatacagtaagtggtcattggatgctcaggtcctgactgacagggccacggggctctgcagggagtggaaatggaaggagctctggttatgagatgggcagatatgggcctgagtcttggcactgaatgactaggcagataacctactccaggagcctcagttttctcatctgtgtaatgggatgatggtaacctctgagatgttaatgagtcaaacaacctgaatataaagtgtgcagcctactgcatggcatatggtagggaactaatagaggttgacttcctctccccctacccagttaagtggaacatgaattcagttcccaggtttgccagtgactaagttgcaaggagactgtagcgagagagccctttcacgctaatcctaaatcctaaagcatgtgtctgcacttcttcgtgaataaataatccctgagcagacctgttccctccaggcaatcagtgttcagtcttctatgaaatgcagctaatcagaggcagaatccaaccttttgatgaacattttgaagggagagtggtgttcagaagtgttggttttctttctgctgttccacgattggtcattggaaatgtgaagtgtcgggaggccaaattttaaataaaaaagggaacacccagttctgatgtactgccagcctccaagaaaggatcggaagatggatctgcacatcaaagggggaggagtgggaggagcaggccaggaggagagagctcagaagcaagacagagcctgggattcccacttgcttcccgatttcccagcacctcacctcctgcatttggagaagctgaaggtgtagatgaaggtcaatttcagggccgagatgagattctactcagccgggagggcacaatcttgctgagccaaatgaccattaactgagttaggggagggtaaaacctgccaggctgactgtgaaccgcctccagctcaattgtcaacctggatcttacaagtccacaaggtcatggatgccagggaaaaacttccccctgaaaggcgcacaagcaggcggaacccagccaataatgtaaatacattaggatgcaaccagaaggtacattgcaaacccactgcttgaaaggtaataaattcatattgagctaataatgtgttaggtgaattgataatgaatttatattaagtgaatcaattaagtaattctgaattggcttttgaaagtctgcgagaggctgggcaccatggctcacacctgtaatcctagcactttgggaggccaaggccagagggttgcttgagctcaggaatttgagaccagcctgggcaacatggcaaaactccatctccaccaaaaaaaaaaaaaaaaattagccaggcatgatgacacacgcctgtagtcccagctactaaggaggctgaggtgggatcacttaagtgcagtgagccgtgatcgtgccactgcactccagcctgggcgacagagccagaccgtgtcttaaaaatgaaaaaacaacccaaaaatattaaaaaaaaaaaaagtccacaaggcaagaagccacagatctaactggttttcaaattcctccctaatgtccaaagtggagcacgatggatgtgttggtcggaagccacttcctctcctcttccagaagtgtgggcaatgtgtgtggaagcttcctcgttgttcattgaggtccttgtggccgaaggtttttcccccataatttgacaaggcctctaatcacttccctaatcttctccaggtgacttcaagtggttaaaagagcttgtttaaataaagcattagcctggtcataactagttaccacaggcctgggtcccactgcaatggccccttctcagccagggcctgtttatcttctctgtgaattgaggtgaaggaaggacttgctataaaaacattcagggaggctgaggtgggcggatcacttgaggctaggggttcgagaccagcctgggcaacatggtgaaaccccgtctctactgaaaacacaaaaattagccaggtgtggtggcgcaagcctgtaatcccatctgctcaggaggttgaggcaggagaatcgcttgaacccgggaggtggaggttgcagtgatccgagatagtgccgttgcactctccagcctgggcgacagagtgagactttatctcaaataaataaatattcagatattttgtcataacttacagacagtgcagcttaataataaacaacacctcatatttggaaacaatgctttcacataaattatttcatttttaaaaaatttcatctccccccaccacccttctgggagataaggaaagtactgttagggtccattttccagatgagaaaaccgaggcttagagaagctaacctgctccaaatcagttccctcctccttaactctacaaattgtggcacacgtgtgtttgttgtttctgtgtgtctgtgtgtgtctgtgatggtatatgtgtagcggtatggatgttttttgggggtgctacagaaataataaaataatacaaaaaagcgaagaagcagccggcgcagtggctcacacctgtaatcccagcactttgggaggctgaggtgggcggatcgcctgaggtcagcagttcgagaccagcctgacatggagaaaccccgtctctactaaaaatacaaaattagccaggcttggtggtacatgcctgtaatcccagctacttgggaggcttagacaggagaatcgcttgaacccgggagatggaggttgcagtgagctgagattgcaccattgcactccaacctgggcaacaacagcgaaactctgtctccaaaaaaaaaaaaaaaggcaaataagcaaaataaatgagggtatgagtgagaagaaacacatcggattgaggaaatcttcataaaacaggatatttcaaatgtttagaggaatatcagtgtgagttgctcagctgaggtggtgtgagggctggctggcaaattcatgagtatttgaagtcagactacttgctgctccagcatttggaagatgtgcagaatgccacaccatcttgccagtatgtgtcttttttttttttttttttttttttttgagacagagtctttctctgtcacccaggctagagtgcagtggctctatcttggctcactgcaacgtccacctcccaggttcaaatgattctcctccctcagcctcccaaatagctgggattacaggtgcatgtcaccacatccagctaatttttgtattttcagtagagacagggttttgccatgttggccaggctggtgtcaaactcctgacctcaggtaatccacccaccttggcctcacaaagtgctgggattacgggcgtgagccaccatggccggctcagaacatgtcttctgtgttagaaaatgtgaacactggagcaggggtggaggggggaacaacactccaagtaaatgggttttagaatctttgttttaaaaaaaagtgagagagagagaaaaaaaaaaagagagatgtagtctcgctataatgcccagactggtctcaaactcctgggctcaagagatctccctcctcggcctcccaaagtgctgggattacatgcatgaggcaccatgcccggccagttttggaatctttcatgttgaatttaaccaaaagctgatttcagggaacttgttatatcctcccagctctacattccttctcccgtgtgcttttatcacaggtgctctgttatggcaaaaaggagtggccagggaagtgtgtgtcctaggagggtcaagggatcgaggggagtaggggtcttggtgttccccaagccctgtcctgtgctgatacaatccagacagactggccccttgtcccctgccctttgtgttctgaagttaaaaaaaaagacagttgtgcaactcgagtctgtcctggtctgtttaccaagcactggagcatgtgctcggcatgagtcaagcgatgaacttccagatcatcgactgtttaccggtggctgctggctgacatgcctcctctgcacagctggttctgataagccacacggtagtttgtttgagagtactcagatggtcccacacacatggtgttaggggctcttcctgtcccagaacgtgctcagggagaatcagctggtttctgaaatctcttttccagccttttccctggaaggctcaggaatcagtttcgcagatttattccggctcattgctttctactgcatcagcaggtaaggcctcttcctctcatatggtttcaaggccctgtttggtgtgtgggatataattaacctgaggtttcttgaaggatctaggaggctggccacctatttgatgttggcagattaagactggttacttaagtaaaatgttcaccaagtgaacaggttcaccaagttcacaccatgccaggcttaaggtcaaaacgactatcccaacccctccaaacataaattatccttcatatgattatttcttcaagctgctcccaaggctcctttcagccaggcccatcaagcaggaaacacacacacacgcacatatgtgcacacatgcacacacagacacacatgcacacacatacatgcgcacacacacctacacacagaaagggaatgtgcatgcaaacctgtgactttgaaagcttcatgataatgcctctgaaaactctgtaagggatggagttcattctacaaatgtgggttccttaaaccagcccatcagtcttgtccttcaggccaactgggtgctcatgtccttttcataaccaaagcaactattttgttctatacaatgttaagtccaaaatcagttttttgttttttgttttctttttgagatgaagtctcactctgtcacccaggctggagagcagtggcgtgatcttggctcactacaacctctgcctcctgggatcaagcaattctcccgactcagcctcctgagtagctgagattacaggcgcctaccactatgcctggctaatttttgtatttttagtagagacgggttttcaccatgttgaccaggctggtcttgaactcctaacctcagatgattcacccacctcggcctcccaaagtgctgggatcacaggtgtgagccaccacgccccgcccagaatcagaatattaaccagagtcaacagggtgtgcattgtgaaaggctttctttctttctttttttccatttttttcttactagcaataacagttttttcacatcaagtgttttttcagtaattaagaatcaaaattcttgttatctgcagggattggcattgcctcctcttatggggctgagctcaatttggcttccttttcttctctgtccatggcagctgatatggcagagacaggaaaatgtgttactaggatgttttcagacatcacttctcacagctaacacacgtataggctggggagtttatttgagtttggctcggtttattttaatttaaggattaggttgtttctcaaagactaaatgcctgttgactagactctgccagagggcaggaggcactacgcacttttttttttttttgagatggagtttcacttttgttgcccaagctggggtgcaatggcgtgatctcggctcactgcaacctccacctccttgggttcaagcaattctcctgcctcagcctcctgagtagctgggattacaggcatgcaccaccatgcccagctaatttttgtatttttagtagagatggggttttaccacgttggccaggctggtctcaaactcctgacctcaggcaatccgcccgcctccgcctcccaaagtgctgggattacaggtgtgagcaccatgcccggccaggagccactaagccgttcaccctctgaagtctccaggtcagctgaagccacacaataaatggcctcaggaaggggaggcacttccagaggaggaattcagcgctgctcaccagcaggaagaaaatgagggcttcactgagaatgggactagtacctgggggcacctcccaagaggatgcaacctgcctgccatgatttgggcaggatctcttaagcctgtgtaaggaaatgaaatgtgctgcccaaagagaggaggctggtgcagaagcacagcccccaacagacacacacacacacacacacacatatatacacactcatccccagggaaccacacctggtatggcctaaagccaaccaggttggaggagtaagtctcaatgctaacacgttggccaggggtgaagccagctgatatttacttttcacagtttgctttttggtaattgtggagttgctgggaaaaatcattacacctacaaagcaatatttggcagtagcatagaaaagttaccatcagtgttcatggtagactggagtacctgctgtccaggactgtttgaagatgcaaggagataaagtatatgaaagccttataaactataacacatgataccaatatataaggtacttacaggaaaactccaaaattgatgttttgcaggtaggaaggccaagattaatttccctgtctgttccaaaatgcaaagatatttgatgtttttgtttctctttctatgctactcatctatgttcttggcaattggtagttgatttactcagtcttacaagaatatttgtgacattttttagttggttgttagtatataaatatattcaagtaaagaaagtgattggattattggttctggtgtttcacacagcatgcatatgcaaatatgcattgcacaagagaattcacgaatcaataaacataggatttgccatagtgggaaggctcgctgaaaagtgtcattgagaatacaaatagtgactgcacaccttcacccccaatgcctggcaacgctctgttgatttggtgttatcagtgtagtagtgagagtactagagtcatttggagtcttgctaaatgcagaatccggtacagtgggtctggggtggtacctgaggttttgcattttcagcaagctcccatgggttaaggctaatgctgcttgtcctcagaccggaatagaggaatagaggaaataataattttaggggtcttctatatctgtactaagcaccatacatacatatttctaatccttatggcaaccctataaattaggatgatgaaaacactgagacagaaaaagtgaagcatgtgcccacaatcattcaatcagtaaatgacagttacgggagttgaactcaggcctgccttaatgccaaagcccgtattttcccaccatactattcagctgctgagaccttagggtccaacacatccaggttttgaccctcacttcacctccattagctctgcgaaggtgtgctagggacctcacttgtctgtgtcgtcatctgctcctgatccacagaatgggggcatcacggcttcctcccagggctgttccaggccccacacgagttacggtgcctgctgtaatttaatagtagttgcccgatgatctttgtcccctcccctttagaaatctacgtatagagcaaagttaaacaaaataaatctagactgtacatgttttaactcttgggtgaaacatttatatctaagatgatggcttttgtttttctgttatgcaagctttagaattgaggcccctttctttaataggatgtaagtgagaaggcgtccctgtgtgagtgtgtgtgcgtgtgcatgcatgtgcatgtgtgtgtgcatgtgtgtgtgaagatgctgggatgcaccctggctggcacagtgggagacgatgcatatacaacatctaattttctagtagatcaaagcctgaaaccatccattaaccaaggacaggtgtggcttcctgtcatatatcattaagaaaaccccaaaccagtcatgtgacgtttaagctccaggtactgcattgagcaaggtaaaagcttaatataaacacaggttggttttgtggtatgcagctttcccccaaaattgtctgaggaaagtagattttaattaagttggtccggccacacaaacatatatttacagtctagtttggtgttacaaggttgtggttcccattaatcttcacttgagattagcatcagggttgccgccctgccaggtcaggcagcagctattacagacacagccatcccctgcagtgctgcctgcttcatctcaaacagacacaagtggccaagcaaagggggtgctcacaacatttgaggacaagtgaaaggtctcatggaaggaagaggtgatatgggcctgacccccaagaacagcagcctcctggctttacattagcagagtactacggtgtcaaaacattcttgcttttttcttcttttcattgacttactaatttgttattcattgttaacagcttccatggctccaaaattctccagtcatccagatttaatctggtttatccaagaatgttgcctaattttaccgtaaacaataggttgtttggtatcattattctcgtcagtggaaattctcagcacgtctcatgatgacaaagtccaggcaggactccaagttttgttccttactagcaccttccagccgcagtggtctccttgctgttcttcatccatgccagaccctccccaccccagggcctttgcacctgctgctcactctgcctggaaggtccttcccctcatgatttaacccctggccaccattagatcttcagtcaaatgctgcctgctcacgaagacttgtctgcccaccttcacactcaaacactctttattctcctttcctgcttcacttttatccatgtcatggatctccttctcatagattctgtaaattgtgtatttgtttattgtctatcggtatcccctgacatggagctccatgcaggcaggaacttccgtctgtttcgttcccagcccctgatgcaatgtctggcacattgcagatgatcataaacatctgtggaacaaatgaatgaataattatttctttgtaagactattaccaccactggaaaaaaacaaacaaacaaacaaaccctcctttttgattaagtcaccatatttattgaatattcattcattcattcaagtacttcctgcctgtctgtgtcaggacagtgttgtgctttgccctgtggggaattcaccagtgcttagagcatggtcctaacctttgtgaatgaacatgagcaaatgtttaagtctgcctttgccatttccaagaaagcaagtcatggcccatggctgtggcaggtccctgatgctggctgggctctctcctgttgggtctgttgctctctctgccatgtgtgtttgtccatctgcacgtggcaccatgctgcttgggtgctggggttattggcatgaggggtcttagacttgctttcctattcaaagcctggtccagggtccagcagcatcagcatcctctaagagcttggcagaaatgccgaatctccagtccctcccagacctctggaatcagagtgtgcagtataacaagaccctgggtatctatctgtacattagagaagctctgccttcaaacacaggagaacgttttgtctccagcacaccaaggccaatgtgtgggctgtaatgggaagatttcataagtaaagccaacagatattcattgagagcctgcagtgtgcaaggcaatgggctaattcatctcggtttaggattccacattcctgcccaggcagtttcggcccaacattcacataggcatgcagtgaattagtacataatgttttatatgcatgctagatctaccaacaagtcagcaattctgatgtaaactctacatacgttttagctactcagcagggcaattgggtccctactttgatactgaaactatgctggtttttctctcagcctgtcctgagtgtgtgataatacagacaggaattttaagtgttaagttttaccaccaggaaagataactttgtcgatatggtatggtgtctacttaggacattttaaacagtttaagctaaaacatctctatgatgaaaataaacacaagatagaaagcagacatgtaattacaaacattctctctttttctgaacaatcagggatgttctaccatttaccttgaagttgccttatgccatttcaacagccaagtcggaggctcagcttgaagaactggcccagatgggactaagtaagtgtgtgccccctgcctgagtctatctaaaaatgaatccatggagcagagtcaatggtgggctcactgaggctacattgctccgtcaatctctccagcttctccatcagtgagtttgggctatccaaaatgttgacgtcctcttgtaaacatctgtaacgtgttgatgtcttccctttctgaggcatcttcctggggagaggcagcacttgacagaaagagaaatccagtgtagtgcatctcgcgtgcatgattttttttttttgaggggcacacgggcattgacggcacttctgtgctttgaggaatttgacagcacagacatctagagtaacgtctgttccacttcctctcttgtcgttcaattgttgtcctgctgttctggtccatgtcctaaccctgccggggatccttggtctggcagctgggtacttgcttccccgtcctgtccctttgccgatgtcccctaagtccccacaattctgccggacaatggttgacaatggatcaagacatacaactcacccactttaacgtcttttccccattgccttgggggaatctgtgtgggtttagcttttgcaaaaaatgttcctcctagatcaaaagaggaaattctcttaagattttaggacttcactcactgtgatacttgacccagcaaataaaagatgtatgtattcctcctctggcatatttttctcttaatttaaagaacttgttttgaagcaagcgccatttccaaggaagcttcagcgaggagcctgggcatagctttgaattcccttctgctgaaactgcaattttttttttttttttttttttttgagagggagtctcgctctgtcacccaggctggagtgcagtgttgagatctcagctctctgcagcttctgcctcccaggttcaagcgatcctcccaccttagcctcccgagtagctggggtcacaggcacttgccaccacgcccagataatgtttgtattttcagtagcgacggcgtttcaccacgttggccaagctggtctcgaaatcctgacttttggtgatccacccgctttggtatcccaaagtgctgggattacaggcgtgcgccactgtgctcggccatgaaacttagattgtatctgtagaaggattgccttctgtgtttgaggcctgtctgatggcaagactgggtaatgggatttggaaagagaatactggtaaaactctcgggccatagaaacgtccctatttaaaagttgcaccttctcttgcaactaagttctgcatacctttggagagagattaaaatacttgctgaagttaagtcaatattgtcaactagattctaggcctcttgaagatgtgcaccgggtctcagttctctctcccgacctctgtccacatagctccagtctgatggtccacaggcttagtgagtgcatagtgctgagtctgaaggactaaagtgtcaaggacaatgcttgtgccatgccgagagaggtgaaaagagtttgctccagtggctactaaccagaagcgactgagggctaattaacatatattcgacttgtgattctcgatgtgcatattatccattttgcgtagagatagaatattttaaaattctgtgcctcagtaaaagtactgttcatcaaactaatattcctcgagggtctgctttgtggcagacactgtgccccagaccaaggactcaagggttaataagatcccctctcactccctgtgcctgtacctactgccaatgagatttgtagtttatatgggagatagatatacacgtgaactaaatatacaaagccttacaaaagatttacagctgtgacagtataagtctaaggaggactcaaaggaggtggaagtaatttctccaagacctgctgtcctgggtaatagaaacataaggctaatctgtgtgtaatttgaaactgtctagtagccacacaggttaaattgattttaataatttattttgttgtatttaatatatccaaaacattataatttctacatgcagccaatataaaaaattttaaggtatgaaatgttttacattctttttttcatatcatgtattcgaaacccaatgagttattttatacttacagcatatctcaaactcaggccctgaatgtttgtcagaaatacatggtttgtatttagatttcattaaattcacagttaaaaaggtagattctcataaccaagttccaaagatacttaaacgttttccagtaactgaactgaacatgagttctaaaatttaaattgattgacactgaatgagatttgatattgacttcctcggttgtactagccaacttcaagtgctcaatagccacctgtggctgttggctttcttgttggacagtgcgggagtcgggagagagaaggagggatacaggatagattacataaggcaggtgacacggctgtcaccacacagacaagggagagccaggactcccaaagggcttcatctcagtcctcccatggccagccattctgggcccatgggaaagaaagacactgcaaagcatagctagagatagagaataacccattccaggccaggcacagtggctcactcctgtaatcccagcactttgggaggccaaggcaggtggatcacctgagttcaggagttggagaccagcctggtaaacatggtgaaaccccgtctctcctaaaaataccaaaattagccaggcgtggtggtgtgcgcctgtagtcccagctactcgggaggctgaggaaggagaatcacttgaacctgggaggtggtggttgcagtgagccaagatcgtgccactgcactccagcctgggcgacagagcaagactccgtctcaagggaaaaaaaaaaaagaataacctatcccaaatggaaattataacaggcaccactgatcacagcactacctccctcaacttacatggaacactgagactcatctgcaagaggagacacaggcagtacagatcaataagcaatctgcactacttcgcagagcattgcatatttatgagcatggtgaggaggttatataggatttgggaaggagggactccaaaccacaaaggtaaatggttgggcctgcactgcacattaagcttgctgtggtttttctgctgatgggacccatgaatgtagttttcctcctttggtggttttaatgctgaatgtgtaaaaccctaggcagattgtgtaacatcccccaggcccagctgctggtcctgcccattaaaggggaacttcaaggcccgattccttggctggcagctgcactgtggagggcatcccaggagaagttgttgggaaagggtggtgttgctttgtaagtcggttcagtttttgtaaagcaagtcaggaagccccagtgaccttttttgagcttatactggagcaattccagttcctttttttcttccaacttacctgtgaaaaggcagggctggaatcctatgttggccaagccatttctccagggctttgaaggtgacagacccctggagccttcctgtgagcccacagctgggcctggcagcctttctgccctttccagtaaaggaatgcagtaaacctgagtacaacgcaccccctaccccaccccgcaagactcgcgttgtcatgcagtgtgctttttttaatttgtgaaggaatggtctgagtgtaccgtatttacattcttgtgttcactgataatgactttcagatttctggagctccccagctgacagcaaacccccgaaccttccacctccccataggcctctttcctccgacggtgtctgtcctgcctccctgcgtcagctctgccttataaatggagtgcattctatcaaaaccaggacgccttcagagctggagtgcagccagaccaacggggccctgtgctttattaatccccttttcttgaaagtgcacagccaggacctcagtggaggcctgaaacggccgagcacaaggactcccaacgcgaatggcacggagcggactcggtcccccccacccaggcccccgccacccgctattaatagtctccacacaagccctcggctggccaggactgaaacccagacgagcatgccagaaacagtcaaccataacaaacatgggaacgtagctctgcctggaacgaaaccaactcccatccctccaccccggctgaagaagcaggcttcttttctggaagcagagggcggtgcaaagaccttgagcggcggccggccgggcgcaggcccggagctggagctgggcacagctggcagcccaggtggggccccgcctgaggccgccccgggggattgcacaagggccccgccgcccagctctgaatcacggcccccgtgccatggaggccggcagcggctgagcgacatgagcatttctacttcctcctccgactcgctggagttcgaccggagcatgcctctgtttggctacgaggcggacaccaacagcagcctggaggactacgagggggaaagtgaccaagagaccatggcgccccccatcaagtccaaaaagaaaaggagcagctccttcgtgctgcccaagctcgtcaagtcccagctgcagaaggtgagcggggtgttcagctccttcatgaccccggagaagcggatggtccgcaggatcgccgagctttcccgggacaaatgcacctacttcgggtgcttagtgcaggactacgtgagcttcctgcaggagaacaaggagtgccacgtgtccagcaccgacatgctgcagaccatccggcagttcatgacccaggtcaagaactatttgtctcagagctcggagctggacccccccatcgagtcgctgatccctgaagaccaaataggtaagtaccctcttttttaaaatataaaatctattgtaactctgtccgggcagtgcaacctatgtttgttattttttatgaagtttactccgaagttcaaaacaacacccagctccaccttctctcccggtttgaatggaaaaatcagtttctcaaagtagctgctgactgccagactcaaaaatgtcttcgggagtgacagattggagctgcacagtgattctgttcagggatggagtttggtcctctgtgggtccagctgccgcctgctgtggtaacgtgtgtgtgttacatgtgccgggtgtttctggacgcgtgcttctctgcaggctgtgcatacatacaaaggtagttttgttatcttctgagaggcagtgggtattttgttctgtcttggttgcaagtaaactttttattgaggtgtagcatatgttcagagagcacaaaactcacgtatgcattggaatgagtttccaccgcaagcttacctgtgggacaactaccaacccctggataagcagaacctgaccagcatctagggaccccgggccccctgttctccctcaaggttaccatcctgctggctcctcatcccatacacttctgtaagcagcacggcttgggagtaagcaaaaactgaaaaagacaagtttgttttgtgtaactttaaaataagtaacatagtttggaggtcacatgaaaggtgttttctccaacttcaaggggaaattctttctttataatctcatttaaaggatgagttgctaatggttactttggccaaggcaaatttgaatttggcaagcagtcttttcttccagggtgagaatgttgaaggttctttgtttgtttgtttgttgtttttaattttagaaggttgactcttgaaggttaatttcagagactttattcaccaggcagcaggagcctttggagctaccaaacatttccaggcggttcagaagctacaccccaattttttctttctgattgggtccatttgttgaaagtagtaaacagtgtgtgatagagggctctttctctttctctgtctctctctctctctcctctcttttttctcgtttaagtgattttcagcagctctttgattttctcacaaaggaatcaaagccttgtttgttttcttgtggtttgactgaggccaggcctggttgatcagggcgtggttaaagctggggtgttgctggagtgagtggctaaaggaatgtgcccttgtgaggtgccttctaattgaaaaagacatcaaggagacagcagaatatccacacaggctgcctttttccccatcccaccagagacccgctctcaagggagaccatatctgactcagtattaacagaaacccaacctgcaggagaagcttcctcttaggggctggggtcagaggggggtgcagccaggcaggggctgatgtcaggcctgagctatgtggccagcggcgccaaccagcccacagtgcctggccttccctccctgctgatgctgtaagaaccaacccaagttagtcccgggaagctcttcagccagctccttttgtagttaaattcggatgtggtacttgctcttagaactcaaggactcactcattttctccaaaaaacatgctaaaattatgtatttcactactctagaaggatgcagcctttaatttaaaatgatttatggagcttcgagtataagcccggcagcctgtccaagctattccagtgggtcctcacctcacccctgtgaacaggcatcgtcatcccttaaggattggaggaaggcaaggagggctctgccaggccatgccatttgtctgacagccacactctctagtaaactagcaggtgcggtatttgaacttccattggatcagaagcccacgtttgctgagctcactgttctgctgctgctgcttgtgtttctattttctcatcagtagttcaggggaattgtaactgcagggacaaccctgtgttgaggcagctcagactaaagctctctgttgagttatggatatggcctccacaagcattgccatgctttttctgtgggtttgtttggtttggtttttttaaacttttgcactaaaagcagtcagttcctcctgtttcttcaccagtgaaacagcattctgttttgaaagtatagtgacagtgctaggcttttgaaataaagaaggtgagtgggagcagaggtcaacctgagaaactcatcacaagtccaggtggaaggaaagatgcgaccctaactattagaaagccagtccccatagaggtgcactttattagattaggcctctgaccagaacatggacttagccagcccacttgtctatgtgggcttaaaaactggtctatgtctgctttaaaaaaaaaaatctagttctatcctcatttcctatagcttctgaagaagatagctctgaactagaagacagaattctaatttaaagcctagatttatggaacaacttgaagtcaagaaggtaggaggagataatacactggtttaatccatgtatgttagagcagtcattcttaggtgaaaatgaccctgtgaatgcatgcacatgtatccctttagtatatggagatactactcatctgtcttcttcagagggtggttcttcagttacatagagaaaagctaatgagaaaaacaaatagttctcagtcactttccttttgcccatgtgctggtgtcactatcctttctagcactttctagacaagtgcaaatgataaacagtgaatcaatctcaaaaccgaaaaactgcccctgtaaatgattatgttctctcatggagaatttgcattctatttagactaccctttggagcacttccaaccaaaagccctgctatgcagaggttcctgaatacatgttcattgcctggcaccagcttggctctcctggttggagagacacgggctcgttcctgtgtgtgccagctctctattcattccaggccacatactgggcttccctcccagagagccatcacctactctcacccttccagagtggtacatggaagaacagacaaatgctttaataagaagtgtgcagtttgggggccctacttaaagtattgggatcaacctcttcacggacagtgtgctgcgctcattactgatgacccatgctataggatgtagatggggtgaaatcacttcctgcttcaacacacgttcctcactggtgggtgttcacatcccaccactcttgctttagtctttttcaacccatgggggatatccaaccaaagtttctggtagagaaatcttcattttgcagaacttgttgcaatggtgtggttagtgttttcattttagtaaaatgatgtttatttctgacttgatgtcagtcttgggaaatccctctgttttcaaggcttgtttcaagaaaaacaaaatttgtccaaatccaaacatgttagtaatcttaaattttctatttcattcagatactctccacagactatcagcagtgatacaaaagagccaactattcatattcctagaagtcagtagcagaaaagagacagtactgtgcttatttaagtgctacaaaccaaaatgtatgttttctccaaagagcaatttaacaatttgaagaaaaagtacccttaaagtcaatttccacatatttcaaaggtcacttcgatttacgtatctgagtgttttttgtttgttaatagagaaatgatacggaaaatgtggttagacaccggagagtatagcgcatatagaaaaggtgattgaaatgattcccggggagttaaacaatcacaactactctggttcagatctgggttttttttgtttttgtttttgttttcaaatgagtatttaagctggctctagcttcaatatctagtgtgacttgtttttaatttttcaggtcacagtttggttcaagcccctgagttatctgggttattttttaagataaagagctattctggggccaggtgcagtggctcacacctgtaatctcagcacttaaggaggccgaggtgggtggatcacctgaggtcaggagtttgagaccagcctggccaacatggtgaaacccagtctctactaaaaatacaaaaaaattagccaggcatgatggtggatgcctgtaatcccagctactcagaggctgaggcaggagaatcacttgaacccgggaggcggaggttgcaataagccgagatcatgccattgcactccagcctgggcaacaagagtgaaactccatctcaaaaaaaaaaaaaaaaaaaaaactcttctgagaggtgtagccagggaggcatgttagtgccaaacagagattaaaaccttgaatcttctgacttctgatctagtacatgtgaccctatcgcctgaaggaacaaatgtccttgtagagttaacaagaggcagagaaaaagaagaaagattgtggtatgcaaaaggatacctatattatttccaaaaattaatttaaatagaagaccacgacaagaagcacttggttttcccctgtgggacatcttttgttgattaatttttactttagggcatcaaaatggggtcaattatgttacatcaaccaaaacaaggttgacacccctggagttgtgactctctgaccctgagcccctgactccatgacagcctgcacaagggggctgttagctcagtaattcggaaagaccttgctcacaaggtgggtggcggatggcatcacaaaataagtcacacgaagatgtctgctccagagtattttttgaccatattcctagagtctttctacctcccaggcaggaaacctcaccaggtaaaagaggaattcatgtaggaattgaggaatgtcacccaaaagacacctaaaatgctgcacgaattgtgtggcagcatcaggctctttagggcacacctatgtttttccacccctccactccagccaaaaggagggttcccactggctgcctctgtgaggccagcaccgcatagacgcagccctccctggtcctcaggtcctacccacagccttgtctcactagctcagtctctcaacagggaacaaatggtgtagacacagcccccactctcttctcgcagacacagtatccactttggagcttctcagttattgtccaggcccaggtgaagtcacagccacctcctctgtagagtcaaagcgtatgaattaaatgcatccctgtttttaaaagagccaagtgagagcactggtaatcactcctcgtgggcggccctgtgtggtttacaaagcactttaatgtataagaatcccttttaatcctccgaatgccttgggaggctccatttattgccctcacttctatagatgaagaaaccaaaggcgtagcaaggtcaagccaagatgcaagcgcgactgacacggtcccttggcaggccttgtctatacttctggtggcagggaattaccgctgccttccagttggttttatgtggcgggaaggtgacctcagaggtgaaggcacatcacaccagagggtactgctgtctgcatgactcatcactgaaattgttctcccaaccccctgacccaggccatgtatgccaggtttctgccctgtaaaattaaagattcccttctttccatactctgttctttggaagcaagtcacttagcactgcccacactcaagggatggagtagaattaagctccacctcccagaagcgggaggatctacataaattatttggaattcttccataagggagattggtctcttcttccctgctttcatttttcctggccttttactaaaagacactgaaatcaggctgatggattccctacatcaaatatcacacagatgtagcccatacttttgcagactagctttccttgaagcccaccaaaatgagcagaaactgaagtggatcaaagccccagtgcttgttatccttatttcggcccctttccttgctgggctaatgggatcttccttaaaatcataccgtgtccttcagtatttattatttatgagccaaagtgtgcatggccaacaatacttaaaaccaacccaggttacaggacatccctgcagagtgacagggtgccccacacctgcctgccccatgcctgggcggtgatttcatcgctagagttacacacctgtattctgcagggtaaagagaagaaacataattccatgtcttctcccaaaggaagaattctctgttaaacttcacacttttggagtgtgtgctgcatgagggcctcatgctggggacttcaggtgacactagactgcaggaaccccagtgtggttttcagagggcttcccctcaaagagagaagactaattgactctatgtcagggcggagacaacaaagaaagcagcgtgcttacgaggtgtcagatgcatacaattgctcctggtggagacgccacccagtcctcccagcaaccaccccgggaagctgtgcgtggccctattttacagatgaggaagctgaggctgggaaaggtcatcttctttgacggtcagaaaccagaaagctacccattcagacttggcatctgacctgagtgcctctgcaaccccaggtggcctgctgtttttttgcgtagtttgtaatagaggattagcaaaatgctgtcatggcggccctggtgtcatattttcaagatcctgccttccaccctcctcagccaccagctctgctcacataagatagagaagtttcttggctgaaagtcaggggcgagtggtggctcagaggaagggctcaggcaggtttgaagccctgactctgctgttcccgacttgtgggtgcttggtcatatttcttaatatctctgtgcctcagttgcctcaaatgtaacacggtgttgtggatgccattgtgctgtgcccactgacacttgcttaccagtctgacgtccagcttccagcacctgtgacattttgcatgaggctttcaccagagctctggcccagggtgggctagaaagcctggggaattgatgcccgtccacctccaggagcagcctcaaccagggactgaagggagcatgtgtatccataacccagctgcctcttctccagggggagcaactgtaaggcatgttcaacgccacctcttggagctccccagcagggctgagatccacctgccagtggtgataactggcttaataaagcaaactatattggctgccttctctccccagtcagtgcttcctgggatcacttctcaaatttaaccactcacactcaaatccttgtctcaggattggcttctgagagaatccaaactaagacaaatggggattatgcacccattttagtcaaagaattgtttaaatacctgtaaagtgcttagtagacatactgagctttcactcaatgttagttctgatccttaatccaataatacagccaaaggagaatatgttagcacataaaaaaagaaagcatcaagttgttttgccctttttgtaccaagagaggtctatgtgccatctcctgacttgtcggaaatagaagttacctggtttgcatttcttctccaccatctgggaaagtcacctgacttccaagcttcatggccatctgtaaaatgaatgacagaatgacagtagtcccagcgtcgtagggctgaagtgagggttaatgaggtaatacatataatattagaataggaagtgctcaaataaatgcccaataaatgttagcaattataaatgtttacattttcacaatttgacttccctacaaaaaaaaggcccatatcttgttatcaaacattagcttctatttctactactttacctttttaaaaaaaaatcagaatgctagaactaaaataagctaagaggtcacatgatctaaactcatggatttttaaattttaaatatgtttatgtatttaggaagtacgcatgcagaattctaacatgcatatgttgcgtagtgatgaagtctgggcttctggtatacccatcacctgaataatgaacattgtaacccaataggtaatttttccaccctcacctccctcccaccctaacctcatgttgtatctttgtcaagtaactttaggttgtaacctgtacattttttgtttattattattatacttctagggtacatgtgtgcaacgtgcaggttttttacatatgtatacatgtgccgtgttggtttgctgcacccattaactcatcatttacattaggtatttctcctaatgctatccctcccccctcctcccacccaacaacaggcccccatgaagctggaaaccatcattctgagcaaactatcgcaaggaccagaaaaccaaacactgcatgttctcactcataggtgggaattgaacaatgagaacacttggacacagggtgggggacatcacacacctgtacatttttaatacaatcatgtgttgtttaactacagggatacatctgagaagtgcactgttagagaattttgttgttgtgggagcatcatagagtacttacacaaagctagatggcatagcctactacatacctaggctatatggtatatcctgctgcttctaggctacaaacctggacagcatgtgacatactgaacagtgtaggcaactgtaacacaatgctcagtatctatatatctaaacacgtctaaacacaggaaaggaacagtaaaaatacggtaacagaatctcatggggccaggcgtggtggctcatacctgtaatcccagcactttgcgaggctgaggtgggtggatcacctgaggtcaggagttcaagaccagcctggccaacatggtgaaaccccatctctactaaaaatacaaaagttagctgggtgtggtggtgcatgcatgtaatcccagctactcaggatgctgaggcaggagaatcacttaaacctgggagatggaggttgcagtgagccaaaattgtgccactgcactccagcctgggtgacagagtgagactctgtctcaaaaaaataaataagaatcttatgggaccaccctggcatatgtggttcatctttgaccaaaacacgccattatgaagcatgtgattatattacatggtttagactctgggtgtggttagattccctggagagtattgatttttactttgtgttgtttgaacaatcaccaactcagttaggttcagactgctggctctgtcttgccttctgtggacaatgattctgatggctgtccagacagtggcagtgagaggggaagggacttggcctccccacggctcccagggctctttctaacacaagcaatttctccagtcttcagctttgcctctcaaagtctcactgccttctggccagcagtggaaatgcagaaagtgtacaaacaaagccactgaattgctggtcttgtgatgtttccttgtctatctccagcctctggaatccatgcagtaggtggtcagcatgaaggaaagggtcaaggtttctgtctctcttccttaatggaggagtgaatcaattcttggagaagtaataagagtgaatcacttcttgtctagaagccaacacattgaatacttcctataaattattacagtaagtgacatttagtcaaggaaaagccagcaattgctatggcctctaccactttcctcttatggattattttggggccagttgatataatcttgataaatattttcagaaaacttgtttccagttttgatcatttagaaacatttagtttctaaagttcaatatgttgtggttcaaacgattttttactatttgcttgttactagaaaaatagaaaagaaatgagtgaggctgggcatggtgtcttatgcctataatcccagtgttttgggaggctgaggtgggaggatcccttgagaccaggagttcgaggccaacctgggcaacatagtgagacccccagcatctcaacaacagcaacaacaaaaagaccttaatgagctttaaaagcatatactcatcttactcatctgtaaaggtttcaggtgtttgttttgcacgcgtgcttgtggatgaatacagttgacattactccaagaactcaggaaacattttatgagttccagtcctggctctccctcttgatagctgcatgacaaagatgtccttgggtttcagtttcctcatctgtgaaatgaaaacatagtaggcctccctggatggagtttgtctgaggatttgaagatccagtgcaggtaaagtggctagaatagtgtcattgttctgagagtttaaaaggttttgtttttttgtccaggaattaacgattaatgcaaaaagagatcatagaaaaaaatggagagtagtaatttatgagaaatgtgaccaatttgttctttcctcttttgtctgaggtggttcatgttatgaaagatcgtctgttccttgggctcctcaaatcctttttccttctcgctttatgagcagaagcttgcttttcctattggagagagccagctggatcgtgggtccctcttttcatttaggctcttgtcccctactctttatgtttattaaggatttggggagggtggggaggaggagtgggataaacctctgaaaaaaaaatgcagggaccagtttccttatttttaaattatggtctttaaagaaaaatgtcctaaaatctaccactagcaattactttttcattttattttcagaaaacgggctactcccttggcaattggtcctaggtttcaaccctcctaagagatttccacagccccttttatacccaagggtggaattcccctcgaaggccagcacccctccctggcagcaaggatgagttgctcaagggagcctgtccaacttgctagtaacgacttttctgatgtcatcattccccagaagcagctgcgagccttttggggatgatttgtattaacactctggcccagaggtgaccgggctcactctgatgataacagttgcccgtggggttcaaggtgaaaatctcatccaggtctttagttgttttctgtttttctgattcatatacatttattgaggtttaacttacatccataaagtgtgtaaatcttaagtactcggctcaacagaattttacacacatgcacacccatgtagacacagtccagatccagatccagaacatctctaatccctggtgtcctgtcctggcccagatcctccccaagggggactgccatcatgacttctgtcccacaggttagttttgcctgcttttgaacttcatataaacgaaatgctgtaggagatactcttgtgtctgggttctttcacacagccttgcgttcatgagatgcatccatgttgttctggagcagtaatgtgagctttttcattgaataaatacattccattgtctgaatttcattgtagtattccattgaatgaatatatccaatgtattcatttctgtccaaatgggcctttgggttatttccagcttggggctattataaataacattactatggacattcatttacgtttctaattaatgactgacatggcctttgtcctcccgtggtgaccctattttaaccaagtagtggtcacttacaaccatgaatgtagctttcagaatgtttggatgagaggaataaactggcgagtatttataaagtgacttgaactttacaattaaaagattatttactttgaaaagctgtataaatggttatttaaaatagttgtgtggcttctatcaagccattagtcatctctgagcctcagtttccccatctgttaaacggacataatattagtattgtgcaaaaataatagaattattgcaaggattagatgatagtgaagtaaagcacttagatggaggctggcccatctgagcactcaatattaatttctgttattaattttttatcataatgatgatataaggtaaagtcaaagatgctatgaagttgcacgagcttattaacacaaagcaaccaatgtaaaccaagtaatttgttttaatgccagatgtgaataagttgttctgctttttttcctactttataacctccttcgcatcaaccttgatttctatagttatataaacctttgtatttaaacaaagagatctcctggataagttggaagaggagaaagaaaaaaacaacttgggctggggaatctgatgattgtggggtcagcgttaacttttggcctcagttttaaccttgggggactgttttcattgtttgtacctctgcgttagatttatctttgtccctggccttctaataataggtaatcatttgaattcaataagatctgatccagcgtcaggaattccaaaggccagagagacaactcaactatttcttttgctttttcttttgagacagagtctcattctgtcactcaggctggagtgcagtggcaggatctcggctcactgcaagctttgcctccagggttcaagagattctcatgccccagcctccagagtagttggtattacaggtgtgcgccacaacgccaagctaattttttgtatttttggtagtgatgggatttcgctgtgttggccaggctggtcttgaacccctggcctcaagtgatctgcccaccccagcctcccaaagtgctgggattacagtcatgagccgccatgcctggcctaacttaactatttctgatcttatatgtaagtggacccattggcttcccaaatggaataaaattaaggtgtcatcattttatgcgtagatgctgcagcagaacccaaggggctcagatgagaatgtgcaaacgtgtgaggtcaaaaagctgctattgacaaagcagaggagttattattatataaatagccttcagcccgcatctctggatttatggtactggtcattttagtattagccaagaaagctactccactgggaaaccattcaatgaaggagggaagaataacgcctcccacacccaaaggtgtttcctaactcggaacagaaacacatttcacacatttttaacttttaattttgaaatcatttcagatttccaggaaagttgcaaaaatatcataaagaaatatctacccttcactcagattcccaaatgttagcacttcgccacatctgcctcattcttctttctctctcttcacacacacacacacacacgcgtgcacacacacagatacatgcacgtacacatacatgcacacaaatacgtgcacacacactgtctctcattttttctgaaccatttaagttgcagacattatatccctttacccctaaatacttcaatgcatatttcctaaaaacaaggctattctgtttaataactacagtataattatcagacctagaaaattaacactgatgccttgttagcactattaccttatctgcaggctgtattcgatgccccactaatgtcctttatagcaaatgaagaattttttagtccagaatctgatccaagatcacatactatatttaggtggatctatttcctcagaaaacattctttttttttttttttttttgagatggagtatcactctgtcacccaggttggagtgcagtggcacaatcttggctcactgcaacctctgcctcttgggttcaaacaattctcctgcctcagcctccccagtagctgggactacaagcgtgcaccaccatgcccagctaatttttttgtatttttagtagagatggggtttcactatgttgatcaggctggtctccaactcttgacctcaaatgatctgcctgcctcagcctcccaaagtgctgggattacagatgtgagctaccacgcctggccctcagaaaatattctaagagatgttgaatgctcattattagaaaatccttcctttaagataacatctttgctctcctgttaattggatgaccagttgaaggactaggtcaaaagaatgtcttctagcatatttgcctgtacttacagggatagggcatgaaagtaattaaaacaaatatatttcattgtattgattatatgcaagttagacatcattggggaagattcggtcttcctggcttttcagagaaaaatgttaacatgtgagttatggcgctgcttggtgttgtctgttggttggatgttaaggtgtacaatttgtgtgcctgcaaccaatgcatagagttgcagatgtccattgtaagaaagcagatgttgcatttcttctttcttcagacaatagtcatagtagctacactttctttggcagatgtggtgctggaaaaagccatgcacaagtgcatcttgaagcccctcaaggggcacgtggaggccatgctgaaggactttcacatggccgatggctcatggaagcaactcaaggagaacctgcagcttgtgcggcagaggaatccgcaggagctgggggtcttcgccccgacccctgattttgtggatgtggagaaaatcaaagtcaagttcatgaccatgcagaagatgtattcgccggaaaagaaggtcatgctgctgctgcgggtctgcaagctcatttacacggtcatggagaacaactcaggtgaggccgctggaagcccaggcttcgtgccgcttcccttccgggccggggacaggcctctctcctgtcaggctttctgattcccaatttctcctccctttggtctcttgatttcaccaagtggcttacagaactacaagtgattctctgatatccggcacattagtcacatgcaacagattaaaatgtaagcagatgagggcaacaagatttttgtaccaggccgatttaattaaagatttagttcagagtatggttacaaattcagtctctggagtctgagttcaaatcttccctccgagaagaagaaaattaactgagggactttggcccccttaatcaaccttgcacgctgtagttttctgcgtctttagccggatgtcaccctttctttcatgaggtggggattagctgagacagcccacacatagccccaagtgcaatggaaatgtcagcgattatcattacaacattttggccaatgagggtttgtgtcaatgacctatagtatgtgaaagaaactctgaacattcagttataatgaggcctcattagagccgcttcattggctagcccttctttgctacaagctgaagcaatataattgaaattcaccgaagagttacaatcttggaaagccagccctcagatttagccttgttgtttcctgtagatgcaggggtaaccatgaatcctggatagtaatggagccctgcattgtcccaggtcttcagtaagcttattgtaattctgaagacgattacgaacttttcttctgagtgaaattgcttaatggagaagcagcagagagaaaacacaggctgtattaaccactgcttgagtagacaggaatgtgtgtgcactttgggaattgttgagtgaagaagttaaaatatgagctcctgggcgtggtaatgatagcaagtgaacatcacctcacaagtttgcaagcatatttcacatataggaaacatattttctatagttcacagttatttataaaaattccccaaataatatctgaatatctgaattccccaaataattcagaaggattatgctcttctgaagcacagttcctcaacacacacactaaagacattaatgtagacaggataattcttcttttgggggctgccctgcttcctgtaggaagtttagcagcattccagatgtcatctgcatccccaccctccagttatgtcaatgaaaaatgtcttcagacagtgccaaatgtcccctgggggacaaaattatctccagttgagaaccactgatgtaaagaaaactagaagtaaacactaacattttttgccatatatttccattaatcaatgtgtatattcaacatgtactgaattggcacgtttaaagaaattaactgtgtgctcacattaaatacagagcaaagttagcttattcctggtttgagtttgaccttgtcattatgtttgtaaataatgtgcacagcaagaaagaggaagtaagacacaaagaattagcataagtaaatattttgtaagcattttataatcttgtttgctgaaagttaaaatattttaacgagtattctgttctatcacataattttatacaaattataaaagtagggagaaaatctgtaatgtgttcattggttcatagacattcattctgaaactgtaagggctggtctctaacattagcagctgggagggtcagaggctacataggattccagaaacactcacctctgtttataaatagcacagttccccccagagtgactccttgctgtctaataaaagcagcaagaaggatgtgaaagaaagaaaagttggtaaaaatattccatctccttctcttcctgctctcagggaggatgtatggcgctgatgacttcttgccagtcctgacctatgtcatagcccagtgtgacatgcttgaattggacactgaaatcgagtacatgatggagctcctagacccatcgctgttacatggagaaggtaactgcttttgagaaaagttgaaggaactgggtgctatttttttcatttttttataattgagacgaaattcatgtcacataacattaatcattttacagtgaataattcagtggcatttagtatattcacaatgtcatgcattctccacctttatttagtgtcaaactattttcctcaccctaaaataaaattctgcacccatgaagcagttacttgggtgcttttttgacatcttaagtgttaactgaattttttattaatttaaaagagtgtactaacctttttctgattgcaaaagtaatacacactcgtggtagaaaatttggaaaagtcaggaaaaacacaaagaaaaaatataaccccatcttaactatacttcactaagattgcttaatggcaataaaaaaaatacattcagtagaataaatgccattttttttggaagaaatggtttctttggctccaagaggaaattataaacttttgttgaggatatttccattgccaggaaaataacctgctcttatattagtgaaatggataaaagcttggctttgtttttattttttaaaatttcgttttcaaggtgaaaacagtattaatttttttccagttttttttaagtatcttttcatttttatagtaaaaatacaggggtgtggaatctgtgcagtttgctctcaatttacgttggcattcgggttccttctccttgtgtctgcctaaccccaacatgtcttagcagaaattccttctccttacacatagcttaggtattttacatggaaatgattaggatgtttggcacagtagtgcacagccttgaaacgcagaaataactgggactctatgtgagcttatcttttcaaaggagaacaaatcagggcctgtgcactgtgaatcctcttaatccatttttatatatccagataaaagcccagacaagccctgggggggattgtcacggtttcgtttttttttttcccgtgagtttcagtctgggcttgagtagaaaggtccatctctgacaggattccctaaggaatgagtcatcccagcattttccctggagggaatgaaatgcatttttaccacccccagaatgtgcccccttagtctcctcagtcctgtaatgtgaattcaccaggccttaacttttcctgtcggagggaccgccctccttggagcccgattatgcccttcccacgtgaccatgggtagtgctgactcaggatgggggatgaatatctctcctcccgtacccgatcccaggcaggtatgaatgggcctctttcatgctttcaccctttagcctcttctgtccccttattaatattactaaccatggaaccagacactccccgatgagcctccaaggccctccctggagcttttcttgcctgctctgccctgggattagacaggacaaggccaaacatgtggttttgcccagggaccaagagaagcatgttagtctacatagcatgctttccttccttccactgtaatgtttgttattaatacagtttggggtttggttattctttttcgagcttcgatcatgtttaattctagtaatataagtatgtagagctcttagggctttggggaaaaagacacgccggtttcacttagaaagtcgattctgttgctgacaatgtgcactcaggacaaacattgcttgtatcttgtggctcaaggatagaaacagctacttcctgcccctttcccagattggcccagggcaaggccctgtgttgatgactaatggacaggtggctgtcttctcctccacgaatcccacaagaaagacaagggcacagctagtgaggatacaaaagctgctggtgagctcgcacttaaatagagcctgcttccacttaaccgtgtctggggcttcttggctgccttccttgggaagtaggcggcccagttgggttggctgtgatcacagaccaggcctgcacagcatcgaactgaagctatgcagcctgggaggaagaggctactgagcagtggcaaaaatacagattggacttttccgtgcctgcccaaagtcctctttggtttgcggggtagcagccacgtctgttttccgctgtttaagcaggtattctcatttaccaaaaaggcgtcatagaatcccttagaagtgcacagctcttgtggtagggttatagtcttgctgaaatttaaaaccttctctaattgcatccacatgtttcaaagtgtggtcaattttgtgcttccagcatttgagttttctccttagcgtcctgaacagatgagagctagggagtctaaaatttgaagtccaaaggagcccccctccacccccacaaagattgtaacagttctccgagtccttgctcaaatcctgaccctccatacggcctttcctgaatacttatgttcatattgatttctcctgaaattctccatgtagcatctgtattctggattactgagtttcacacacagtcacatgctgatttgtttgtggggcgaatatttggtaaagatcaacaattcaaaactcttaactagggtgattatactgtaggtggcaaggtctggaaaacccttcagatcactctatacacaaaaagcttgacatgtgatcaatggaaagtgcatggctcagggtgacccagattatgccgcgggaaaaaataacctcaagtcttcatctgcaacctgaaaacaagaagggtatttttctttctcgtgttcatgtccagcacgagtttgcagggcgtgtggctcctgatccacatggaggggacagttgccatcttgcatattgccacttattgaccagagagaggcttctgcagggtctcacatgaataaagctaaatactttggccctaaaggtgacacttctgcacaaaactcatttcgccaaactaacttctggtccctgcaggaataaattgccagtgtctgttttttttttaaaaaaaaaaaaaaaaacaaaacacattcataaacttctggagagtggggactcagattctatttcttacaaacctactttcttctctgtagctgtggctcacagtagagattcaatgagtattttgacaaagaatgtctctaaatctaaaatatgctgtgcccaattagggaatttttaataaacattcagggcgacccctagtggctcttcagcgcagagaccataagttcctccccaggcacctaattatatgttaggacaaaaactatgaaggaatacatacacatcttacagtgtcgtcagccctttttacactcctcaagaacataagagatcattcctaaatacaccatcacaggaacatcactttcctgtaaattattttatcctaaatgccagatgttatgttagtcccaaaggaaggggggggtaagaaagggaatcaagggagagaaattatttttgaagtgtccacatttttgcgaacagttctttcaaagtgtatagtttacttaagatttagaaaatactcattgcgttttttcctttttacttttttttaaaccaaattcttgtttatcagagatagaaaatatcaatttctaaaagaaaaagccaagagcaagtgttgccacgagtctggactgatggaggggatactggccttggatcacctcacacgcctgactttccccccacctccccgtcaggccttaataccccaactactcctggcaaacatttttcataattgcactttaataatttcggctgggcatggtggtcatgcctgtaatcccagcactttgagaggccgagacaggtggatcagttgaggccaaggttcaagaccagcctggccaatatggtgaaaccccatctctactaaaaatacaaaaattagccaggcgtggtggtgcatgcctttaatccgagccactcgggaggctgaggtgggagcgtcgcttgaacctgggaggcggaggttgcagtgagctgagattgtgccactgcactccagcctgggtgacaaagcaagacgccgtctcaaaaacaaacaaacaaaaaaacaaacaaacaaaaaaaacactttagtggcttggtcagtctcacgcactagaatggaaatcccatcattgaaaaacaggaaccttgtcagcctggcttgtctgtgcccccttggcccctcccaggcctgggtcgctccagaaatctctgtgggatggctgtgtgaagggatggatggaggagtgagtgccatgctcttgggtgtgtgcttctgtgatcccacaaggaaatgcatgttgaagaaatactaaaaatacaaaacatgccttctaacgctggcatcccctgttatcacccgtgagcggaggttggcactgggaggacccactctttctgctcttttcaggaggctattacttgacaagcgcatatggagcactttctctgataaagaatttccaagaagaacaagcagcgcgactgctcagctcagaaaccagagacaccctgaggcagtggcacaaacggagaaccaccaaccggaccatcccctctgtggacgacttccaggtgtgcagctggccacccctttgcttccttcgtcctccaggaatgcggagctggctcacccagcacatcccagctcagaggtccccactgtgttgaattatttggcaggaaagggatatctcaaaccaccctctggccttgttacactgatctgttttctttacatttatatacgcatgggatacttggcccaagttttgctgtctttaagaaaaccaagttgaattaaggcagaatctctgcccaatcaagcagacgataagtcaaaaaggaggaggaagcacttggcacagacgttggagattttgtttcatcaggaaacagccgctgtgttacgcgatgcaattggcctagtttctctttgggaagagggagaggaacagcgatgtctccttcccttttctctcgcccactctccaaaacagaagaccccagaatctcagcagcagcagcaacagctatggcagccgtccacggcgcagagtgaccaggcgagcatctgagcgagtcctgctcaggttccctggccagggcttttcctgaccgtgagctgctgcttgggaatgtgggactcccagtgagcttgtttcttagaatggacaggtgggttagggctatagaaatctttacccaaggccaggcatcagggctcacgcctgtaatcccagcactttgggaggccaaggtgggcagatcacctgaggtcaggaattcgagaccagcctggccaacacggtgaaaccctgtctctactaaaaatacaaaaattagctgggtgtagtggcaggcacctgtaatcccagctacttgggaggctgaggcaggagaatcgcttgaacccaggagatggaggttgcagtgagccgagatcacgccactgcactccagcctggacaacagagtgagacttagtctcaaaaaagaaacaaagaaatccttacccaacacaattcctgatttgctcattgtctatgaaataatgagtgagttggcaaatgtctgcaaataatattttgaaggttttaaattaaatgataaaaccttcctgtggtttgtttctatgttccccatgatgagtttccaagcagggatgtggaaagcaagacagatttgtctacacatccagattcacctgcttttttttttttcttaagacagagtctcgctctgtcacccaggctggagtgcagtggtggcacgatctctgctcactgcaacctccacctcccaggttcaaacgattctcctgcctcagcctccggagtagctgggactacaggtgctcaccaccacacctggctaatttattttgtatttttagtagagatgggatttcaccgtggtggccaggctggactcaaactcctggcctcaactgatccacccgcctcagcttcccaaagtgctgggattacaggcgtgagccactgcgcctggccattttttttttttataagagctctgaaaatagagggtcagatgaggtggctcatgcctgtaatcccagcaccttagaggctaaggcaggaagatcgcttgaggccaggagttggagaccagccttggcaacaaagtgagactccatctcgacaaaacaaccacaacaaaaaattttcaagttaggtaggcgtagtggtgcacacctgtagtcccagctactcaggaggctaaagtgggaggatccgttgagcccaggagtttgaggctacagtgagccatgatcacaccactgcactccagcctgggcagcagaatgagaccctgtatcaaaaacaaacaaacaaaaaggcaagcccatctttgaaagccaagatcagctcattcttctccatgattgcagtatgctcagaaattccttctggagcgcataaacctaaagagtgagaatacacgcactgcactctccccaccctgttgcactaagaaggtccctgtgccactcagtgcctgcagacccctggggtgccatcatatagccatccagggaggggctgcctagggcagaacagaggaagtgaaaaaagttcattgttcctttccccacctgccaacacaccctcctccacctcttcacctggagaccctcagacaccatagagctgccttcttctgcagccgtcccctcctgccctcattgaccctgctcaccttggaggtgcatgccttctcagagtgtaaccgaagaaggaaatgttcagcactcggctcaggggtcaaagcaaaacctcagacccaaagctccatctggaacccctaaatcagaggccacagacacagaggtcttctcacatgggaagaggtagtacgtcttggtggtaaaggcggtggggctgcatctgccacgtcctagctgtgtggctttgggcaagttacgtagcctctctgtgcctcagtttctgcactagtcaaacagggattatgtagaccctgtctcttaaaaaaaaaggttcaaagagtgtcactgtcaatctgggcacctcccactagctcacctctcctgcaaagtcactgggctagcaaaagtccccactggaagcagatatgaaacatatcttacatgtgcagagctcactgtccttcccaagagctttcccttctgttatcccaggaaaccctcgtggtgaccttgcaggcacctgggcagagagccctccttcccttcactgctgagcagggttgccagatttagcagaaaaaaatctatttgttttctagctgaaactcaaatttaactggctgttctagatttcatctgataactccactgttaaggaaacagaagcaaagttatctggggtcacaaaatctaggagagcctgatgtgagtttaagattctttatgcctggtctgggctttgtatcttgtaaggccacaggtttacatgtttcatgatagcatgtacctggcatgattgcagcacctgagcctgcaaacgtctttgtttaattccctgcagcaccaccttgcatgtaatcagctccatctgcaaagtatttggcaaaatcaacattcttctccttctgactttttccacattgtgcccagagccactaggagccttgtattagattgaactacatgaaatcaccatttgggggagataaaaaatagtcaaaagtcagcgcattttgtgtgtgtgtgattcaacctaaatgattgcccttgcttaggatttatttaaaaagtttgtcaaaagtgaacacaagccaggtacagtggcatgcacctgtacacctagctactcaggaggctgaggcagaaggatcacttgagcccagcggtatgagtccagcctggagaatatagtgagatctcatctcttaaaatgaaaagaagaaaacaaaaagtgagcacagtacgtgcttttgtgtctagatattttaaatctctttctgctgacttccttcatactcttgtgctatttggtttagttttcaagctgggaataaacccagcattggatgtggttcacactcttaagcaggggtttcttaaccagaccttatgagggaaatggaaagatcagaaccagggctgcatggacttcctgcttcttacagttgcaatgaatcatgtagtcatcttcgccactgtccaaagtcagatcagcctctttccttgccattcgaagcctcgtggcctgacatcggacattatgacaggaaagggcctggaaatggcttacagttaccccctcccctggtcccccatcatgctcactatctagttttctcttctgactgtctcaacattcctcttccacctgcagaattacctccgagttgcatttcaggaggtcaacagtggttgcacaggaaagaccctccttgtgagaccttacatcaccactgaggatgtgtgtcagatctgcgctgagaagttcaaggtgggggaccctgaggagtacagcctctttctcttcgttgacgagacatggcagcagctggcagaggacacttaccctcaaaaaatcaaggcggagctgcacagccgaccacagccccacatcttccactttgtctacaaacgcatcaagaacgatccttatggcatcattttccagaacggggaagaagacctcaccacctcctagaagacaggcgggacttcccagtggtgcatccaaaggggagctggaagccttgccttcccgcttctacatgcttgagcttgaaaagcagtcacctcctcggggacccctcagtgtagtgactaagccatccacaggccaactcggccaagggcaactttagccacgcaaggtagctgaggtttgtgaaacagtaggattctcttttggcaatggagaattgcatctgatggttcaagtgtcctgagattgtttgctacctacccccagtcaggttctaggttggcttacaggtatgtatatgtgcagaagaaacacttaagatacaagttcttttgaattcaacagcagatgcttgcgatgcagtgcgtcaggtgattctcactcctgtggatggcttcatccctgccttccttcctttctttttccttttttttttttttttttttttttttacaaagagccttcatgtttttatatatttcatagaaatttttatagcagttgcaggtaaactgtcaggattggttttaaaatatttttgtaactttaaaatattctataattatgcatgtgattttaacatttaatattcaaaaataaatctcttgctggatttgagagtattgcatttttaaagtctctcttctgtaactggatgttttggcaactttgtggggagagactgctggatttcttaaagcaacgtattcctgacactggccacagaatgcctttggaaatcggatgtactgttctcttgttcacgtttagtggtgttttgctgttttgttttttaaacaaatgatgctgagaataaggagagaaatgaatgtagagagaggtagagagagaaatatgaactctaacaaaggactgaggagtgcagtctgctggttcaggctcttcaaaagatgtagaaaaagagatagaaggaaccacctatgcttaaaatactgtaaatatgcagtgaggtttggcaaaatctattccatgtgtgatttgcttgtagaaacaattttgaaagccccttgaggaaaataaaaatcaagaagaacacttttctcccttttccatacaaattaaaacttaacagcatcaaattattgggaccagaaaccaagtaatgtataatgtggcttttgttgagttaaataagatgctatataatggagaagaatttgaaaatgcacaaaaaaatcaatctacattatcagaacctgcagtgaaattaaacttatgttaaataaaaccagtttgcaggtgcacaaactatgagggtcttgtatccacgtaacacaggtagttacaaaaacatgttattgtactgtgtaaagatgcatagtcatctcatttggttggctttgtaccttgtaccttttttagccttggcttttgttgaactagaaccctcagcacatactgtgttgtacttttgtaaatgattttttaaatggaattttgcacataatacattgtaatactgtatgataatcatgtgtgaaaataatttttgaaatatcctttggctgtttttttttttctttagagtaagaatatattcatgcaccacgcagtgtcatggacagatgaaatccgaaccagggtttgtggttagacaatgtatcgtgggggtgagcagaaaagctcacatttctcagaagctcctcctgatatggggcaaaagttaaggagcagaaggaaaagatcatcctcccacctgaaagtgttttcattgttatctagtgctgtacttggctcagtgggacttagagcaaatcacaggtaatttgaacccggagttagctggggtcctgcagacagccccaccctgtcctcacgtaacctctgcaatgccctgggtgacagttcagtgctgttgcaaaattgatagcgcagaggcttggactcctcgctgccatactccccatgcttggaagggtgcctggcatatattaatagtaagtgctcaataaatccttgctggctgaaggaaggaaaacatgagtttagaagggtttctaactcatcagtgggagagatccgtaaagatcagaatgagaattgaatgggctgcctgcttttgatatttacaacggaccaaaagatgacagctcaatccatatggttgtcctcccaactcttcaaactaagatcatcatgctttgttgatttaaagcaggtcacagcctctggatgcgaggcagccttgcagccttcggtgggacgagagcgggctcagaagaggaaaaggtagcgtgggcagaaagcaacatcacaagacggtccctggttttgtcattgggcaatgtttccccgttaaaattacaacacaacatgtgcctccactttttcccccacgcaggcatttctcacttctcaaattgccaggaaacagacttgggtgaaggttggagggaataagaggagagtaaaaatatacatgctgggtggaggaagaggagaacgcatttccaaatttaaaaatacattatagctgaggtgggaggatcgcttgatcccaggagtttgagggtgcggggagctatgatcccgccactgcgttgcagcctggacgacagagcaaccctgtcttccccctacaaaaaagtaaaaataaaaacatgttataaaagttgaacgccggccaaaggaagggatttttttttttttttatgttgcatgcgctgccaaatactttcactctagtaccacccccacacccccgggacacagaatagaaatagaaactgttgaagtagttcatattatgtggaggttacaacttcagatctataagaaaatacaaaggacaggaaacccagctatgaatgcttccattcacaaatgcggttccgtcctcattgggcagctgttaccttcatcttctttaagagacttgaaatgaggcagcgctccaatctttaacgcctgctcatgccgtcatgcctggtcacacctagtcactcctggtctcctaccagcagtctcagagaaacagaaacagcacaagaaggactccgaagggcacagtgtgtgtggaacacaggcattttaatcatctggcagtatctgatagtaaaattctaagtgtcctcattttttcggcccattttcatgatggtgaattagagaccaaaagtactttttgtcatttggttaactctaattcagttggaaatatgggaaagaaatcgcctaacattgcaaaatcctaaatacgtgataaggaaaggaaggaaagaaggcagagaggggccaggcgcggtggctcatgcctgtaatcccagtactttgggaggccaaggtgggtgaatcacttgaggtcaggagttcaagactagcctggccaacatgtgaaaccccatctctactaaaaatacaaaaattagccgggcatggtggcaggcacctgtaatcccagctactcgggaagctgaggcaggagaatcccttgaagccaggaggcggaggttgcagagagctgagatgaggacactgcactctagcctgggcaatagagcaagactcagtctcaaaaagaaaaaaaagaaaaaaaaagaaggcagagagggagggaggaggaaaacatctggcatttgtctcaagaaacaggttctgattagaaaaagatcgattttactccaacatcaaaaatggtggcagttggcacaaacctttcccccatgaatactagctttggaagaaatgtaggtatgggaagttaaaaatatatataattattctgaaaggtctgggcatgtaacctttttttttttttttttttttttgagacaaggtgtgactgtcactcaggctgaaatgaaatgcagtggtgctatctcggctcactgcagcctcaacctcctgggctcaagcacaatcctcctacctcggcctcctgactagctaggactacaggtgtgcaccaccatgcccagctaatttgtgtttattttttgtagaggtgaggtctcactatgttgcccaggctagtctcaaactcctgaactcaagggatctacccccctcagcttcccaaatttctgagaaagtgtaaccaaggcctcccctcagaagtctccctggagaagcttcagttggagtgaggtggttgggggtggagatgggggcagagtttcttatctcgagtctgctataaattctcccatttaaaagtaaaatttgcctgaactctgaggctgcatgtaagacacttagactatcattacattaatgaatctgagtatttcctttgagtgcacacattagaactactacagccagccctcatttctcactgctggggaacgggggtggtcagatcctgccacctgtggagaggggctcagaacctgaggaccacgggtggccagggaggagctcctagacggccttcacctctgtaaccagccttcggtttcctgggggaaatatcactacacataattagctccattgcttccctttcttcccatttccccaccatgattctgtgggctgggttttccctcacgtagtaggtttgagggtgctcttaactctattccaagcctccttgccaaaaagcaggctctgatccttttcacagtttgtttcttcagttccaaccagagactcaaaaagtgtgaacccggccccactgcaaacattacccgcccacactatctgtcaccaagacccagtgtccgttgttccatttgaataggtggctctcagctttggctgtcagcttgaagtcacccggagccttttaaaactcccaatgccccagctgcccagaccatcagaatctctgcagaggcgacccagccagccatatttattttaaacttccaaggtgcttctgctgtgaaaactactagtttagatcaaaatctggattttaatataaaaacacacctgcgagaagtaacacctttgcctaaccaagaccactgacacctaaccaagcatgcattctcaacctgatttggctggcagaggaccatggaacatgtacttctagcctggtgctatcccgtagaaatacgaagcaagccacataataggtaattttacatttactagtggccacatttttaaaaatcaagaagaaatatgtagaatcaattttagtaattttatttagctcatgatatctcaaatatatttcaacaaccaatcaattaaaaatattaaagaggcattttacatttttttattttttatattgtcttcaaagtcttgtgtgcattttgcacctacagcacatctcatttcacactggccatgtcttaaataaccaatagccacatgtggctggtggctaccatattggagagtgcagttctagcatatcaactagggatgatcttaaaagttaaaaaaaaaaaaacggtatgtgtatataaaataaaacacattcacaggttacatctacaaaggaacagacacatgcatcctgtcaaacgtatgtacctattactagccaaggatgaaaatagcatcttgcctcttcaggcactgctgtaaggcaaacataaattgatccatgcaaagtgcttagaacatccaggcaccacaccacaagcactgttaaatgttacttattatgattattagataatcgactgctttggcatttcacccctactgcttatttctgcttacccattcatgctattatctgctggcaagtttcttgtgaaacagaagaaaggcagtaatgggtatcaaaggtttaagaaaaatgtactggggcgggttgctcaatgtaggaagatcaaacataaagtgaatactagtcattaattttattttatttatttatttatttttgagacggagtctcactctgtcgcccaggctggagtgcagtggcacgatctcggctcactgcaagctccgcctcccaggttcatgccattctcctgcctcagcctcctgagtagctgggactgcaggtgcccgccaccatgcccggctaattttttatatttttagtagagatggtgtttcaccgtgttagccaggatggtctcgatctcctgacctcgtgatccacccgccttggcctcccaaagtgctgggattacaggcgtgagccaccgcacctggcctaactttattgttgttactgctgacggtggtgatggcggtgatggtggtgtgtgcgtgtgagttgggagtagctcattttccccagtattcaatgctggtcaagagcatcatcagggcccatagccaggggtgactttcgccaagaagggagaagggagcaagggaggttgcaaagacgtcttgctagcttcccagtcacgggcagatcgaaatcctaagaggaaccatctctgcctgcacaagagtctaaaatagtatttcccaaaaaggaattattatttaagtaaaagcataattatagtcagtgattattttaaccactttcctccacctttttccccttttactttattatattcacgaatttatatgtccatttatatcatttaacaggactattgtttaaaacttggtgctttaccaagaagaatacagaggttgacgtgattaattctttttatttctgatgtgcgtgcttccgatttctcaccacttctacaaattatgagagaatgcatttatttaccagattgcagtttccgtccattttatctttctcactcccatttttctctgcagcctattgatgtacgatcatatgcagaaaagacttatgcatctattatctactgaaagaaaaactacagaaaacaataaaatgctagagactctttaaccaatcagaaaaaaatacgtaagtgaagcagctacgacatcacaaagcttctatttttcgctagcacatgaaaatatgagacctgacaaattgcaaactctcattgaacagatagtttagggttttgccttgaaaaccatagtccacggatcaagcatcacatcttttgggagtttgtgagaatctcagacccctggcagacctgctggatcagaatctgcattttaacaagattcacgagcacattagagttggcttgagaagcattagttcaaggtatatttggggccttggcatttgtgcagctgatacaaatacacaaatgtaggaggtgtgctgctcttagaaccctgcaggaaaggagaagaaaatagctcataattgttttgctaagagtaaggcataacttcatttaaaatcacctacattatggacaaaaggcttaacaaacaaatgtcaggaaccaagtttttacctcattatatatattcaattatgttcttcttgctttgacagggaaaaggggcttgaagggcgtggggaaaagattctgaaaattaggtgggattgctgaagtcaaacttaatgattttgctgagtttgctggagagtggcttctctcacctccaacatctgtatgagggcaaacaggagcagcggagggggatctctctgtccgggccagctgcttgcacatgcatgtgtgtgcacgcacggatgtcgtcatgtagtctgcacaattagtcacattgtctgcatgtgacatgggaagtttataagcttttttattttcttaaagaacagctggtccggccacagtggctcacgcctgtaatcccagcactttgggaggccgaggtgggcagatcacctgaggtcgggagtttgagaccagcctgaccaacatggagaaaccccatctctactagaaatacaaaattagccaggtgtggtggcgcacgcctgtaatcccagctactcaggaggctgaggcaggagaatggcttgaacccaggaagggaaggttgtgatgagccgagactgtgtcgttgcactccagcctgggcaacaagagtgaaactctgtctcaaaaaaaagaagaagaagaacagccaacttccttttaaaggcatttcattccctgagaatctactaatcataagacccttttactcaccaacttcgaaaaacaaagatgtgtttaataaaacctcttcggtgagcaaggagtggatgatttaaaacatcgctggaaaaagctcctgtggaatccccagcagacaatttcaaagggaaagtatggtgaatttcgcagaactctttcatttctccaggtaaccattgtggacaatcctgagccctcatttgtttttccagatgacactggtttactcacatgattttgccttatgtttttcaaggggaaggaggattttaaaagaataaacacaatacatggttttcaaaatcaaatattggaagacttgcaatggaaggcagcagcccctgagcctcctcccaatcccatttctgttatctcctcccctaaactacgtctccagctgtgtattcattatttatctccatacttctaaaaagatgctgatactgctgcttattggtttctttttcttttctttctttcttttttttttttttggagacagagtctcactctgtcccccaggctggagtgcagcggcacgatctcagctaactgcaaaccacctcccaggttcaagcaattctcctgcctcagcctcctgagtagctgggattacaggcatgtgccaccacacccggctaatttttatatttttagtagagaaggggtttcaccatgttggccaggctagtcttgaactcctgacctgaagtaattcacccacctctgcctcccaaagtgctgggattacaggcgtgagctaccatgcccggcctctttttcaatattagacattaataattgattccatatcatggaaggtgaggattgaaccttcttgtatggtggtcctctccttagggtgaccatgtagcagcctggtcatatgtcaatgcctgtggggcttttctcctgggtcaggtggtttccccacaagaaaattctccagtatcctacgggcgccgggtgcaaagtggggttaaattttgttgccagcgttctaggagctaagcaggcaaggagcctgtgggttttcagctttccgtctgccagctttcacctcctcccatttccaatgcagtgtctcaacgtcacttttcgctgcctgtgctctgacggctcagggacatggcttctgggtctctccaggagtgaggcgctcatcttctcccttcactcacacctgccagagctcattcctgagcccgctcagacgctgcatagggaatcgattgccttgcttcctgctggcttttccgcctgacattggttaacatctagctttctcctgtctgctgagttttcaagcccgcaaaattttgttaccagttcccattggctgctgtctcctcttccattctttttgttcctatggatgtatgcccttttaaaaattcctttttaaattttctttaattctcattttagtgaggtattggtaggggaaagataggtaatgcagcctgccttgtttaattgaaacctgtagttttaataagaaaaaaaataaataataaaataataaagaaagaaacctgtagttttacatttgaatggtgaatgaacttatacatcctagttagcaaaactgaaaatagattattacaatgataggccagagtcaatgcatctatcttatccagttattattttatataaaaaatttcttatatgaagtcatccaaacatccaagctgtttaattgtaaagtatgctgcctaggatatatcaaaatatatatttactgtgcactttgtcctttccatataatctgaaagaaaagaaacagagcaacaacagatgaaccatcaagctgtttgcttgttttcaatgtggaattttgcaatgatggatgtgaatctgggtcagcactgtttacagagagcacatggtgttttgtttcaatgagcaggaaaatgtttgccattaaatgtggtaaaagcttgtagttttttccaactaagcagtaaaagaaattactctgtgtagaatgataaataaagagttctatgagtcatctttaatgtaggggaaaatgtgcagccgggatagaaacagtgttttactgccggctaaaaataaaatcaaatgcactgaaacagaagtcaataacagcatgtcctagaagcccaagtaactgtggggtttaacgtagttcatgcttttcaaatatacttcttaaaatgatggtgacaaaaatggaaagactatgctgatccttccttctttccttccttccttccttctgtcccctcccctcccctcccaccattatttatctccatacttctaaaaatatgctgatactgctgcttattggtttcttttcctttttcttttcttttttctttttttgagacggtgtctcactgtgttgcccaggctagagtgcagtggcacaatctcagctttccttctccctttctcccctcccctctcttcccttcccttcctttcttttttaaaaacaccatgctggagtgcagtggtgcaatcatggctcactggagcctcaaactcctgggttcaagggatccccctggccttaccctcctaagtagctgggactacagacacataccaccatgcctggctatttcttcttcttttccttctccttctccttcttcttcttcttccttttttttttttttttttttgtttttgtttttttgtaaagatggggtctcgctttgttgcccaggctggtctccaactcctcaagcagtcctcccaccatagcctcccaaagtgctggtgattcttctgtttaaagtcagatttattaaggtataagtttgataaagtaaaattgactcatattagtacacatttgatgtattttgacagactcatttggtcatgtagccaccaccatgatcagtcccagcctgggcaaacattggtctgttttcttctgttcctataattctgccctttcagaatgtcatataaatggctgggcacattcactcatgcctgtaatcccagcattttggaagactgaggtggatggatcacctgaggccaggagtttgagaccagcctaggcaatatgtcaaaaccccatctctactaaaaatataaaaattagccaggtgtggtggtacacacctatagccccagctactcgggaggctgaggcaggagaatcgcttgaacctgggaggtggaggttgcagtgagccgagatggtgccacttcactccagcctgggcaacagagtgagaccctgtctcaaaaaaaaaaaaaaaaaaaaaaaaagaatgtccatgtaaatggaatcacagggtacacagacttttgattccggcttaaatattcatacagatgttttgataaaaacgtaacttttcgtttccctggggtaaatgcccaggaatgcaattgctgggttaagtgatagttgcatgtttgcatgttcaatttgtaaagaaactaccaaactgttttccagaggggctgcaccattttatattcccatcagctatgtatgagtgattctgttttgaagtttttagtacatttcagtgttaaactgctgaaattgtcagattcactaggtttaaaacacatgcactgttaaaaatgttttatttctgaaagtgttataattatatttctagaaatgttataattagactccagcataaattaagtcgctgatacaagggggaaaaaaactcatgctggccttattcttctcccccagaaactttaaacaccagaaaacaatggagtaatgatgtttacaaaatcttggaggagagaacatgggatccaggaatatccagccaatattccacttgagcatcctaagagacaagggcgctctgtgaatagagcaccagcaccatgagcccgaggaaaaacaaagcacagcaaagtcaaacaaacaaaagctcagcagagaaacccagccaacccatacatgcatcagaatgaagaatggaaagggaaaagctgtaagaagaaacaggaatgacaattacatccactcaatcatagacttaaaaccaaacaactaggtgatatatagttgaaaaactgatgtggctttatagagaatggtggcacacgcctatagtcccagctactcaggagctgaggcacgagaatcgcttgaacttgggaggtggaggttgcagtgagctgagatggtgccacttcactacagcctgggcaacagagagagaccctctctcaaaaaaaaaaaaaaaaagaaagaaagaaaaagaaagaaagaaaaagaccagtcacggtggctcacgcctgtaatcccagcactccgggaggccaaggctggtggatcacaaggtcaggagttcaagaccagcttggccaagatggtgaaaccccgtctctactaaaaatgcaaaaaaagtagccaggcatagtggcgggcacctgtaatcccagctactaaggaggctgaggcagagaatcgcttgaactcaggaggcggaggttgcagtgagctgggatcacaccactgcactccagcctgggcgacagagcaagactctgtctcaaaaaaaaaaaaaggcctcgtgtggtggtgcacacctatagttccagctactcaggaggcggaggcaggagaatcccttgaacccaggaggcagaggttccactgagctgagatcttgccagcgctccagcctgggagacagagcgagaccctgtctcaaaaaagcaaaaaaacaaaaaacaaaacaacacaaaaaaagagtaaatagtgccctaaattgaaatttctattaaaaaatctgattttgaccattaattatcctcattaggagattgaaattacatttaatacatatataagataatactatacatatcttaaactttacaggaaacttttaggagcttttattttgtgctgctcagcaatctctttattttcatatttatttatttatttattctttgtattattttttaattttttgagacagagtcttgctctgtcacccaggctagagtgcagtggtacagtctcggctcactgcaacctctgcctcccgggttcaagcgattctcctgcctcagcctgacaagtagctgggattacaggcgcccgccaccatgcctggctaaattttttttgtatttttagtagagatgggatttcaccatgttggccaggctggtctcaaactcctgaccttatgatccacccgcctcggcctcccaaagcattgggattacaggtgtgagccaccgcgcccagcctatttatttatttatttatttattgacatggagtctccctctgtcgcccaggctggagtgcagtggtgcaatctcagcaaactgcaacctctgcctcctgggttcaagcgattcttctgcctcagccttccgagtagctgagattacaggtgcccaccaccacgcccggctaatttttgtatttttagtagagatggggtttcaccgtgttggccaggctggtctcaaactcctgaactcaggtgaaccacctgcctcggcctcccaaagtgctgggattacaggcgtgactcaccgcgcctggcactctttcattttcatttgatttgtttttcttctgttaaattcaagaaaaaagtcaagtacagtaataccttatacttcataatctattaacatatataattagaatcccttttaagtaaaagtctctttctcactccccttaatctacatagagagatgactgaaattatctgagagttaacatggtttattcccaggtggcaaaattttcaatgatttgttgctttattctttgtacatttccacaagtctttgatttcttaataatgtgcatatatcctttttattaaaaagtctttaagaatgtaaatagccctaaaaggtatttttaaaacccataaaacaagtgtgtcaacatgtagacttttctggttgaagcaagacaataagaggaaagggaggcggcttccaaagccccacccatctcctctaagctgctcatcggggactatgagcaaacatcacccctccagagccatttgtgctaaggtctatgattgagggctgtgcctctcctaactctacatctccagattctgatccttcaaaatgcaagatacttaatttcattatttttcttaacaaacacttatatggcacttaaaatgtggcaagcactgttataactgctttacaaatattaactcatgtaatcttcataataatccaatgaagtaggtgctatgattatgcaccttttacagaaactgaggcaaagagaggtgaaatacctttgttgagaatgtgaataccctctttgtaaactaccaaggatgacattatcttctgggtaacctgtgtgccactttttcactcagctatttaatcaatatttgctaggcacttactggccacccttcgagatgctaattcataggaggcaatcagcaatggaaactgataacagtttaaaaataagtagacaaacaggagagaagggagaaccagctggtgaatatccaggatattctctgtactgccctgcacgttcccctgaccccatgtgttggaatggccacgtagctataggatatttctgatctgtgcctcaaaatcggaataataattcgtatcggtgcttgcaaactgctggcctacagcatccagtttctgcagggttccaatgctacctttgtgttaaacccacagtgtttttttctaaaaatcaaaatcatgtttattccaccattacctagatacaaacataaagtagctataaacttctaatgtttataataccaatgaatcagagccaaaaatattataaaaaccttcactacttcataaggaacaaaattcaaatcaacattagttcatgtcacacacaaaaaattatgaaacactttgaaatggccagaaaaagattactgtttagtacacgtttccaggttttctctgctttttattgtctttgacaatacaaaattttacaaatttgtaagctgaggaaaattgatagtaatgaaaatttttcttgtccataaaatacaaatgcatagtgttatacagtgcccaggagagacagtgattacagctctgtggatattgaccagtttaacactcatgtgtaaatacatttcagcattcctgcttgctttatgtattttatctctctttatcttatctttttgagacagggtcttggtgtgtcacccaggctggagtgcagtggtgcaatcatgtctcagagcaacctctacctcccgggctcaaatgatcctcccacctcagcctcccaagtagctgggattacaggtgtgagccactgtgtctggtctgaataaaggaatttttaacttttaattttaactactttaaatttaaaaactgatgtttggttcagcgatttgaaaacagtatatttggaaccgcttggatatgagaatctgctttttaaccatacattgatgaaatctaaatagagaacaagcatttccgatgacagctgctctctcagattgaaatgcactgcaaatgtaaaatacacaccggatttcaaagtctttgcaaaaaagaatgtaacatatcacattcctttttttattgattgattacatgttgagtattgattggttacatgttgaaatgatatttcgggtataataaagtggggtcagggaaaaatatttttcccaaataggaaaaataaatgggtaaaataaagcgtactatcaaaatcaattttacatttcgttttgcttttatttatttattatttatttttgagaccaagtctagctctgtcgcccaggctggagtgcagtggcgagatctcggctcactgcaacctccgcctcctgggttcaagcgattctcctgcctcagcctccaagtagctgggattagaggcgcgtgccaccacgcccagctaatttttatttctttccttttttttttttttttagtagagagggggtttcgccatgttggccaggttggtctcgaactgctgaactcaagtgatctgcccgccttggcctcccagtgttgggattacaggcgtgagccaccgcgcccggccttctttttgtttttaaacgtggtattgacattttaagatgacatctgcaactcgcaacactgggacaagggattctgggtcataaattctcccattcctcatttactctgcagcaccgggtggctgcgaactccgctcttctgcttgggtttccgcatcaccagcagcttctttccttcccaggtgtcgccgcctgctttctgcagccgctgcctgggaggggttccgaggttctgggcagccacagccccggaggccttacaggagcgacctggcaattcccgccgccggccgccagaggaagctgctttgctgctgtcgttgcccagcaactcgtagcccggaagcagtaccccgtctcgctcggttccgcggcggccacgctccgggagacttccggcagggcgggcgcggggtcttggcgaacggtcttcggaagcggcggcggcgcgatgaccacgctacgggcctttacctgcgacgacctgttccgcttcaacaacatgtgagtgacacgcgcctagggccagccgctcttggccgggcctcgcttcccggccccgccagctccggccccagccgcgccttcccggccggaccccaagcccggacggggacccgcgagaaccaccccccgccggccaacgtgggcgcctccctggggccacagggtccagggagaggtgggcctggagtcgacgcacgccggccttggcgaccttggccgaggtgctcaaactttgtctctggaccctgcgagctggcaggttctggggcagcgctcgggcctccgctcgtggtcgctgtcaggaggcgctggggtgatggggcgagctggagacgcggcctggagcccacgacctgggcttctcgccctgccctactgcttgctggttcgtggccgggccgcgcctcttctgggcagagggcaccgccgacggccaggccgcagagggggcttgcgaggatcggaagctggtcagcagctgttgggatgtgtacatcgtgaagcccacctggtggccgtggttaaattgtatccaaatgaaatgacactgatcactgcgtcccctgcagcagatgctgtctcagtcatggttagtgtttgcaagtttagttactgtagctgcgcaccccggtgtacacacctttcctctgtgaggagtcacggcagatcttaggggaggctcgctgtgcccagagccctggatgcagtttctttggattcgagttaaggccagacctctgatttgcaggtaccaattttttttttttaagaaaacattttattatgaagattcccacacatttagaaaagttggaggaatttcaccatgtgcttttatagacacttttcctggattctgcagttaacattttgctacgctggtatctctccttccttcccatctatcagtcctggatccactttaaaaaaacaacagggcggtatgtgaaaactaaggacaaagtggttccgattcaagtgtcaggaagatggaaagaactatgggataagatggctgggaacatttcaaagagggggtgagccttgaagatggataacacattggtaagtgaggaagacggaagttccggagaaggagcggggcatgaaaatggggaaacttgaagtgcggtcagacaactgggatcagtgcgaatctagtggctggtttctgccactgagcagtcaggaagaaatgggtgaaacaggaggggtttagacttgatcctgtggaaagaattttctgttgggccagtctggtagctacggtgacttgtgttgaactcactgttccctgcattgttctgagtgcccacgtaataatcca

SEQ ID NO: 452 - protein, 689 aa, Homo sapiens
MGLNFWSSPADSKPPNLPPPHRPLSSDGVCPASLRQLCLINGVHSIKTRTPSELECSQTNGALCFINPLFLKVHSQDLSGGLKRPSTRTPNANGTERTRSPPPRPPPPAINSLHTSPRLARTETQTSMPETVNHNKHGNVALPGTKPTPIPPPRLKKQASFLEAEGGAKTLSGGRPGAGPELELGTAGSPGGAPPEAAPGDCTRAPPPSSESRPPCHGGRQRLSDMSISTSSSDSLEFDRSMPLFGYEADTNSSLEDYEGESDQETMAPPIKSKKKRSSSFVLPKLVKSQLQKVSGVFSSFMTPEKRMVRRIAELSRDKCTYFGCLVQDYVSFLQENKECHVSSTDMLQTIRQFMTQVKNYLSQSSELDPPIESLIPEDQIDVVLEKAMHKCILKPLKGHVEAMLKDFHMADGSWKQLKENLQLVRQRNPQELGVFAPTPDFVDVEKIKVKFMTMQKMYSPEKKVMLLLRVCKLIYTVMENNSGRMYGADDFLPVLTYVIAQCDMLELDTEIEYMMELLDPSLLHGEGGYYLTSAYGALSLIKNFQEEQAARLLSSETRDTLRQWHKRRTTNRTIPSVDDFQNYLRVAFQEVNSGCTGKTLLVRPYITTEDVCQICAEKFKVGDPEEYSLFLFVDETWQQLAEDTYPQKIKAELHSRPQPHIFHFVYKRIKNDPYGIIFQNGEEDLTTS

SEQ ID NO: 453 - DNA, 161 bp, Homo sapiens
cacagctgcacagtgctgtcagaacggccgatctccagcccaagatgattccagcagtggtcttgctcttactccttttggttgaacaagcagcggccctgggagagcctcagctctgctatatcctgggatgccatcctgtttctgtatggaattgtcct

SEQ ID NO: 454 - DNA, 469 bp, Homo sapiens
gaggctggagtgcggttggcatgatcatagctcactacagcttcaaactcctgagctcaagtgattctccccatttcagcttttcagctcagtaggcgtgaccataggcacctgccaccatacctggctaaattttttcactttctgtagagacagggcctcactatgtttcccagactagccttgaactcctggcctcaagcaaacctccctccttggcctcccaaagtgctgggattataggcatgagcctccacacctgcctgatctgaaaacattaataagggtataaagggcatgaatgagtaagaagatattgtatgttttctggaagcaaagcttagtatttcaaggatgacaattctaacgtgtctgttcgtttattggaaattgagtttaaaataccgatgggctattctggggaaaaggtaacttgaaaaacatgagctttaagtatacattaaagcca

SEQ ID NO: 455 - DNA, 287 bp, Homo sapiens
  misc_feature (39)..(39): n is a, c, g, or t
  misc_feature (75)..(75): n is a, c, g, or t
  misc_feature (186)..(186): n is a, c, g, or t
  misc_feature (206)..(206): n is a, c, g, or t
  misc_feature (214)..(214): n is a, c, g, or t
  misc_feature (245)..(245): n is a, c, g, or t
  misc_feature (265)..(265): n is a, c, g, or t
  misc_feature (278)..(278): n is a, c, g, or t
tttttttttttttttttttttttttccacttgttcacanattttatttatccacgtgaaggaagaaaaaaaaaangggggggggctttaaggtggcacaattttaagaaaataccatccatttttctcagtctaatctgaatccatacattaaaacaaaagtgcaagtgatgagacgaacatcttnttggagaacaaagcatcttntttgagantgaaaaccctttttaaggttaatatctaccnaggggttccttatttgaggntggcttacttttntttttttaa

SEQ ID NO: 456 - DNA, 661 bp, Homo sapiens
ccagtgtgtataggtgcggcctggtgtatattcgtgcgacgggggcgtgcgtgtgatttgaacgaagttggtcacgggctgacattactcataaatccattacaaatctgcttagcttctaaatatttcatcaatgaggaaatcccagccctacaacttcggaacagtgaaatattagtccagggatccagtgagagacacagaagtgctagaagccagtgctcgtgaactaaggagaaaaagaacagacaagggaacagcctggacatggcatcagagatccacatgacaggcccaatgtgcctcattgagaacactaatgggcgactgatggcgaatccagaagctctgaagatcctttctgccattacacagcctatggtggtggtggcaattgtgggcctctaccgcacaggcaaatcctacctgatgaacaagctggctggaaagaaaaagggcttctctctgggctccacggtgcagtctcacactaaaggaatctggatgtggtgtgtgccccaccccaagaagccaggccacatcctagttctgctggacaccgagggtctgggagatgtagagaagggtgacaaccagaatgactcctggatcttcgccctggccgtcctcctgagcagcaccttcgtgtacaatagcatag

SEQ ID NO: 457 - DNA, 399 bp, Homo sapiens
tagcgtggtcgcggccgaggtacgcgggtataccagtggactattgacctccaattttttaaaaagttgaaattttaacaattaccaatacttttttttcttccttcaattggaaattctgagggatacagttatgtcatgattacttgtgaaatctctccccacaaaaattttactgataataaacatgagtaaatgagaaagtctataaataacaatagactttgcctcataacacgtgttgtgttaggttttgggatggctttctagggagcaattctgaaattacttgacagatacactctttatggtaaacaggtcatttcagagtctagagtgctaaccattacactatggaaccatgataaataggtcatttcaaactgatatgtcacaatg

SEQ ID NO: 458 - DNA, 114771 bp, Homo sapiens
gatcctacccccacacagcttatctatggaagggagctattggatcttcctaggaggttctaatcaatgcaactataggtattttctgccaaggtctagctctggtttcctcaccttctccattacactggcacctgtaccatctctcaagtcccttccagctcagaaactctgttcattgaagatcaggtcaccctcctccccaatccacagacaaatggtccccttcttccctctctctcagaagcacccccctccccaccctggacatccctgggagaaggagaaggcacattctatggaccacagctggaccagtctgtgctccagcaatggatggcatctcacataggggcagcgatgtggcagagggggagctgctatgcaggcagacagactggagtgtgaaccccacttctcctcctccccagctgcacaaccaggccagtcactctgcctccttttgaatgggtaccagaaccacaacttggcacatttgtggatgaacgtacccagcacagcactttcttctcttttggctactcctgtgctgaatttggcagccctattctccgttggggaggccccatcctggcccagtcctctctggctgccctaggccctgtctgtataaccacttccactggctttccagtgctgtctccaagttcctcaggggaaggcccccaatgccataactccctagttacatgtgcctccatctacctgcccatgcacctttcatcacccctctgcccacccacctgtttacttgccgtccctccatccttcatcattatcgctatagctcatacttatggagtgtgtatgaagggccaggcaccatctaccatgttgatagcaacccatctaatcctccttgcagccacacaaggaagatattattatcatcatctccatttgcagatgaaaaaaactaaagcatagagatgtaaactagcttgcctcaggtcacataattagtaagagggagaactaagattcaaatcctcatgaagtcaggagatcgagaccatcctggccaacatggtgaaaccccgtctttactaaaaagacaaaagtgagctgggtgtagtggcatgtgcctgtaatctcagctactcaggaggctgacgctggagaatcacttgaacccaggaggcggaggttgcagtgagctgagatggtgccactgcactccagcctggcaacagagcgagactgtctcaaagaaaaaaaaaaagaaaagaaaagattcaaatctaagcacacacaggctaccaccaacccatactaccccagcttcccgccacacatctattatctgtctgatcacctacctgtgatcagacacttcttcccaggtgggcatagattcatccacccatttacccacctatcagtcaccaccctccatcagagcttccctttttggccactacattgcatccaatgttgcaatggccacagtcctgcccttctgcaggtcacagtccagttagaaagaccaacatgtatccaggcaatgagaagccatcgtgatacatgttgtgaaggtccccgggtgctgtaggagaatggtggaggcacctggcccaggctgggtgctcaggtctgagtcccgaaggggagtgggtgcaaagagaggagcatccccaaaaagagaagagcaagtgcaaaggcttggccccagcgagatggtggcacacggggaagctgtgaatattcctatggcggaagtcaggattccaaagatgaggctagaggggcagccaaagccaggggtgtaggactgtgaatgcaggccagtgtgtggtaggcagtgatgggagccaccaaagggttttaaatgcgggggagtgatgcggccacagagcttcagtgtggtccagagtgctctggccactgcagggagaaggtcaaggccagaggcagggagagaagggagcaggctgtctcagtgacccagccccagtatgaggaggcctggactgagtccatgaccatggaggtgagttacagtgggtggattagaggcgtgctcaagacatagcttctttggacttaagtgatggagtgggcatgggggtagggatgtctcctctctggagatggtgcctcacctcctggaacttccccagggatcaccctctggctgtcacactcccaggttttgcacaggctatacatcctgtctggaagtccctggctttacgggccatgtgaagatgttataactctttgcagtttccaagcaggggagtgtgtggtcagatgcggctgttagaaataccagttccaggctgggtgcggtggctcacgcctggaatcccagcgcttcgggaggctgaggcgggccgatcacgaggtcaggagattgagaccatcctggccaacatggtgaaacaccgtctctactaaaaatacaaaaaatagccaggcgtggtggcacatgtctgtaatcccagctactcgggaggctgaggtaggagaatcacttgaacccaggaggcggaggttgcagtgatccgagatcttgccattgcactccagcctgggcgacaagagcgaaactccgtctcagaaaaaaaaaacaacaaaaaacataaaacataaaacaaacaaacaaaaaaaacccaaaaataccagctgcagggaaggctcagcagtggggatttgatcagggtccggtgggagtgggatggggatatgagactgggtgtcaggcctcagaaggagccatggtttcctcagacgatccttcccagacctactcacccacaaattatgccaagtttctcactaataatcaatcatctcactctggagtttaccttcatttcacagactacagtttgcagttttatatttatgtgcatgattatttgattaatgtctatatctcactctaaattataagctcaatgaacatagagacaccatgatggtatcaagatatcactgggataccattttatccctagcgtctaggacagtccctggcacatagtaggtgctcaataaatgttgaaagagtgaatgcgtattcctggctggagtttcagcagcacttggatgataggatgtaagattggttggaaaaaggtgccaatttgtagagctcagaggccaagtttagcagtttggatagttgtcctaactcctcaacatccactttgaggaatagccacagaaaaatgattcttaggatttctaaaatagttaacaggctgaaaaagaccctcaggtgtcccagaggaaagctggcagggctcaggggctgcccatttttccgaattactcatccatctcatctgctctctatgggcacaaggaattgacatgcagccctggctgttttgttcacagggcctggatctcaaccatgtaccaaataaaagctggaacaaaatgtaccacatttccaaccctgaatgtatctcaaacgttttctatagtaggtatgattttttatttctattaaactacaaagtgaacgagctttcctcttgaactcctggtgagccagtcgaaactagaagcctggctgggcacggtgcctcatgcctgtaatcccagcacttcgggaggctgaggagggtggatcacctgaggtcaggagtttgagaccagcctgactaacatggtgaaaccccatctctactaaaaatacaaaaaaaaaaaaaaaaaaaattagccaggcatgatagtgcatgcctgcagttccagctacctgggaggctgaggcaggagaatccttgaacccaggaggtggagattgcagtgagccgagatcacaccaccgcactccagcctgggcgacagagtgagactcagtctcaaaaaacaaacaaacaaagaaacaaacaaacaaaaactagaagcctgagtaatggagacagcccagacccagagctgagccagactggaatctgcacaccagcttcactatgggaggttttggggacccttcaaagtcacttttctctgtgcatctcagttttcttatctgtaaagtgaggcaagtaatttctgcctattcagcttgcagctttatggtggggacgttgggtgcgaacctgtattaaacactgtccagcaccagatacatcgtaggaggtgcagcttcactagtcaaaccatgtgggtttcaaaagctagaaaatggaagcattcgtaactctttccaacctctttattcccccgagacaccgtctccctgtgtcacccaggctggagcggatggcacgatcaccgctcgctgcagcctcagcctctggagcacaagccatcctcccaccttggcctcccaagtagctgagaccacaggtgtgtgccaccacatctggctaattatttttatttctgtagagacagggtctcactatgttgcccaggctggtctaaaactcctggcctcaagccatcctcccacctcagcctctcacggtattgggattacaggcgtgagctaccatgcccagctttatctttccaacctttgtggatgcatgtgaataaattactgttttttgttctgcttggacttcattccctgcattttccagttcactgagagaatttgttatgctccacccctttttccataggctatgtcataagcccgtggccaatgggctggctgcctacgtgtagagcacccgccccttacccagtcagatgcaactgagggttcacatgatattccggcagccaagctttctaacagggtttagaagagtccctggcaggtgctgttatgatgttcattttatagatgagaaaactgaggcacagagaggtatcttagccaatgacatggaaccagtaaaacacagaattgtgattcaaaccttgggctttaaatcgtttctttccacggtcttgctcgtctctgtctctccagggctaagcaaagtttctggcatgataagcactctgtatatgtttgccaagtgagagtttgagaataataacacttactttacgggcttattacgaaaattaaataagttagtatgagtgaaagcatctggcgcagaccctggggttgagaggtggtgaataaatactggtttaattcattcatgaattcattcattcctcctcccttatggcttggagccattgctcctggcgaacacggaaagaaggcaaaacctgtcttctctccctgagcccgacattctgcagacttttgccttcagaaagctggtgctctttctttctctctgcttatgcggagaatctgtaccacctctttgccagggggacttaatggttaaggtaagcccctctctgacctgcctctccaggctcacctctctcctctcccttccctagctccccactcacacaccagccatcgtgggctgcccagaactcaccctgggctttccctgtcttgtgcttttgttcacaaccattcctggtgggttccctgtccagccttcaaagctcagctcgaagggaactcttccgtagcctttgaggaaggggatgtttttattccagccagaaggggaggcttttattccagccagaaatcaccatccccaatcgctgcccctctgttactttatctgcaccgctcttaaggtactgagggtgccactgattgacctaaatagcacatggatggtggagtttgcatttcacatgtggaagaactgagttaaataaccctcacttcggccgctcgcggtggctcacacctgtaattccagcactttgggaggcccaggtgggcagatcacgaggtcaggagatcgagaccatcctggctaacacggtgaaaccccgtctctactaaaaatacaaaaaattaaccaggcatggtggtgcatacctgtaatcccagctactagggaggctgaggcaggagaatcacttgaacctgggaggcggaggttgcagtgagccaagatcgtgctactgcactccagcctgggcaacagagcgagactctgtcaaaaaaaaaaaaaaaaaaatggaaatcggctgggcatggtggttcactcctttaattccaattccatcactttgggaggccgaggcaggtggatcacttgaggtcaggagttcgagaccagcctggccaacatggcgaaaaccagcctctactaaaaatacaaaaaataaaaataaataaccctcacttcatagggctgttgtgaggattaaattaaattagaacaagtaatgaatattcactcttttgcatttccctagcccaatattgcactatagaatgtcagaacggaaagggactttagcaatatcagtcagatccagtgtttcccaaacttttaaaaaggtaagcacaaccattttttttttcagtggggtgggggtactgttctgtcggagacaggacttacagctctgcccactcagctcctccatcatccccttcctcaaaggctcttcctcccaagaagacttctagtcttgtcttagccagagtaattaggcaagaaaaagaaataaatgccatcaaaactggcaagaaggaagtcaaattgtccttgtttgcagatgacatgattttatacagaaaaccctaaaagctgcatcaaaaaactcttagaactgataagcaaatacagtaaaattgcaggatacaaaatcagcatataaaaaccagtagtgtttctatgcaccaacaatgaactagcaaaaaaagaaattgaggaagcaatctcacgtgactacaatgaccattaatacaaaaaaccctaaaacacctaagaataaaagtaaccaaggaggtgaaagacctttagaaggaaaatgataaaacactgatgaaagcaattgaagaggtcacaaaaaatggaaacatatcacatgttcatgaattggaagacttaatattgtgaaaatggtcatactaccaaaagtgatctacagattcaattgttatccctatcaaaataccaatgaaattcttcacagaaatatacaaattatcctagaattcatatggggatcccaaatagccaaagcaattctgagcaaaaagagcaagttggaatcatctcactatctgactttaaaatatactgcaaagctatcttaaccaaaataaccatggtactggcataaaaaaatatatatagatgaatggaacagaatagaaaacccagaaataaatccatgtatttacagccaactgattttttttctttcatttttgttttcttagaaattctcggtatggtttattagtggcaatgtaaatcgatgataatcataaaccaaattaaacaaatctaccccatgaataaattctttctttttttttttttttttttttgttttgagatggagtcccactatgttgcccaggctggagtgcagcgccatgatctcggcccactgcaacctctgcctcccgggttcaggcgattctcgcgtgtcagcctcctgagtagctgggactattggcacctgccaccacgccctgctagtttttgtatttttagtagagaaggggttttaccctcttggccagggtggtcttgaactcctgatctcaaatgaactgcctgccttggcctctcaaagtgctgggattacaggcgtgagcccctgtgcccagtcttagtgaataaattcttaactactattaattaattgcttatagtatccagcagatatgttttaaaagtcaataatattaattccctttgtagattgtttaaaaaaactgttttgagtcaatcgctgtgaatacttgaaagtacaaatataaattaaataagatccaaaagactgtaacatggcgtggtggttcgcgcctgtaatcccaacactctgggaggctgaggcgggtggatcacaaggtcaggagtttgagaccagcctgaccaacatggggaaaccccgtctctactaaaaatacaaaaattagctgggcgtggtggcatgcacctgtaattccagctactcaggaggctgaggcaggagaatcgcttgaacctgggaggtggaggttgcagtgagctaagatcgtaccactgcgctccagcctgggcgacagagtgagactccatctcaaaaaagaaaaaaaaaaaaaaaaagaattgtaacacatacaacaaaaaattctataaaacaaagataactttaaaaccattgctcaatttactttgtaccttttttatataaaatatttaaaaacaggacatattgtctggatcatacatgaaagttcacatccacatgtcttttctatcaaattctcatcctttcttcattgtcaaaatcttaattttcattcctagctggattgtttttccttggcaattctttctgttaccccactaaaatatttctcacggaaggaattatgaccttggtattggcagaaaatgatcactttgcagatgtgaataccggtcgcagttctcaaatttcttcaccatttccattgttatcaagcaccttgatgtgtgactggaaagcttctgctcgcagttgctaatgagtttcaggcaaggatgccagggcaccatctcttcagtgtattctggtatatacattagcaacccatagaccagtcttccacctaccacaagggtctcagctgagaagtttaacaagtcaaaaaacatatcactcagatgataactcaaggaaacaggaatgtggctttctggacatttttctatctcatttggtatttcctttggtgaaactgttcttctcgtagattctccgataccatatggaggatcaaaatacgggcgcctgtagtcccagctactcgggaggctgaggcaggagaatggcgtgaacccaggaggcagagcttgcagtgagccaagatcccaccactgcactccagcctgggtgaaagagtgagactctgtctcaaaaaaaaaaaaaaaaaaaaaaaaaaaaaaatatatatatatatatatatatatatatatatatatatatatatatatatatatatgccctttctccaggaaggtttatatgcatctggaaccagaacttcaaggtcatacttctgtaaaccatattgacaaagattggccctaatattttcatctggtgctctccatatctgttttttcctactggccattcccaagccatgaactatgttgtggtctatgtctgtcccataaacatatataccaaaatgggcacatgctatcaggagaccacctagaagaactagttgtcaagaggaacagaaaagctttcctttgctttcttaaacagaagcttatccattcggttggagtgagtttcgagaagacccagtttacagtacactgctgtttcaacaaacagatcaaagacaatatcattttctttcactttcccgtggttagccatgatgaatgacaaaccagcatccatacttgtatttccaacaaagtgcctctttttgacactgtatgactcaataagctctctctgtccatctgcaatccatctgccaaaataattattatgtggattctcagggatgcagtttgggtccaaaccatgatcctccaaaacagagaatgtatgttgtggtttctttaaattcactttttcttcagatggcagacattcaattgcatctattcgcttgatttttcccttcttgtgtcaatgtcttattaaaagtgtgaatctttattttatatgtagagtctgaatgtagaaatggaaccatcttgtccacagggtaatttttaagagaactgtacagctcctcgggagattgtgcatgatcccatagttcacacacagactgtccatttcattaaatctcttgcaatatcttcagagggaatgccaagaatttaaaatggtgactttccatgtttcttgactgctggcgaactgacctccaaaaaacgaaagcaaagactttatttcctgaggcatttaagcttcaacatcagacaattaccattcagtgtttggtaggtggaactccaggtgctccttgaccatgagcagcagatacctgtttagggtgcacagcagcaccattgcagctgcctaccgtgcaccttcacggcttgcatgaggtcccacctctttctccctcccagagcagagtctccactgagaccagccagctgattttcaacaaaggcaccaagaacattcaatggtgaaagaacagtcttttcaatgaatgctgctggaaaaattggatacacatatacagaaaaatgaaactagactttgatcgctcaccatatagaaaacatcaaatcagaatggattaaagacttaaatgcaggaattgaaaccacaaaactactagaagaaaacattgggggaacacttcgggaggacttcgctctgggcaaaggttttttggcactggcaacaaaagcaaaaatagataaatgggattacctcaagctaaaatgcttctacacgtaaaggaagcagtcaacagagtgaagagacaacctacagaatgggagaaaatatttgcaactattcatctgataaggaattaataaacagaatatataaaagctgggtgcagtggctcacacctgtaatctcagtgctttgggaggccacgggaggatggcttgaggccaggagtttgagaccagaatatataaggaatgcaaacaacccaacagcaaaacaataacaacaacaaagccaaatcatctaattttaaaaagggcaaataacctgaatagacatttttcaaaagaagacatatgcatggccaatgagcatatcagagaaatgcttaatgtcattaatcatcagggaaatgcaaatcaaaacgataatgaggtatcatctcaccccaattaaaatggctattactaaaaagacaaaattaacaaataccagcaaggaggcggagaaagagaaactctatacactgttggtgggaaggtaaattagtatagccattatagaaacaccatggaggttccttaaaaaactaaaaatagaattgccatatgatccagaagtcccactattgggtggctatccaaaggaaatgaaatcagtttgctgatatatctgtacacccatgtttattgcagcactattcacaatagccaagacgtgaactcaaactaagtgttcctcaatagaaaacgtggtatatatgcacaatattattcagccatcaaaaataatgaaattttgtcattcacggtaatgtgaatgagtttggaggacatgatgttaagtgaaataagccaggcacagaaagataaatactgcatgttcttactgctatgtgttagatgaaaaagttgatctcgtaggagtagagagtagaataatggttactagagtcagggaagggtaggatgggaggacagccagaggttggttaacagatacaaaagtgtatccagataggaggaataagttctagtattctacagcactgtggagcgactgcaattaacaacttattgtatatttccaattcgtcagaaaggcagattttgcatgttcccagcacaaagaaatgataaatgtttgaggtgatgtatatgctaattatccttatttgatgactatgcgtcatatacgtgtattgaaatatcacactgtgctgcataaatatgcacaattatgtgtcaattaaaaataataataaaagcaagaaagagagcatgttctttaaaaaaaaaaaaaagacttccagccttcccacccagatgttgtctttggggtttttatggtgcaggattgggagactcagaactgcaggggttggggaagggcagagagcgtggggagagtggactccacctgggggaggagtttccttttttgcagggacaaaatgacaggcgacaaaagcagcatgtgggagacaaaagggactttaaagaagtgtggctaaagactgcatacttcacagagtgagaaaaacaagcaaggaacatgagggcttttttttccaagtcaggtctatcaaggtgtaatttacatgcagtacaattcacttttggaggtgtacagttcagtgaattttgatgaccgcctacagccatgcaaccaccgtcacagtcaagatacagaacatttccattaccttgaaaattcccccatgcccttttacttagaaggatgtttgctgtttcctgtaacagtgttgaagaatccatccttatctgagatcaagtaatagagaggagagagagctgggtgtagaggtgcccagggcaccctctctctactcgagccagtaaaaaacaaacctgcaatattcatctttatatacactcacagatgtaaatacagagagatacagatgagcaagccacaaagccaattacataccaaagttatgccattaacctatacaaagatttcataggttgtagttccttccagttcctcttccagcccctgctcctggcaaccactgatttgcattaaagataattcaacctatctcaatttaatttctgtccctatggttttgtccttttccagaatgtcacatacatgtaatcatacaaggattaaccttttgtgtctggcttctttcacttgagagtcatccgtgttgctgcatgcgtccatctttgttcctgtttattgctgagtaatatactaggcacaccacaatttgtttatgcatttactagttgatggatgctgcggtcgttttcagtttggggttgttttgaatagggctgctatgaacattcatgtaaaagtctttgtgtggacatacgttttcatttttcttgcataaatatctgagtgcaattgttgggtcaggtgatgtgtctgtttatgagaaactgacaaactggaattactttggttggtgaactgtgtttctctgactatgaccctattgtgaaactgagccatgtggctcacaggtttataagggttgctttgtactcttgttggacgaatttcagctgcatatgttgtctctcctaaaggtatttgcattttaaacagaagtcaactattctgttcaacaaacactgccccaaacttcaagtcatagaattggcttcattctccatgggagaggtttcctatgagctagcaggcaggaggttcttgttgccttagacagggtgcgtttggaatgccatatgggtaccagtgaaccgtacgtgtgcctgcaactataggtagatgaatcccctgagtactcccacatccaggattctgccaggcagaggaaacggctctggagagaagaggttgccggagtcctctaacactgccccttgccatttttgctcaggtcccgcgtactttctttagactccactttttctgtcaccagtgcaaagcaagcatcttttagagacaaaggagcgttggatgaaaggtccccagggaaatctctttcctgtctcagatgcttcctttaagacgaggacagaatcagagcagaaggggctatccagagaactcagttttacttcatgaatgtcttttttttttcttttttctttttcgagacgaagtctcaccctgttgccctggctggagtgcagtggcacaatctcagatcactgcaacctccgtctctggggctcaagtgattctcatgcctcagcctcctgagtagctgtgattacagtcacccgccaacacacccggctaatttttgtatttttagtagagatgggatttcaccatattggtcaggctgttctcaaactcctgacctcgggtgatccgcctgcctcggtctttcaaagtgctgaggttacaggcgtgaaccaccgtgcccagctcatgaatgtgtttgactccatctgcttctctatacccccacagtgtaggcctcccattgatacaggagctaaaaagaaatgatttaggcagctagtgagggtaagatagtccttggtaagccttcccttttaacaaaaagcagtccccaaatcatttcttttctaacaaagagcagcctgtaaaattgagctgcagacatagataagcaagctggaagcttgcacaggtgaatgctggcagctgtgccaataggaaaaggctatctggaagccaggtatcttcaacatggaggctccattttcccttttctttgtcaccacatgtacagaaagaaacagggaacatggagccagccaggtagaggacccatctgtgtaataaaagattagggggcgggcgcagtggctcacgcctgtaatcccagcactttgggaggccgaggagggaggatcagttgaggtcaggagttggagaccaacctggccaacatggcgaaacccgtctctgctgaaaatacaaaacttagccaggcatggtggtgtgtgcctgtagtcccagctacttgggaggttgagacaggagaatcacttgaacccaggaggcggaggttgcagtgagctgggatcacaccattgcactccagcctgggcgacagagcgagactctgcctcaaaaaaagattagggcgggaagccagcttcttcgtgagctatgtaaatggaacacttggtttgctcaatcttctgggccctatgtaaatcagacactgtctcctcaagctcatctataaaacctggtgcatttcactagggaaccggaaaaccctcttgggatctcctctttctctgcaggaaggagagcatttctctttcttttgcctatttaaacctctgctcttaacctcactccttgtgtgcctcgtgtgttcctgtccttgatttccttggcgtgaagcaatgaacctcaggtatgaccccagacgaccccagtaggtgcctcagtgacctgctaccttctactctcagtccatcttctggtctccacgtggcagccagaggagctgctttatttttaaggttttgatggattgatttaaactggtaaacacatggttcaaaattagaaaggtgcaaaagggtaggcagagaaaagtctcctttcaccacccccctttgttttaagagacagggtctcacgatgttgcccaggctggtctcaaacttttggcctcaagtgatcctcccaccttggcctcccaaagtgctgggattacaggcgtgagccagtgtgcctggctgagatacatttttttagaaacacacacacacacatacacaatcacaatgatcatgtcattcctctgctgatagccattcaatggcttcccctttcactgaggataaaacaccgagtctataataaggccccagggtcaggctcgggcagccctgactccctctttgggatctccttgccacccagagttgggaccctcgggcctcctctcagtctctccagcatgctggcttcacccacctcagggtttgtacacacactgctcccattgcctggaagatttctttctccacttcacctagtgaagccccctcatttttcatttttcagatcttgacctgagaactgcttcctcatggaaaccttccatgatccccatgcctggccaggtcctagggtcatgggactcggcgatgccacttcagatctcttaccaccatttatcaccattctgttttgagatattatttgatcatgggacttgaggaatcctgcactagactggcagtgccagggcagcagttctcctgctttactcattgccatatctccaggatccagcacagttccatggaacacaaagacagcagctagcatttgccgagtgcttaccatgtgccaggccccgttgtcagcactttacacatagcacattcctgtaatcaacatgaatgcctggagacaggtacaatgatcatctccattctacagacaagcaaactgaggttcagctaagcaagtcagctaatatcactaccaactctgacattacatgcctcctgcaggagtttggtaagtatttgttgaatgagtgactaataaataaaagagagaatgaaaaacaaaatgaatcaaactctcatgtaatggacagaaaagctgagactcccccccctggagaggcgcaacctgaccaggttattcaacgcagcggaggtggggctgggagggcggtgcaggtgccgcctgtggggccggattctcccagctgccccacctggcctctcagccacatgcccctgctagccagtagccccagccccagcggctcagcctggccctcactgcccttccctcctccctcgcagtggctgtcccaccctttccctagagctttccaaagcctgtccctggatgcctcctcccagaaaatcggcgggcctctcccaaatccccccagcccctccacttctgctctcagacaccctctagcatggacccacacagccagggctacaggcacagcccctgaatcaagagacatcttcaccctccccctgccatcttttcagttcttcaagttgttcttgtctttttttcaatacaaagtccctgtgtgatgctgggagttaattaattgtattctggccaattaactgtaatgaaagtttttccttccctgtagaagaaagggcttccctatagaagagatggctacctagggagactgcagctctctctctctctctctctctctgtgtgtgtgtgtgtgtaaaactccatctagctttggatatcatttgggtatcatttatgaggacttgatgtccagagctgtggcaaccattttgtgacatgaggcgataagcttgaggctgaaaagtctaaatgctgagaaaggcagtgtggagagagcctggatccttcttgataatctccccccagagggttcattaggtaagcactattgtccttacagcccagtcgccattgctttgattttctgcaacttgaagctgaaagcattctttactgattgggtgaggatgccttcacctccttaggaagcacataggaagttcaggcacaaggagacaggagggaaagcgctgacctatgggtcagccaacatggactctccctgactccaccaccaattagtggcctgacccagggcaaagtcacttcctctcactccattttcttcctgggaaaatgaggggctgcatgacagcagtggcgtctcctaacagtgactcacaagccccccaaagcctcagtgagctgcctgaacttttactgatgccagtgaggggtggagagggtccatactgagctcaattgtgacggtttggaggtgactcagtgaggaatcagacagccccggagtctttttttcattcctgttccccatttgtcagcaatccttcatcgtgccccagtttcagggtgtatttttagtgaaaataaacttgcacagctcaggattacacaattccttcaagagcttcagcatcacctgctgatggacccaagctaatgagcaggtcacgtggaggtggtcaccccctccccgatagcagctgggagtagctggtgaggcccactgaccccaaagttcaggaaggtgggctaacgagggaaataatttaattttgccagaaaaacaaaaaaaaatctccacgtcctacagcctggggcgagatgagtgcattcagcctgggattcagaatcaggccttcgaggtatccagcatctagtgaggaaaacagagctgcattttgaaaccctttgccttctaaatccaggcctggagctggcttgtgttttgcagagcaggtaaacaggtttgattggtttgcaaaaaatgtgtttgggagtggggagctggggtggtggggaggttaaatcttctgcttaaataagggaagagaatttagcatttctagaggccatggagaaggcagaatatcacaagcactgttggtgacctgcccagatccccattgcaggaatgaaacacccaggcccctcctactgggagtgtcggttgtacccttaaactgagaaccacccccaaccaagaagcctgggagatcacactgccctgtcctcattcaatgactgacctatacaaggggtcaaagagcccaagtccctgggctcaaggtaggataaatctgtggttccttccacagtccagagcttctggtaggacctggctgaggctgggcttccacagtccccacattcctgcctggcttcttcccctgccctatcctgactcccccacttccttacaagtccctcctgagagtactccttccctccatggatgatctgcacagggacctctgtctcagatgctagttctgcagagccaacctatgacctaggatacggaaatgaggaggaaagtggggcacttgggctggataaagcccctcaaatgggacaaaacagccaatgactaaggtcttttaagcacatgaatatttaatgttctataatccatatgaattgaactgttctgtatgaatcttattagttgggtagacatgggcaggtctttcaatcttctgctgtgatgtaagctcttagcccatccccttcaatcttaagtacagtctgttatacacagaaatgccctgcaagtatgtgtgtgtgtgtgtgtgtgtgtgtgtgtgtacatgtagggttaggggttgggttccacaattggattgaccccaaatggccagaacatgcaggatggtgatctaatccataaatggaattaactcagcagaaaggagctagaggtgatcatcagcctataaatacttggagaatttgcatcagtgttggagaggacttggaacttccttgggaaatagatgagaattggaatcattcttatctacatcttaaggagcagaaagacctcagctgttatggaagacattactagttgtctacacagcatccattctctctttcttccttagtaacagagcattggttttattctggacagcaatgtgctcaattaaaaggatatctttcccagagcagttggcatggccgatgagatggaagcactaggttttgctttgaagtctctgtaagaagagcacagcatggaccctttgtgtcctttccttctccctcttgcttcctacctggaacatagatgtgatgattggagcttcagcagccatctggacctatgatgagaccttgaggagggaagctacatgctgaggatggcagagcaaaaaaatctaaggaccttcagtctctgaagacttcatggaggtgccaggccagcccctttggggtttaaacaattgaagttggagctcccatactcatagcagcatgtgttcctcatgaattctgctttcacgagcagagtctttgccaagttaccccctttttaccaggatcatcattattgcttattcccatgttttccatgagaatgacggtaggaaagggaaagagtgtgggcttaggagtcagacacttggctcaggggaccttagcagagagcagtttcaagtttgagtgtgctgtagaaccacctggaaggtttgttaaaatgcaggctgctgctggcccctgaccccgcagcttttgattcagtaggtttaaggggggcctgtgaacttgcatttccaaccagcttccaagagatgctgatgcagctggtctggggattacatcatcctcatggcaatcacactaccctaattttaaaatctcttttctgtcattaatttaacagctaggtacttcatcctgtattcatttcaacacatgactcattcattcatttaacaaataattataaagcagccaccgtgtgccaagctctagcaatggggactcaacagtggagaaaaccaaccccctgatgtcagctaggaagctaacatcctagtgcaagagaagggcaatgtaaccgattaaaaatataatagagccaggtacagtaccatcccagctactcaggaggcaagaggatcacttgatcccaggagttcgaggttacagtaagctatgatcacatcactgcactccaaccagggcgacaaagtgagatcttgtctctaacgagagagagagagagagagagatagtgtgtgtgtgtgtgtgtgtgtgtgtgtgtgtgtgtgtactatagtgacaggcagggacaaatgctatgaagaaaaataaatcagggcaaggggatagagagtgataggagatgcaattttagagaggatcatcagtgaagggcatttaaaagaaatgacttacaaaaactcacatacaatgagggagtgagcagtgcagaattctggggcaagaacatcttaggtttagggaatggcaagtgcaaagccctgggagagggtcatgtttgctatgttgaggggccagcaaggagatctgtaggctggagcagggagagccagagggagaaaggcaggaaaagagggcagaaagatggacagggccagcccatgggggtcttccagggcatagtaaggatttggggttttagttaaaggtctaggggagctattggaaggagtgacatgatctgacttctgttttcaaagaacactctgacttagttaggggctgctgctctcattcaggcaagaaatgatggtgggtagggtaggacagatggggacaagtggacagatttagtaggatttgctgtcactttggatatgtggagcaagaacaagatcagagccaaggacaactgctaggattttagcctgggcaggcaggtaaatggtggctgttcaggaattcttaggtgctgtatctagtggggaaggccacagggaaaggagatgatgaagacataatgtctgccttccagatctcactgttcagtgggattctccataaacattcactgagggcccaggcaagatcattcccaagggtagggacagttctatttgggccgcctttgtcagtttatatgatcagggagatcccttttgggtctctacttgcataacagatgtcacgggaaaagctaccttggcatcaaaactctgctggttgggcaaccccgtagattacagatagatgtgtggtttacaaatcgctagaattggaaagagccaaagaaattagtgagggaggctcagaacagaattccaggtgagttctatgcaggcttactaaaataactcagcattgagaggaacaatgacaagtattgtgtcacaggtgtgctgtgctgcaacagcctagcaaactcttctagacttggggaactagaaacagcatgtcaggcttgattattcatcagttgctagctggcaggggagggagtgggagtctcagattttctttgcatttttctagtagttaataattcctatataattcaaatatcagctagagccttcctacactttgagaacttcaaaaatacttttatgtggccaggtgcggtggctcatgcctgtaatcccagcactttgggaagccaaggtgggaggatcgcttgaggccaggagtttgagagcagcctgggcaacatagcaagattctgtctctacaaaaaataaataaaaaattagttgggtgtggtggcctgtgcctgtagtctcagatacttgggaggctgaggcaggagaattgcttgagcccaggagtttgaggctgcaggaagttatgattattctactgcattccagcctggggaacagagcaagaccctgtctttaataataataataataataaaatactagtatgaactcctcaattctatgccttctggagtctacatcagcatttctgtgaatttggagggagggtcgggactcctattgtcaaggttacctggtgtctccaggagattgcttctcttagcatcgcctttgtctcacacaaaactgatgagactcaaagatcattttttttcttattttctactgtaatcttattaaaagcaagggtcccatatggcccagattttggatggagttgtattcaggatgcacagtccagtaaacaaaggtaattaaaaagtaattccaggctgggcacagtagttcatgcctgtaatcccagcactttggaaggctaaggcaggaggatccctcaatcccaggagttcaagattggcctgggcaacatagcaagatctcgtgtgagaaaaaaagggagggggattccaatttttatgttcatctttcaaatcaccctgaagaggacctccatcatatttcataccatttctcaaaactctcttctttgtcttgccagttctcactcatattttcttttttctttttcttttccttttctttcttttttttttttttttgagacagagtcttgctctgttgcccaggttggagtatagtggcatgatctgggctcactgcaacctctgcttcccgggttcaagcaattctcctgcctcagcctcccaagtagcttggattacaggtgcatgccaccacaccagctagtttttgttttagtagagatggagttttaccatgttagccaggctggtttcaaactcctgacctcaggtgatctgcccacctcagcttcccaaagtgctgggattacaggtgtgagccacggcacctagcctacatttcactcttacgcttctccgctggcaaacctttcaaactttctcctaagtcttgctgcttcccattggcctttacagtctctctccctccctccttcccttcccttcccttcccttcccttcccttcccttcccttcccttcccttcccttcccttcccttctccttccttccttccttcttctctttctttctccctctctctctttctttcttttctctttctttctttttctttctctctctctctctttctctcttttttcttttcttcctttcctttctttcttttttgcagtcttactctgtcgcccaggctggagtgcagtggcacaatctctactcactgaaacccccgcctcccaggttcaagcaattctcccacctcagcctcctgagtagctgggattacaggtgcctgccatcatgcccagctaatttttgtatttttagcagagacagggtttcaccacgttggccaggctggtctcaaactcctgacctcaagtgatccacccacctcagcttcccaaaatactgggattacaggtgcgagccaccacgcctggccactgtttctttatttctggccattcttcaagtctcacaaaaggatgcaaaataggctgcaaaagttcaaacttgcatacagcttgtgtgtatgtgtgcatgcacacatgtatgcatgtgtgagacaaaggttagctttattaatctcctaaatacccattctctctccccatatgggctcactaaaggtaattttctttgtccactcaacttctttcctctccccctgcccactcccacaacacagtcattagagtagagagcacttcgctaaagatttcttgggagagcccaagggattctgtcagaaatgcaagtaacgtaaccatgcacaccaggcatctgagttcttaagaagcctctcaccacctaccaccggggttctcactggctgtctatccacattcgcccatcgtgacccattttgatgccttctttatatatcacctgtctatactgattgccaccgtccctcctcttcttctctcaggagcaaagcgacaaatttcactcctcgtatttttttttgagatggagtttcactcttgttgcccagattggagtgcagaggcacaacctcagctcactgcaacctccgcctgccaggttcaagtgattctcctgcctaagcctcccgagtagctgggattacaggcgcctgccactacatctggctatttttttttttttgtatttttagtagagacggagtttcaccatgttgtgcaggctggtctcaaactcctgacctcaggtgatccacccacctcggcctcccaaagtgctgggactacaggcttgagccaccatgcccggcctcactccttgtcttatgcagagcagtttagctcattagcagacgggttgcaagcatgggaactggagccagttggcttgggtttgaatcctgccccctgctgactagttgtatgacctcaagatggcttcatcacttcttgtttcctagtttcttcatcgccaagatggaattagtgctaacccctttctccaagggttgttgggaggattaactgagttaaccaacatcaagtacttagggaagcacctcgtatacagcaggtgctcatgaaatctcaggttttattagtctcctgagctcttgggctcatctgtcatctcctaacagagagacttttccaaggtttccaaataaaggacgcttcctcctcaggatggattttggtgctggccatgaatgctgtttagccttgttgcttccataaagggtcctgggtttgaattctgactttgccactttctggctgtgtgaccttaagaagatccttcaacatctgtgagtctcagtttcctcatcctttaaatggagataacagcactacccattttctgagattgttaggattaagggagcatgcatgtgaagcctctggagtggtaaggatttgtggggtgttggcggggcactgggtgctgtccaatgtatcaatttttagcacagtgaacaacaccctggatgtggtccacaaatgcgcttgcagcctgccccccagagctgtgcaatggtggttctttatgaaggaaaggtgctcctgggaaacagacagagttgggatcaactaacaaggtgatctcaggggagggcaagacccctgtgggctgggaagactttctaagggagggagagcttgggctgggccatgtaaatggggaggatttgaataaggaccatgtggaaggaacttcagacaggaggggctcctgagcaaaggctgggaggtaggactgggctttgtgtgcaaagccagcttcccgggatccgccacaccctctgattcagctaagtccacagatagggctgagcagctggctgggcctcagcagagggttcatgtcgtgggtgggtaactgacaagagcagaacggagggctgcggaatgtcccctgccaggccgaggtgcttggacttcagtgttattagtgataatagcaaagcaataagaacaagcatcatttgttgcactctgagataccaagcactgcacctcagaatgcaaaaaacactgtggctcgggggccacacatcaaatctgtgccagagcctggatggacactgaggtccagtggaccccagaggccaggcccctgactacaaggagagcccgcactgtcctggggcacccacagcctctgagcattagcagagtccgtccttagggtcagctctctcccaggaaggaggggagggggtgccttgtgaccatcctgttctccgtctcctcccctcccccttttcctctgctctctgctcctccttccgatcatgcactggttggggacacctccaggccaccctcagccccaggtgggtttggcatccatggagtgcagcccatgtgtccccagagcccctcctccagcactccttgtctggatgggaccaagcaaggtagaggtggcgcgggtggagaaggaggagagaaccttctccaatgagagaggggactgcacctctccaaccctggtttggcattttatgtgctgggaatgagaagcccaaggttgctatggaaactaccatcccctgctccctctctcattctctgtgggaagttcttgcatgtaaggggtgtggggtacgtgggtagggggcactcctgctgcacacggcgctggaatgcagaaggaccgtctctaggggtgggagatgcaatggatggatgggagccaggtgaaaggcctctggggctcctgatcctagaaggggcttcagggcttctgacttgagagcagggccaggggcagccatggagctcagggggcttctctggaataatcctgggagtgaccatgcatactcgaaaggcacagaacaatttgcaaaacgcagtcagatgggccactgggaaagagcttgggccccacagttaccaggatgtaggcttgaataccagcacagctcatgctcctaagcttcactctctctactagaagatgtgcctagtgacagcagcctcagagagtggtgacatgaaaccattatgctatgcacctggtccctgcctggcgtctatacagcaggcagcatccagttaaggggaggtccttgtcttccctttcccatctcactggatcccattcagataggcagtaggagcccgctttacagataaggggactgaggcccagccaggggaaggaaggggctcagggtccacaaggggtctgggcggggccaggaactacacaagttcttctgccttcctttgcactcttgtcgctgctgcctggcactggccttaactgtcagccactgtgacctgcaggactccctgcgtctgagcccggtgctaagccccagagcttcttgatactctcattagggggaccgggcctgtggcagaaacaaatctcttttggcttttattattaaaatagaataaagtgccaagctttctctgtgggggagggaaatgatggaggtggggaaaaaaaaacagccttccagccccgacgccgacacccccatgcagcgcccctctcagctcccagaaaggagagttccttccaggtgagttgtcagctctttctggggcagaagaaggtggaaaactaattttaacctctcaggattttttttgttttttttttttttttagccttcatgtctttcagaccaggggaaggacatcaggtacccctctatgtccattgagacacaggggaagaagggaaccaagggtgattttgcctcccccaggcaggttttgcaaaccccaggtggatactgaggccaatctgggctcggcaggtctctaccttctcccccgcagcagaaaatgaggtccctcctattccacctcttcccaaatccaaggaaggtgtcagcaggctgaagtcagatatgtgagtttatgaaaactggggcctgagttccagaccacctgcttcagggatttgctgtatggcgttgagttaagtcacctcctcctctgggcctgagttgcctcatctgtcccaagaggaacaacttccatcttgctcacttcccagggtggccatggaggcttaaagcagtgtgggctgatgtccaggccccagcatttagaggctgtaaccaaactggagcggatcccatggggagtgatcggaatggggcagggacccttagtctgcccacctgatgggggagaaccaagagatcagcctccaaattcatgttgcacccagcccagtgcttggcatgtggttgttaaggcacgtttagaacaggataaatcaatcagggttcccatagggaataatgggacaaggttagcctgagaagacattcatgggaaatcagccaattgatctacaagcagtagaatggctgtgacaaggcattagagattagagatagttcctggggacaaataagtagacactgtaagaagacagatttcaattctacacaagggccatggagtgaaggcaggggaatgagcttggattaggcatttgcaatgtgtctgggaactgaatggaaatggctataattggttgagcccttgctgagaagcagtaagctagggtgaggactcagcatctggagccagatggcctgggttcgaatcctgactctgccactaatcagctgtgtgatcccaggagagttacttcccatctgtgtctcagtttcctcatctgtaaactggggaaaataatgttacctgactcgggagctgctctaaggattaccgcacatgtgcacagacacgtctatacatctatccagagcagagcctggcaaatagtaagtgcttcaaagcgctgtgtgagtgttggccaggagcactgctcccccttggtcctgagctacttcgtttcatgtaatcttcccaatgatcttagaagaggtgctgttatcatctccattattcagatggggaaactgaggcccatctagattcagcagtgtgctcaaggtcacctatcttgaaaatggcagcaccaaaaatcgagtgtagctctgattgcccggaagccagaattcctaatcactgagtaatgttcagatcatccctcttgagagagacatgctgtgccctgctctcccagcccaggtgcagaggtccagagacagcaagtaccagactcaatgccacaaagctgtctagtgaaagaactcaggtttggctccaaggttcacgggcttgctttccacggcaccacacctgaccctgggtgatatctcgggccagcaggggttgggtgggccttctgggaggatgccgaggttcaagatgagacaaggtgacctttctgccctcttgcagctctgagtgggatgattaggtgagatgatgaacgtggaggccctccagaggatggaaattgggcgcacacgtgagactgttgtgcggctgctcgttatcagccggggccagaaagcccagattcctgtttgtgggagaacaggaagcacccacacatcacccggattatttcttctctttccctctctctgccgccttgtctctctctctctctctctttgtctgtgcttctgcctctctctctctgtctcctatcctccctctctctctagaaaaagatttgttccccgccactcagcagcagcactcaaccaaaatgagtaattaatcctcacagctcctctttatctggccctctcatatttggttacttttggcccaagaatattggaagatatgctacccagagtaaattaccttatttcactgactctttgcttggaaatatgttacattctaaaggtcattttataaaagggattactagatcaaggcaatgccacgtcagcttgattgctgtatcaacgtaagaaaccagggcaaaaatagagaatctagagttatttactcatctatgtcaggaagcaggctattcatcttttctggaatcgagtaaaactgctcccaaggcattttagacaggaatcttgatataacgggagataataataggaagattcactggcttgagggtttcttaaagagagattcgatgaagtggaggggtctggagatattcggctgtcatcatggaaaataatatatcccctctctctttttctttcttcttcctttctctctttctttccttccttcttcctctctttcttttttctttccttctttctctttctttccttccttccttctttctctccctctccttccttccttctttctccttccttccttccttcctctttcttttttccttccttccttctttctctttctttccttccttcttctttctctccctctccttccttcattctcattccttccttccttccttcctcttttctttctctttctttccctttcttcctctttctctccctctctttcctctctctcctcctctctccctctccctctccctcgctctctctctctctctctgtccccctctctttctttctggatccagcttttactctgttctaggccctggaaatacaaagaagatggacacagacactggtggacaagggggcacttcctggccttctgaagctttgggtctgagggaggacacaggcaggtaagcaggcagcgaggatggtgggtgcagagtgccgtgctgggaacagtttgccgggggttcgcgtggatccctgaaaaggctcgttccagcttaggaaatgttagcctgaccaggtggaaagctcacccctgctcgccatctgctgaagaagggtcacgtacatgccacctggctttctgcggggagatagcatctggaaggcagagaaagctcctctgggtggggagaagtttcactgggcaccatcatgatttattcagcagcgtcagacacctgcaccctggggccagcgccggccttggtggttctccaggattcgttctgggtgcacacacctgtctcttcctacacccggggaatggggggtgggggacagaggccagtccagaggcagcagcctctcccacccttagcctgggtagggggaggaagcagtcctggccagagccccagactcacagcggatgtggccagctcacctggtggcaagagggagccagaaacgtccttggggccctgagtcccagtgccaggactgttccctgcaagatttctcctcctaggctcaccacgagattcagtatcctgtgaagccttctcctaataaccccaggcagaactcactgctaccagcacctggcaggctccctttgtgtggattgtgtgtgcacacacgtgcacgtgatgtgtttacaaactagatgtgggccgttttgatacctccaagctaggattatgttaacactgtctgagtaatataaatcatcacggattaaaaacagcttgcatttgcataacatgtcgtacttctccagatgctgctcacatcttcattttctgcatcggtctcaccaggatcctgagaggaggagagggcgggtattagatgtccccaagaagtgaaaaaagaagtgtcaccggcattaaagactgagcaaggaggcgtcaaatctccttgaccccatgctcacagcacagctggaggagacagaggtctcgccttcaccgagcttagcggtatgacatgtttctccaggccagccttgcagtttttaacaccactgtttaaatgataattttgtttaaaaatttatttttatttggctaaagattgaataaggctggtgcggtggctcacgcctgtaatcccagcactttgggaggctgaggcaggcagatcacaaggtcagaagttcgagatcagcctgacctacacggtgaaaccccatctctactaaaaatacaaaaattagccaggcatggtggtgcacgcctgtagtcccagctacttagggggctgaggcaggagaatagcttgaacccgggaggtggaggtttcagtgagctgaggtcacgccactgcactccagtctgggcaacaaagcgagactctgtctcaaaaaacaaaaacaaaaacaaaaaaacccccaaaaaacaagattgaatagtaagctaggaacacagtagctgattagtgtaaagattagttacctaatattgatattaggcaaagttttaatttttaccatgtacagcaaaacctaatgctgtttccctattgtattctactctctttgggagtgtggccatgaagactgaggctggccatagccaggaccctccccaataaccatgtcttctgttttcattttgagcaggtcctaggctaagcactttgcaggcacgatctcaataaacagaggtaacagatcgacaaagtgtggccaggcacggtggctcacgcctataatcccagcactttgggaggctgaggcgggtggatcatctgaggtcaggagttcgagatcagcctgaccaacatggagaaaccccatctctactaaaaatacaaaaaattagccaggcgtggtgtcagtcgcctgtaatcccagctactctggaggctgaggcaggagaattgcttgaacccagttggtgagctgagatcgcaccacttcactccatcctggttgaaaaagcgagtctccatctcaaaaaaaaaaaaaaaaaaagacaaaatcagttttattcccattgtgcagatgaggaaactgaggttcagcaaggctcagtgatttacttacagttacaggtaggagtggtggtgcaaaggtccacacccagactgtccccagctcctgggggagtaaccactaggttttgctgcctccctcttctccagctcctctgccacagtggggctcctgttccactgccaggaccccaggtaggagcagggaagtcgtggggcaggagagtcagccctggattgcagcagcggccaccaaaggcagggccactgggcgatgagcctgcattaggcttttcatccctgctgctccctccagctcctcgttactgtccttaattatgaaataacagcggttcccaggcagagggagggcgggagggtggcagagcgagcatccagatggccctcctggcaagcgtgggcctcgcctggtctttatgtaagagtcgctctgctttccagattgccttcgagtcagatgtttaaacacttgttttgtgtttatgatacagaggaagaaattaaaaggcccccaggggaaaacgaggaagggaaaaaccaggagtgattctggggggttgtcaggccagatggagagagaaatcgagtctgggactggtgttcagatgaccatgagcaggtggcttctctgcccttaggtggtgagatccaggagtgcatgacagagggaagtgggtgagctccttcaggaaacaaaactggaactgccagcgactgagggcctgctgtgtcctcagcactgtgctctagcacaccttatatgccctctctttttcttttctttttatttatttatttatttatttatttatttatttatttatttgagacagagtcttccactgtcacccaaggctagagtgcagtggcacaattttggctcactgcagcctcaacttcccaggctcaagcgatcctcccgcctcagccctgcaagtaggtgggactacaggcacgccccaccatgcctggttaattttttaaaattttagtagagatgagatctcgctatgctgctcaggctgatcttgaactcccgggctcaagtgatcttcccgcctcggcctcccaaagtgctgggattacagacgtgagccaccttcccggcctatgtaccctctctcaatctctcagcagccctgttttacagatggagaaatcaaggctttgcggggggatttggtgacttggccaaagtcagattgcctgacgtgcagagttggcctgggactgctggaagtttttcccgcctggaacattcttcctgcatccaactccccctcctgcagaaaatctcccccagcaagccagcccagctgcgtgcgctgctgccccctaaatttcctgtgattgtgacttctgaactggatgtcttactgcatctgaccttcggtagctcgagaactgttcataggcccctggaatccgcactggaaaaggcctccgtagtcaacgctccaagcctccattggctttttagattccctgaaaggcatcccagctgtgctgaacactgacaccaaaagggaatcagtcaatcactgctcctttgaacggagtttgtggcttgacacttcttcactgcagaatctcttaatggacggaaccaagtcttcacttctctctttcatatcctgtagcgggtagtgcagtgctgggcccactaagagatggcagaagcacagcataagttagttgcaagagcatagaatcaccatctcttttgacaggtgaggaaattgaggcctagattgctgggggcttgcctacagtcacacagtgagtggtggacagagctggaacaaggactcagaccccttcctagcccagagctctacccactctttgctggccttgggtcttgctcctcccagcagatttgggtgttccctccacagtgctccccaagggccttgcacagaccgctgtgaaagcatgtaccagaatctgttgtcacaaaatacgcagggttttggagaccagggacctcgtgtcatgtctccggacctacggcttcttctgtaagcctggcccacagaaggcaccaggaaatgttggaaaaaggcaggagaagagggaggggggcagaggaaagagggatggaggagcagcaggggatggcaggggcctccactgtgaggggggtcccccaagacagcctgtcattacagccgagtcagaaggaactgtgacctggttgactgtgagcaggaggtgtctgaatacggctttgtaacaatcatggtaatatagagttcacaaatacactctgctttatccgattcccagtgcttgttgcatttggtttgcacaacacaggaggcatggggcttgtattatgttgattttgcaggtgaggagactgaagctcagtaaggtcccgctgttaattaaagacagagcttgaactattgaacccacacctaccagtttgtagccagaatcgtttctgccatgacatatttccttccttccttccttccttcctctttctctctctccttctttatatatatatatatatatatatagacagaatttcactctcgttgcccagaactggagtgcaatggtgtgatctcgactaaccgcaacctccacctcccgggttcaagcaattctcttgcctcagcctcacgagtagctgagattacaggcatgcaccaccacgcccggctaactttgtatttttaggagagacggggtttctccatgttggccaggctggtcttgaactcccagcctcaggtgatcctcccgccttggcctcccgaagtgctgggattatagacgtgagccaccgtgccgggcccattcattctttctttcacttctttcatgactagctcacattcttaggcgtgttgttgcttttccttgaacacgccaagcacaggccctctggggcatctgcacttgctgttcctctgcctgggatgttcttcctactgccatgcccacctgacccagcccttgcttcgctctgtttcagtgtcacctccctgaccacctgtccccaacagctcccccattaccctctcacacacctgagcctgcaccatttttcttcatagacccaatcactccctgactttatattgttattatatgctatttactgtattatattctgttttatagctatttgattaattacctcttccctctagaacatcagctccttgagagcagggttttgtctctgttgtccaccattctattctcagcacctagatccatgcccagcacatagtaggtgcttaaatacgtttctgtttactgaatgaataagcacctattatgtgccagaacctactctggattctgagaatacgcacatgattacgttgatctcctgcctctaagatgctcatagcagacagacaaaaatgggtcaccagggctgggcatggtggcttacacctgtaatcccagcactttgggaggcctagaagggtggatcacctgagggcaggagttccagaccagcctggccaacatggagaaacctgtctctactaaatacaaaaaattattggggcatggtggcaggcccctgtaatcccagctactcaggatgctaaggtaggagaatcacttgaacccaggaggtggaggttgcagtgagctgagatcgcaccactgcactccagcctggtgacagagtgagactctgtctcaaacacacacacacacacacacacacacacacaaatgaaaaacaaacaaacaaacaaaaacaaaaaaggggcaccaggtcagcatgtgggctgaggtaggcccccaataagatggctcctttagctgttgtgtggcagagcctactggatgaccgctagtataaattctactctatttccttaataacagaaccctaaatttagctgggtgtgaggtcacttagagtaaaggccacatttcccagcttcctttgcagtccagtgtggctatgtgactcagttctggccaatttccaggaagtatccttagagaaaaagggtgtcccctctgctgccctttcctctgctcactggattgagaagtgatgggtggacttaagcagccatcttgggccgtgaggatgaggccacacccccagaattctggcacacaaagctagaagcagcctgggtctctgaccctgtgaagcacaagtcatctcaccttcagaattcatttagctgagtgagaaatttacctgagcgaaaagtaaattggtttaatctacttttatttggggttttctgtgacttgcagttgactaatcctaatccttattgatgcagccttagaaggagcggagaaagtggctaggagacttgttttggttctcagagagtgagatggccccaccattcggcagagaggcagaagttgtggttgaagtgtatctggatctaggcagggcctgttgaccttgcaagttttataaatcattaatggtagcactcatttgatctccattcattcatttaccttttcatttatttcttcagttgtcccaccattcactcatgaggtttatctacccatccattcatccatcaaaacattccatgaggcaggtattcatggggctggggtgtgagtttgagccaggcagggaacagtttgcaaatgaagctcagctgggagactgggagcagggtctttggaactggagtgccctatctgaggcctggcagtgcttgctctctcatcaggcttctgcctctactggaggcacatctgtggagtggtcaaattcaggattacaggagtgtgccagtcccagggagggccagagagccctccaggttccttggggactcccagggcaggtgtcctcccaccccatgccctgcaagagagcaggcagtaaaccttttagctcaactgcaccttcattgtgtcatgaatggtggttgatatcagcaagagaatgattcatgtgtcttgtagtttctggaagatctagaaggcgtaaagtccctgcttaggacacatgctaagaatatgctggaagggagtcagaaactcatgggccttgtacgttttctccaaaattgagccaggatcctgggggaggagtgggattaacaaagatcacaggacttactggggtggaacgaggctgagacagcagagacaaggcatatttgatagaaaacaaaaagtggatgaaaaaatgactccctggatgtctgtggttcacccagaataagccggttttttcctggaacttcatgaacctgtactttcgcagatgttttggtcaaaactgaaggttacaagacagaaacaaagcaaaagtatctatctctgtaatcttttgtgatataacgaagcatcccaaaagttttttttttctttttttttggagacggagtctcgctctgtggcccaggctacagagtaatggcatgatcttggctcactgcaacctccgcctcccaggttcaagcaattctcctgcctcagtctcccaagtagctgggactacaggcatgcgccaccactcctggctaatttttgtattttttgtagagatggggtttcaccatgttggccaggctaatcctgaactcctgacctcaggtgatccacccacctcggcctcccaaaatgctgggattacaggcgtgagccactgcactaggcaggcatttcaaaacttgatggtgtaaaacaacaatatttttatgatttcccatgattctgtggtaagctgggcaaggctcctgctccacgtgatcatggctggacatgcaggcagctgcattcagctggtggccagaaggttctagaagggcggtcagttcttctccacatggcctttcttgccacatggtctttccctctggcaggacagcctgaacttccttacatggtggtggctggactctgagagtgaaagcagaagcttccaggcaccccccactttttttttctttttttgagatggggttcagctctgttgcccaggctggagtacagtgatacaatcatagctcactgcagcctcaaactcctaggtgcaagtgatcctcccacctcagccttctgagtaggtagtactacaggtacacactatcacaaccagttaattaaaaaaaaaattttttttagagatggggtcttgttttattgcccagggtggtgtcaaactcatagacttaaacgatctcctacctcagcctcccaaagcactgggatgacaagcatgagccactgctcccagccacttccaggcctcttggggcccaggcctggaattgatacagcctcacttttgccacattctattggtcaaagcatgtcccgcattatctcagactccagtgcagagaaaataaactccatctcttgggaggcatcgtcagtggccacatttgcagacaaacttccgtcggaagttgatgggatcatggagcctagaaaaaaagtaagatgtgaatgacacaggtttgacctacgcacaacttcatggacacacacttggtgcctagagtgagactcatcatacatcagcttagggcttaagccagtgtttgctgcggctgactctgcctctcttctactatgctgctttcctcttcatcaaacaactccatcaactggagaccactaaaaggaaagagaaatacaccaaggccacagtcattagcatcctggaacattggattctatttctggcagatcagaggtagttggcaaacctctgcccccgtctccccagctcagcactctgaggtaatgagcccactgtattatgtggcattagcagaaatgctggatgctgatcaagagaggaaatagactcccgtcctccatcatcagcagcctgcacctggggcttggggttcagctgtggcctcaggggaaggcagctcccatttattgagggcctactgtgtgccaagtgctgtgctaggtgcatctggtccctgcttttttctcaagcctcatcttgcattctattccctctctctgatttccaaccaatctgggtctattttagtgttttcaaacacgctgctctttctcttccaggtctttgtatgtactgtccccattgcttgatgcactctccctgtctcttagtcaggttaactcaaatgcatccctcagaccttaggttctctgctttctctgctggactgaaagtttctctggggtagtgccacaccccccgaagtactgcttggctcccggcccagtgttctgtaagtatttgttgaatgactgaatgatggagtgaatgactcctcacaacagcccgttttgaaagatggagcaattgaggctcagagagaactagcttgtccaaggccaagataaggtgagaggcagagtcaggatttgaacctgggtctgtgtggtggccaagcttgtgtcctttcgactacacctggcactcaggggtaaatgaaggagtggacgatggtgatggggagcgggataaggtgtccgagaaagaggcaagggcaaaggcacctctgtcccattgcttccaggtagtaacaccagaaatggaggtggaacctggggctgagctaccaagtcacacagagttcggctaagcctctgggagcctggtctcccagtgtctcttagactgaggacttacaggtgcctgctctgtagacaacaggtgtcaggccagcagctcagctgctgccagaatccggagggtcgtgctaattcccaggttcttcggtgccctccagttaaagggacccacagaagattccaggtcagaaacaggaggtgttagcaccagggagctgcatgggaggtggttcctgtagcagagagagcactgactccagagtccaaaaaacagactaagaatcccagctccatcaattattgctgactgactttgcccagttacttcacctgtctgagcctcagtctccttgtctggaaaatggggataataagacactcctcatatggttgctcagaaagccaaatgagttaactttgtagcagactgagaacagggcctgcctctccagctggagcctggcataaggagagcagttggtaaatgttaggctagaaggcctattgttcctccattgccatggaacctttgctgcttcagcttctctcccacataatagtttgctctgcgtgtttcccagggctgttggaaggatcaaatgtgatagaggatggaggagacacctgtcaaatcctgtctgaagggagaaagctgaaggaagttgtgttgcctttgtgtctccatttggaccacactgggcccaggccaagggactcaataaacacctaaaaaggagcaaaaggtccataggcttgagagatgatgatgatgacaacaatgatggtggctatgatgatgacgctgacggtgatggtgatgatggtggtgatgatggtaataatgatagtgatgatggtggtgatggtgatgatgatgatggtggtgatggtggtaagggtggtgatgataatggtgataatgatgatgatggtgatgatgggaatgatggtgatgatggtgatgatgacagtgatgatgatgatggtgatgatggggatgatgatgacagtgatgatggtgatgatggtgatggtgatgatgatgatagtgatgatggggaagatgatgacagtgatggtggtgatgatgacgatagcgatgatggggatgatgacagtgatgattgtgatgatggtgatgatgatgatggtgatgatggggatgatgatcacagtgatgatggtgatggtgatgatgatgatggtgatgacggggatgatgatgagagtgatgatggtgatgatggtgatgatgatggtgatgatgacggtgatgattatggtgatgaaggcaatggtgatgatgaggatgatggtgatagtgatggtaatgatggtgatgatgacattagaaagagggatgcagtccaagccttaagaagacaacagggcatcataaaaaaagatcaaaggatagttgttcaaacacccagatatctttaagtccaggctctgcctctaactagtcaagtgactttgggcaagttgtggaatatctctgagtgtcagttctgccacctgtaaaaccgaaacaagaaccctgccctgcatgcttcacaggtagcctccatggggatcacaagcattttcatacacacaggcagctgtggttactgctgctgtatccgagagcagatcctagcccaggcagctgttgctatcagtcagacttagttcaagctctgttatttccttgctcaggtgttgtcagcctcagttttctcatctacaaatgactctaataatgcttctccacgtagggttgtggtctggctaaaatgggtccatgtaattacagggatccacccagtgcctgcaaagagtgggggctccataaatggtcttcattgtgattgcaagcctctggtccactccagctctttctctcctggctgcccactcagcttggcccaacctggttgatcacagtcatcatagttccctgcaaaaatattctgtggtgcattctcaaggactagatgaggtcacaaagggctgccctgtatggttgtgtaggttgcttactgtgcaagggcactcagctgaggaaatagcttgtgcctttcctttcaaaactgagagctttccctcaaagctgagagctttaaagacggctgcctctgcctgggaaaggaacctttcttttatttgcataaaaacaacacatgggctggaaggcacctgaatcacccgtggtgggattaaaccagcttggaaatgtagactcggatgggtctcagagagcacccaacattcttgttggacagaggaagaaactgaccactatttattcattcatccaacttttactgcccactgattgacaagtaccacctctcctctcaagagggcgaggaccccatgacagattattacatgcttttcaaacctatttggatattgattctggacatcaagagtttatataggaagctctggccagatgcagtggctcacacctgtaatttcaacacattgggaggcagaggcaggaagctcgcttgagcccaggagtttgagaccagcctgggcaacatagcaagaccctgtctctacaaaaaatttaaaaattagccgggtgtgatggtgcatgcctgtaatcctaggtatttaggagcctgaggtgggaggatcgcttgagcccagcaggttgaggctgtagtgagccatgatcacaacactgcactccagtgtgaactacagagcaagaccctgtctccaaaaaaaaaagaaaaaaaaaagagtttacatagcaagttcagagagtaaaagatgatgcattatccaaatctattggaaccccaagtttcagatatgagtagcaagagttcagacagtgagggttgaatccaaaagcaaaagatttctgtaaggcagctccatggagcacagaagagagagcaaccaagacttcccagaggcagtgatgcttgattccagaaggaaagctaggagcctgctggcaatccagagatgagcagcccctcaggcacaggctccagcatgtgcaaagacctagggtacagagagcctggcaagctcagggaactacaagtcagtgtctttggctggagcataaaggaggggaggaagaatgccgggcaatgagggtcagagacgttaagtggcccattcaagggtcacacagcaaacttctgtttagttgggattagaacccaggctcctgactgaattggggcttgcttggatcatcgggctcagtgggtggggggaggggcagcaagaggcagaaatggtcagatgcaccgggggcagggtgtggctggttcagctgtgctcctgttgatctttggcctggtggggcacccctcctcccatgtcattgccagtctgccttcagggatgtttggtgaggccttgaatgccagatgaggtgccagcctgttccggctatctgccctctgtactgactggcacctgacccagtgccccagtccagctgagcttatgcagctggtgacccattgacctctgatgaagttcaaggctggcacagatgcccaggcctgccaaggcaagagactcagttagaggctgtgtagtctgggatggtgcattcagcaggaaagaatgagcctgtcatgagcatgtgttgaacttggtcaagccacaaaccgtctctttttttttttttttttgagacagagtctcactctgtcgcccaggctagagggcagtggcgcaatcttggctcactgcaagctccgcctccagggttcatgccattctgctgcctcagcctcccgagtagctgggactacaggcgcctgccattatgcccagctaattttttctatttttagtagagacagggtttcaccccgttagccagggtggtctcgatctcatgaccttgcgatctgcctgcctcggcctcccaaagtgctgggattacaggcgtgagccaccatgcccagccccatctctttgtctacaaaacaggaaggctgggccacatgacctctatggtatcgccaacttcaatcttctggccagtgcttctcaaactttggcttgcatcagaatcaccaggagggctggttaaaaccaggtggcctggcctcactcccaaagcttcaggttcaccggcttagagtgaggcctgagattctgcatttccaagtcccagatgatgctgatgctgctggtccagggaccacactttgagaattactgctctagcaaccctgggtgcacattagaattacttaggggagctttaaaccgtatggtgatgaaacccaactccagagcaattaaatcagcatctctgagtggggagcctgggttttggtatcttttaaaagctcccctaggtgattctaatgcgccgccagcattaggaactgctgttctagaaaagcagcctgacgtgtgctttttttcctattggaataatttctcttggaccccagctcagcctctcattagctgcctggttttgaacagtctccctgaacctcagtttccccttctgtaagtggggctgttaggaggactaagtgaaactctgcttcactgtgtctgtccacccttccctgtgtccaaggagagcttgtacgtttcttctgctctgagactgtttggctgaacacaattcaataagcatttattaaaaacttataatgtgtgagatgctgcccttaatgatgtgagaataaaaggatgaatcaggctcggtccccactcaaaagagctcacatgctaatgggggtgacgaggcatgtgtccaaaatatgaagcaggaagtaacaccggctacggaggaagtaatcatggtgaaggccattatgtgtgaagcacttcgcagtttattttaatcctcccaacaactccacgaggcagctactattgtaacacccacttttacaggccaagaaactgaggcttaaagagaggaccagttacccacagcacaagagccaggctttggtgctgtgggagcccagaggaggagattcacaccattagaaaggctgggagtaagttttgtggggagaagtgtggacacagtgctttgaagaatgtgtaggagtttgatgggtaaatacagagaaaagggtatccctgataagaaaccagcatacacaagctcagaggagggatagcttctcttctttagagacccggaagtgatttgattttgctggaatggaggttgagtgcagggcatggtgggaatcacgtcctggttggaggccttgttcgctaggataaggaatttagatttttagactttatatcttttttttttttttgagacagagtcttgctccgtcgcccaggctagagcacagtgacacgatctcggctcactgcaacctctgcctcctggatacaagcaattctcatgtcccagcctcccgagtagctggaattataggcgcacaccaccacgcctgggtagtttttatatttttagtataaaattattatattttatatttttagtagtagggttttgctatgttggccaggctggtctcaaactattggcctcaagtgatcctcccatcttggcctcccaaagtgctgggattataggcgtgagccaccacacccagcccaagattttatatcttaagcaatggggagcccttgaaaactcttgagcaggaggtggcagttttagaacagggctaaaatggtcacaggttatatgggagagagagggtgacagggagcccagggacgaagggggcagctatgacaaagggtctgatgagggatgataaagcaagtgggtggggaggggggaaggggaaaataggcacatgtgagaagtgtgctgttgctacacaaagcttccttgggcatcagttgatcccttatgtgtatttgcttattgactgagccctaccataccaggagtgggggagggcaggagcagaagacagaggctggggcaagtggacctcccagggttctcactccacatgcagctcccctcgcgactgggatatggtcagtgggacatgacccattctgttgaacaactctgcagaagcagggagcaattggttcttgggccgtctgctacatttccgtgatggaggtggcagagctggcccagcgacctgagtcttcctgaccccagccttccaggtgaagcgtgccaccctgctcacctcccactgccaagttcactgccagctcaaggctcacagcctgtgtgtgtcatgcccagcacaaaccctcccgggctgaagccagttcccagaggcaaagtctggatgtggaaaatgcaccaggctgcaatcctgccacttgccaccaggtgactttgggcacatccccttagcccctctgtggcctaaattggggcattaaacacaatcaggtagtacaggtactgcaccctccacccccacctgccccatcctctctggttaactttcctggagaatctcaagatgttacagagacaagcaaagcaagtcactttccatattcaaagtcccaggccattttagtacttctgtcattctgtggacccatcaatatcatacccattttagagatggcacaaccaggacccagagacttttcatgacggcccagggtcagatatctaggtagttacggagacaggacttgaacgccagtctctcagccaatggagctgacccctcaggtgccctcccagacccctgcgtcctctcatgaggtagggaggccagatctgggttgggggtgaggctggcagacatccctgaggtccagggatctggaactgagggacacagacacagcatcccatccctttgctgtatcacacaacgagaacattctcttttaagcctcctgatatgtgaaggagaaagtctctgttaggtgctaatgggtatttaacacctctccaaaccttgccaatctccctttttcactgagggcacacatctcaagccttggcaggccacggtttccagctggaatttaataaccttgctttgttttcactgtgcttattttaactcttactttctatttatggcaagtgatactgatttcccatttaaggcagtgatataatgattctctaaaaaaacgtgtttaaggggtggggaaagtggatctgatattttaaaaaatatattaagtaataagtggtgtggagatatggcccagtgagaaggcccgatgtctggcctaggtcaagcccctcatttaaaggtggggagggagaatgcaggcaggagacgcaatgctcaaggcacctggtgtgtccccgtcggccgtggtctctgagactcgcatgcctcgaagacctctggctactaagcctaggtgactccccgcccctctgggcgacacgtgcatggcccatgtgccagtccgcagggtcccgtgggcaccgtgagctcgggagggaggcggcggctgggacaggcaggttggacacctgggagggcacccggggacttccgcgaaggaggagggcgctggaaccgtggcgcgctcgacctggccgggcgcaagccgctggagaccccggccgagtgggcaggcggccggaccccatgcgggtcacctgcggccaggccgggcgtgcgtgtgagcgcgtgcgcagacgtcagcctccgaggcccgggccgccttctgggcaaggtgcgcgcgcccagcggccccggccccacgcgcccggacacgcggaaccgcagaccgcggcgccccggaggccgcgaaagggatgggcggggccgggccgcgggacccgcctcccattggccgggcgccggggcgaggcggggcgccggggtggggcggggcgagcgggctctggggggcagacgctggcgctgggcggcgggaggcgcggctcgcggggggccgaaggagcaggtgggcgacgctcgcaggggcgcgggagggtgccgctgggaccgtcatcaggagcctggggttctgccacctttcggagggatcagcgacctcttcgccctgcgggtgacagtggggcatctgcctgcgagagggggaaggagggagaacccagggccacacacaaagttctcctcatctggggacaggaggaggtgaaggaggaggagccgggttgatgctaacttggagctgcgaaaccttggggcggcgttcaaggccccctcccacacgcgcgcagagcagagcgccctgctcctccttcagctgctggcgtcgccgcgcggggagaaagaagccgtccctccggcgctgggagagctgcagagccgcgggcagagaaggaggccgcggccgagcccggcagcccgataccccccatccgagcgaccccctttggggcaggcggagaaggtggcataggcgaccaggagggttcgcccacctgggacacgcacccacagtcacctccaaaggaccccccctccccaagtctctaggagctgctccttcatcactggagtcgcccctacctctctgcccccagcccgagagccccaggcggggacccccggatcggacgtccccaagcctccgggcacctggctcagcaggaggcccccggctcggggcagggcagggccggcggcggcgagccggagcccgccccctgcccgggccccgccgagccctcggagcccacccatggggcacctgccccttgcgcctccttgcccggccgcgcccagcccggcgtcccgagcagcgcaggggaggatccccgcgcagtgacccgggagccaccacagactctgggaggctcggcggctggagcagcaggcagctccccgcagctcccggcgcttccaggcagctctctgagccgtgccagaggcccggcccgccattcccaggtaggagacgccccaacagagctgggcatctgggggaagtggagcagccgggaagaaagggtagaggcttggaggaggaaagctcagtgattccttagatgaccagagaaagtgaaattgattgagcacctactatgtgccgggatcgtctggcaactttgcatacctagagagaattaaattcgttgagcacctactgtatgtgtcaaactgagtgctatacccttgacttaatcccaggaaagaaagatttattgagcttctactatgtgctagttttggtgccacaggctttgcatttaaagagctagagtaatagcccatttaaataggaggaaacgggggctcagggaagacgagtcaactaccacaaacactcctgtccctcttctggagctggctgcagcctgcattacctggaggtggggaaggaagattaagaagctccttcgttatccagagttcttgagctttttctgggttggtgcagagtgagtttcctggatgattcccttcccaggaggggtttcctgtaacttagctgtcttggagggcccggaaggcagctctggaggcctctctgtgccctcccctccccttgtccccagcaccaggaggatgacaggggatgttgtccaagacctcatggaaggtgggaagccaggctgggagggagcagccaggtcaggagccagtgaatcaagcctcctgtggtgtcagagacaagatggggtccctgcaagacctgcgcctgcattccagtccagcctcaccaggctgctctaggcagccccacgactgccaagataaagtgccacgaagaaaagaacccagcatgtgttcaggtttgctgcgggtcaagagctgggtcagcctccagacttattggaaacccagggccacacagggggtttatgtcttaccattaacagaggaataacctgagccccaggaagccaagtcatttgcccagggctgccgggctggtgagaggcagagttggcctgccagaagtggatgcctgcctaccttctaccacctgagctgccaagggtggtggggttggctttgccaagctcccggactctcagagtggcagctggaagccagtgatggcaatgtgcgtgtccaaagaggctgagtgtgcactgatggaggaggcatgggggtgtggaggaggggcagtgcagtgaaacaggctctggggcatacaccgggaggacacgtccagactcttgtcctgctgcctgtgcccgtgtgaccccttcatctttcaggcaggccctgggagagaggctcaagggagaagtggtgaatccacaggtgcacttgctcagaggtggctggcagggttaggggagaatcctgggaggtgcctgccccctttccgctccgctgcctgcagggagagagggagtgagaatatagtatgtctcggcgtcatccccccgcctgatgccagctgaggcttcactgagacagacagtgttttggaaaagaccagttttggctgggggtgggttttcatagagttaagagcccagactttgaagccaaacagcctggttctgatcccagcccagctagtcatctgctgtgtgaactggggcaagtgacttaacctctctgagcatcagtgtccccatcagtcaagtgggctgatggatgccttcctggctgtggttactgtgcccccaggatggcgtcccctcatctctgctctgggaactttctggcttccacctgtcctcagaatggccctgtgatggggtcagtagtcacagtatgtgcattcagatacctgtgccgctagggggtctccgttgaatttcctgcctctctgagcctcctctctctgattccttacttcccctctctgattccctgcctcctctctctgacttcctgaaatccattcagtcactgatattggactctaaattcccaaagggctcttcaaactcatccctgtctgctcctcgctgtatgaggtcagcctggctgaggatggagaagggagaacaggctgcagaggagagatgtgcctacgagggtgcccatggtgccacctctgggggaagagagggaagaaagatgtggaggcaggaggcggagcccacagaggcactgtcccctggcgtccaggtgtccagatgtctcacacagccccacgtggctcaggccatgtgaagaatcagtcttctctcagagataaaaaccacagaggattttttttctctttttccccaccctgattccctgtctcttatttctgactccttgcctcctctatctgtcaccttgcctcctctctctgactctttgcctcctctctgactccctgcctcctctctctgtctccctgcctcctctgtctgactccctgcctcccctctctgtctcactgcctcctctctctgactctctgcctcctctctctgactccctgcctcctctctctgattccctgcctctttgaccctctgcctcctctctttgactccctgcctcctctctccgattctctgcgtctttgactccctgcctcctctctctgactccctgaagctcattcagtcattgctatcaactcgtctgtaccaagctctaggctggaggctgggcagggcaatgatggagacaaatactgtccctgggagcttctggcccctttcccatcctgtttagacagaagtgaccgccagcagagtcaagctgtctgcagaaggacttggggagggggctgtcatggggtagggcttctttccccccatctctgctgaaggcccaggctggctgagacagccccggcagagactgagaagggctccctgctgtggtctggcagccccctctccaccctcctctctctcatttcctgcctcccacacgtatgccctgggcacctcatcagggctgccctaggggagggccctccttggcacagcccctgggccagtcaggtggttgaggctgaggagagaaggtcccagagtggggcttcaggcaaacccaaagacagagccctttgccatttgatgaatgcacagaccctttattgagcccctgctctgttcatggcatggcagttttgtgggataaattcaaagacagctttaggtgggagctgggtgggggatgtgggggtcttaggcttgaactactacccagcctcctttgttaaccaagtagctagtcacgtagccttctgagctcggggcagaccacctgggatcaaacctctcctctgctggttactggctgtgcaactgtaagcaagtaatttaacctctctgtgcctcagtttcctcatctgtaaattggagaataacaccacctgctttctggggttatgaagggagaaataggttaacatgtgtgcagcacttagaacactctggcatattttagctgcaaaatgaatgccagctatgattatttctatacttagtgcggggcttggcacactgcatgggctcaagtggcagcagttgtcgtccttgtggctccaggcctggggtccgccgtgtgctgagctggcttattgtgcacgtccctttgtgattcattcatcgaagtcacattagtagcttagaagtgaccgtagtgggagcatttacgccatggaaattggcaatagggcttttaacaaaggtatttttgagagccggtttcctgcacagaggctggtagttgggcagggtgagcagatccagatgtgtgccagggactcgcacgcaggcaatctctccacctccagtggccatctcagaccttagcttcatgatagccaggaagcgatggtgttggaaagcgccttgggtcaatgggcgaggcactcaaggaaaccgacttggggcatcctggggtggggaccgagtttgggcacatacagccctttgtgtgaatttaaaaacagtgccttttcctctacacaagatgccctttcgtctgggatacagcccccacctctgggatgcagcccccacttgcccacccagccatgcgccttgtgcagtatccaacctgcacaacctgtggcagcctgtggaagacctaggggattgatatttcagcaggcctgtgcccatttgcagttcaggggctggaaagctctcctctggagaggggagggattcctgcaagggtgaggagatcagagaggccttcagagagcaggtggcacttgagccagaccctgaaacataaggggaagagggtgttctgcagaggggtggcatgagcaaaggagtggaggctgatctcagcagagctcaaactgacgagggtgactggggtcaggggttctggggcggggattctggtgggcgctaaggtaggaaaggagggagggctgggctgtgaagagcctttggggtgagcctggtggagcctgcgggtttgcttatacaagagcttggatccatgtcggcctctttcatgaggtcaagaggctcccatagaaagctctgggtttgccccagaaccataacccttggagttgggagggaagcttgagccagccatgggtcgttccccattccacatcctctactccgggcctctgggtctcctggaggcaagtaaacacctagggcctgggaggcaaaaatatccgggcaggtcatggagcggagggagcccgccagatgcagagcacaggtctaaaggtgggtcctcctgaggtggctgcaggagcaaccccaggcattgggcttggagcatgcggtgtggacatagccttcccttcttcccaggagggctgaatggccacagaaccaccccctgccccaggcttaagaaatgcatgctagtgccttccccatgtcttatcctagaatcacaggctccgggaaagccagatggatgaaccagggaaagaacggattctcaccatagataccatttttgagatttcaccatgtgctgagccctttgcaacaactctatgaattgggctcattttgcagatgagaaaagtgacttctagagaggttaagctactagcccaagatcagtagctagaggcaaggcaaggattcaaatcccaggagtccggtgcttgcataaatgaaaggatgaatgaacggatattgagtgagtgagtggatgaaggaaggagtaaaggagagggcatgaatgaatgagagggtagaactccaagaccccttagaacctcgtctgatgttcccattttacagacagaaaactgagtcctagacagaggcctagaggaggccaagaggtggtggggccaggtcgggggggccctgatgcctgcttctctcgctttgttgcagccccgagccatgatgaagactttgtccagcgggaactgcacgctcagtgtgcccgccaaaaactcataccgcatggtggtgctgggtgcctctcgggtgggcaagagctccatcgtgtctcgcttcctcaatggccgctttgaggaccagtacacacccaccatcgaggacttccaccgtaaggtatacaacatccgcggcgacatgtaccagctcgacatcctggatacctctggcaaccaccccttccccgccatgcgcaggctgtccatcctcacaggtgaggcccactggtgcctgggctggggcggcagggccagggcatgggtgcggagtgtgctgggcacttggcagtttgcatagacttgcatagccatcgtctgagacaggcgtcatccctgcacaatgaggctcagagaggttttgccatgtgctggaaatagtgatgaagtcgggggccccgattccattctgttagactccagatcgattactcatggctgtcggggccgccttccagatcaggagctgataccagcatgccccagggatattcctttctagggaacagaatgatgccctggctgctgctttccttctccggaagatgacccaccagagctccagggcccaaggtcagtccacggggctcaggtctcccacaccccaggcctttgccacctcctagagaggtaagggcaggacccaggcagtgatcaccaaagggaagggggcttggtcatggtcatagtgatggtgatggcactagctgacacttatcagaagctatgggcctggccctgttcttagagcttggcatgtagttttttttgaaacagagtctcgctctgtcacccaggctggagtgcagtggcgcgatctcggctcactgcaacctctgcctcccgggttcaagcgattctcctgcctcagtcccccaagtagctgggactacaggcatgtgccaccatgcccggctaattttttgtatttttactagagacgggatttcaccatgttagccaggatggtctcgatctcctgacctcgtgatctgcctacctcagcctcccaaagtgctgagattacaggcgtcagccaccgcggccagccagcatgtagttatttaaccctcatagtaaatagttattcattccctttttacaagtggggaaactgaagcccagagaggttaagtaactcactccagtggtagcacagctcgtaaaggcagtctgcttttgtgctttcagacaaagccataccacagcctctcagccctgctgggaagggtgaggagggacagggaggttggggggaagaaggggtgagtggagctgaggggctgtgcccttgtttacactgcattagcatggtagctaagaggacaagcccgggacccagcacctgggtgtgagccctggttccgctgcttcctggctttgtacctcgaggcaagggattttatctccttgtgtctcagcactctcatctgtaagactgcaccacatcaacactcatcctaaagggactgtgagacttaaatgaatgaatatatgtaaggcgcttggtgagcagatagtaaatgcacaataaatccccaagtcttctgttgagtcagcatttgcaagtgggcctgctacgggttacacgatcatttcccaagtcacgcccctgaagttgctgagcagggataagggaaggagtgagcaggcaactctctaggcatcattcagataaccccccaactgaggtacttctatacagagaaacccatgccactcccagccctgctgccgccttgaggccaagactgaggctgcggggtggcccctccttgagtgctttctcttccaggctggcttttccgagcatctgacccagacagcagtcaagttctccgctccaccccgagttttggagaaggggcatgtagataggagagccctgggtcgacctgtgttcgaatccttgctgggcctcttggcttaaatgtgtgaccagaggcacatgcatcctgtctgagtctcagcctccccagccacacagtgggcttaacctcataccccgcagggaggctgtgaggactgcaagaaggcttgtggcgggagcttccagcacgtgacgggtattgcattggtgtcagctcccccagccttggggaggggactgggtacccgctgcaatgaataaggctaatgacagagggaaggagaggggagatgtagagaggaagcacatgcatattttcagcattaattttcagtgacacaagtaatacccaaacacaccctcctgcaaacgctacagataaagctaatgcccctttgacccatgtccccaatcccaggctcctgcccctgccccggaggtggccaccctggcagtctggcatggagccttccgggcctccgtgactacaccggcattcgtatttgtatccccacaatggagagtatttttgtctgtctcttttttatggcgcatatcattctgagcacagctgtctgatgcttgtttttttttcacacaccaacccgtgcctcattttccaacctggtggaacctcattttttcaacctcattttcctgctgctcaggaaattctgaaagccattaattccactgccagctcttcttccagctgccagacgggccgatctctgatgcttggcatcgcagtctcgcatttgaatatgtcaaggccacgagtcctcaggggccccggattagcctaacgggatggggtttggcagcccaagcaggaagagttgccaagctgacgctgcctcgcaagtgcctttcagaagagcccacactgcagttccctccatcacctcccatccattcaggcttccttggttaacactgactgtgtgccaggccctggggagaccaggacgagtgggtgatggaacccttctctgtgcccgagctgtttggagcacacctttgatctggacaccattctgaatgtgccatgtgccattaaatgggggtaaatgatgtgctctgggggtgcagaggaaggtggcagccattctgccagaagctggaactggttgcttctcttctcaagaatttgggccaattgctgattcctctgggcctcagtttcctcatctgtgagacagggatcttgtcacaccacaaggctatcaagagtttgagcaaaagtggttggacgcagtggctcatgcctgtaatcccagctctttgggaggccgaggtgggcagatctcttgaggtcaggagttcaagaccagcctggctaacacagtgaaacaccgtctctactaaaaaatacaaaaaattagccaggtgtggtgatgggcacctgtaatcccagttactcgggaggctgaggcaggagaatctcttgaacccaggaggtggaggttgcagtgagctgagatcttgccattgcattccaggctgggcaacaagagtgaaactctgtctcagaaaataaataaataaataaataaaaaatagctaggcatggtgacaggcgcctgtaatcccagctgctccagaggctgaggcaggagaatcgcttaaacccaggaggtggaagttgcagtgagccaagatcacaccactgcactccagcctgggccacagagaaagactccatctcaaaaaaaaaaaaaaaaaaaaaaaagtttaagcaaaagtgaggaaggtgcttattaaaagctggaaatcaggatggaggtaccagtccagacagcctccccaccaccccaccgtctccacagcagcccctgtttcagattcacaagcctgccttgagtgatgcagtgagttatcctggaggcagtgtgggccttggaggccagcactcactttttcatcctatgatttatttgagaagcagagagcacctaccgggtgccaggcacgagctaggtgagaacagaatcaggtagaaatctcagcctagccacacggaagctgtgtgatcttgggcaggctgcataccctttctgagcctcagtttgctcacctgtaatgcaaaggtaacaaaatcttgacagaggcatagtgaggaatcaagagaacaacgggcctggagcatacacccagtgcttagcccccagtaggccctcactctcatcattactgacacctgaggtcactgagcatgtgccactgtccattcattatcttgcataactcccaaaatcatcctgcaaggtaatatttcatcttcatgaaacagacagagaaactgaggttacagaggtttcgtgatctgcccaagtctgctggcagctaagcggatgaggccagatgcaaactaggcattgagcaagacaggcaggacccctgctctcatagaaatgatttttattattatctgaacacagtccacacaagtgacctacccctctccagccctgcaaagaaatgtgaagtgagttaactgtatttgaaccaagtggtccacgtgttagctatgcgactgtgaacaggggcttcaaccccctcagcctcagtttcctgtcctggaaaataatcgcagggagaataatcgcagctaccccgaagagtcgctgtgtaggttaaagcagttatgccgcataactgcttcagggcacctgtgactcccagctcttagggctgatgttctgtggccagaggagggcaggggttgcagctggccggtgaactcactacctgggctctctccctgcaggggatgtcttcatcctggtgttcagcctggataaccgggagtccttcgatgaggtcaagcgccttcagaagcagatcctggaggtcaagtcctgcctgaagaacaagaccaaggaggcggcggagctgcccatggtcatctgtggcaacaagaacgaccacggcgagctgtgccgccaggtgcccaccaccgaggccgagctgctggtgtcgggcgacgagaactgcgcctacttcgaggtgtcggccaagaagaacaccaacgtggacgagatgttctacgtgctcttcagcatggccaagctgccacacgagatgagccccgccctgcatcgcaagatctccgtgcagtacggtgacgccttccaccccaggcccttctgcatgcgccgcgtcaaggagatggacgcctatggcatggtctcgcccttcgcccgccgccccagcgtcaacagtgacctcaagtacatcaaggccaaggtccttcgggaaggccaggcccgtgagagggacaagtgcaccatccagtgagcgagggatgctggggcggggcttggccagtgccttcagggaggtggccccagatgcccactgtgcgcatctccccaccgaggccccggcagcagtcttgttcacagaccttaggcaccagactggaggcccccgggcgctggcctccgcacattcgtctgccttctcacagctttcctgagtccgcttgtccacagctccttggtggtttcatctcctctgtgggaggacacatctctgcagcctcaagagttaggcagagactcaagttacaccttcctctcctggggttggaagaaatgttgatgccagaggggtgaggattgctgcgtcatatggagcctcctgggacaagcctcaggatgaaaaggacacagaaggccagatgagaaaggtctcctctctcctggcataacacccagcttggtttgggtggcagctgggagaacttctctcccagccctgcaactcttacgctctggttcagctgcctctgcaccccctcccacccccagcacacacacaagttggcccccagctgcgcctgacattgagccagtggactctgtgtctgaagggggcgtggccacacctcctagaccacgcccaccacttagaccacgcccacctcctgaccgcgttcctcagcctcctctcctaggtccctccgcccgacagttgtgctttgttgtggttgcagctgttttcgtgtcatgtatagtagtagaaatggaaatcattgtactgtaaaagcctagtgactccctccttggccaggccctcacccagttcagatccacggcctccacccgggacgccttcctcctctgctcccaaacagggtttccgtggcctgtttgcagctagacattgacctccgccattgagctccacggtttacagacaattgcacaagcgtggggtgggcaggccaggactgcttttttttaatgctcccatttcacagaggataccaccgagactcggaggggacacgatgagcaccaggccccacctttgtcccctagcaaattcagggtacagctccacctagaaccaggctgccctctactgtgctcgttcctcaagcatttattaagcacctactgggtgctgggttcactgtgtcctaggaaaccaagagggtccccagtcctggcctctgcccgcccctgctgccccaccaccttctgcacacacagcggtggggaggcggggaggagcagctgggacccagaactgagcctgggagggatccgacagaaaagctcagggcgggtcttctccttgtgcccgggattgggctatgctgggtaccaccatgtactcaggcatggtgggttttgaacccataaaccaaaggcccttgtcatcagctcttaacaagtatattttgtattttaatctctctaaacatattgaagttttagggccctaaggaaccttagtgatcttctattgggtctttctgaggttcagagagggtaagtaacttcctccaggtcacacagcaagtctgtgggtggcagaagcaagctagcgctgggcattcagtacataccacgatgtgctccctctcttgatgcttggcccctggggccttcagggctttgggacatcttgtcctcaaccctctccctagatcagtctgtgagggtccctgtagatattgtgtacaccatgcccatgtatatacaagtacacacagatgtacacacagatgtacacatgctccagccccagctctgcatacctgcacctgcaccccagccttggcccctgcctgcgtctgtgctcaaagcagcagctccaaccctgcctctgtccccttccccacccactgcctgagccttctgagcagaccaggtaccttggctgcaccggtgtgtggcccgctctcacccaggcacagccccgccaccatggatctccgtgtacactatcaataaaagtgggtttgttacaaagccgtgtccttgcccatgtgtattttttgtatttccaagaggaggtgtgcccctttccagaccaaagctggcctttccctcccaaaatgcacctgccgtgtgccctggccctgagggtcagcactgagtccaccttcaagtgtaagtgtggggagagggggataagtcccccagatggaaggtgatgccctccttcagcctggccctcctgggtcctccgggtgtgtgtaccgaggtgtctgtgtccacaaagaaggggcccccgtggaccattagctccaggaggatctccgtgtctgagttctttgtgattcctgtacagcagcaatttcacccgcaggggacagttggcaatctctggaaaccttttccaagcctggggctggggctgctactctcatctggtgggtggaggccagggacaccattcagtatcctccaacgcacaggatgcccctccacccccaccccactgagaattatctggcctcaaatgccaagcgtgggcagccttacttagactcaccccaggggctgggacacgcccccacctgcgtgtgatggatttgttggaccacattctggacggaacccacagcatgagcactcctgtgaagtgagacaggatgtgggtgaggatggaaagtggaggctgagggagaaggtctgggccctgaccaacacggaatgtgccccctgggactgagaggcttccctgggcagagggaaaggaggaagtcagtgaggtaaaatactccctgtgtgttttacccagcgagtctcacgccatcctatcacccagccccgagggaagcccactcatgttcaccccatctgagcatttaggctcagagagctcaatatcttgtccaagatggcacagctggtgaagtggcagatcagagattcaacaccagaggctgtctgatttccgtctggctgaagaaagattttgcatcagggaggtggaaaccatctgtgcttttgatcagcaaatgccaccagcaggatcagggagctaggccataaaggaggtcgagagacaggcagtgtaaggttcattgggaaccacattgtccattgggaagccacaacctctgcacagacattcacaaaacagagccaggctgtggtggaggcgagaccacacaagtccatagtgtggggagctggagaactcccagcctctacctacctgggggccccgctcccagcctgtgcatatctgggggcccgctcccagcctctgcatatctgggggccctgctttcagcctctgcctacctgggggaccctgcttctagtccctgcctacctgggggctcggctcctaacctctgcctacctggggcctgtctcccagcttctgataatctagcagcccagctcccctccaatcctttgcccaccccagccacagaaggtcagtgtgggaggcatgtccctcggacactttctagatcctggttttcatacacacaaagcatggaggcgaacactcccttctgcatcgccatcagcgctgaaccataacaagggcgctggtgcacagagacaggcctccacggtgtcccgctggagcccagcctgctgctgccactccctttctctatgtgggtctggaaataagtctcgtcccctcgcaggcctccttttcttcatgagtaaatgggaggcgggaggaaggcatccggaccagatacacaccaacagcctctcgcagccctgatggtctctactagaaggaattaatattcctattgcataactcacaacattccaatcatcaccaaacagaacacgctcgccccagccccagctctagccccactctttgttccctgcatcccacagtccttgccctggaatggggttgacagcaacaggctgccacagaggagaaagacacatgtcttcttagccctgggacagtgggtaggataagattgtaggaaaattcccttcatggtgagaccatttagagccaagcccaggatagccggctaatcccccgaccctaggaagggagcattgggaacatgatttcaaagaattctgcgctgtgaactctaagtacttgttctgttccacctccctgaacctgtcacttactcgaaagaaaaacttcagtctgcatcacggtttggtgggggctgatgggaggcctgccaggggctcggcagtgaaggctgccgggaatgggggaagggaaaaggagctgacctttgcgaagaccttactctgtgccaagcactgtgctgagccttttacctgcgtcctgtcattgaatcctcatggcagagctagctggaatccttttttggataagagagaatggagttcagagaggtaaagtcacttgtccaaagttgcacagccaggaaggagcagagctggatgagaaaccatgtctgattccaaagcacatttttgtctccagggcttttataactgagccagctgagaggttgctctctagtgggagagtccagtgagttggggtgcagtgtctggacgtggttcagggaactcagaaaatggggtgctcttccgttcacaataaaaggctgagctgctgtcacaagagaggaacccaacttctttttcatggcaaagtcactctgctccacctggtcactcaggcacccaggtttcttccgtcttcaggttcttccatctctaggaccttgtcaccatctgcacggttgaagccactgtaacattcaggttcagccgaagggataggggaagagagtgtggaagaggtacacctgctgttttcagagccatggactcatcacttccactttctagcaatggcaagagcccagccatgtgactgtacctacctatgagaaggcctgagagatgcagtcctttgctaggtggccccatgcccagcggtgactccactgtggaaaggaggaggagagatctggttggccagcctgttgtctccaaacagccaccctaatgcagtgggccagcctcgggacaccacgggcagtctgacttcaaacaagctccacttagcagatgaaatcagaaagcagctctaggctcccaaggctgctttaaattggctctgagcaggccgggtgaggtggctcacgcctgtaatcccagcactttgggaggctgaggcgggcggatcacctgaggtcgggagttcgagcccagcccgaccaacatggagaaacctcgtctctactaaaaatacaaaattaaccaaccatggtggcgcatgcctgtaatcccaactactcgggaggctgaggcaggagaatagcttgaacccgggagacggaggttgcagtgagccgagatcacaccattgcactccagcctgggcaacaacagcgaaactctgtctcaaaaataaataaataaataaataaaaataattggctctgagaacttattcacatccaacccccatccccagatgaaaacttagactatcccatgatttttctcatctctcttggaaaacagaatataccacagacattttaagtagtaagtagagtctcaactaaaattccttggccagtgtgatcatcagtttccagtcttcattcaaaagagtttccctccctcgcccagcggtggtctattgcacataaaaagctggagacttgggaagagaagggtggatacttcacttttctcacttgccttctctctctttagctacttctggttcctctcttctccattcttgggaggtgggtttgggggtggagggagaagaggctgagaagggggtggagggagaagagcagggagttcttccttgcctagttactacggcactttgggaagatggtgtcacgttccaagcatggccaatgtttaatgataccattaaaatctcaggggttattttggagattgttccctgccatcactaggaacctgttatctgcagaggcttctatgcatctctatcttccgggtgtacctcttccacactctcttcccctatcccttcggctgaacctgaatgtggcagtggcttcaactaggcagatggtgacaaggtcctagagatgaaggaaccggaagacagaagaaacctgggttggttgcttagtccctccgcagccccaaggaatcttctgacgccttttgattctctgtgcagaggctttttgcccctttggggtgttctatcggacagggcctgaggcacccccatgccagcttcctcttgtggtcagcccacatctggcgcatatgaaactcacaccctctaccccaatcaactctaagagtgtaagttgctctgagtttactgggatctttagcatctaacccagccagtctgtcacatgtgagatttatcaggcagaggacagtggcccacagagccactctgcccagggacacatgtccagctctctaggcttgagctaagggcagtccctgtcacagcatactgtagtgctcaacagtgattctctttcccaggaaatcttcttcctgctgactattgtatatcttgagaagtacaagagtcaaggagctggttcttggccaaatgctttgaaaattttgctcttggtttgataccttactttggaatctgaggtcagccttcttaaagtgtcagccaaaatgaagaagccagggtcatccaccagataaaggggtctggggaatggcactcacagagggacccctacctcatctaggaagaggaaccctgagcaggaaagtgagttagagagttcaggattgaaccaacccaggtatcctgggtgcacaccttaatgcgcccctcagtaagagaggcagagcatttggcttgttcataacgtagtctctggtctgaggctgcctgagttcaaatctcacgtctgccatttgctcatctgctaaaaggcaaatgactttttgtattggtcagctattgctgcaatagtgctgtgtaacaaaccaccccaaaattcagtagttctcaacaacaagcatttcttcttaggtttacaggtccctaggtcaattgcagtttgagtggactgggctgaatatcacctcaatactgatcttgtctttatttaaatttttgacattttgttccttatggattttttgcattaatttttattttaaaaatattacataagtctgtgaaccgtggctcccacctgtaaacccagcactttgggaggccaaggcaggaggatggcttgaggccaggggttcaagaccagcctaggcaacatggagaaaccccatctctgcaaaaatcacaaaaatttagccaagtgtggtggcacatgcctgtggtcccagctacttgggaggctgagatgggggaatcacttgaactcaggaggttgaggctgcagtgagctatggtcatgccactgcactccagcctgggcaacagagtgagaccctgtctcaaaaaattgtatctatctatctatctatctatctatctatctatattaatgatagcactaaatatcattaatttataatgataatatataaataataataataattacaataatatataaatagaattataattataatataaattaatataaatataatacaatatataataaaaattataattatatataaatattaacagtagcattatatatatatatataaaaaacatgaaaatattattcaccttgattcctgggggtttttgtgggtgagggggcatctgaagtattgtgcttaaggtaattgcctcccttgcctcaccctagttctggctgtggctcctccgtatcttctccatgactcagcgtcctcatttgtaaaataggaataatcacaccacctcactggatggttatgagaactaaatgacttattacttgtgaaacatttagaatggtgcctggcacatcataagcaccagccataatgatttctgtgtcactgaggctccttgcaggtgcacctgggggtgagcagcattcccactggggcccccaccctggtcagcatggactcttccatttcttcatcctggactctcagtgaggaccacacaaggtggacaccaaagcacttggcgatttgtcacatggggtacagacgtcggtcatcaggatcatttgacacatgttcaatatcgggttttaagacacagcccctacattctttggcgtgcctcccatcaagaggtggagtctatgcccctccccttgatcagggcaagatgctgattgctttgaccaatggtgtgcactggagtaatgctctgtgacttctagggccaggtcagaaaaggtcacacagctctgcctggttttcttagggtgttctgtcactgtcaggatgctcctgctaagaacccagctgctgtgctgtgagaagcccatttcatgaggagaggccatgtgggggtgctcaggacacagtcccagctgcatccagcccgaaggccaggcacggtggtgcaggagcctccagccccagccatgggcatcctctagacagagcagagcagagattagccattcctgatgtgcgtgggccaaatccctgaccacagaatctgacagcaggataaagtggttgttttatgctactaaatttggggtggttaagcagcaacataatcagaacattcaccaaagccttcttcattgtcagagtctcaggacacagaaatgattcagacagtctctgctccacgaagaaccaaaagcagcccctgaactgtccattgcaatataatctgtctgtgctataataggtgctgtgaaagctcgaggaggagcctctaaccgagccagggtgaggttctggactgacctccctgggtggggagatgatgctggagttgaatataacagataaataaaggctaaccagaagaatgagggaggatgtttctgaatggagtgggcaagggactagaggcaagacagtgcctactggaagttcaatgtagctggagcacagagggcaaatgcctactggtcctggaaatactggagatatccagctgccacaggacttttgcacatgctgttctctgcctggacagtgcttccttttgggaccatgctggcttacttgctcacttcattcctatctcagctcaatgtcacctactcagagaagcatcccctgacctctcaacctaaaattactccctaatccatccctctccccccttctccctgccttctctttcctcaaagtattgatcatcatttgacggttttggttttgtttttttttttttcgctcttgtggtccaagctggagtacaacagcacaacattagctcactgcaacctccatctcccgggttcaagtgattctccagcctcgcttcccgagtagctgggattacaggcgtgtgcctccatgtccagctaattcttttatttttaatagagacggagtctcactatgttggccaggctggtctcgaactcctgacctcaggtgatccacccgccttggcctctcaaagtgttgggattacaggcgtgagccattgtgcctggctcatcacttgacttcttataatgtgtttatgatatgtttcttctgctaaaatgtgaatgacaggagactaagacacacttctcccagcatagcgtagtgcctggcagacagtaggtcttagataaatatatcaggagttggatggatgaatgaagggagaggcatatcagatacaccttttggaagccccctctggctgcagtgagtgggttggaagggtgtttgaaaggaggccgggagagggggtttcagttatccaggtgggagccgatggcatgagtctctctggagagccaacatgaggatgatgaggggtcgggtttgaggtgggagacagaagagctggaatctcccaggtggagggcgtcgcattgggtggggaggcaaaggtggggctcgggattgccatgtgcgaagccggtggatggtgatgccgcccactcaactggggctccaagaggagagagtgcacatcggaaggcctcctgcggtgagcatcaaggagatgagtcacatctgtgttatgtggcatttgaggctcccaggggcccttcaagtgcaattgcctgacaggagcctggctgtaagggtctgaagctgaggagagaaggctgaccagagtgaaaatctggggttccatcagccatggagagggtggccactaggccatacagcgagaggaggaccaggaggaacgccgtgacttagggaaaggcagaggggggagggatggaggaagaaaggagagacggacagaagacaagttggtggggtcatggaagccgagggtaggggaaggtttgagaagaaataaatggtctccgatatcaaaagctgccaagaagcaggttgaagggtgtcgactaggcccgtgacgggaaggtcactggaggcttggagcccaggctgtggagacaggctatgttgcatgggaagaggagggggtggtgaacaaattccaagagcattcttttctttctttaaaaaaaaatttcaggccgggcatggtcgctcacacctgtaatcccagcactttgggaggctgaggcaggtgaatcacctgaggtcaggagttcgagaccagcctgaccaacctggagaaaccctgtctctacgaaatatacaaaattagccaggcgtggtggtccatgcctataatcccagctactcaggaggctgaggcagaggaatctcttgaacccgggaggcggaggttgtggtgagccaagatcgcaccattgcactccagcctgggcaacgagagcaaaactctgtctcaaaaacaaacaaacaaacaaacaaacaaacaaatttcaataagggccagatgcagtggcacacacctgtaatcccagcactttgggaggccgaggcgggtggaacacttgaggccaggagttcgagaccagcctggccaacatggtgaaaccccatttccactaaaaatacaaaaattagccagatgtggtggcacacacctataatcccagctacttgggagtctgaggcatgagaatcgcttgaacccaggaggcagaggttgcagtgagcccagatcaaggcactgcactccagcctggatgacagagcaagactctgtctcaaaaaacaaaaacaaacaaacaaaaaaacccaggaaatttcaataagcataattgtaaaactgaaagaggaacatgaggcaaaatagaagggaatgaggtgttctagaagggtggctgttagtattatcatcattctttaagagggagagacttcaactcactgaaatgctgatgagaaagatccggaagagaaggaggaggatgctttggggagaaggaaggggtgattgctggagaggggactctggagacagaggaagtgctgggacccaggcgcaggcagacgggtgtgaccatcaggagagatgatgatctgcaaggagaaggctgggagaggagactgcagtggactgagctgagcctgggctgcggggaagcctttgtcctgccgtcctaggctcttggcttcccggtgtgttgcctgttggagacagagcttgggccccaagagaggacgttctcagctctctagtgtttttatgagaaattaaacttgaattcgaaaagcccaaatcaattttatctcaaatgagaggaagtgaacagagacaaaggctttggtccagaaaggcggggagtggaattcataggacatttaatattcactccacaaacacagagctctctctgggccctggcggctctgggtgctggaggcagatgaataaatttctcaaggaatctggggggcaggagggaaacagacagacattgcaattaaggaatgtaattgctaacatgaataggaaagtttctcagaggaggtaacaattctagctgcctctaaaggatttatagagttttaccaggaaacactcctagaagtgaagaatcatattattctacttaatataagtgtaattttacttaatataaaagcccttagctcggtaccaacataccatcagctttcaatatcattgagctattaaaatattattattatttattattattattttcaagacagggtcttgctctgtcgcccaggctggagtgcagtggcacaatcatggctcactgcagtctcgacctcctgcgcccagatgatcccctcccaccccgcctcagccccccatgtagctgggattataggcatgcgctaccacgcctggttaatttttgttttatttgtagagatgcagttttgccgtgtagcccaggctggtctcaaacttctgggtgcaagtgatccacccacctcagcctcccaaagtgttgggattacaggcgtgagccaccgcacctgtatcccaatttttttctgatacttacaattactgtgagcccttgacattcacatgaaataagacaagatctctaagaatctcacgctgggaaatactgtcttctgcataaactatccctctttaaaaggagcaaagcgcaactgaaatgttaagctactatcttggacatttaatgactataagaacagaaccaaagccatttccacagttattaacacattggaggcctgaagcctccaatctcacttgagctgttctttgctggctccagaggctcttgagctgcgtggggaatcacttttcctggtttccactgagagcagcatatggtgggctcacttggaccaaagattcaagccagggccaagttcaactctccactctttaatccactccttgctcctacttttcagactaaaagccaacacattcccagataccttcatctttctctccattattagcactagcaattggagttcttctgaggtcattttccagaaagaagctgtgtttattgccaggtcatcagctggcctcactcactagctcagttccacgctgacatttttgccccagcaaaattacaaattagtaccagccacggacctttggattatttgaaacgacccaaaactgcatgttaaattcttgaatgtcaaggatttcctgggctttccagtctctaccactcctgaactcaagctttaagtcacctaatgtcccattaccacttaacacacatgcacacatcatgtgcacaaagccacgtgcatgcatgctcacacagacacatgcattggtacatgtgtatataaaaatgcacatgaacacacaggcatgtgccatgcacatgtacacatgtacatatatgcacccccatacatgctcaatgcatgaacacattcatgcatagtatgcacgcacatatctaccctctgtcatcacacatgcttacacgcatataatgcatacacacaaatgcacaacaccatacacacagacgtacacatgcatttacagccatgcacacacacggacatacaaatgcttgcacacacatgtgtataagcacacacaacatgcatgcatacagaggcacagcaggcacaggcttgcccacacactctgccaagaacaagtcaggaggaggaggaaggtagacacatcattcttctccctctagttcaaatgacttctcttccttggcacaaacttttgttttgatatcttttgttatttttttagatcgcaaagacatgggatggaaaccaaatccctggggtttccagatggaagatgtggtttctaacaacgcatctacttaggcaaactggaatagcaaaagaatctggaggcctcttggagtgtttgtgatatctgcagcacccctccaacttctcctccccctctcacccgcctaccccaccacagggaggcaatgcagggctggacgccctgctcttgctgctaactgcagctctgccatcttttcactgtgtgaactcaatcaatcccctccccatctctggtccttccagatttgatggggagtggatagaccgaggttcagttatccccatacacagatgaagaaatcgtggctgcaataggtgaagagggcctcctgaaggtcatacaaccagaacccacatgttgcagcttcctcccagtgcccatcgctacggggcttctcgtgcttgaatgtgcatatgaatctccctggggtcttgttaaagtgcagactctgattcaataggtctgaggtggacttaagcttctttctaacaagcttcagttttaagattctttctggctgggtgcggtgggcccatgcctggaatcccagcactctgggaggcggaggcgggcggatcacctgaggtcaggagtttgagaccagcttagccaacacggtgaaacaccgtttcaactaaaaatgcaaaatattagccaggcatggtggtgcgcacctgtagtcccagctactcaggaggctgaggcacgagaatcgcttgaacctgggaggcagaggctgtagtgagccaagatcgtgccattgcactccagcttgggcaacaagagtaaaactccgtctcaaaaaaaaaaaaagattctttctgacaagctccaaggtgatgctgatgctgctggtctgtgagtatacttttactagaaaattatgtcactcagaccaggcaccgtggctcacgcttgtaatcccagcactttgagaggctgaggcgggcggatcacgaggtcatgagtttgagaccagcctggccaacttggtgaaaccccatctctactaaaaatacaaaaattagccaggtgtggtggtgcatgcctgtaattccagctactcaggaggctgaggcaggagaatcgcttgaacccaggaggcggaggttgcggtgagccaagattgtgccattgcactccagcctgggtgacagagcaagactcgtctaaaaaaaaaaaaaaaaagaaaaaaagaaagttatatcactcttccatggtttttaaaaaggtgtaatggggctgaggtttgactctcctgcacagctccccactcccctggctgggacagtgatgacagcatcttgtgtcctccctttctctttggttctaggcccctggtgcgacccacctccccttcctgagccatttcctcacctatcccacctttggagctgaggatgctcagtgggatggagatctgattccgcacgctccgagtgccttgctacctggatgcctaggacacatcccttctcctcctgaagcctcagtttccccatctgtacagagagtgggttagatttgtcctcagaactggctgcacctcagaagcacaggcagagtttttacgaagtaccctggccaggatgccactcagattttatttcattggatgggggtgaggcccagacgtggatatttttaaaaagctgcccaggtgatgccaacggggtgccagggttgagaagcacagatctggtgatcgctaaaggtcagcccagcgccgactgtcagagtgtgtggtcccatggccaggtctgcacactgacaccatgctgtcctatgcagcgctcagaagcagattggaaaagtctcaaaaagatctcagtgcagctattagacaaggtcacgcgccccctcatgggaaacggctcttgagttgatgatcaggatacagaccctggcagagagctgaactttcttttctgctgactgacacatgatgaatactttaattaaagactcaaccccacacatcaatcatcagcagacctcccccaccaatgtgccctcccacgggagggctggaaaagctgtctctgtgtgccaggtgggacaaggggagggtgcacccaggctgccgctgagcgctgggagttaacctgacatcatgtccaaacagggggcccgattagcaggaggacccttggctgcctcacagcagagacagacccatgaaaagattttcttgaagccagccggttgtacgtctgtacagtccagaggtttccatagcgacccgtctcttcctaaggctgacaatgggctccagcaccaggggaaggctttcaacgtcctgaggatcccagcccgaaatggatgggctgagcctgtctaatcttggctccactggtccctcgaggcacgtcctttcagaaaggacactgaacaggcggcagccccgcccccactgagccctcagaggatgggaaagcaatctttaggatgacagcagttagcgggtacctctccgtggtccctctccaccaattagggcggtggataagcagctgtaccctgaagttagaccacccaggattcaaatcccggctctgccacctgggtaactatgggcaagtgacttgatagctgcctgcctcagtctccccaactgtgaaatagggataataatactatcctcttcataggactcttttgaggattacctgagttcattaagggaagtccttactacagaatccggcacattgctctcattttttacagcccaatagtcatagatcatgagacggtctcagtccccaggctagaagggctatgccaggcccccagtctctccactgcccagggcggtgtttctgaggcttgacctggaggatttttagtcaccccaatgtccagtgcaccctccatctgtgcaccaggatctctgagggtgggacccaggcatctctttttggaaaactttgcaggtagtttcaatgcttaaccaaagttaagaacaatggaaatctgtcagcttttgtgcctgtaaggtttatttggcctgagtcgtgagaccccatggagctcctgcagcctgtgtggaatcaggggagggaggagtggacacaaacaatatttgcacagtactaggcaccctttgtgtgctcattcattcattcattccacacaagcacttatgcacttacaatgtgcccatgctgtgccgatagccaggaatgagacagaggggccccgccccatggcacttactgacccgtaggggaggcagacatttatggtttatcacacaaacacgctggcaatgataagaaccacacagagcagctgaagtggtcaggtggcttcccattccaggtgagatctggaggttgcggggcagttagcaagtgggagagagctgcatgcggggaaggtgggaggcgttgcaggaaaggtgagggagacacagctgagctgtggtgctggccagctggggccttgcgccttatccgggcactgtgacggccactaacaggttttaagtaccggaatgacatgatcggatttgtaatttaactagatccttctgactgctgttgggggaacagactgtcaacctcacaacagcactgtcagctgagtattagacaaatgatgaacctgggcccagggagctgagtcactcatcagagacgtgtggctagcaagcaacagaggccaggcccatcccaggcccctgctctcagatctgggttctttgcaccccctcccctggctgtgtccatctctctctctgctccccgtttcgtccccattatctcaggatcgactccaaactccctgtgagacaatacgatcatccacattggatgacagcctttctcaaagcctctgtgagcacaagtcttcattctttagggatcactctgattttgagaagcagccaaaggctttccaagccaaacttggcaggataaggtaggtgattatattagtcacctattgctatgtcacaaattgccccaaaacttagtggcttaaaacaacaataaaccttaattctttcacacatttctgtgtgtcaggaattgggagcagctgagctgcatagtctagttctggtctctcctctttcccaatgcctcagtttccccaattataaaccaaggtgcttgaaccggaccctaatatccctcttaaccttggtgcttccagaaaaggtttgattctcccactcttgccaattcctcttcctccttaggcggtgggcccaggctcacagagaactgcaggtcattagccaaactttttttttcttccacaaagagcttcggcctatagctgggcgctttctacctacctgctgcaaagggccggaggtgaaaccctgaacctgagatgaggtcagagcaaaaacccaaaatgtcatcccccaagactcctgagctgtggcggggtgcactgagaatgggttgcagacttccttgtggtccgctgcggggccactaactgctctgaagtgtctttgccctgagttctctgaaacactgagcacctaagggagagcaggcacgcggcagatgggtgacagcagccaggcacacctgccgcactccgatccctcctggctaggggctaggcatcttggaacgcttacgaacggggtcttcagctctgcagcccccaatctcaagacagctggctctgttctgcccatcaggtcctgaacccggaggcaggacctgaaataccccaaggcagggactcacatccactgacctgctgtgtatctgggattaactggagtctggaagacaacggggagcctccagctcacccccaaaatgaaagacagctcctggggagcttatcatttagtaggacagatggatagttgccaaataaccacgcaggtaaagggaccatcacaagtctagcaagggctatgaggagcacagtggagctggctgttagtggagggcccctggcgaggcctcctggggaagggatggttcagctgagcttacatcacaggcaaaaataaaatagggaaaagaatatccaccctccaagggcccatttaacttagcaagggagaaatggggcagggagattaatggaaagaaggaatttggtggccgtgcagcagggtcctgagcgtcagcggcccgtcatcccagtgttcctgggaggccagcactgggaggcactggcatcccagccagcagccagggtcaggattctagccaaagagacctgtcagggccttggcaccaccttggagggactgcaccgttccgctatccattgctcctggaagtggcattaccctgcctcctggctggtgccggcccctctgagcctcagccttgctgctgcttccctggctgcatcagatgcaagtggaacagcaacaggccggcacccccagggctgtgttcggcccctccgagagtctgccctctgtggagtggagtccggctaggaccgtcttggccgcatgctgaaagcagcccccaacccctctgacctaccagcaacccacccaccagcacgtggttgcagcctgcttcttgggtctccctgttcttggtgcttcacccacccaaggcaggtcatatctctcccggagccagaccttccaaaggcttcccacttcacccaaacaaacccaagatccttccccaggcctccgaggcaccggcacatctctggcctcatctgctactcctcaacccagacctccttgctgtgcctccaactcacaggtacaggcagccacagggccttggtacctgctttccccaatgacttttcttccaaatacacacgcggcttcatctgtcacttcctccacatctctgcttaaatcccgtctattcaaagagggcttcttagctactccatccaaaataacccctcgggcactctttactccccctctctgcttttcttctttatagcatctattgcattatatatatatatgaaataaaaattttatttattatttgtgtctcccctagaatgtaaatctcaaagctcagaacactggttttgttcactgctatatgcccagtgccggccagatgcggtggctcacgcctgtaatcccagcactttgggagaccaaggcgggcagatcatctgaggtcaggagttcgagaccagcttggtgaacatggtgaaaccctgtctctactaaaaatacaaaaattagccaggcatggtggtccacatctgtaatcccagctacccgagaggctgaggcaggagaatcacttgaacccaggaggtggagtttgcagtgagccgagatcatgccactgcactccagcctgggcaacagagcgagactcagtctcaaaaataaataaataaataaataaccccagtgtctatagcatggcctgacgtataggaggccctcagaaaatatttgttgaatgaacaaatgaatcaagcacaaattaggttgtcaaaatacagaatggatgggggagaatgctatgattgccaaaattgtgccgagttgttgggtggcaaatgtttgttgaatgactatatgaatatatattgactgggggtgccataggaagagtgctcctgctgggtacatgtcccagctctgccactgatgagataggcctgtcataggcctattcatgcctatctccttttgaggtcttgatcttcatctgtgtaatatgagagaattgtgttaatatcaggtcatttttttttccattttttaaagcagctttgaggtgaaaacacacatggcaacccaatggataaagcggaggtggtggtgttgaaggcaggaatcttagaaccctgtccatttggactcctttctttccctcctcccctgtgccccaaggtggttggaaaggccccttctgagaacggttgaactcccctggactcacagttccctaaatcctggtagtaaattgcatctttgtttagcaactattcatcaccagctctgtcagttgatgttgacttgactgcgtgactttattttcccccaaaatgtgggcccgtgtgacaacgtgatggattccagtggaggctttaagaggcgttgcaagttcctcctaccaccttgcactcctgccctgggccctgggatgagagacacgtggaccaggcctgactctggccacagcccgcactagagcttgtggcagcagttccccctgccactggcacacaacctgaggaagaaataaagatttattgctgcaagaaactgagattgaggttgtttcttatgcagcataacctggtgaaaacgagtacgagcccctctagctttgctgtgcctgcagcttaagtctggagggggctgttggcattattcacagagtataggaacccaaatttggaatttcttttgtcaaattttcagctgtttccttagcttgtgatcttccccttaaaatacttctccaccttaccttaatcagagatctcaaactggtggttcctggctacttgtaactcgaagtcatgccttgttgggctccaattaattaattaattaattcaacttactatctgcctatccacttacacgtgaatacagatgattgcacaattgtagttttctgagtggccattcagaaaaatctccttttcagtaaatgctaataaggtacctactctgccagggctgcatagatgaaaaaataaaagtggtccctgactcgttgaaatttaagctattacactcagggtatgaaaagagtctgtcataaataaaccaccatcaacaacatttaaaaaaaaacccatcttcatctcgaattcgaaaagccacccatcatttctacttagtgaggctggataatttctgaaattaacggatgcttatagcatacccaagaaaagcatttttgcaacaacagaaccttttatctggcttacaggcagctaaaaacatcccaacccatccttcttagctgtctttactgagactaattttcacaaacatcgttttgaaaaggagccgtagtgtgccaaagcaggaagcgcgtgccccggattcaggcacgccgtggggccaggtgtcctcgggaaactggttctctgagcctcactttcttcatctgcaaggtgggctgtgtgaacagagggggctgggtcagaggacctcttattatcttagggctctttggctgaatgcagaatttcttttctttctttcttttttcttttgttttcttttctttttggagacagagtcttgctctgttgcccaggctggagtgcaatggtgtgatctcggctcactacaacctccacctctccggttcaagcaattctcctgccttagcctcccaagtagctgggattacaggtgtatgccaccacactcagctaattttttgtatttttagtagaggtgggatttcgccatgttggccaggcagatctcgaactcctgacatgacctcaggtgatctacctgccttggcctcccaaagtgttgggattacaggcgtgagccactgcacctggccgaacgcaaaatttcaaaagtgtgttcctgcccatctgctaggttcaagttgttactgcctttggggtccggggtctcggaggagtgatcccaaagaatgtcccctctccccagctccaaaatcaagatggcctgagggtcccctcccagcccctcaagcccaggattctgagccaggttctctaccatcccctgcccccagctttccctctctgaacccacctggctccttgcttgccagccccagtgccttcttgctggttctcaaacacatcaagtgggtacagccccgggctttgcacgcagcatgccctcctcccagaatgtgctggccctgattgtccatgtggctccccgctgacttccgtcggggtcctgctcaaatatctcccctggaagaggccttctctgattctcccacctcacgagcagcccagttattccccatttccttcccctgcttggttttccttcatagtattcatcattatctgctctccgccgtctgactgccccccaccagaataaagcagtggtcttgctcatggctgtttccccagcgcctagaacctggcacatagtaggtactcagaggtattttttgaaggaaggattgaataagcaaatatgcagttcaacaaatatggacccttatttgtctgcttcccccaacaaatgtggagaagattccccaaacttcaccctccccggcccctggttttgcccagtagacacccccagccctggaggctttgcgatgcccgccctgctcacaggttgttaaagctggtgcaggtctcagagatccagctgaggaaagggcagaccaaggcctggagtgggtttagagtccattcatcgagctcaggcaggcgcagagctggggccctgagcagctgtcctgatgacaagaaactgagatttcttctcccgcacaggccaccgcagtccactccaagcccccagccatggtcacagctaaactcctgtccctctgacaagatgccgaaggagggcacttcctgtctcaggcctgagtccctctcagcctccagaggggagcagggatggggaggaattggtagttttgagagcctgctaggggctggggctgccacacacagcctcttccacttgtcaccttcaccacagccccgcgcggaaggagccattgtccccattttgtggatgagcaaagtgaggcctggggaatgaagacgctggcccagcttgcacacagagccaggaaatggcccagcaaatcacgtctctgtgttctagtctgttaaaagccatctggtgccgaggaccgcagcctcaggagctccctgccttccccagagagaaagctgtcagtcagcgggggagcccatctcctcctccctcccacaccacccgctggtgtcacatggcattgggagggagcagcacccacgggggtgcctccccctggaggctgtgcagggagacttgggagctgcaccttgtgggtggctggggtttggggggcaggggttgcacacacgttcagggctgtcacgtgttcctactctctgcagcttctctggaggcacgtcagcctgctgggtccgctgtccccagactgggactcctgcagagaagcctccaatgccagaaatggcagggaatctcagagaccatccaggtcagcccccctactttgcctggctcagacaagaataaaatctagagctttgtatgccagaagtggggcaaggatgggatgaggtcagggtcctttagagaacacacatagggcaggtcggttgaggcaaggtctccagtgtcagaccacctgcatccgagtcccggctctctcctcaatggttgaccctggataaatgccttcacctctccaagcctccgtttcctcatctactttaacagatcctagttacggagtgctgctcagggacaggcatggctctgagctctgcacctgtgtgtcatcctccaagcaaccctaggaaggagatactattgtcatccttctttagctctgaggaaactgacgcacagagtggttagctaacctgcccaagggcacacagctgggaagtgatggagccaggatttaattccagacaatgaggctttgggatcctggagctccatcactatttcatctgctgtctactgaggattaaatgaggcaaggagtactaagaacctagaactgtactgagtcagcactcaaacaatcatttttataataatgaggaagaaggtcatggacccccagaaggtctgatgaaaggtaaggaccttcctggtggaagatttcacacacacacacacacacacacacacacacacacacacacaccccaaacactgcctgcaatttcatggggcccctgctccagaagtcaacccatcagtccccctggggaaactctgctcaagtcagccccattatttcctaaggaagggagaggagagggtccacatgtacgttccttcatttgatcctctgaggtcgatccacctcaggtccacatgtactttccttcatttgatcctctgaggtggccattattagcccattgcacagatgagaaaaccaagggcaacggtgaggtcccaggcaagctggtgggcagacgagactttcctgtcctagggggcctgccgccttctccttggctgggtgttacttagtccagaagccatggtaagaaatggcgcccgcagggctcgggcctgtggtacacactcagtgaagatttgttgagtgagtgagtaagagtgagtgagtgggtcagactgggtcgacatggggccaggccatgtccaaggtcagagactcagagctcccctagcccagctcctctccggggtgctcatggctcttcatggggaggcagaggaagaagcaaaggaagagctgtaggaatcctggctttttaaaagctactactccaacccccagacaagaaaatgggggccccaagcctgacttgatgtattcagtcacaccccgggatggcaggagccaggactggaaatcaggtgtactggcacccatgccagagctcaggcagtggtggtcggagggaaggggtgctgaactcgagtcagaacacttgggccacattctgcctgtcattcatgagtgctgtgacttcaggcaaactgcatggccaagtctctatttgcaaaatggtgattgtatctaccttatagtcactgttaaatcaagcagtttgacaattgtctattgaaaattgtttagtggccgggcgcggtggttcacgcctgtaatcccagcactttgggaggccgaggtgggcagatcgtgaggccaggagatggagactgtcctggctaacatggtgaaaccccatctctactaaaaatacaaaaaatcagccgggtgtggtggcatgcgcctatagtcctagctactctggaggctgaggcagaagaatcacttgaatccaggaggcagaggttgcagtgagccaagatcgcaccactgcactccagcctgtgtgacagagcgagactccatctccaaaaaattataataaataaaaataaaagttgtttagcattttctcctcatttgtcaaatgaggataggttaatgtgagaatgtaggaaattccctgatgtaaaacaaatgttctgtaattggtagcttttactattattggcagctattattacaatgttgagcatacaggataggcctctataaatgtcccatgaatgggtggatgaaccaacagacaggctaataagttgtttggcagaccagtgggaagtggggtggagagatggatgaatgggaggaaggtggattgatggatgggtgagtgggaagtcggcaagagggtaggtgggtggatggatagatagaccaattgacaggcagagaggtctgttttggggaagaccaataggtagatgagagagagtgtaagatggacaaatggctggctggatgagtgagaggatggaccaatagtaatcagacagaaagactggtggtttttcagagcatggaaggaaggaaggaaggcgggagggaaggaaggaaggtggatgtgtgggtggatggatggatggctggctggctggatggatggtggatggtgaacagatggaaggaaggaaggtggatggatgggtggatagatggatggatggatgatggatgggtgggtgggtagatagatggatggatggatgctggatggatggatgggtgggtggatggatggatggctggctggatggatggatggtggatggatgggtggatagatggatagatggatggatggatggtggatggatgggtgggtggatggattgatggagagatgaatggatggatggatggatggatggatatgtgagtggaatcattgggtaggtgggtggagagataaatgcatggaccaataagcaggcagatagagaggtgggaggacagaagaccaggatgtggatggatggcagatattccttccccttgaactgaagccagagggatgatggcagcagctacagccttaccatgggcatcctgagggtgaggaagagaggtaggagatgattgttcacccagggcacccctggaatgaggcagtgagcagttgcttactgtaccccaacatccaaggttggaatggaagccctaggagtgagatgagtgggaggaagacacccgggcccacactcacacgcacactcccctcaacacggcatgcagcaggaggtcgcctgggaggggccctgcacccacaccagagcagcaggctgcacagcttcttcagaaagcgtcagagccacagcagaggaggacctcagctgcagaggccttcagcagggcaatcccagtgtgcccctggggactccctgggtctcagccagaagaacaaaatgtccccagtgggggaccgtggctgcctcgtgaccattccacttctcagatggcgacccagggtccaagggcctatttcaggccttgcgggttttgttgacaacgaggccaccttgcgatagccccatttcacgaaagtggaagctgaagtccaccagtggataccatggtctgcaggcttggctgtacccccaccatctctttggtttctcctgggccttgtcccactgctcacccaacttggcctctctggtgtggcttgaacactccaggcagccccaccccacttgctcttccgcctacctggtaggcttttccgccgaggaccaacgcggccacaccctcacttcctgcattgcctgtttatggtgcaaggacttttgtccgttgggttcctgatgcccggtgcatactcaggtatcatttgctgtaatccagtaacccatgcagggatggtgagggtgagcaatagtgaggtgttgcccatgtgccaggcacagtgctcactcatttatccacacagtgccaccatgaagtagatgcagttgctatctgctcccctgcagatgggaactcagaggctcagagaaggggtttgctcaaggtcccacagcaaggctgccgctagaacatgctagagtcatgtcgagggtcatcccacaagagcttaggtcccgaagctagtggagttctagcattgccaccatgggacgttgaccttggcaagtcccctcttttctctgagccttgtttttttttttttttttctgagatggagtcttgctctgtcgcccaggccagagtgcagtggcgcgatctcggctcactgcaacctctgcctcccgtgttcaagcaattctcctgcctcagcctcccgagaagctgggattacagatgcccgccaccacacccagctaatttttgtatttttagtagagatggggtttcaccatgttggccaggctggtctcaaattcccgacctcatgatctgctcacctcggcctcccaaagtgctgggattacaggcgtgagccactgtgcccggccctgagccttgatgttttcatctgtaaaatgggacagtaacagcctctccttggcagggctgttttgagaatcaaggctggcagtggtgtgaatgttttatggaaaagaatcatgcctgtgtcgctgggtgttacggcgctacctgtgtctccagctgcctgagcagagagagcccgtggggccccttggtctgtcacacaagcccagggttccaggctcaatttaggataatccagaataatgctaccaactggctgcagatcagaggtcaaattcctttttctgggcccctctttcctcccagctccactgggacgctgcctccaggggacttctcacagctgtctggaccagacctgcctgggaggaacagggtgagcggggacaggaaggcctcggacttttcccaggctgaagacctccaagaagccactctcccattcctccgctccagctgggcaggcttctgatgtggctttcccagaccctgctggcccctgtctgcagcggatacacacagaggaacagcgctcaagagggggagggaagggcctttgaataggaggactcatgagggctccaggcctgcacacaccctgtcagcttggggtgcaggttgcagatctctcaggcaatgccaggcctcagtttcctcacctggaaaatgggtttggactggatgacttcacccaggatgcccagtgctagacactagaacagaccgagcagcccaggaccttcccccaagttcgctccctggacccctttcacctctgcaagataggggccattccctacctctggcctcagtctccacctctgtaaaatgggctggctgaactggaagatcccggagggtcctttcctctctgccattctgttgtagctggaaaaggaaaacggggtagtgctgggaaggaaagaacatttagtgagctgcaactgtataccgggtgtttttatacgttatctcagttctctgtgccttattttcctattgcttctgtaacaacttactataaacttggtaaattaaaacaacacacatttatcaccttataattctagaggtcagaagtccaaaactagtgtcactgtgttaaaggcgtcagcagggctggttttccttgtctttcaagatagaatcaatgctctcttcattcccacatcacatggtcttttctcccgtttcctcagtctcatctctttctctctctttttttttttttttttttgagatggagttttgctcttgttgcccaggctggagtacagtggtgctatctcggctcactgcaacctccccttcctgggttcaagtgattctcctgctgaagcctcccaagtagttgggattacaggtgcatgccaccacacccagctaatttttgtatttttagtagagacagagtttcaccatgttggtcaggctggtctcgaactcctgacctcaggtgatctctctgccttggcttcccaaactgttgggattataggcatgagccaccatgcctggtcatctcatctctttcttcctactgccacatgcctgcctccctcatagaaggatccttgtggggacattaggctcacctgaccaatccaggataatgtccctatctccagatccttaacttaattacatctgcagaattccctttgctggataaggtacgattcacaggtatttgggggattaggacgtgggtatctttggaggactctcactcagcttgccacatccgttcacacaaggctgtcatggagctcagcttccaaccccagtgcctgtgactttgtagctgtgtggccttgggcaatgacctaacttccttggctctcagtctcctcatccataaaacagaggtaatgatgaggattattaagacagtgcaggggccaagcacagtggctcacacctgtaatcccagaactttgggaggccgaggcgggtggatcacctaagatcaggagttggagaccagcctgaccaacatggagaaaccccgtctctactaaaaaaacaaaaattagccaggtatggtggcaggtgcctgtaatcccagctacttgggaggctgaggcaggagaatcatttgaacctgcgagttggaggttgtggtgagccgagatgtaccattgcactccagcctgggcaacaagagcgaaactccatctcaaaaaaaaaaagagtgcagaggactctctgaacacggggtctgctgctgctgctgagtgaatgtatacagtgatagtaacgctgataatgaatcacccttgtttattgcagctactcgtaccagacactgagctgagtgttgagtttatgtaggtgagccacgttgacatgagcctggccctcgtggaacgtactagagaaccaggaagacagacttagaataaatagtcacacaaatcattagggaattatcagagcagcccaaagccacacagctgggaagaggagaagtgggtgggattcacacccaagtctgtctgattcccaagcccttatttttccatgatactcccagcctcttgaggctggtggaggccaagccgaggaccagagatgggaaatgacttgccaaaggtcacacagtgagagaacagtccattgcagacccagatctctgggcatcctgcctaaggctcctcccagaggagattctgagacgtaatactaaattacaaagtaacactaataactagtgtggcagctaatgctgtggaagcttgctctgtgcccggaggcagaatggacattttacgtgcccagtatcattcagtttccacgatgcacaggagaagagacttggtaccctatttcacagagaaagaacctgaagtctcaaaggggtgctatgaaatgcctagggtcaccagcgaactaactgctaagcagagagccaggatgttctctaagagcagggcctggctcagaactccccagttcaaatttgtctgacccccacccctgtccctaactcctgcacatcctgcctgcgcccactggcagatcttcaggggctcctgccagtgggaggagggaggtggctgtggtccttagggtgtaatcccacaggtggaattcctcctgaggtcagcctgcagggagacgggtgacacgctggtgccatctagtggccttaaagagacatgctgcttcccccgggagccgcaaggtaccccacagagatgcagggagatagtaatacataaggtcctcatcctccacccagctggaccccggtagcaaactgacaaagctgagctaaaagtgttcgaaatgatcctcctcattttgcagctgaggaaacagaggttcagagaggagaccgacacaccccagcccagtcaggggcagacgcaggtggctggagggactggcagggaggtggggcttgccctgagccttagcagggagtctgtccagccactgggaggccaggacaagacaagtgagctcttcgtggagactccagttttggtctggggatgggtagggggcactggcctgggacaaggaggagggtatggctagtaggagctggattatgggccagtgcctgaggaagggaggaagaaggctggtaagagacagagtgtcctggatgatcaccaaggctcctccgtagagaaatcccatgatctaaggccaaacatggctggagaaaccccaggattcttagaaacaaacatggctaatgaaattccatcattctaagggacaaacatggctggagaaatcccaagattctaagaggcataggaacttgatacattgttcattccatcaacaaaccatcactgaccatgcactctgggccttccccataagggacgctcaagacccacagaccaaccagatctggtccctgctctgccggattccacagcccagtggggcaaataaacagatgacagactctcagaaccggacaagataaattcaagtggccccccagagggccataggctctgcagccagacagatctagctgatgatgttagcaaaaatagcggaagggccgagcgtggtagtgcacatctgtagtcccagctactccgcaggaggattacctgagcccaagagtcagaggctgtagtgtgccatgatcacacaggtgaatagccactgcactccagcctgggcaacatagcaagatcctatctctcttttgttttgttttgtttttgagacggagtcttgctctgtcgcccaggctggagtgcagtggcgtgaccttggctcactgcaagctccgcctcccgggttcacgccattctcctgcctcagcctcccaagtagctgggactacaggcacccgccaccacgcctggctaattttttgtatttttagtagagacggggtttcaccgtgttgcccaggctggtctcgaactcctgacctcaggtgatccgcccacctcagtctcccaaagtgctgggattacaggcgtgagccaccgtgcccggcccaatcctatctctgcaaaaaaattgtggagtggctaacatttattgagtgcctactatatgccaggcactagtataagcacttttgattagctaatttagtgaaacccagactttctctgactagccatgtgacttttggtaaattacttagcctctccaaccctccagattctcgtctgtaaaacaggagccacgtgcctaccttgctaggctattgtgaggttaaaacgaagttttgtgtgtgggtgtgtgtgtgtatttgtgtgttacctggaatatagtaagtgctctatagatggtagccaccattgaaatagtaagtgctgtaatgcaggaatgccgaagagttcccacgatctcatgcctatctggaattatcctttctttttcttttctttttttttttttttgagacggagtcttgctctgttgaccaggctagagtgcaatggtgtgatctcggctcactacaacctccacctcccaggttcaaatgattctcctgcctcaacctcctgagtagctgggattataggcatctgccaccacgccctgctaattttttatattttttagtagagatggggtttcgccatgtttggccaggctggtcttgaacttttgacctcaggtgatccacccacctcagcctcccaaagtgctgggattacaggcctaagccattgcgcccggcccttttggtgttatcttagggatgggggtagttgcatctgaggtcagggagaggagggaaggggaaagctccctggaaaggagtggagacttggccaggacctggaaagggcaggagccaccgccctcttcccctcctctgcccctccccaccttctgctcagctcccccttcccctctggggcacacctcatcccctccattcgtatacctgttgccctgggcctgacctcaccatcccttgcttggccttgtgtttccactggcctccctgcctccactccttcctccctgtacccagaggaaactcctaccaccaaatctgtccgtccctgcctcctccggccctcctgctcattgatcccaccccacaggaaagcccactcaactgtgacgggcaaggcccaccccattcattacatgagtctgtttccccatctccttccttgcgtccacagagaccagagttccagccacctggaactacatggagctacctgctgtcccctgcagaccctgtgctccctccagcccctattggccgcctagaagtttctctgcccactcatctctccagatggctgtgccactcccggggaagccttcccaggcacccctcccctgcggggtcaggaagatcaccctcctccccctttctctcccccccgctgtgttcccagaccctgtccagggtgttccaatgcttgtcttatgtgcccatctcccatactagatcattgccttccattaggtgacaccactgctaggaaatgcttcagatagtgcctccctccatgttaggcctcacagttataactcgggccaggtctttgtcatctttgcgtgccactgttgaatcgtgatgatgacactcacatttctgagcacttggtgcaccaggcactgcactatggacttcactcaaagtatctcccttaatccctccaaccccataggtggtaggacctgttattatccccttttttagatgaggaaactgaggtcaaagagggtggccaagaggcattaaaaccaggcaggccagatccaggggccaccacattgccacctctctgagtgtgcctatgctgttccactgcctgcaacaccctctttcactgcctggcccctggtgggctcgtttcaccctcgggcctcaatcccaaagccccctccttggagaagccttttctataacaccctgttatacagcatcatgccactctgtctgtttgctttgtagaatatgtctcaaggtatttctttgagtttgctgtctgttgttcttttgtactcaacgtgcacgcacacacacagccacaaacacacatagtcgtacttgactgtgagagcaatcaccgtgatttcgcttactgctgcatccctaaagcaaaacagagtttagccagcctcccagagggtccccagagatcctggcttcttggtatgcacacctttgtggagtccgcttccacgctgagcagaggacctgtgctactgagaggacactgtgtaaatgccaaagtgagacctctgaggctgggtcatgaaagatattgcacttcctccttggctctcttggaccacttgctctgggagaatacagctgccatgttgggaagacactcaagcagcattgtggagagatccacatggtgagggactgaggcctctggcccacagccagcatgacctggccagccttgtgagggagccaccttggaagtggatcctctctcctgtccagccttagatgactgcagccctgaccaacatcctgcccacaacttcatgagggatcctgagccagaaccacccagccaagccagtcccaaattcctgatcctcacaccttgtgtgcaagaagaaatgctgattgttttaagccactacgttttggagtaccttgttatggagcaaaattgaatccaacactttctaagtagttgttgtataaagaggtggagagatggatgctgaatgagaataacaatgattctcactccctgagccctctctgtgtgctaggcatagtgctaagtactttacatgtgaaaccgtcacacagccttatgagaaggctgctaccctctacccattttatagatggagaaataggaacagtgaggttaaattactcacccaacatcccaccagcagtcctggggctttgcaccctggcagattgggaccagaggcttcactgccacatggcactgtctgggtgtctcttgactcttcccagaccccctctcaggctcactgggggcctggaagagctcactgtcacagtccgcgtggcatgcatgccctgcagagctaggaatgcatggctcatggcctggtgccagtgcctcttgtcccactgctgggaacactgccctgtcacctaccggtagaagccagttggacagagcagaaggaagaggatggcttctgtccagccacaccccatgggaccaagtggctgtaggggcaggagtgggggtcagagagctcagattccagccggctcgtcatgctggtctccttagcaaacctcctaaggttacacaccccagggttctggctggactcagagccttcgtcctctggatctgaaatgatatggttgggacagagctggaagtaacaacggaaaaccctgagcccttcttgtcctctgagcaacggaggctaaaaggatgttggggcccagggagcatgtagcactcaggcccacaccatcgtgagaagatagttgggctggcacagagctggatgccttctgagagggtacaaggggcctgggcacaggatgcctgggtccaggtctggtctctatccgtcacagtcactgtgtgacttcaggcaagttccttaacctctctgtgcctctaaacaattcatctgaacacatgcaggtggcaatagcacctattccctgagaatgaatgagcctggtatgagacaaacactcatgtgtgccgggatgtttggttttcatagcactaacctttccaacaaccttgcaaggcaggtaccattactgccatctgcccatgaagaaaccgaggtttggttaggttaagtcactctcacgggccacacacagccagtctgaggtgaagacagtcaggattcaaacccaaacgaggtccttacctctgtgccaccctgctcctgttcatttttgagcctcagtgccagccactatgtgtgatccctgttagacacaatcactgctgtctagcaaacagacagagtgggttgcttggggaagcagggagctccccatccctccagaggtatgcaagcatagcctgggtgcggtggaggccttaagcattgggtctggtgttgaatccagtgccatttaaggcccctgctacccctagattctggggttcttcactatcctcccccaaagacagagagggcttagcaggggaaactgaagcccagagccaggatatgcccaaggttacttcatcaagacgctgttgaacccaccctccatcacgccaggagaaaggcgggccccttcctccaagggccaggagaaggaataggggtaaaaaaagaagccacaggaccatgggcaaggtgagggtgaatcctgaagacaaaggtggccactcggtgggtgttcagagccagggagcaggtgaaggttgtcagaaacaaggtgagtgtcagacaccttggacttcttttggttcagtcccctcatttgacagatgaacaaatcaaggccatggggggccgatcctcctgtcccagatccgtaatgccatgtagggcacaggctgctgcggaaataagaggaaaggatgtgaaggaggtgggctggacttcacaaagcctgccactctggcacaaagtggatgggatacggggtctctggcccacactctgcccctgcccatgcctccctcctagcagatgatgagctattttccaagcatgtaggatgcactaaacccttcttgaggtgtcctcataaatttgagcctaacagccgcctgtgagataaggactgggaatttcatcatctacatttcttcagaagaggaaactgctgccagagaggtgaaatcacttgcccgaggccacagagccagccaggaaggagtgaagcttagcagtggcccctgagacctcagtcaccctggactggcgttccccttcctgggagtaagggatgagcacactgggtgagaaaatctcagcctccgccctctggaaaatgactcagttctggcccctggtcaggacatggggtaggtggccagacagccacaaggttgggctgtaagcctctagcgcccaggcagccccgctgccacccagagcaagtcacactcatacgctctcctcagttaaagtgcacaggctgagtgcggtgactcaagcctgtaaactcagcactgtgggaggccaaggcaggaggatcgcttgaggccaggagttcaggaccagcccaggcaacatagtgagacccaccccatctctactaaaaataaacaaatttagccaggcgtggtggcatgcacctctagtcccagctactcggaaggctgaggtaggaggattgcttgaacttgggagcctgagattgcaacactgcactccagcctgggcaacagagtgagatcttgtctcaaaaacaaacaaacaaaaacaaagtgcacagttcagtgagtcttagcatatccacaggtgtgcaaccagcaccacatccactttagaacattttcaccaccccccgaaagaaacccagaagcacttagcccccgtcgccacaacccgcctcacctctagccctggacagccacatatctactttccgtatctatcaatttgcctcttctgggtgtttcatataaatggaatcacacgatatatggcctttttgcaggcaccgctttttgaagtcttacaataacattttgcaataaaaacagtgttctctcaattttattttattttatttatttatttttgagacagagtcttctctgttacccaggctggagtccaatggtgcgatctcggctcactgcaacctccgtctcccgggctcaagcaattctcctgcctcagcattctgagtagctgggattacaggtgcccgccaccacgcccagctaatttgtgtatttttagtagagacaggatttcgccatgatggccaggctggtcttgaactcctgaccccaggtgatccacctgcctcggcctcccaaagtgctgggattacaggcatgagccagcatgcgtggcctgttctctcaactttatagatgaggaaactgaggctcagagtggttcagagcttgcccaaggtcacccggctcagaaatggtgggtgggatctggaatacgtctgtctgactccagagaacctcagccacccttcttagggccagaatccagagtggccagacagcttcaggggcctaggttcagggatctaggactggaagaaaggctgggagggtcggggagtttgtgagtcctgagggccagggctggagggtgaagggcctggggaggggcactggtccggcctctagaccctcgagttacagggagaaaaggaaatatataaggcagccactggggaaggggtggggtggctaaatgtaccttcgggaactcctgagggccaccccttctctggcactgattggcgcagtcacaggttcctgataattaccccctctcctgccttacttcccccatggaaacggtcccctctgcccacactcccagcccccagcagccgccagccttcctacgatgactcagcctgagccactgtcccctctgccacctccaccctcccccgacacctgtccctttctagctgaagctgacccccaggacgtgattatcaccagcacccgggtggctgtgccaggactggcctggccagcacctgttggggctgggagacagctctccccagcctgccccctgggtcagcctacttgggggccctcacgcccttagggggctctacccaccccattcctggcaagtccccttaggataaacacaaacatttcaggccctcttgaaatactctttgtatttgtattattttattttattttattttgtgacaggatctcactctgtcaccaggctggagtgcagtggtgcgattatggctcactgcagcctcaacttcccaggctcaggtgatcttcctgccttggcctctcaagtagctgggactaaaatattatttatttttgtttagaggcagggtctcgctatgttgctcaggagtggtctcaaactccggacttcaaaggatcctcctacctcggcctcccaaagtgccacagtcatgagccacctcctggaactttgtgttgttaaaacgattaccatacctcaacagaaagaaagaaaattttggaacatgctctttcaggctgctgtctgctttgtactcccatgttgacccatcccaccaaaccgccttggggatggacaaggcattatccggctgggaatgaggcttagcgtgtgaaggagtggttccgctcccagcaccacggtctcctacaaaaggaactctgagggtacggttgtgggcccagcctgcctgtgtgtgtggtagggaggactctgtgaccttcagaggccccaaaatcaaatgacagcagcagctgctagctatgctggagcaccaaacctttattttcctttgcatccattaatttgtttagagccagacagcttggcttggagtaccagccacaccaaacttcatgctctgtgactttgggcaattcagttaacctctctgggcctcagtctcctcatctggaaaatgggcgtgatggcagcttctgcttcctaagcctggtttgaagatgaatgagtgagtatgtgtacagtgctcggaaggcacccggcacaccttgtgagctgtttgttcttgttcttcttacgcctggtaagtgcgttgcaggggcacagccccacccaccccaccgggcctcaaggagattacaggcagtggagactcaagtaagtcagtctgtcaccatccagagaggggagggcctgcctcagggcccgcagggagggctcaggtactgtggagagtgtcagctgggaggcctggggccccggctccagctctgctgcccaactgctctgtgaccctggccaggtcacttgcccactctgggctgcagtttcctcctcctctggaggcactgggctgactctccagggccctgggcagccagaggtctgggaggccagccaccactccggctctatttttactggggctctggacactgtgctgtccttggactcagaacctgggtgggtgaaagggagccctgaggtcatccagccagccgggtctgagctgcgctccctgggcctgtaaagcatgtgcgggaaggtccccctcattccagagggctttgtgctggggaagctgcccttgccctgtctctgcctctctgtccctcctccatcttgctcactcttctcactggttctctctctctgtccctcccttcctctctctctgtctctctctggcacatgtgcacagagctccacttcactctctaaggccctggcctcactgcaccccagtgaattacaacctgttctcatccctactctgtgcttttaaacttttttctctttattttaaattgtttacaaaatctcagagaatttatggaatcagaaatgggaaagagggagggacagagggagtaatgcaaggagccatgacccacagcaccagaactcctgcttcagagaccaacaggcatacccacaccgatgagagagggagggagagaagggtgggggagagggatggaggtggggggacagagggagggagaaagagagattgacagagggagagagagggaaagagagagagagggatggaaagatggaaagagagagagagggatggaaagagggaaagagagagagagggatggaaagagagaaaagaaggaagacagggagggagtgagagagggagagagagacagggagctagagaaagagagagggaaagagagagagagggagggagggagagaccaaatagaaaaaaggagggagagagggagggagagagaggtgaggggaagagagagaaagagagagggagggagggagagaccaaatagagaaaaggagggagagagggagggagaaagggagggagggagggagagagaggtgagaggaagagagggaaagagagagagagggagggggagagagggagagagagagggaaagagagagagaaagagaaagaaagagagaaaagggagagagaggtggggagagggagagagagggagggagagagagggagggagaggtgaggggaagagagggaaaggagagaaaaggggagagagggagagggagagaaagagagagagaaagggaaagaaagacagaaaagggggagggggagagagagagagagagagaggaagagtgggaaggcacagagaaaaaagcagaagagaagccagaacgagatggaagaaacagaaacagagccagagggcagttgcggagtccctagcacaaatcctttgaaagggggagggcttggcgtgcagggcctccctctcaccatggtagcctgatcaaggtttatcttctttgggcctcagcttcctcacttggaaaaacaaatctgagctacgtgaccaccaagggctcccggaactctggcattcagaccctgtgatgctgaggccacttgggaatggtcccagcctcctcattcctcagatttggataatgctttgacactcagtgctccactgttggttcaatatgactgatcccatgtagcatatgggatgctggtgcttagagaggcggagacgtttttccgaggccacacagcgacacggtggtgggtgggacctaggggagcctgagtgctgcgggcaggactttccacctccttcctcccagcccatagttgtcccattaccgtgactgtcccctcaccacccctgcacagcacctgcaccccctctctggtccttggtgctccctgcacaggggcagaggtgatccagccgagcacgtgtccttcccatgaggcctgtgggccctctcagcaaagggtgagacgtggcgtgtgctcctccccccaagacccctcctcccttcctcagtgagaaactgcagcctgggatcccttcactaaggaaagaaatacattcaggaaaacgggacccagttcctgccaccgtccacccctgaggccactctcattgatgatgggggaagaacaaggtgttctaggcgcttggtgtgtattaattcatttgatcctcacaaacgcctttggcataagtaattagaagaaaaattattattttcatttcacaggtgaggaaactgaggcacacagtagtgaaaaaacatgtccaaatcacacctctgggaagaggcagaccaggctcaggggcttgggtgagtgacgactaagagttgtgtagcatgggctgttgattcaggcatgagcacgagtgtcactggcatcccagccccgggctaagggcttagcacctgctaccttatgccatcctcatggccaatgccatcggttcccagccctccccagcggcatcccatctgccctgcctgaagagtctcctgttggtttggaagttcacccccaatggtgctcacagaagatgacttcagtcttgccccaagggtgagttacagttgctcccagcccatcatggtggtcttgactgtgacaggcttaggcataggcatgtgacccagtcctggaaaatgggaacttagagaaaatctgccagggaggaggaagggggcctctggaaagttcttccataccttcaaatgaggacatgaagcaggaattgcctcttcctgcctttggatgtggagtgaggatgtgatatctggaggtgtagcagccatcttgtggccttgagggaaaggcaacttgtggggaagtagattgtaagccaaaaataaaattctaagccatcccatgactgaatggaccgcctttacagccaagggcattccaaagtaaacctgataaaatagttccggccacgaggggaaggaggggtcagacaggcctcattataccctcctcactttggatttcaggtacaactgaccagcactaacaatgaaacagattttaagattgacaatacagactcttttttttttttttttttgacatggggttttactcttgtcacccaggctggagtacaatggcatgatctcggctcactgcaatctctgcttcccaggttcaagcgattctcctgcctcagcctcctgagtagctgggataacaggctcctgccatcatgcccagctaatttttgtatttttagtagagatggggttttgccacattggccaggctggtctcaaactcctgacctcaggtgatctcgcctcggcctcccaaagtgctgggattacacacgcgagccaccatgcccagccaatgcagcctccttatagcaataagacaccaaattccaatctgactccagtattgcatcacatgacatagcaagcccagaaagaaagcaaagtgttttacccccaaaatatatttctttgacatattttgaaacggccctgcaaaactatctctgatggggaaaatgtacaatctatagagaatccccttccctttccaggtcttgtcctgacccaaaagagattaactaagagtctggcaccttttagagacatttaccatctatttgctctgaagcctgctacgtggaggcttcatctgcacaataagaaccctggtctccacaaccccttatcttaacccagacattcctttctattgattccaggtctttagataatagctgtttcaaccaattgccaatcagaaaatctttgaatccacctatgacctggctaggtcacaaaaagcatccagcgtctgccaggctccttctcctgggtcctttaatcttggaacccagtcgccatgtcaagaagaagtagagcggccacatgtcatgtatgcaatgcaatgggtgcttcgagaaagggttgtgccagagggaggagagccagctccaggctggatgggcagggaggagaggaaacacttcccaaagtgaggcttcaagagtgcaaaggggctgggtgtggtggttcacacctgtaatcccagccctttcagagacccaggtgggcggatcacctgaggtcaggagttcgagaccagcctgaccaacatggcgaaaccccatctctactaaaaatacaaaaattaactgggcatggtggcaggtacctgtaatcccagctactcgggaggctgaggcaggagaatcacttgaacccaggaggtggaggttgcagtgagccaagatcgcaccattgcactccagcctgggtgacaagggtgaaactactcaaaaaaaaaaaaaaaaaaaaaaaaaaaaaagactccagcccgcaaagtggggctgacatccgagagcactggatagtccaggaacagcaaacccagggctcaggcactgtagactgcacatcaaatcagggttcaggagggaaaagttgggccacgttgtctgaacttttctcccatgcgcaatgagaaggagccgttgaaagttatttgcccagtgactttggcagaattgccaagtggtttggagcgtggccttgggctgtgtgtgggttttcaaactgacagccggttacatgatccaggcccgagggggtggctctagtttctgtgtgagtgaccctgagtgaaaacctgcttgctcagcctgctccattcctagggccaggagaggcaataataagatacagaaccgttgtgttttagccattatattttggggtgactttattactatttattacatactatttttattactacgcagcaatagaaattgaaacaataaggccgggtgcattggctcatgcctgtaatcccagcactttgggagtctgaggcaggcagatcacttgaggtcaggagttcgagaccagcctggccaatgtggtgaaaccctgtctctactaaaaatacaaaaattagccgggcatggtggtgggcacccgtaatcccagctactcaggaggctgaggcaggagaattgcttgaaaccaggaggcggaggttgcagtgagccgagatcacaccattgcactccagcctgggtaagcgagaccgtctcaaggaaaaaaaaaaaggaaaaggaaaagaaattgaaacagtaagtgtttcacaggtatttggtgaatgaaatgtattaggtacctgattaggtggaattgaaaaaatatgtttttgttgttgttgttgtttgtttgtttgtttgtttggaaagaagctgccattgaaaagcatccaagagtttcaactgaatggcagtggcctccggttcgcctggaacgctcacctctgataagtagagtcttgcaatgctcaatggcctctcatgaacactcccgtgtaagtgacaagtgagaaatgaggccccaggccctggtagccattgggacatcccccaaggcttgaactcctgccagtccagcctgcaggtgcttagcaggatttggtcacttggcttcagctggcgtgttagtgagtcttgccctggctcaagcaaaagtcagcggctctgcgtcagggcacccacaggatggaaggtgggactcactctgaactggtgtcatgatgcttccaaccggctccaggaagactaccagctgggaatcccccgcagcctggcggaagagcccccgtaccaagctcctgaagaagatcacccttcccagcagcctcagatgcaagaactggggatggggcagacagacttgtcacagggctcccgggaggcctcacccttcccttctgagggccagggagaggagagccacattttgccggaaggatgcctggggactggctcagcgaggctggcattctcctattgaaggatccttcgctcagctctgcagtgtgaggccccaatgcccctagtccccgagcctgggccttgagtaaaatgacagggtgtgcagctttgagtgataaccaccagcctttgaagcacaagcttggggctccctgcagccctgcaggtgagggtctggaccaggacagaggttatgggcactggacaaggacttgccagcttgcccaggatgggtgcccagagcacaactgcatggtggcgaaagggcagcagtgcctgaaactggcccccaggcaggcggatcagggcctccagcgccaccacacatgtgcaacctgtctggccctcttgggctgagccagcccctgcattctccggcaattcagggagaggaagtagagcccacaggagaagtcagacttgctgctaatctggaagtggaggctcagactgattttactttgaaaaatgtgaaaatcgggagaatatttgtcccaaagctgatgaggcatgccacgctggtggcataagcctgtatgtcctagggggcagggtgctgcaagcatttaagagtacagattttggcggggtgtggtggctcatgcctgtaaccccagcactttgggaggccgaggcaggccgatcatctgaggtcaggagttcaagaccagcctggccaacatggtgaaaccctgtctctactaaaactacaaaacattagccgggcatggtggtgggcacctgtaatcccagctactcaggaggacgaggcaggagaattgcttgaacccaggaggcagaggttgcagtgagctgccattgcactccaggctgggcaacaagagtgaaactctgtcaaaagaaagaaagagagagagagggagggagggagggaggaaggaaggaaggaaggaaggaaggaaggaaggaaggaagggcagatttcaggtgcaaatcccaacttgccttctttttagttggtggtcttgggcaaattactcaaactctctctgttttagtttcctcatctgtaaaatgaggatcattgtggaagttagtgtcctccaaagaaacagaaccaataggacgtatatatagagaggtttattttaaggaattggctcatgcaatcatgcgggttggcaagtctgaaatctgcaggacagaccgggaggctggagacccagggaaaagtgattttgcagccttgagtctggaagcagaattccttcttccttgtggaacttcagcctcttcttgtaagaccttcaactgattggtgcggcccaccctcattatggaggtaatctgctttactctaagtctctttatttaaatgttactcgcatcttcaaaataccttcacagcagcatctagactggtgtttgaccacacaattgggcaccatggcttagccaagttgacccataccaacatgatgacaatgatgataataatgcctacctggtagggctgttgaaagattcaatgcattggactatattaaatatttaggcctggcctggtggctaacctctgtaatcccagcactttgggaggctgagaaggaggatcgcttgagtccaggagttcgagaccagcctgggcaacacagagagaccccttctcttcaaacaatttaaaaattagccagccatagtgacgtgcacctgtagtcccagctactctggaggctgagatgagaggatcacttgaacctgggaggtggaggctgcagtgagccatgatcacaccactgcactcgagcctgggtgacagagcaagaccctgtctcaataaataagtaagtaaataaatatttagagtgggctgggccctcctcatagctggctttcccctcctcttactgtcagtactttcatcactgcaacaaaatactcctgatatccaaatacaagcccccctgagaaccatccatctaggctcgtggtttaagcaaccctttcttttcagtggtcaccccacttggcttatttctaatgaaacatcatgcggaaccccaatagatacgttggccaaaggtgccgctgctctggctgaagcagaaatgcccagtgcccctcacccccatgtctgatccctcccacatctgtcagaggacttggtccctgtgctcaaaacctggagctccacatcacccagtttcataattcaccaggtccgcaaaactacctcctctctctaacgcatgtgtgaagggtggccgccctgcccctgggggatcttgactctgatacacggtgggaaaacttccaaggaggctgaaacctgcgcagccaccatggggaaggccacccagcagatgggagaggctccgcgcctcggagcggacgctcgttgtttttgaggaaccgatgccctctgatgactggaacattttcagcaaagattttgcccttctgagtgtgctaacaggttcagtatttctgtgtaaaataacagcatgggaagaatttttttatttgtgggtaatctgtggtcagacaaaagcaacagcattgacagagggcagtagaaggggaaggttttgtgtctgtttgttaagataccactttcacgtgtctgggagcacacaatgaatggtgtgcatgtgcgtgcatatgtgtgtgtgtctgtgtgtgtgtatgcatgtgtgcacctgagagagaaaacacaatagaatagaaatataagatgccattttcattactaataaaatggcaaacgtgtgtgcgtgtgtgcgtgcatgtgtgtgtgcatatgtgtgcatgtatatgtgagaattgtctatgtgtgcatgtatgtgtgtgtttgtgtacatgtgagtgtgtttgtgtatgggtatatgtgtgtgattgtatgtatttgtgtgtacatgtgttatgtgtgcatgtgtgtgtatgtgagagtgtgaatgtgtgtatgtgtatgtaagagtgtgtgtgcatgtgtgtgtatttatgagtgtgtgagtgtatgtgtgcacgggtgtgtgtatatgcatgtatatgtgtgtcacgtgtacatgcttgtgagaattgtgcgtgtgtgtgtgcatgtattgtgtgtacatgtttgtgtatatatgtgtgtttgtgtgtatgtgtgtatttgcatgtgtgttatgtatgtgtccatgtgcaggtgtatgtacatgtgtgtgtgcatttgtgtgagggtgtgtgtgtgtgcattgtgtgagtgtgtatgtctgtgagcatgtatgtgtgtgtctgtgtgtgaatgtatatatgtaagagtgtgtgtgtgtgagagtgtatgtgcggttgtgtgtatatgcatgtatttgtgtgccatgtgtacatgagtgtgagaattgtacatgtgtatgtgtgcatgtgtgtgtacatttctgtgcatatatgtgtggttgtgcatatgtgtatgtgtgttatgtatgtgtgcatgtgtgtgtggttgtgtctgtgtgtatgtgtgtatgtatgtggttgtgtgtctgtgtatttgtatgtgtgtatttgtatgtgggtgtacatgtgcttgtgtatgtgcgtgtctgtgtatttgtgtgtatgtgtatgagtgtgtgtctgtgtgtgtatttgcatgtgtgtgtacgtttgtgtatatgtgtctgtgtgtatttgcatgtgtgtgtacatgtgtttgtgtctgtgtatgtatttgcatgtgtgtacatgtgtttgtgtgtgtgtatttgcatgtgtgtgtctgtgtgtgtatttgcatgtgtgtgtgcatgtggtgtacatatgagtgtttatgtgtctgtgtatttatgtgtgtgtctgtgtgtatttgcatgtgtgtgtacatgtgtttgtgtctgtatgtatttgcatgtgtgtacatgtgtttgtgtctgtgtgtgtatttgcatgtgtgtgtgcatgtggtgtacatatgagtgtttatgtgtctgtgtatttacgtgtgtgtctgtgtgtatttgcatgtgcgtgtatgtgtgtataccttatcaagcctgtccctcattgttttgctgtcacctgatgccccagctctgctcagctagtggctcgctgtccacgttgaggtctcgagtgagtcaccccgcacagctcttcacggtttctcacttctgctccccagatattgcccaagccctggtttcttttacatcctatccaacttctccaggctccacccagaaagccacagtcccaggcagagtcaggagggccagattttaaagaagttgcctgggctgtcctgggggtgactcttgtggattccaaagtggcaggtaatgtggctagaagccaagatcagacctgacagcaggagagtcagacagacattgatacactcagactcacacatgccaacgcgcacacacacccagtgtgtgcccagagacacgcacacacacagagctcagcttcaggaatcagatgttcagaactagggtcctactgggacctcctgaaccatttaatttctaaaatactctacagtttacaacatgcttttatatccatatccacatgttatactagtgtggtatcccagtaggaccctggttcggtggctcacacctgtaatcccagcactttgggagaccaaggcaggtggatcgcctggccaacatggcgaaaccccatctctactaaaaatacaaaaattagccaggtgtgatggcacatgcctgtcatctcagctacaagggaggctgaggcacgagaatctcttgaacctaagagatggaggttgcagtgagccaagattgcgccactgcactccagccagggtgacagagcgagactccatctcaaaaaaaaaaaaaaagtgaatgtagaaaaggcaacatgaacatttatgtagacacttcccgttggttctgtttctctggaaaaccctgacttatgcagcagctgactctttatgactttcatccaccatgactgggcccgccatcactcccacacctcatcttcatactctcagagccctgtgcctcgtcagctccccgaggcaggggcagggcctgtctgcttcactgtggcaccccagagcctagctcagtgcctggcaccctgcaggcttcaggaaatatttgatcaatgcatgtgtgaatatatgactgagtgaatttggaaagccactccttaggcaattcctacacctgaaactctcttcctacttctttttttttttttttttttttttttttgagacagagcctcactctgttgcccaggctggagtgcaatggcacagtcacggctcagtgcagcattgacctccctgggcataggtgatctcccacttcagcctctcaagtagctgggactacaggcgtgcaccaccatgctcagttaatttttctatttttttgtggagacagggtttcgccatgttgcccaggttgttctcaaactcctgagctcaagtgacttacctgcctcagcttcccaaagtgctggattgcaggcataggtcactatgtccggccccttctttgctcataaaaatcctttattgtccccgaggcctagcatgggctactttctccttcatccccacaccgcggaagcctcatgagagcagagaccatgtctgccttattcacgattgtgacttagactgaagcctaagtctcagtctggggcctggtacatggtagatgctcaataaatactggttacattaatgtagaatacatgtcacagcggtaggatatttttatttatttatttttttgagacagagtttccctttttttttttttttttttttttgagattgagtcttgctttgtccccaggctggagtgcaatggcgcaatctcaggtcactgcaacccctgccttccaggttcaagcaattctcctgtctcagcctcccgagtagctgggattacaggcatgtgccactgtgcccagctaattttgtatgttagtagagacggggtttcaccatgttggtcaggctggtctcgaactcctgactttaggtgatccacccgcctcggcctcccaaagtgctgggattacaggcatgagccaccaccccgctaggatattttttaaatgttaacctctattcttcccccaggattgcccttattccttttgctctcacctcttctttagacagcaaagtatttctttccctaagcctcagggaaggatgtgacagctgagaacaaaaaacccatgtctcttgcctggatttgcagtgtcgaaagcttagactcagagagaaccagaaggaatacacagaaaggagaaaatacttggaggaaatcatgagagttttctgctttccaggctggagaatcattttctgaaactgtcataaagaagagaactgcagagaaaacacccagattgcagatgctggtagttctcagagaaagaggctctgtccctgctcataaagcaccttgtgtgggttaggaaaaggcacccccctgggtgcacagcttggtaactggagcacagttcacatccagctcttattacccgcttcgtccaggcactcatgtggagtgcacaacccatacaaccatacagagccgccttgcacaagccctaccaagtcctaaaagaggcaaaaaaaaaaaaaaaaaaaaaaagttcagacaggtctgcggggtctgaacacagagaaaatccatgcctcacattccaggcagagacctcatggggcaagagtgtttcagggaggaagtggtcccaggcaaaagcgatcacagtttcctacgcagaggatctgataaggaacaatgactaaggaccaggtgggtgcagcagtcctgaggtcaaccctggggacagatgacagcagccaccagattgccacctccccatgcacgcacacaacttggcacacataagccccttggaatcagcccaaaaaccacagaaaaatctcaaataaattgagattaagtatttgccactcatgcaaaatgaagattcaaaacagaagtccccttgagtcacaggcgtgcacacacaagcacacacacacaaagaataagttgcatcgtgtgcatccaaggtgcacataaactgggaatttttttaaaaaattgctctgcttagcacacatttgttcaatggatgctgaatgaataacaagtaacgggtgcatctctgcatccttaatggtgttctgccctgatttaattatcagaacacatctgtctccctgactagattgtcaatggcttgcagacagggacccagtttattcaactttaaatcctgcacatgaatcctctacagaactgctcattgcctgagtgttcaattgaattactctctaagtatgtggaatttttctccaggctccaagatcaaaaagctcccctcaccctgaactcccctcctttctctcccacctcttcatagagcatacgaattcccaaatcctggcgcagaaaggaagaaggttcccctttaatgcggttgtctggtgccaccgcacagcctggtaaataagtgtgctaggatttgggacgtgtccacatccagcagaggagcactgctctgcccagcagccgtgagcctgagcttagtctgaggtttggggcagtgaggtcacgattatcgtggggtaggggtagggctggaccccaagacagatgctcaagggcaggggggctcaaggtcccttgttctgggagctactggagatttaaggtgcccaggacttggggcttcccagagatggcgcccagagtcgtggtggcattctaggacctcatggcttgggcacgtgggccggtccagcccaccaggcccttttccaggcccctttccacaccctttgctgcagcctgcttcctggctgccacaattacatgccaacattttatttttggccctcgcagcaatacttacattttctgcccgtgcactctgccttcgctgatatggattttgtctcctggcctgtgtttgtaaattattccccatgtgtctgtcctttctctgtggccagaaggtcagcagctgccactggctggccgccttgctctctccctggctggagtccctgctgccttccaggccatagtttgagtcccagctctgccacttactagcagggtgaccttcccatgttactgaaggtattgcagccatgatgatgatggcttcccctctcctctgggttcccacagcctggcgcacctgtcactctctcctcgtattgcagaggtctgttcgctgcctcccacctcccccgaagagaaggtgctcccaaggctggggccaagcctgtcccttccatttccccatgccctgcactgggcctgcctctgagcggtggcccagggagggtgggctcctgtccctctcaccctcctgcctttcctcctccccttctcctctttcctgaggctctctgcacacacaagcccagggtctgccttcctcccatttcttccttgatgctggtgctggtgggggcatcatttactctaggagatgaaaaatgccaggcagaaactgagatgttgcaggttgttttattaaaaccaggtgagtcactgccatacctgaggaggcacacacaagttccagatagtcaaatgcttccccagctggcccgcccagcccagatctcctcctcattgcaaagggacattctgctgtcttcaaggggccagtgattaatcagacaattgctactgtcaggtgtagttaatggcttggatttggggttacagccagtttggaggttggaagaagttcggttgggatttagaagaaaggacaattaattcagatccaaaccatgcagaacacagtgagccaagggccactcccggttcccagggtgatgacatcccacagggaggcgcatcgctgggcatgcaaagccaacttcaacaccccagccccagcccctcagctcctcctgcccacctctactaaacaaagcagacactcagaagcaaactctatatggctacacgagatcagaccccgctctctcttgaacccggggcccagatgggtgggggtgggagcggcaggggcctagccctggaagcccagctccttgtagttggaggccatgtccttccggaacagctccagggccttgttcatggccccctgggcatcagcaccaaagtccccgggatgcttgctctgcagaacctggatgatgcattccgagatgaactgcagggagggtgaggagagaaaatggtcaccagggtgggacaagccaggggccagatgggagtcagttgtcctcctaccttctctttattccaggaccgtgtattgagcacttgctaggcaccaggtgagagtctgtgtgatctccacggatgaacccctttgatccccacaaccactgtgagatagatactacaactgccctcgatttacagatgcagaaactgaggcgaggggaggttgaatggaagggacatttggacccaggagggccggctccggagcccacgctcttactcacagccccctccactccatcaggatgtagaccccactgaaaccaggtgagagctcagagcaccacccgcttgggggcagcagaaaagaagggaaatgctcagatttcattattgtattcaggattttgcaatcagaaagtctagaaaggaactatttctatttgtgtgtatgcaatttttgcatacttaatgacttggtatggttattgttttaaagaccctattttgggggcacagcctcctattttttataccaagcacagaaacactggtgggagggaaggagagagaggaagaagacagggatgaggcccgcggctggctcccaggatggagaatgtctgctatcagcctcagcattgccatttgctttagtacccacagtctcactgcccggataacagagatgggcatgggaaaacggagatgtagcatggtgctgctttagggatggaaagactcatggatgtgaaatgcggctgtgctttctcaagttaaccagatttgatcccaaccacagccctggctggtgcaccaaggagtgtcgttttacagaggagaaaatcaagtggccagaccgaggtcacgcaggaagcagagagcaga

SEQ ID NO: 459 - protein, 278 aa, Homo sapiens
MPASLALLQPRAMMKTLSSGNCTLSVPAKNSYRMVVLGASRVGKSSIVSRFLNGRFEDQYTPTIEDFHRKVYNIRGDMYQLDILDTSGNHPFPAMRRLSILTGDVFILVFSLDNRESFDEVKRLQKQILEVKSCLKNKTKEAAELPMVICGNKNDHGELCRQVPTTEAELLVSGDENCAYFEVSAKKNTNVDEMFYVLFSMAKLPHEMSPALHRKISVQYGDAFHPRPFCMRRVKEMDAYGMVSPFARRPSVNSDLKYIKAKVLREGQARERDKCTIQ

SEQ ID NO: 460 - DNA, 1552 bp, Homo sapiens
gcccgtacacaccgtgtgctgggacaccccacagtcagccgcatggctcccctgtgccccagcccctggctccctctgttgatcccggcccctgctccaggcctcactgtgcaactgctgctgtcactgctgcttctgatgcctgtccatccccagaggttgccccggatgcaggaggattcccccttgggaggaggctcttctggggaagatgacccactgggcgaggaggatctgcccagtgaagaggattcacccagagaggaggatccacccggagaggaggatctacctggagaggaggatctacctggagaggaggatctacctgaagttaagcctaaatcagaagaagagggctccctgaagttagaggatctacctactgttgaggctcctggagatcctcaagaaccccagaataatgcccacagggacaaagaaggggatgaccagagtcattggcgctatggaggcgacccgccctggccccgggtgtccccagcctgcgcgggccgcttccagtccccggtggatatccgcccccagctcgccgccttctgcccggccctgcgccccctggaactcctgggcttccagctcccgccgctcccagaactgcgcctgcgcaacaatggccacagtgtgcaactgaccctgcctcctgggctagagatggctctgggtcccgggcgggagtaccgggctctgcagctgcatctgcactggggggctgcaggtcgtccgggctcggagcacactgtggaaggccaccgtttccctgccgagatccacgtggttcacctcagcaccgcctttgccagagttgacgaggccttggggcgcccgggaggcctggccgtgttggccgcctttctggaggagggcccggaagaaaacagtgcctatgagcagttgctgtctcgcttggaagaaatcgctgaggaaggctcagagactcaggtcccaggactggacatatctgcactcctgccctctgacttcagccgctacttccaatatgaggggtctctgactacaccgccctgtgcccagggtgtcatctggactgtgtttaaccagacagtgatgctgagtgctaagcagctccacaccctctctgacaccctgtggggacctggtgactctcggctacagctgaacttccgagcgacgcagcctttgaatgggcgagtgattgaggcctccttccctgctggagtggacagcagtcctcgggctgctgagccagtccagctgaattcctgcctggctgctggtgacatcctagccctggtttttggcctcctttttgctgtcaccagcgtcgcgttccttgtgcagatgagaaggcagcacagaaggggaaccaaagggggtgtgagctaccgcccagcagaggtagccgagactggagcctagaggctggatcttggagaatgtgagaagccagccagaggcatctgagggggagccggtaactgtcctgtcctgctcattatgccacttccttttaactgccaagaaattttttaaaataaatatttataat

SEQ ID NO: 461 - protein, 459 aa, Homo sapiens
MAPLCPSPWLPLLIPAPAPGLTVQLLLSLLLLMPVHPQRLPRMQEDSPLGGGSSGEDDPLGEEDLPSEEDSPREEDPPGEEDLPGEEDLPGEEDLPEVKPKSEEEGSLKLEDLPTVEAPGDPQEPQNNAHRDKEGDDQSHWRYGGDPPWPRVSPACAGRFQSPVDIRPQLAAFCPALRPLELLGFQLPPLPELRLRNNGHSVQLTLPPGLEMALGPGREYRALQLHLHWGAAGRPGSEHTVEGHRFPAEIHVVHLSTAFARVDEALGRPGGLAVLAAFLEEGPEENSAYEQLLSRLEEIAEEGSETQVPGLDISALLPSDFSRYFQYEGSLTTPPCAQGVIWTVFNQTVMLSAKQLHTLSDTLWGPGDSRLQLNFRATQPLNGRVIEASFPAGVDSSPRAAEPVQLNSCLAAGDILALVFGLLFAVTSVAFLVQMRRQHRRGTKGGVSYRPAEVAETGA

SEQ ID NO: 462 - DNA, 490 bp, Homo sapiens
  misc_feature (266)..(266): n is a, c, g, or t
  misc_feature (464)..(464): n is a, c, g, or t
ggacaggagctgaggaggaaagaggaggggagaggggtcaggccaggcagccaaggagaagacgtgtggccgggggctatcagaaggaaactgggacggacgggccgggctcgggctgtcctgtggagcagcagcatccccggggccggcagaggcgccagtggctgggcgggatgagtctctgagggccactgtggagcgccccgccatggccccccgcaccctctggagctgctacctctgctgcctgctgacggcagctgcangggccgccagctaccctcctcgaggtttcagcctctacacaggttccagtggggccctcagccccggggggccccaggcccagattgccccccggccagccagccgccacaggaactggtgtgcctacgtggtgacccggacagtgagctgtgtccttgaggatggagtggagacatatgtcaagtaccagccttgtncctggggccagccccagtgtccccaa

SEQ ID NO: 463 - DNA, 3277 bp, Homo sapiens
atctttgatcaatgtacttgccagggagagcccaagtccttcaaacctcctccttttcaccttcatccttaactttgtgctagagcgagacccacacaacaacagccgaccctccccgccccacccccacccccaaaccagccctcgatcccagcccccggagaggactcgcatttcgacttgcgggacacttttgtgcgttcctctccagagcgcctctcgtgctcgcccctcttgcgctcgctctttattaccttcacctccttttctcccccttctctccctttctccttctcgttctctcccggagttgttgttgcccccctcgctccttctccccccttttctccccttcccctcccgggggtgtgtggcaacttttcctctcgcttctcctccgtctgtttccccttatatgtgaccatggcagtgccggcggctttgatccctccgacccagctggtcccccctcaacccccaatctccacgtctgcttcctcctctggcaccaccacctccacctcttcggcgacttcgtctccggctccttccatcggacccccggcgtcctctgggccaactctgttccgcccggagcccatcgcttcggcggcggcggcggcggccacagtcacctctaccggcggcggcggcggcggcggcggcagcggaggcggcggcggcagcagcggcaacggaggcggcggtggcggcggcggcggtggcagcaactgcaaccccaacctggcggccgcgagcaacggcagcggcggcggcggcggcggcatcagcgctggcggcggcgtcgcttccagcacccccatcaacgccagcaccggcagcagcagcagcagcagtagcagcagcagcagcagcagcagtagtagcagcagcagcagtagcagcagcagctgcggccccctccccgggaaacccgtgtactcaaccccgtccccagtggaaaacacccctcagaataatgagtgcaaaatggtggatctgaggggggccaaagtggcttccttcacggtggagggctgcgagctgatctgcctgccccaggctttcgacctgttcctgaagcacttggtggggggcttgcatacggtctacaccaagctgaagcggctggagatcacgccggtggtgtgcaatgtggaacaagttcgcatcctgaggggactgggcgccatccagccaggagtgaaccgctgcaaactcatctccaggaaggacttcgagaccctctacaatgactgcaccaacgcaagttctagacctggaaggcctcctaagaggactcaaagtgtcacctccccagagaactctcacatcatgccgcattctgtccctggtctcatgtctcctgggataattccaccaacaggtctgacagcagccgctgcagcagctgctgctgctaccaatgcagctattgctgaagcaatgaaggtgaaaaaaatcaaattagaagccatgagcaactatcatgccagtaataaccaacatggagcagactctgaaaacggggacatgaattcaagtgtcggactggaacttccttttatgatgatgccccaccctctaattcctgtcagcctacctccagcatctgtcaccatggcaatgagccagatgaaccacctcagcaccattgcaaatatggcagcagcagcacaagttcagagtcccccatccagagttgagacatcagttattaaggagcgtgttcctgatagcccctcacctgccccctctctggaggaggggagaaggcctggcagtcacccatcatcacatcgcagcagcagcgtgtccagctcccctgctcggactgagagctcttctgacagaatcccggtccatcagaatgggttgtccatgaaccagatgctgatgggcttatcaccaaatgtacttcctgggcccaaagagggagatttggccggtcatgacatgggacatgagtcaaaaaggatgcatattgaaaaagatgagaccccgctttctacaccaaccgcaagagacagccttgacaaactctctctaactgggcatggacaaccactgcctccaggttttccatctccttttctgtttcctgatggactgtcttccatcgagactcttctgactaacatacaggggctgttgaaagttgccatagataatgccagagctcaagagaaacaggtccaactggaaaaaactgagctgaagatggattttttaagggaaagagaactaagggaaacacttgagaagcagttggctatggaacaaaagaatagagccatagttcaaaagaggctaaagaaggagaagaaggcaaagagaaaattgcaggaagcacttgagtttgagacgaaacggcgtgaacaagcagaacagacgctaaaacaggcagcttcaacagatagtctcagggtcttaaatgactctctgaccccagagatagaggctgaccgcagtggcggcagaacagatgctgaaaggacaatacaagatggaagactgtatttgaaaactactgtcatgtactgaatctttcctgttgaagaaatccatgttatagaaaagaactttgcagtcagacattcgtcatgggaaagttcagaaaaaaataaagtccttttaagggaacttcctgaattttgtgtattaatgttctttaaaagtttaagtattctacaaaaaaaaaaaaaaagttttctccattgattttcacctgtggttcataccagagacctgagaatgtttgtaaatgtacaagtatcaaagttcttacagttaattactgcaacttgctgctggacaattgtatacagagttaaaggcaggtctgaataagacctagctttgtttttttctaatggaatgaaccattttcctcttctgaaaattctgtatctgagcacatcaagagactcttgtagcagtggttacccagacttacagaattatgtcctccagaaaccagcaagaacacttggaatgaacgaatgaacttgtagggggcatagaggattcttgaaaaaaaaaaaatgcaagagtgattttctgttacattcaatttcaaactctctaattgtgggttttctcctgaagaattttttttcacatactttccaaaagaccaacaaatggatgttgacaacaacccaatgaaataacattttgcatatctgaaaagaagcattgaatataagccaaaagctttcactgaaggtttttttttcataaaaaaaaaaaaaaaaaaaaaaaaaaaaaaaaaaaa

SEQ ID NO: 464 - protein, 706 aa, Homo sapiens
MAVPAALIPPTQLVPPQPPISTSASSSGTTTSTSSATSSPAPSIGPPASSGPTLFRPEPIASAAAAAATVTSTGGGGGGGGSGGGGGSSGNGGGGGGGGGGSNCNPNLAAASNGSGGGGGGISAGGGVASSTPINASTGSSSSSSSSSSSSSSSSSSSSSSSSCGPLPGKPVYSTPSPVENTPQNNECKMVDLRGAKVASFTVEGCELICLPQAFDLFLKHLVGGLHTVYTKLKRLEITPVVCNVEQVRILRGLGAIQPGVNRCKLISRKDFETLYNDCTNASSRPGRPPKRTQSVTSPENSHIMPHSVPGLMSPGIIPPTGLTAAAAAAAAATNAAIAEAMKVKKIKLEAMSNYHASNNQHGADSENGDMNSSVGLELPFMMMPHPLIPVSLPPASVTMAMSQMNHLSTIANMAAAAQVQSPPSRVETSVIKERVPDSPSPAPSLEEGRRPGSHPSSHRSSSVSSSPARTESSSDRIPVHQNGLSMNQMLMGLSPNVLPGPKEGDLAGHDMGHESKRMHIEKDETPLSTPTARDSLDKLSLTGHGQPLPPGFPSPFLFPDGLSSIETLLTNIQGLLKVAIDNARAQEKQVQLEKTELKMDFLRERELRETLEKQLAMEQKNRAIVQKRLKKEKKAKRKLQEALEFETKRREQAEQTLKQAASTDSLRVLNDSLTPEIEADRSGGRTDAERTIQDGRLYLKTTVMY

SEQ ID NO: 465 - DNA, 246 bp, Homo sapiens
tgatgccgtatatagccaaggggtgaggatattctaaacaaacaaaaattgaataatttattcacagaaactattaagattgtattgtaaagctcacagcaagctcagtgggcagcagctgcaacatctcaccggggaaattattttatttaacgtgagtgagatgtgggccggagaaggtagctgaagctatttataaaacgttgtgtaccttcttccgagctctctcccctttgtgaagggcgc

SEQ ID NO: 466 - DNA, 1390 bp, Homo sapiens
aaacaagatgctaaaagtcttggactaatattctaatattttccttttacagatgttccattcagtgccacaccagtgaatgccttttataatggctgcatggaagtgaatattaatggtgtacagttggatctggatgaagccatttctaaacataatgatattagagctcactcatgtccatcagtttggaaaaagacaaagaattcttaaggcatcttttctctgcttataataccttttccttgtgtgtaattatacttatgtttcaataacagctgaagggttttatttacaatgtgcagtctttgattattttgtggtcctttcctgggatttttaaaaggtcctttgtcaaggaaaaaaattctgttgtgatataaatcacagtaaagaaattcttacttctcttgctatctaagaatagtgaaaaataacaattttaaatttgaatttttttcctacaaatgacagtttcaatttttgtttgtaaaactaaatttttaattttatcatcatgaactagtgtctaaatacctatgtttttttcagaaagcaaggaagtaaactcaaacaaaagtgcgtgtaattaaatactattaatcataggcagatactattttgtttatgtttttgtttttttcctgatgaaggcagaagagatggtggtctattaaatatgaattgaatggagggtcctaatgccttatttcaaaacaattcctcagggggaccagctttggcttcatctttctcttgtgtggcttcacatttaaaccagtatctttattgaattagaaaacaagtgggacatattttcctgagagcagcacaggaatcttcttcttggcagctgcagtctgtcaggatgagatatcagattaggttggataggtggggaaatctgaagtgggtacattttttaaattttgctgtgtgggtcacacaaggtctacattacaaaagacagaattcagggatggaaaggagaatgaacaaatgtgggagttcatagttttccttgaatccaacttttaattaccagagtaagttgccaaaatgtgattgttgaagtacaaaaggaactatgaaaaccagaacaaattttaacaaaaggacaaccacagagggatatagtgaatatcgtatcattgtaatcaaagaagtaaggaggtaagattgccacgtgcctgctggtactgtgatgcatttcaagtggcagttttatcacgtttgaatctaccattcatagccagatgtgtatcagatgtttcactgacagtttttaacaataaattcttttcactgtattttatatcacttataataaatcggtgtataattttaaaatgcatgtgaatatctttattatatcaactgtttgaataaa

SEQ ID NO: 467 - protein, 650 aa, Homo sapiens
LSKQQASQVLVRKRRANSLLEETKQGNLERECIEELCNKEEAREVFENDPETDYFYPKYLVCLRSFQTGLFTAARQSTNAYPDLRSCVNAIPDQCSPLPCNEDGYMSCKDGKASFTCTCKPGWQGEKCEFDINECKDPSNINGGCSQICDNTPGSYHCSCKNGFVMLSNKKDCKDVDECSLKPSICGTAVCKNIPGDFECECPEGYRYNLKSKSCEDIDECSENMCAQLCVNYPGGYTCYCDGKKGFKLAQDQKSCEVVSVCLPLNLDTKYELLYLAEQFAGVVLYLKFRLPEISRFSAEFDFRTYDSEGVILYAESIDHSAWLLIALRGGKIEVQLKNEHTSKITTGGDVINNGLWNMVSVEELEHSISIKIAKEAVMDINKPGPLFKPENGLLETKVYFAGFPRKVESELIKPINPRLDGCIRSWNLMKQGASGIKEIIQEKQNKHCLVTVEKGSYYPGSGIAQFHIDYNNVSSAEGWHVNVTLNIRPSTGTGVMLALVSGNNTVPFAVSLVDSTSEKSQDILLSVENTVIYRIQALSLCSDQQSHLEFRVNRNNLELSTPLKIETISHEDLQRQLAVLDKAMKAKVATYLGGLPDVPFSATPVNAFYNGCMEVNINGVQLDLDEAISKHNDIRAHSCPSVWKKTKNS

SEQ ID NO: 468 - DNA, 414 bp, Homo sapiens
  misc_feature (391)..(391): n is a, c, g, or t
ttttttttttttttttttttttttaagttctcagcacccattgtaatttatttgtgaatgaatgggaaaagggtatcagtccaaggggagatcaggtggttcctcctcatcagagtcaaactcaacattttcatcttttacccatcgacctcgtccatctgggatccatccagagcttcgaagggtgagataatggtccagggctcgtcttcttgtggggctcatgggtgcaggggctgagacagttgctgactcctcggcctgtgggcaggccgcaggttcaggttccctactgatcttcccactttggagtttgacctctgagggtggcataggggaaagggagacagagggaccaggggcttctggtctgtacttccggcggcacaanctgttatagtggggagctctgtg

SEQ ID NO: 469 - DNA, 1887 bp, Homo sapiens
tcgcccaattccgggctcagacactgggctcccagctggggactgctccatggccatggagatagacagcaggcctggggggctccccggcagtagctgcaacctaggtgcagcccgagaacacatgcaggcggtcacccgaaactacatcacccacccccgtgtcacctacaggactgtgtgcagcgtgaacgggcccctggtggtgctggaccgggtcaagtttgcccagtatgcggagatcgtccacttcaccctcccagatgggactcagaggagcgggcaggtgcttgaggtggctggcaccaaggcgattgttcaggtgtttgaagggacatcagggatcgatgccaggaagaccacttgcgaatttacaggggacatcctacgaactccggtgtcagaggacatgctgggtcgggttttcaatggctccggcaagcccattgacaaggggccagtggtcatggcggaggactttctggatatcaatggccagcccatcaacccgcactcccgcatctaccccgaggagatgattcagacgggcatttctcctattgacgtcatgaacagcattgcccgcggccagaagatccccatcttctcagcagccgggctcccccacaatgagattgccgctcagatctgccgccaggcggggctggtgaagaagtccaaggctgtgctggattaccatgacgacaacttcgccatcgtctttgcagccatgggggtgaacatggagacagccagattcttcaagtctgactttgagcagaatggaaccatggggaacgtctgcctcttcctgaacttggccaatgaccccacgatcgagcggatcatcaccccgcgcctggcgctgaccactgctgaattccttgcctaccagtgtgagaagcatgtgctggtcatactgacggacatgagttcctatgcagaggccttgcgggaggtctctgctgctagagaggaggtgcctgggcgccgagggtttcctggatatatgtacacagacctggccaccatctacgagcgggcgggccgtgtggagggtcggggaggatccatcacacagatccccatcctcaccatgcccaacgacgatatcacccaccctatcccagacttgacgggcttcatcacagagggacagatctacgtggacagacagcttcacaacagacagatctacccccccatcaacgtgctcccttccctgtcgcggctgatgaagtcagccattggggaaggcatgacaagaaaggaccatggagatgtctccaaccagctgtacgcctgctatgccatcgggaaggacgtgcaggccatgaaggcagtagttggggaggaggcgctcacctctgaggacctgctctacctggaattcctgcagaagtttgagaagaacttcatcaatcagggcccctacgagaaccgctcgatgttcgagtcgctggaccttagctggaagctgctgcgcatcttccccaaggagatgctgaagcgcattccgcaggccgtgatcgacgagttctattcccgcgaggggcggctgcaggacctcgcgcctgacactgcgctctagccccgcgcgccgtggcaccccaacaccggcaggaacctaccctcggctcccgggtctccccgtccctcgccacccctaaccagcggctttcgcgccgccctccgccctccgtggctccgaggtggtggggggcgccgcagtcatccctttcctcgctcgattccttttcccgcgctccatgcctccccctcagctcccggtgctgcggaagaactgaaggttcatgcctactctgacgggagcatctgtattttttatgttaaaagcccacaaaataaaaataaaaatgaactgag

SEQ ID NO: 470 - protein, 511 aa, Homo sapiens [sequence omitted]

SEQ ID NO: 471 - DNA, 364 bp, Homo sapiens
gtaaaactgacatttgcatgtgtgatgagggaggagggaggtgggaggtagcaggaacaccatattgaaacctagtgttgaaataaaagaaattgtaaaagagaaaaaggcagactctagacaaagaaaatggttaaaattgtcacgaggagtgttctgaagccaatgcctctctacagttaacctgagtatgtattaatcctgagtgtgacaggtaattaaaacacattatttgtctaaccacacttcctgggaggaggaaacagtagcagagccaaacagatgaagacccaggacctagacacaatacttcaccatgcgcaacagcaaagtgcgtgcaccacatcctagaaaatgacaggat

SEQ ID NO: 472 - DNA, 1696 bp, Homo sapiens
gctgtagctggtgagaggaagtcctagaggctatggacactctgctgctgggatcaccgagatgagcagcagctgctcagggctgagcagggtcctggtggccgtggctacagccctggtgtctgcctcctccccctgcccccaggcctggggccccccaggggtccagtatgggcagccagggaggtccgtgaagctgtgttgtcctggagtgactgccggggacccagtgtcctggtttcgggatggggagccaaagctgctccagggacctgactctgggctagggcatgaactggtcctggcccaggcagacagcactgatgagggcacctacatctgccagaccctggatggtgcacttgggggcacagtgaccctgcagctgggctaccctccagcccgccctgttgtctcctgccaagcagccgactatgagaacttctcttgcacttggagtcccagccagatcagcggtttacccacccgctacctcacctcctacaggaagaagacagtcctaggagctgatagccagaggaggagtccatccacagggccctggccatgcccacaggatcccctaggggctgcccgctgtgttgtccacggggctgagttctggagccagtaccggattaatgtgactgaggtgaacccactgggtgccagcacacgcctgctggatgtgagcttgcagagcatcttgcgccctgacccaccccagggcctgcgggtagagtcagtaccaggttacccccgacgcctgcgagccagctggacataccctgcctcctggccgtgccagccccacttcctgctcaagttccgtttgcagtaccgtccggcgcagcatccagcctggtccacggtggagccagctggactggaggaggtgatcacagatgctgtggctgggctgccccatgctgtacgagtcagtgcccgggactttctagatgctggcacctggagcacctggagcccggaggcctggggaactccgagcactgggaccataccaaaggagataccagcatggggccagctacacacgcagccagaggtggagcctcaggtggacagccctgctcctccaaggccctccctccaaccacaccctcggctacttgatcacagggactctgtggagcaggtagctgtgctggcgtctttgggaatcctttctttcctgggactggtggctggggccctggcactggggctctggctgaggctgagacggggtgggaaggatggatccccaaagcctgggttcttggcctcagtgattccagtggacaggcgtccaggagctccaaacctgtagaggacccaggagggcttcggcagattccacctataattctgtcttgctggtgtggatagaaaccaggcaggacagtagatccctatggttggatctcagctggaagttctgtttggagcccatttctgtgagaccctgtatttcaaatttgcagctgaaaggtgcttgtacctctgatttcaccccagagttggagttctgctcaaggaacgtgtgtaatgtgtacatctgtgtccatgtgtgaccatgtgtctgtgaaggccagggaacatgtattcctctgcatgcatgtatgtaggtgcctgggagtgtgtgtggtccttgctctggccctttcccttgcagggttgtgcaggtgtgaataaa

SEQ ID NO: 473 - protein, 422 aa, Homo sapiens
MSSSCSGLSRVLVAVATALVSASSPCPQAWGPPGVQYGQPGRSVKLCCPGVTAGDPVSWFRDGEPKLLQGPDSGLGHELVLAQADSTDEGTYICQTLDGALGGTVTLQLGYPPARPVVSCQAADYENFSCTWSPSQISGLPTRYLTSYRKKTVLGADSQRRSPSTGPWPCPQDPLGAARCVVHGAEFWSQYRINVTEVNPLGASTRLLDVSLQSILRPDPPQGLRVESVPGYPRRLRASWTYPASWPCQPHFLLKFRLQYRPAQHPAWSTVEPAGLEEVITDAVAGLPHAVRVSARDFLDAGTWSTWSPEAWGTPSTGTIPKEIPAWGQLHTQPEVEPQVDSPAPPRPSLQPHPRLLDHRDSVEQVAVLASLGILSFLGLVAGALALGLWLRLRRGGKDGSPKPGFLASVIPVDRRPGAPNL

SEQ ID NO: 474 - DNA, 3981 bp, Homo sapiens
cctcttgcggccacaggcgcggcgtcctcggcggcgggcggcagctagcgggagccgggacgccggtgcagccgcagcgcgcggaggaacccgggtgtgccgggagctgggcggccacgtccggacgggaccgagacccctcgtagcgcattgcggcgacctcgccttccccggccgcgagcgcgccgctgcttgaaaagccgcggaacccaaggacttttctccggtccgagctcggggcgccccgcaggcgcacggtacccgtgctgcagtcgggcacgccgcggcgccgggggcctccgcagggcgatggagccggtctgcaaggaaagtgaggcgccgccgctgcgttctggaggaggggggcacaaggtctggagaccccgggtggcggacgggagccctccccccgccccgcctccggggcaccagctccggctccattgttcccgcccgggctggaggcgccgagcaccgagcgccgccgggagtcgagcgccggccgcggagctcttgcgaccccgccaggacccgaacagagcccgggggcggcgggccggagccggggacgcgggcacacgcccgctcgcacaagccacggcggactctcccgaggcggaacctccacgccgagcgagggtcagtttgaaaaggaggatcgagctcactgtggagtatccatggagatgtggagccttgtcaccaacctctaactgcagaactgggatgtggagctggaagtgcctcctcttctgggctgtgctggtcacagccacactctgcaccgctaggccgtccccgaccttgcctgaacaagcccagccctggggagcccctgtggaagtggagtccttcctggtccaccccggtgacctgctgcagcttcgctgtcggctgcgggacgatgtgcagagcatcaactggctgcgggacggggtgcagctggcggaaagcaaccgcacccgcatcacaggggaggaggtggaggtgcaggactccgtgcccgcagactccggcctctatgcttgcgtaaccagcagcccctcgggcagtgacaccacctacttctccgtcaatgtttcagatgctctcccctcctcggaggatgatgatgatgatgatgactcctcttcagaggagaaagaaacagataacaccaaaccaaaccgtatgcccgtagctccatattggacatccccagaaaagatggaaaagaaattgcatgcagtgccggctgccaagacagtgaagttcaaatgcccttccagtgggaccccaaaccccacactgcgctggttgaaaaatggcaaagaattcaaacctgaccacagaattggaggctacaaggtccgttatgccacctggagcatcataatggactctgtggtgccctctgacaagggcaactacacctgcattgtggagaatgagtacggcagcatcaaccacacataccagctggatgtcgtggagcggtcccctcaccggcccatcctgcaagcagggttgcccgccaacaaaacagtggccctgggtagcaacgtggagttcatgtgtaaggtgtacagtgacccgcagccgcacatccagtggctaaagcacatcgaggtgaatgggagcaagattggcccagacaacctgccttatgtccagatcttgaagactgctggagttaataccaccgacaaagagatggaggtgcttcacttaagaaatgtctcctttgaggacgcaggggagtatacgtgcttggcgggtaactctatcggactctcccatcactctgcatggttgaccgttctggaagccctggaagagaggccggcagtgatgacctcgcccctgtacctggagatcatcatctattgcacaggggccttcctcatctcctgcatggtggggtcggtcatcgtctacaagatgaagagtggtaccaagaagagtgacttccacagccagatggctgtgcacaagctggccaagagcatccctctgcgcagacaggtaacagtgtctgctgactccagtgcatccatgaactctggggttcttctggttcggccatcacggctctcctccagtgggactcccatgctagcaggggtctctgagtatgagcttcccgaagaccctcgctgggagctgcctcgggacagactggtcttaggcaaacccctgggagagggctgctttgggcaggtggtgttggcagaggctatcgggctggacaaggacaaacccaaccgtgtgaccaaagtggctgtgaagatgttgaagtcggacgcaacagagaaagacttgtcagacctgatctcagaaatggagatgatgaagatgatcgggaagcataagaatatcatcaacctgctgggggcctgcacgcaggatggtcccttgtatgtcatcgtggagtatgcctccaagggcaacctgcgggagtacctgcaggcccggaggcccccagggctggaatactgctacaaccccagccacaacccagaggagcagctctcctccaaggacctggtgtcctgcgcctaccaggtggcccgaggcatggagtatctggcctccaagaagtgcatacaccgagacctggcagccaggaatgtcctggtgacagaggacaatgtgatgaagatagcagactttggcctcgcacgggacattcaccacatcgactactataaaaagacaaccaacggccgactgcctgtgaagtggatggcacccgaggcattatttgaccggatctacacccaccagagtgatgtgtggtctttcggggtgctcctgtgggagatcttcactctgggcggctccccataccccggtgtgcctgtggaggaacttttcaagctgctgaaggagggtcaccgcatggacaagcccagtaactgcaccaacgagctgtacatgatgatgcgggactgctggcatgcagtgccctcacagagacccaccttcaagcagctggtggaagacctggaccgcatcgtggccttgacctccaaccaggagtacctggacctgtccatgcccctggaccagtactcccccagctttcccgacacccggagctctacgtgctcctcaggggaggattccgtcttctctcatgagccgctgcccgaggagccctgcctgccccgacacccagcccagcttgccaatggcggactcaaacgccgctgactgccacccacacgccctccccagactccaccgtcagctgtaaccctcacccacagcccctgctgggcccaccacctgtccgtccctgtcccctttcctgctggcaggagccggctgcctaccaggggccttcctgtgtggcctgccttcaccccactcagctcacctctccctccacctcctctccacctgctggtgagaggtgcaaagaggcagatctttgctgccagccacttcatcccctcccagatgttggaccaacacccctccctgccaccaggcactgcctggagggcagggagtgggagccaatgaacaggcatgcaagtgagagcttcctgagctttctcctgtcggtttggtctgttttgccttcacccataagcccctcgcactctggtggcaggtgccttgtcctcagggctacagcagtagggaggtcagtgcttcgtgcctcgattgaaggtgacctctgccccagataggtggtgccagtggcttattaattccgatactagtttgctttgctgaccaaatgcctggtaccagaggatggtgaggcgaaggccaggttgggggcagtgttgtggccctggggcccagccccaaactgggggctctgtatatagctatgaagaaaacacaaagtgtataaatctgagtatatatttacatgtctttttaaaagggtcgttaccagagatttacccatcgggtaagatgctcctggtggctgggaggcatcagttgctatatattaaaaacaaaaaagaaaaaaaaaaaaaa

SEQ ID NO: 475 - protein, 822 aa, Homo sapiens [sequence omitted]

SEQ ID NO: 476 - DNA, 1061 bp, Homo sapiens
ctctgttttctcaaagctgaagtcggctaggtttgcaaagctgtgggctgagcactcaggcaatcacactctcagaaactgcggcggctctggactgcagcctcccaaggctccatgccagacaaagcatgcgtgtcacacttgctacaatagcctggatggtttcttttgtctccaattattcacacacagcaaatattttgccagatatcgaaaatgaagatttcatcaaagactgcgttcgaatccataacaagttccgatcagaggtgaaaccaacagccagtgatatgctatacatgacttgggacccagcactagcccaaattgcaaaagcatgggccagcaattgccagttttcacataatacacggctgaagccaccccacaagctgcacccaaacttcacttcactgggagagaacatctggactgggtctgtgcccattttttctgtgtcttccgccatcacaaactggtatgacgaaatccaggactatgacttcaagactcggatatgcaaaaaagtctgtggccactacactcaggttgtttgggcagatagttacaaagttggctgcgcagttcaattttgccctaaagtttctggctttgacgctctttccaatggagcacattttatatgcaactacggaccaggagggaattacccaacttggccatataagagaggagccacctgcagtgcctgccccaataatgacaagtgtttggacaatctctgtgttaaccgacagcgagaccaagtgaaacgttactactctgttgtatatccaggctggcccatatatccacgtaacagatacacttctctctttctcattgttaattcagtaattctaatactgtctgttataattaccattttggtacagctcaagtaccctaatttagttcttttggactaatacaattcaggaaagaaaaaacccaaaaaccaacctcattcacatatggcttttttttaaccaataacaattaggtgtacttctattttaaaacatttcagaaaaaaatatatgttatagcaatactcttac

SEQ ID NO: 477 - protein, 266 aa, Homo sapiens
MRVTLATIAWMVSFVSNYSHTANILPDIENEDFIKDCVRIHNKFRSEVKPTASDMLYMTWDPALAQIAKAWASNCQFSHNTRLKPPHKLHPNFTSLGENIWTGSVPIFSVSSAITNWYDEIQDYDFKTRICKKVCGHYTQVVWADSYKVGCAVQFCPKVSGFDALSNGAHFICNYGPGGNYPTWPYKRGATCSACPNNDKCLDNLCVNRQRDQVKRYYSVVYPGWPIYPRNRYTSLFLIVNSVILILSVIITILVQLKYPNLVLLD

SEQ ID NO: 478 - DNA, 459 bp, Homo sapiens
  misc_feature (4)..(4): n is a, c, g, or t
  misc_feature (65)..(65): n is a, c, g, or t
gcgnccgcagcctgaagccagggccccctccctcgtcaggaccggggcagcaagcaggccggggnaggtccgggcacccaccatgcgaggcgagctctggctcctggtgctggtgctcagggaggctgcccgggcgctgagcccaagcccggagcaggtcacgatgagggcccaggctctggatgggctgccaaagggaccgtgcggggctggaaccggagagcccgagagagccctgggcatgtgtcagagccggacaggacccagctgagccaaggacctgggtgggggcaccctggccattggacacgctgccaagataacaaggaccaagggtggtggaggacaaccacagctattatgtgtcccgtctctatggccccagcgagccccacagccgggaactgtgggtagattgttggccgaggcaaccggagccaagtgaagatccacacaata

SEQ ID NO: 479 - DNA, 523 bp, Homo sapiens
tttttttttttttttttgagatggagtcttgctctgtcgcccaggctggagtgcagtggcgcgatcttggctcactgcaagctccgcctcccaggttcacaccattctcctgccgcagcctcccaagtagctgggactacaggcgcctgccactgcgcccggctaatttttttttcgtatttttagtagagacggggtttcaccgcggtctcgatctcctgacctcgtgatccgctcgcctcggcctcccaaagtgctgggattacaggcgtgagccaccttgccggccttatcagataatttatttaaaagaaaagagagagagagagataaatgggtagattttcacaatgtatacaccaaaagaggacatcttttccgtgagtcagggaatatttaaagagatatcaaaagtccctattttcatgagttccacatcacatattttgtgctttctttgaatagccaaaaaattttcttggggaaaatacgagagtaaaaccagagctaaggagctataaga

SEQ ID NO: 480 - DNA, 604 bp, Homo sapiens
gaaaattgtttctcaaaagcaaataagtaataaatctggtatctgcctataactcacagttgataagaaagtggccatttctcactagcattatatatgatttgggctctgggtaatttggaagtgttaggtttgtgtctttgtagcagtatttttattagaaaagaatctattggccttttacagggtattaatccctttgtcacctaccattgatgccttaagttttctgagtctcaattaaaaatcttccttttcttgatgcatgacaagtgtaatcagtacttgctcatttatttgtctgtatttagtttatgctgtactatttaattatccttccagcgtttttttttctccttacaaatatgatactctttagtgttaagctaaggcattgattcatgtatctgtccttataatgaattaataaactattttccagaaatgtggaattctcttttggaaaaaaaaaaaaaaaaaaaaaaaaaaaaaaaaaaactcgagggggggcccggtacccaattcgccctatagtgagtcgtattacaattcactggccgtcgttttacaacgtcttgactgggaaaaccctggcgtttcccaa

SEQ ID NO: 481 - DNA, 587 bp, Homo sapiens
  misc_feature (483)..(483): n is a, c, g, or t
  misc_feature (515)..(515): n is a, c, g, or t
gaagccaaaaatgcatctggttctgcaaaagcagaaattaaagtgaaagtacaagatacaccaggaaaagtagttgggccaataagattcaccaatattactggggagaagatgactctgtggtgggatgccccactcaatgacggttgtgctcccataacccactacatcattgaaaaacgggaaaccagcagacttgcctgggcactaattgaggataaatgtgaagcccaaagttacactgccattaaactaataaacggcaatgaataccaattccgtgtttctgcagttaacaagtttggtgttggcaggccacttgattctgatccagtggttgctcaaatacaatatactgttcctgatgcccctggatttccagaacctagcaacataacagggcaacagcattaccctgacatggggcaagggcagaatcagatggtggcagtgaaattccacagtatatccaccacgatggtnccgagtagcatctctaaccaatagggctggtngattccagtacgttcggttattccataatcatccccttttcgatttccattccatccttgaaccaagttact

SEQ ID NO: 482 - DNA, 430 bp, Homo sapiens
  misc_feature (311)..(311): n is a, c, g, or t
aaagtcttttcttccattcaaagcattttccttctattctagtaccatttccctcacttgcagtaaaggttcacttaggctttctttttgctcctatgacaggcaagcataatcactcttaaataaggatctcctaagtaaagggaaattcaaccctttcctccgttgttctgcatgttccagtcagctttgtttttgaatataatacttcatgtgctcacattcagaagtaatttttatttaattttaattaattaatttttgagacagagtctcactctgtcgcccaggctggagtgcagtggcacgantcttgggctcatggcgacctacgcctcctggggttcaagcaattctccctttcctcaagcctcctaagtagctggaactacaggtgcatgccaccacacctggctaattttttattttt

SEQ ID NO: 483 - DNA, 468 bp, Homo sapiens
  misc_feature (429)..(429): n is a, c, g, or t
ttttttttttttacaaaagtacttttaatgcagttaaaaccaacgccacacacccttgcctaagcccctggctctggtgcctccatggagcagaagggaacccccgggccatggctgctgagctgggcaccctgcccatctctgcccacagagccagtcacctcctcacttcttcttggtcttcaccagtcctttctgcacaaggctgcggtacagttcctggatgtatgtgtagacgcacttggagtcgggcacagccaaccgcaccatgtcatccacgtccagcagctgagcacagtcagccagtttctctgctgtggagaaggccagggtgaagttgtgccggcgctttgcgggatccagctctgcgtagtcaaaggcgtcagggaagaacttgtggatgagggcacagaaggccataccactgcntcagctggaggagaagttctggatgtccacatgctcgta

SEQ ID NO: 484 - DNA, 506 bp, Homo sapiens
tgaatgatgagaggaaagggatggggtggtatgttttgttttgggtccagggtgagaaaggcaaggttacaagaatgagtggcttgcaccactgactagtgatgacagattacttctatgccccttgactagtaaacattccaagggacatcgcgatggggtgaggttgctgctatcaagaccagtcacattttgaaaattaacacttgcttccttacaagctgccttccagaggtcaacagcttttcacaagtgaggcacccagttgctgacccttgatttctggaatgtagggggtcaggaatccttggtggcccccagagaaggttggggcacagtgtaacctatataaggaaggatcatactcactctttacatcaattagcaaaattttgaggaaaaagaatctcacttttaaaatgtaaatagctcttcattacccctccagacttaatcctaccagtaactcacaccttagtgtgaaattaataaacagcagctttgga

SEQ ID NO: 485 - DNA, 466 bp, Homo sapiens
gggacgccctggctgaggaggccacggggggcctactttgcagcccctcattgacccgactgtctttccttcctcagatcctgatctccgggagggacagatggccaatctctccccttccaaagcaggccctgctccccgggcagcctcccgccgaggggcccagcccccaacccacaggcagggaggggcatccctccctgccggcctcagggagcgaacgtggatgaaaaccacagggattccggacgccagaccccattttatacttcacttttctctacagtgttgttttgttgttgttggtttttattttttatactttggccataccacagagctagattgcccaggtctgggctgaataaaacaaggtttttctactctgtggctctgcatgcggcctgctggctggctggcagaccagctagtttgggcctgggggatgtccttaggcatcatcctt

SEQ ID NO: 486 - protein, 574 aa, Homo sapiens
MALARGSRQLGALVWGACLCVLVHGQQAQPGQGSDPARWRQLIQWENNGQVYSLLNSGSEYVPAGPQRSESSSRVLLAGAPQAQQRRSHGSPRRRQAPSLPLPGRVGSDTVRGQARHPFGFGQVPDNWREVAVGDSTGMALARTSVSQQRHGGSASSVSASAFASTYRQQPSYPQQFPYPQAPFVSQYENYDPASRTYDQGFVYYRPAGGGVGAGAAAVASAGVIYPYQPRARYEEYGGGEELPEYPPQGFYPAPERPYVPPPPPPPDGLDRRYSHSLYSEGTPGFEQAYPDPGPEAAQAHGGDPRLGWYPPYANPPPEAYGPPRALEPPYLPVRSSDTPPPGGERNGAQQGRLSVGSVYRPNQNGRGLPDLVPDPNYVQASTYVQRAHLYSLRCAAEEKCLASTAYAPEATDYDVRVLLRFPQRVKNQGTADFLPNRPRHTWEWHSCHQHYHSMDEFSHYDLLDAATGKKVAEGHKASFCLEDSTCDFGNLKRYACTSHTQGLSPGCYDTYNADIDCQWIDITDVQPGNYILKVHVNPKYIVLESDFTNNVVRCNIHYTGRYVSATNCKIVQS

SEQ ID NO: 487 - DNA, 716 bp, Homo sapiens
gagcggcacagacgagatctcgatcgaaggcgagatggcggacgtgctagatcttcacgaggctgggggcgaagatttcgccatggatgaggatggggacgagagcattcacaaactgaaagaaaaagcgaagaaacggaagggtcgcggctttggctccgaggggtcccgagcgcggatgcgtgaggattatgacagcgtggagcaggatggcgatgaacccggaccacaacgctctgttgaaggctggattctctttgtaactggagtccatgaggaagccaccgaagaagacatacacgacaaattcgcagaatatggggaaattaaaaacattcatctcaacctcgacaggcgaacaggatatctgaaggggtatactctagttgaatatgaaacatacaaggaagcccaggctgctatggagggactcaatggccaggatttgatgggacagcccatcagcgttgactggtgttttgttcggggtccaccaaaaggcaagaggagaggtggccgaagacgcagcagaagtccagaccggagacgtcgctgacaggtcctctgttgtccaggtgttctcttcaagattccatttgaccatgcagccttggacaaataggactggggtggaacttgctgtgtttatatttaatctcttaccgtatatgcgtagtatttgagttgcgaataaatgttccatttttgttttctac

SEQ ID NO: 488 - protein, 173 aa, Homo sapiens
MADVLDLHEAGGEDFAMDEDGDESIHKLKEKAKKRKGRGFGSEGSRARMREDYDSVEQDGDEPGPQRSVEGWILFVTGVHEEATEEDIHDKFAEYGEIKNIHLNLDRRTGYLKGYTLVEYETYKEAQAAMEGLNGQDLMGQPISVDWCFVRGPPKGKRRGGRRRSRSPDRRRR

SEQ ID NO: 489 - DNA, 6322 bp, Homo sapiens
atgcaggccttcccacaagggcccggcagcatgacaaggtgaaggcagagtatgtgcatctcaaccacccgctcaccctcgtgaccagagagcgcgatttggccgtgaaggagaaacaccagctccaagccaagctggagaacctagaacaggtcctgaagcatatgcgagaggcggctgaacggcggcagcagctgcagttggagcatgaccaggccctggctgttctcagtgccaagcagcaggaaattgaccttctgcagaagtccaaggttcgagagctggaagagaaatgccggactcaaagtgagcagttcaacctgctgtcccgggacctggagaagttccggcagcacgctggcaagattgacctgctgggtggcagcgcggtggcccccctggacatctccacggcccccagcaagcctttcccacagttcatgaatggcctagccacctccctcggcaaaggtcaggagagcgctattggaggcagctctgcgatcggtgaatatatccggccccttccgcagcctggtgacaggccggagcctctgtccgccaagcccaccttcctgtcgagatccggtagcgcaagatgcagatctgagtcagacatggagaatgaacggaattccaatacctccaagcagagatactcggggaaggtccacctctgtgttgcccgctatagttacaaccccttcgatggaccgaacgagaaccccgaagctgagctgcccctcacggcgggaaaatacctctacgtctatggagacatggatgaggatgggttctatgaaggagagctcctcgatggccagaggggtctggtgccctccaacttcgtggactttgtgcaggacaacgagtcgcggttggcaagcacgctggggaacgagcaggatcagaacttcatcaaccattccggcatcggcctggagggagagcacatcctggacctccactccccaacccacatagatgcgggcatcaccgacaacagtgccgggaccctggacgtgaacatcgacgacatcggagaagacatcgtgccttaccctagaaaaatcaccctcatcaaacaactcgccaaaagtgttattgtgggctgggagcccccggcggtgccaccaggatggggaacggtgagcagctacaacgtcctggtggacaaggagacacgcatgaacctcacgctggggagcagaactaaagccctcatcgagaagctcaacatggcagcctgcacctaccgcatctccgtgcagtgcgtcaccagcaggggcagctcggatgagctgcagtgcacgctgctggtgggcaaggacgtggtggtggccccctcccacctgcgggtggacaacatcacgcagatctccgcccagctctcctggctacccaccaacagcaactacagccacgtcatcttcctcaacgaggaggagttcgacatcgtcaaggccgccaggtacaagtaccagttcttcaatctcaggcccaacatggcctataaggtgaaggttctggccaaaccccaccagatgccgtggcagctcccgctggagcaaagggagaagaaggaggcctttgtggagttctccacgttgcctgcaggacccccagcacccccacaagatgttaccgtccaggctggggtgacccccgccaccatccgggtctcctggagaccacctgtgctgacgcccaccgggctgtccaatggcgcaaacgttaccggctacggcgtgtatgccaaagggcagagggtggctgaagtcatcttccccacggcagacagcacggccgtggagcttgtgcggctgcggagcctggaggccaagggcgtgaccgtgcggaccctctccgcccagggcgagtccgtggactctgcagttgctgccgttccccccgagctcctggtgcctcctaccccccacccgagacctgcaccccaatcaaagccattagcaagttctggagtccccgaaaccaaagacgagcacctgggtccccacgccaggatggatgaggcctgggagcagagccgtgcacctggccctgtgcatgggcacatgctggagccgcccgtgggccccggaaggcggtcgccctcacccagccgcatcctgccgcagccacagggcaccccggtgtccaccaccgtcgccaaggccatggcccgggaggccgcgcagagggtggccgagagcagcaggttagagaaaaggagcgtcttcctagagagaagcagcgcggggcagtacgccgcctcagacgaggaggacgcctatgactctccagacttcaagaggaggggcgcctcggtggacgacttcctgaaaggctctgaacttggcaagcagccgcactgttgccatggagacgagtaccacacagagagcagccgggggtctgacctctcagacatcatggaggaggacgaggaggagctgtattctgaaatgcagctggaagatgggggaaggaggcggcccagcggcacgtcccacaatgccctcaagattttagggaacccagcctctgcaggacgggtggatcacatgggccggaggtttccccgtggcagcgctggtcctcagaggtcccggcccgtgacagtcccatccatcgacgattacgggcgagaccgcctttctccagacttctatgaagagtcagaaactgaccctggtgccgaagagctcccggcccggatctttgtggctctctttgactacgacccgctcaccatgtccccaaacccagatgctgcagaggaggagcttccctttaaagaaggccagatcatcaaggtttatggtgataaagacgctgatggattctaccgtggggaaacctgtgcccggcttggccttattccttgtaacatggtctctgagatacaagcagatgatgaggagatgatggatcagcttcttagacagggctttctccctctgaatacacctgtggagaaaatagagagaagcaggagaagtggcaggcgtcattcggtatcgacgcggagaatggtggccctgtatgactacgaccccagagaaagctcgcccaacgtcgatgtcgaggccgaacttacattttgcacaggagatattattacagtttttggtgaaattgatgaagatggattttattatggggagctgaacgggcagaaaggccttgtgccctcaaacttcttggaagaagtgcctgatgacgtagaagtctatctttctgatgctccatcccactactctcaagatacgccaatgcgctcaaaggcaaaaaggaagaagagtgttcatttcataccttaatcaggcaatgtagccttcacgtaagtgagcaactgaagataccgataaagataccaacttaagctaccttaaccgggccagtgtggtagacttaaggcttcattgtggggttaaaaaaaaaaaaagatacaaagaaatatgtctcaaaaaactattggacctaaataattagaatattacttggtctcagttgtaaagcaactgaatttatagtgaagcaaatcatctttaataatcatttcctactatttgcattaagaatatttgaaaggccaacattgggaacatatttcttaacaagctaactgtgtgtttacatagagagagctgcatattgcattgttagccactcttggaaaaagcacaacctaacaaacatgtttactataggaagctttactttagaaacttaacccaaggtcaagcagatgagtagtgaacacaggtgatcgagtgttggctctgaacactccaaacactggctcgagtggccagaacgtgttttccttaagtaaccctgcctctaccttacgagagagctatgctcctcctcaaagcacaatcatcctgtgacagaagttgctgcaacacgcgtttgttgttggtataccaatgcaatactaagttgatgaagcacgcagctcaaatgatcacattagatggaatagatggtatcttcaggtgtactttgggatgctttactaggtgttttccattagaattagaccttgattttaaatccaagcaagcttgaagccccttggcttacagcatttgcctgctgaatactaaacactcacatggcaagagttgctctggagaggtagggccagaggaatgctgctgcactgccaactcaggcacatgcttagctgtaaagggaagcgaggtgaagtcgtcctgcagcgtattagagtaaaagtctacccctctgaagcactattaagcgcttaacgtatatttaaatactaccatgtgctatctactgaggaagattcatgttcaattatttggaaataatgcaagcatccactaagggcctttaagctttctttgattataattaaggttcattttagttttttttttttctttcaaccagtgtgccatctccaatatttctatagtataccaaccaccccaggaatgcactttaacaatatcaggattttatataaccaaatagtttcaaatacaacaaaattccctttatgaactttcgctttttaagactactgatgggtactcggccaactttactatcaacctaatttcagatcatgtctcccctgcccttagtcttcatttatgaagtgaattattacctgccttagctttgccaaagcaacggccaccccgcactccctcgagacagagaaacggaacccacacatttatgtctggggcctctctctggcgtgctgtgggagaggacctttgcttctcatggcatacttcaacaactgaaagaacaaatgaacccccctgacctttcctggtgggaaacggggacagtacgatgttaccaagtgaattctgttgttggcgctcacacactcaataaactgtaacactgtacctactaggttcctcctgagggttcaggtacagcaaggagagctccatcccccacagtccatctccattcggggtcacctacgtcatctatgggttctggtagtcctgggagaggcagggaaatgtcctcgaaaaagaaaaaggggctgctttccaaaggcaagaaactgctgaaaaagctgggtgcagtgaaatgattcatgtgcttccggacaactgccaaatctatgtaattttctttaattccaaactagggctttcatgactcaagtacttcctaaaaaaacccaatcttctcccctgacaccagtagagaaatgcacttttgcactaccaaccactttaaaccaaccacgagaacaaagaggagcggttgctctctgtcaccgctggcagtctgctctcattgtccaagctctgatttgggaggtgggaggggacgtcttattaacaaacgggggcgcatagctatcacctgtagctccctccctacctgtaattccagtctttgtgcatttgtcatctgcccttaaaggaatgattttcaacctttctcccttctcaaaatgcttgcctcataatgcataactttcactttgactctggtcttgaaattcctagtttaattcgccttgatgttctgccttataaatgcacaatgatttgtactgtctaataaaaacagtgtatactttgtatgtgtcgtgcattcagtggtcttcatcctgacacagtggttcgagatcaagttgtacaggctgtgcattttaagatactagtttcagtctttcaaagccagccaggctacacacagaaaatgtttactcaatcattcaaaaaagagaaaaggagagaaagtaactttgtttggtaaagcaccagtactccaaccttccagaaagccgattatcttcattgcttttaatgttctattctgtggcatatggttttctgttactttcgttgtcaaaatgccatacccaaatacacagcaatgaatggcacacaagtaatccacataatgcataagccacaccaaaaccagactcaatttaaatctgctccaaatgagtccatacccatcttcatcattggcatttgaacaaaagacttacttacaaagttgctggcagatgtatttgatggttactcttttgtaattcttgtccacttgtaaattgtttttactctttatacatacttttcagactgcctttcttttgtaatttatggacggtttataaatgaatgacaaagctttccccattgtgtcttcaaaaacgctattataaattgtaatataatagtatgtggtagatttattattaaaggaaatccatgtgtggttaagctctgtgtgggtgtgtgcatgtgcacagttagtgtaaaatattttctagaaataaaatttgttattttat

SEQ ID NO: 490 - protein, 1106 aa, Homo sapiens
AGLPTRARQHDKVKAEYVHLNHPLTLVTRERDLAVKEKHQLQAKLENLEQVLKHMREAAERRQQLQLEHDQALAVLSAKQQEIDLLQKSKVRELEEKCRTQSEQFNLLSRDLEKFRQHAGKIDLLGGSAVAPLDISTAPSKPFPQFMNGLATSLGKGQESAIGGSSAIGEYIRPLPQPGDRPEPLSAKPTFLSRSGSARCRSESDMENERNSNTSKQRYSGKVHLCVARYSYNPFDGPNENPEAELPLTAGKYLYVYGDMDEDGFYEGELLDGQRGLVPSNFVDFVQDNESRLASTLGNEQDQNFINHSGIGLEGEHILDLHSPTHIDAGITDNSAGTLDVNIDDIGEDIVPYPRKITLIKQLAKSVIVGWEPPAVPPGWGTVSSYNVLVDKETRMNLTLGSRTKALIEKLNMAACTYRISVQCVTSRGSSDELQCTLLVGKDVVVAPSHLRVDNITQISAQLSWLPTNSNYSHVIFLNEEEFDIVKAARYKYQFFNLRPNMAYKVKVLAKPHQMPWQLPLEQREKKEAFVEFSTLPAGPPAPPQDVTVQAGVTPATIRVSWRPPVLTPTGLSNGANVTGYGVYAKGQRVAEVIFPTADSTAVELVRLRSLEAKGVTVRTLSAQGESVDSAVAAVPPELLVPPTPHPRPAPQSKPLASSGVPETKDEHLGPHARMDEAWEQSRAPGPVHGHMLEPPVGPGRRSPSPSRILPQPQGTPVSTTVAKAMAREAAQRVAESSRLEKRSVFLERSSAGQYAASDEEDAYDSPDFKRRGASVDDFLKGSELGKQPHCCHGDEYHTESSRGSDLSDIMEEDEEELYSEMQLEDGGRRRPSGTSHNALKILGNPASAGRVDHMGRRFPRGSAGPQRSRPVTVPSIDDYGRDRLSPDFYEESETDPGAEELPARIFVALFDYDPLTMSPNPDAAEEELPFKEGQIIKVYGDKDADGFYRGETCARLGLIPCNMVSEIQADDEEMMDQLLRQGFLPLNTPVEKIERSRRSGRRHSVSTRRMVALYDYDPRESSPNVDVEAELTFCTGDIITVFGEIDEDGFYYGELNGQKGLVPSNFLEEVPDDVEVYLSDAPSHYSQDTPMRSKAKRKKSVHFIP

SEQ ID NO: 491 - DNA, 440 bp, Homo sapiens
ccagcctcgcctcgggtgtagggattgcatagaaaagcaaaactacacagtcttgactgtgtagttttgtttttaggattagaggctcaccgattcatgtcggagatggtcagaaaaaccaactctccataggacgtcgtttcagaagcaaccttgggcttagtcccaccctttttaggcactcttgagaaatcagagtgcctagaaagatgacaactcaagcaccgacgtttacgcagcccgttacaaagccgttgtggtactggagggtagtaccgcaacctttgaggctcacattagtggttttccagttcctgaggtgagctggtttagggatggccaggtgatttccacttccactctgcccggcgtgcagatctcctttagcgatggccgcgctaaactgacgatccccgccgtgactaaagccaacagtggac

SEQ ID NO: 492 - DNA, 1694 bp, Homo sapiens
gcggccgcgccccgccgccaccatgagggccgagggcctcggcggcctggagcgcttctgcagcccgggcaaaggccgggggctgcgggctctgcagcccttccaggtgggggacttgctgttctcctgcccggcctatgcctacgtgctcacggtcaacgagcggggcaaccactgcgagtactgcttcaccaggaaagaaggattgtccaaatgtggaagatgcaagcaggcattttactgcaatgtggagtgtcagaaagaagattggcccatgcacaagctggaatgttctcccatggttgtttttggggaaaactggaatccctcggagactgtaagactaacagcaaggattctggccaaacagaaaatccacccagagagaacaccttcggaaaaattgttagctgtgaaggagtttgaatcacatctggataagttagacaatgagaagaaggatttgattcagagtgacatagctgctctccatcacttttactccaagcatctcgaattccctgacaatgatagcctcgtagtactctttgcacaggttaactgtaatggcttcacaattgaagatgaagaactttctcatttgggatcagcgatatttcctgatgttgcattgatgaatcatagctgttgccccaatgtcattgtgacctacaaagggaccctggcagaagtcagagctgtacaggaaatcaagccgggagaggaggtttttaccagctatattgatctcctgtacccaacggaagatagaaatgaccggttaagagattcttatttctttacctgtgagtgccaggagtgtaccaccaaggacaaggataaggccaaggtggaaatccggaagctcagcgatcccccaaaggcagaagccatccgagacatggtcagatatgcacgcaacgtcattgaagagttccggagggccaagcactataaatcccctagtgagctgctggagatctgcgagctcagccaggagaagatgagctctgtgtttgaggacagtaacgtgtacatgttgcacatgatgtaccaggccatgggtgtctgcttgtacatgcaggactgggaaggagccctgcaatatggacagaaaatcattaagccctacagtaagcactatcctttgtactccctcaacgtggcctccatgtggttgaagctagggagactctacatgggcctggaacacaaagccgcaggggagaaagccctgaagaaggccattgcaatcatggaagtagctcacggcaaagatcatccatatatttctgagatcaaacaggaaattgaaagccactgaaactatgcagcatttcagttttcatttaaacacttagttcagaaaccttaaaggatttgaatatttcaaattgcacacgtcactccagcatctctgtaaaataattggaatgaaaatacttcttgcacttaaacactgcacatgccgtactttgaggttagtctgaatcttgaactttaataccaaattaattttgaatgcttttgtttcctaagagataatggcatggtttcatatgttatactttggacagagttttaaaaatggaattattttttctttcatgcctcttgtaatgttctgaacaaacttgaatgatgaaagtattaaagagatatcagtaaaaaaaaaaaaaaaaaaaaaaaaaaaa

SEQ ID NO: 493 - protein, 433 aa, Homo sapiens
MRAEGLGGLERFCSPGKGRGLRALQPFQVGDLLFSCPAYAYVLTVNERGNHCEYCFTRKEGLSKCGRCKQAFYCNVECQKEDWPMHKLECSPMVVFGENWNPSETVRLTARILAKQKIHPERTPSEKLLAVKEFESHLDKLDNEKKDLIQSDIAALHHFYSKHLEFPDNDSLVVLFAQVNCNGFTIEDEELSHLGSAIFPDVALMNHSCCPNVIVTYKGTLAEVRAVQEIKPGEEVFTSYIDLLYPTEDRNDRLRDSYFFTCECQECTTKDKDKAKVEIRKLSDPPKAEAIRDMVRYARNVIEEFRRAKHYKSPSELLEICELSQEKMSSVFEDSNVYMLHMMYQAMGVCLYMQDWEGALQYGQKIIKPYSKHYPLYSLNVASMWLKLGRLYMGLEHKAAGEKALKKAIAIMEVAHGKDHPYISEIKQEIESH

SEQ ID NO: 494 - DNA, 1559 bp, Homo sapiens
gtcataaatgggagaccacacgtagagctcggtcaccaaggaatgcccaacatccctttacctctcacaatgagcagccacgctcaccgggaagcagtgtggggacttcagtggggtgtcccttagtggagaacacctttcatcatttttatagagacaattcccttgagaatgtaggcttttcatcttaggaacaattaggaagaatctccagctgggagtgttcttatgtatacagaaacaatgggtcgcattggttcatacttaggtgatattaggtttggctatattgatgtttggtgccacttaccttctagattttcccaaaagttgggtcattgctatgggaaattggggcctgcagatgggggagaaatgatcattattggtgcagggaaggggttcaggcagagctggagtctgaggctcagtgtgagaaagcactggcagttttctagtagagtcaggtcctgggctcctctcctcacccactgtgtcccgaactgaggccagctgtgatcggcaaattgcttatctctaggtagtttaaagaaaacgtaagagtttggggggtggtgggagaataactgtagaaagaccctaaactcttctctcccccagcaaattatcttgtataatgtttaaaaacccaaaggccagatctccccttttaacgtgaatcagaaggaggatggcaattggaccaagggcagagtggccacacttgaaacacattataaaatgggaatatatttcagggaaccccacccccacacttccactccacctcacacctgttggtcctgctttgtgggtgattgattgatacccaaggactgccccacctttaaattcctgcaatttatgctgcaaccaacatcttagtgtttgctctctccgggaagaggccaggtgggggagaacatacggtccagagcctgagatcgcctggctggggtgcaggcaagcaggaacccagtctagatagaatgcagtgttctctaaagctatggatggtttcagtgaaatgtctgtgtctgacaatcgtcacgcaagagtacttactgtcttcccttgtacatacattgtctgtgtttagcttttcctagtattgtgaggtttcaaataggggttccatgtaaatactctttctgctactgaaatgccggcccccttgagtatgcatcacccccacagatggttttgcctttctctatgctaacactttttgagccactgacgtgcagatcggtggttagtttcttgggcttttattttgcaatttatatatatacacatattatatatatatatatatttatgggttggttttgtatagttttctgtttgaatctctgagcaccaaagctgccctttgattttcacgagaactttccaaagccacttcctgagccctcctgctgctttggtgtctgacggtgatgctgcggtggcatctctgcccgtgaatttctgtatgtgtgtgctgttacctcacctgcagacatgaccctagtaaatctaacgtgcttggcttcccaaaaaaaaaaaaaaaaaaa

SEQ ID NO: 495 - DNA, 413 bp, Homo sapiens
gtccaggaatcgatttaatttttacagttgtttactttctcacatttttactaagtccagaatatcatcaaactcacaaaaccactggtcaaaaaaacccaaatggccactaattaggcaatacagcacctgcctcaaatttgggttcatatagatttttttcctccctttttgtggagaacatagtcttgctgtgttgcccaggctagtcttgaactcctggactcaagcaatcctcccgcctctgcctccctaaattctgggattacaggcgtgagctgctgtgcccagctcatccagattcttgctggttctctttctcagcctaaatgtcttgtttgcgtggagaaattatcaaatgaagcaggagtgccaaacaagcctcataggctcttcaccctacaacatctatg

SEQ ID NO: 496 - DNA, 375 bp, Homo sapiens
  misc_feature (4)..(4): n is a, c, g, or t
atanggttggacgaaggaacgaaggaacgaaggaacgaaggaacgaaggaagggctatacaaatgtaggagaattaagctatatgtgtgggggagtgtgctctgccattaattagacattaccttagaaaacctactctacctctctaacatgcctcagagggttggtgtgatgattaaatgggaacatgtaaagtagcacactcatttgccaatcgagaccttcacagaatctcaggaataaaagtgaccttcgagtgcatgtaatccaactcattccacccaaggagattctgaagttcaattcccagtgttcatacaagcctctaggtgtcacttccaagaatcatctttggagagtccttaaaactggttc

SEQ ID NO: 497 - DNA, 614 bp, Homo sapiens
aacgtttttaatcgtgttttattccattgccacagcctactctaccttttctaccaccccgcagtatctgcctctgggtccagggtcctttctgctccggcactgggggctctcaagaggtggggctgccacgtgggtggcctctccctggagctgagcccaccctgggggaccctggatcatgcccctttgcccccagcccttggtttgcagggaggccgcctggcgatgcccagcctgaaacagcacccctggcagggctgctcagtggcagctctcactttgtgctcaacaggaagcaatcagaaacacataccagaagccaaatctacgccaacaatttctcagacaacgaagaagcagagagcaaaatcaacatgatttggaaaaggaattttaaaccttagattaaaaaaagaaaacattttcacacagaagacttatctgctgtgagaaataaagagattagaacgcgtagaatataatgtttcagaccccagataatgataaaaatagatgtattctcgtgaaaaatctggactaaactattcaggcattcatggtattcaggattcatagcatgaagtgaaacaccaaagtatatatatattaaa

SEQ ID NO: 498 - DNA, 9940 bp, Homo sapiens
agtatttctctcgcgagaaaccgctgcgcggacgatacttgaagaggtggggaaaggagggggctgcgggagccgcggcagagactgtgggtgccacaagcggacaggagccacagctgggacagctgcgagcggagccgagcagtggctgtagcggccacgactgggagcagccgccgccgcctcctcgggagtcggagccgccgcttctccactggcaggggccgcctgaagtgggagcagcgcctggagaaggcgggaggagcccggcccgggggacgggcggcgggatagcgggaccccggcggcgcggtgcgcttcagggcgcagcggcggccgcagaccgagccccgggcgcggcaagaggcggcgggagccggtggcggctcggcatcatgcgtcgagggcgtctgctggagatcgccctgggatttaccgtgcttttagcgtcctacacgagccatggggcggacgccaatttggaggctgggaacgtgaaggaaaccagagccagtcgggccaagagaagaggcggtggaggacacgacgcgcttaaaggacccaatgtctgtggatcacgttataatgcttactgttgccctggatggaaaaccttacctggcggaaatcagtgtattgtccccatttgccggcattcctgtggggatggattttgttcgaggccaaatatgtgcacttgcccatctggtcagatagctccttcctgtggctccagatccatacaacactgcaatattcgctgtatgaatggaggtagctgcagtgacgatcactgtctatgccagaaaggatacatagggactcactgtggacaacctgtttgtgaaagtggctgtctcaatggaggaaggtgtgtggccccaaatcgatgtgcatgcacttacggatttactggaccccagtgtgaaagagattacaggacaggcccatgttttactgtgatcagcaaccagatgtgccagggacaactcagcgggattgtctgcacaaaaacgctctgctgtgccacagtcggccgagcctggggccacccctgtgagatgtgtcctgcccagcctcacccctgccgccgtggcttcattccaaatatccgcacgggagcttgtcaagatgtggatgaatgccaggccatccccgggctctgtcagggaggaaattgcattaatactgttgggtcttttgagtgcaaatgccctgctggacacaaacttaatgaagtgtcacaaaaatgtgaagatattgatgaatgcagcaccattcctggaatctgtgaagggggtgaatgtacaaacacagtcagcagttacttttgcaaatgtccccctggtttttacacctctccagatggtaccagatgcatagatgttcgcccaggatactgttacacagctctgacaaacgggcgctgctctaaccagctgccacagtccataaccaaaatgcagtgctgctgtgatgccggccgatgctggtctccaggggtcactgtcgcccctgagatgtgtcccatcagagcaaccgaggatttcaacaagctgtgctctgttcctatggtaattcctgggagaccagaatatcctcccccaccccttggccccattcctccagttctccctgttcctcctggctttcctcctggacctcaaattccggtccctcgaccaccagtggaatatctgtatccatctcgggagccaccaagggtgctgccagtaaacgttactgattactgccagttggtccgctatctctgtcaaaatggacgctgcattccaactcctgggagttaccggtgtgagtgcaacaaagggttccagctggacctccgtggggagtgtattgatgttgatgaatgtgagaaaaacccctgtgctggtggtgagtgtattaacaaccagggttcgtacacctgtcagtgccgagctggatatcagagcacactcacgcggacagaatgccgagacattgatgagtgtttacagaatggccggatctgcaataatggacgctgcatcaacacagatggcagttttcattgcgtgtgtaatgcgggctttcatgttacacgagatgggaagaactgtgaagatatggatgaatgcagcataaggaacatgtgccttaatggaatgtgtatcaatgaagatggcagttttaaatgtatttgcaaacctggattccagctggcatcagatggacgttattgcaaagacattaacgagtgtgaaacccctgggatctgcatgaacgggcgttgcgtcaacactgatggctcctacagatgtgaatgcttccctggactggctgtgggtctggatggccgtgtgtgtgttgacacacacatgcggagcacatgctatggtggatacaagagaggccagtgtatcaaacctttgtttggtgctgtcactaaatctgaatgctgttgcgccagcactgagtatgcatttggggaaccttgccagccgtgtcctgcacagaattcagcggaatatcaggcactctgcagcagtgggccaggaatgacgtcagcaggcagtgatataaatgaatgtgcactagatcctgatatttgcccaaatggaatctgtgaaaaccttcgtgggacctataaatgtatatgcaattcaggatatgaagtggattcaactgggaaaaactgcgttgatattaatgaatgtgtactgaacagtctcctttgtgacaatggacaatgtagaaatactcctggaagttttgtctgtacctgccccaagggatttatctacaaacctgatctaaaaacatgtgaagacattgatgaatgcgaatcaagtccttgcattaatggagtctgcaagaacagcccaggctcttttatttgtgaatgttcttctgaaagtactttggatccaacaaaaaccatctgcatagaaaccatcaagggcacttgctggcagactgtcattgatgggcgatgtgagatcaacatcaatggagccaccttaaagtcccagtgctgctcctccctcggtgctgcgtggggaagcccgtgcaccctatgccaagttgatcccatatgtggtaaagggtactcaagaattaaaggaacacaatgtgaagatatagatgaatgtgaagtgttcccaggagtgtgtaaaaatggcctgtgtgttaacactagggggtcattcaagtgtcagtgtcccagtggaatgactttggatgccacaggaaggatctgtcttgatatccgcctggaaacctgcttcctgaggtacgaggacgaggagtgcaccctgcctattgctggccgccaccgcatggacgcctgctgctgctccgtcggggcagcctggggtactgaggaatgcgaggagtgtcccatgagaaatactcctgagtacgaggagctgtgtccgagaggacccggatttgccacaaaagaaattacaaatggaaagcctttcttcaaagatatcaatgagtgcaagatgatacccagcctctgcacccacggcaagtgcagaaacaccattggcagctttaagtgcaggtgtgacagcggctttgctcttgattctgaagaaaggaactgcacagacattgacgaatgccgcatatctcctgacctctgtggcagaggccagtgtgtgaacacccctggggactttgaatgcaagtgtgacgaaggctatgaaagtggattcatgatgatgaagaactgcatggatattgatgagtgtcagagagatcctctcctatgccgaggtggtgtttgccataacacagagggaagttaccgctgtgaatgcccgcctggccatcagctgtcccccaacatctccgcgtgtatcgacatcaatgaatgtgagctgagtgcacacctgtgccccaatggccgttgcgtgaacctcatagggaagtatcagtgtgcctgcaaccctggctaccattcaactcccgataggctattttgtgttgacattgatgaatgcagcataatgaatggtggttgtgaaaccttctgcacaaactctgaaggcagctatgaatgtagctgtcagccgggatttgcactaatgcctgaccagagatcatgcaccgacatcgatgagtgtgaagataatcccaatatctgtgatggtggtcagtgcacaaatatccctggagagtacaggtgcttgtgttatgatggattcatggcatctgaagacatgaagacttgtgtagatgtcaatgagtgtgacctgaatccaaatatctgcctaagtgggacctgtgaaaacacgaaaggctcatttatctgccactgtgatatgggctactccggcaaaaaaggaaaaactggctgtacagacatcaatgaatgtgaaattggagcacacaactgtggcaaacatgctgtatgtaccaatacagcaggaagcttcaaatgtagctgcagtcccgggtggattggagatggcattaagtgcactgatctggacgaatgttccaatggaacccatatgtgcagccagcatgcagactgcaagaataccatgggatcttaccgctgtctgtgcaaggaaggatacacaggtgatggcttcacttgtacagaccttgatgagtgctctgagaacctgaatctctgtggcaatggccagtgcctcaatgcaccaggaggataccgctgtgaatgcgacatgggcttcgtgcccagtgctgacgggaaagcctgtgaagatattgatgagtgctcccttccgaacatctgtgtctttggaacttgccacaacctccctggcctgttccgctgtgagtgtgagataggctacgaactggacagaagcggcgggaactgcacagatgtgaatgaatgcctggatccaaccacgtgcatcagtgggaactgtgtcaacactccaggcagctatatctgtgactgcccacctgattttgaactgaacccaactcgagttggctgtgttgatacccgctctggaaattgctatttggatattcgacctcgaggagacaatggagatacagcctgcagcaatgaaattggagttggtgtttccaaagcttcctgctgctgttctctgggtaaagcctggggtactccttgtgagatgtgtcctgctgtgaacacatccgagtacaaaattctttgtcctggaggggaaggtttccgaccaaatcctatcaccgttatattggaagatattgatgagtgccaggagctaccagggctgtgccaaggaggaaaatgtatcaacacctttgggagtttccagtgccgctgtccaaccggctactacctgaatgaagatacacgagtgtgtgatgatgtgaatgaatgtgagactcctggaatctgtggtccagggacatgttacaacaccgttggcaactacacctgtatctgtcctccagactacatgcaagtgaatgggggaaataattgcatggatatgagaagaagtttgtgctacagaaactactatgctgacaaccagacctgtgatggagaattgttattcaacatgaccaagaagatgtgctgctgttcctacaacattggccgggcgtggaacaagccctgtgaacagtgtcccatcccaagtacagatgagtttgctacactctgtggaagtcaaaggccaggctttgtcatcgacatttataccggtttacccgttgatattgatgagtgccgggagatcccaggggtctgtgaaaatggagtgtgtatcaacatggttggcagcttccgatgtgaatgtccagtgggattcttctataatgacaagttgttggtttgtgaagatattgacgagtgtcagaacggcccagtgtgccagcgcaacgccgaatgcatcaacactgcaggcagctaccgctgtgactgtaagcccggctaccgcttcacctccacaggacagtgcaatgatcgtaatgaatgtcaagaaatccccaatatatgcagtcatgggcagtgcattgacacagttggaagcttttattgcctttgccacactggttttaaaacaaatgatgaccaaaccatgtgcttggacataaatgaatgtgaaagagatgcctgtgggaatggaacttgccggaacacaattggttccttcaactgccgctgcaatcatggtttcatcctttctcacaacaatgactgtatagatgttgatgaatgtgcaagtggaaatgggaatctttgcagaaatggccaatgcattaatacagtggggtctttccagtgccagtgcaatgaaggctatgaggtggctccagatgggaggacctgtgtggatatcaatgaatgtcttctagaacccagaaaatgtgcaccaggtacctgtcaaaacttggatgggtcctacagatgcatttgcccacctggatacagtcttcaaaatgagaagtgtgaagatattgatgagtgtgtcgaagagccagaaatttgtgccctgggcacatgcagtaacactgaaggcagcttcaaatgtctgtgtccagaagggttttccttgtcctccagtggaagaaggtgccaagatttgcgaatgagctactgttatgcgaagtttgaaggaggaaagtgttcatcacccaaatccagaaatcactccaagcaggaatgctgctgtgccttgaagggagaaggctggggagacccctgcgagctctgccccacggaacctgatgaggccttccgccagatatgtccttatggaagtgggatcatcgtgggacctgatgattcagcagttgatatggacgaatgcaaagaacccgatgtctgtaaacatggacagtgcatcaatacagatggttcctatcgctgcgagtgtccctttggttatactctagcagggaatgaatgtgtagatactgatgaatgttctgttggcaatccttgtggaaatggaacctgcaagaatgtgattggaggttttgaatgcacctgcgaggagggatttgagcccggtccaatgatgacatgtgaagatataaatgaatgtgcccagaatcctctgctctgtgccttccgatgtgtgaacacttatgggtcatatgaatgcaaatgtcccgtgggatatgtgctcagagaagaccgtaggatgtgcaaagatgaggatgagtgtgaagagggaaaacatgactgtactgaaaaacaaatggaatgcaagaacctcattggcacatatatgtgcatctgtggacccgggtatcagcggagacctgatggagaaggctgtgtagatgagaatgaatgtcagacgaagccagggatctgtgagaatgggcgctgcctcaacacccgtgggagctacacctgtgagtgtaatgatgggtttaccgccagccccaaccaggacgagtgccttgacaatcgggaagggtactgcttcacagaggtgctacaaaacatgtgtcagatcggctccagcaacaggaaccccgtcaccaaatcggaatgctgctgtgacggagggagaggctggggtccccactgtgagatctgccctttccaggggactgtggctttcaagaaactctgtccccatggccgaggattcatgaccaatggagcagatatcgatgaatgcaaggttattcacgatgtttgccgaaatggggaatgtgtcaatgacagaggatcatatcattgcatttgtaaaactgggtacactccagatataactgggacttcctgtgtagatctgaacgagtgcaaccaggctcccaaaccctgcaattttatctgcaaaaacacagaagggagttaccagtgttcatgcccgaaaggctacattctgcaagaggatggaaggagctgcaaagatcttgatgagtgtgcaaccaagcaacacaactgccagttcctatgtgttaacaccattggcggcttcacatgcaaatgtcctcccggatttacccaacaccatacgtcctgcattgataacaatgaatgcacctctgacatcaatctgtgcgggtctaagggcatttgccagaacactcctggaagcttcacctgtgaatgccagcggggattctcacttgatcagaccggctccagctgtgaagacgtggacgagtgtgagggtaaccaccgctgccagcatggctgccagaacatcattgggggctacaggtgcagctgcccccagggctacctccagcactaccagtggaaccagtgtgttgatgaaaacgaatgcctcagcgctcacatctgcggaggagcctcctgtcacaacaccctggggagctacaagtgcatgtgtcccgccggcttccagtatgaacagttcagtggaggatgccaagacatcaatgaatgtggctctgcgcaggccccctgcagctatggctgttccaataccgagggcggttacctgtgtggctgtccacctggttacttccgcataggccaagggcactgtgtttctggaatgggcatgggccgaggaaacccagagccacctgtcagtggtgaaatggatgacaattcactctccccagaggcttgttacgagtgtaagatcaatggctaccccaaacggggcaggaaacggagaagcacaaacgaaactgatgcctccaatatcgaggatcagtctgagacagaagccaatgtgagtcttgcaagttgggatgttgagaagacagccatctttgctttcaatatttcccacgtcagtaacaaggttcgaatcctagaactccttccagctcttacaactctgacgaatcacaacagatacttgatcgaatctggaaatgaagatggcttctttaaaatcaaccaaaaggaagggatcagctacctccacttcacaaagaagaagccagtggctggaacctattcattacaaatcagtagtactccactttataaaaagaaagaacttaaccaactagaagacaaatatgacaaagactacctcagtggtgaactgggtgataatctgaagatgaaaatccaggttttgcttcattaattcaccatccagaaaccaaataattaaaagaaaaacaaatatagataggtagaactatattttcccccaatcagaatcatcatatcataggtacaatctttcaccaagtaaatttgtataaataagcactattctttgtattaccaaagcaaggtacaggtgactaccctagttcaaaacaaccactttctcaggcttctcatgtgtgtagctaagctaccttgtcatatgtgttgattcttgaaaactgggacgtgtatttccattgggggttggccatttatgctgacatgccatccttccagcaaacgtaygggaatgtgctttcaattgatggactactctattttttgcaaatttgtaaactttgcttctccaaatacaagtactaggttgtccatttatggtacctatttggtgctagtaaattttcaaactagatttataaatgcactgtaatatgtacacaacttagaaaccaaattacaagtattcagttccaatacttcattaatttcaatcaaccaaagttagttcagtagcttatctcagttatgagtataatacattacatgtaaattaagtgtgtgtatactgtaatcgtgctattttttatcattgaaacatttataaactagaataataatgcccttaatgtgagggtttgtaatggtgcttattaagaccaaagacttgttaaatgtatacaccaagtggtaatgaaatttckgtgactggcccacacgtgcatagaggtctgggaggaccaggaaacagcctcagtggccagaggatcaccagtgcatccttcatcacagcatgtgcaatatgccaagattaccctcggtcattcctgtcaacaaggggtcaatgtcataaatgtcacaataaaacaatctcttcttttttttagtttaaaaaaaaaaaaa

SEQ ID NO: 499 - protein, 3002 aa, Homo sapiens
YFSREKPLRGRYLKRWGKEGAAGAAAETVGATSGQEPQLGQLRAEPSSGCSGHDWEQPPPPPRESEPPLLHWQGPPEVGAAPGEGGRSPARGTGGGIAGPRRRGALQGAAAAADRAPGAARGGGSRWRLGIMRRGRLLEIALGFTVLLASYTSHGADANLEAGNVKETRASRAKRRGGGGHDALKGPNVCGSRYNAYCCPGWKTLPGGNQCIVPICRHSCGDGFCSRPNMCTCPSGQIAPSCGSRSIQHCNIRCMNGGSCSDDHCLCQKGYIGTHCGQPVCESGCLNGGRCVAPNRCACTYGFTGPQCERDYRTGPCFTVISNQMCQGQLSGIVCTKTLCCATVGRAWGHPCEMCPAQPHPCRRGFIPNIRTGACQDVDECQAIPGLCQGGNCINTVGSFECKCPAGHKLNEVSQKCEDIDECSTIPGICEGGECTNTVSSYFCKCPPGFYTSPDGTRCIDVRPGYCYTALTNGRCSNQLPQSITKMQCCCDAGRCWSPGVTVAPEMCPIRATEDFNKLCSVPMVIPGRPEYPPPPLGPIPPVLPVPPGFPPGPQIPVPRPPVEYLYPSREPPRVLPVNVTDYCQLVRYLCQNGRCIPTPGSYRCECNKGFQLDLRGECIDVDECEKNPCAGGECINNQGSYTCQCRAGYQSTLTRTECRDIDECLQNGRICNNGRCINTDGSFHCVCNAGFHVTRDGKNCEDMDECSIRNMCLNGMCINEDGSFKCICKPGFQLASDGRYCKDINECETPGICMNGRCVNTDGSYRCECFPGLAVGLDGRVCVDTHMRSTCYGGYKRGQCIKPLFGAVTKSECCCASTEYAFGEPCQPCPAQNSAEYQALCSSGPGMTSAGSDINECALDPDICPNGICENLRGTYKCICNSGYEVDSTGKNCVDINECVLNSLLCDNGQCRNTPGSFVCTCPKGFIYKPDLKTCEDIDECESSPCINGVCKNSPGSFICECSSESTLDPTKTICIETIKGTCWQTVIDGRCEININGATLKSQCCSSLGAAWGSPCTLCQVDPICGKGYSRIKGTQCEDIDECEVFPGVCKNGLCVNTRGSFKCQCPSGMTLDATGRICLDIRLETCFLRYEDEECTLPIAGRHRMDACCCSVGAAWGTEECEECPMRNTPEYEELCPRGPGFATKEITNGKPFFKDINECKMIPSLCTHGKCRNTIGSFKCRCDSGFALDSEERNCTDIDECRISPDLCGRGQCVNTPGDFECKCDEGYESGFMMMKNCMDIDECQRDPLLCRGGVCHNTEGSYRCECPPGHQLSPNISACIDINECELSAHLCPNGRCVNLIGKYQCACNPGYHSTPDRLFCVDIDECSIMNGGCETFCTNSEGSYECSCQPGFALMPDQRSCTDIDECEDNPNICDGGQCTNIPGEYRCLCYDGFMASEDMKTCVDVNECDLNPNICLSGTCENTKGSFICHCDMGYSGKKGKTGCTDINECEIGAHNCGKHAVCTNTAGSFKCSCSPGWIGDGIKCTDLDECSNGTHMCSQHADCKNTMGSYRCLCKEGYTGDGFTCTDLDECSENLNLCGNGQCLNAPGGYRCECDMGFVPSADGKACEDIDECSLPNICVFGTCHNLPGLFRCECEIGYELDRSGGNCTDVNECLDPTTCISGNCVNTPGSYICDCPPDFELNPTRVGCVDTRSGNCYLDIRPRGDNGDTACSNEIGVGVSKASCCCSLGKAWGTPCEMCPAVNTSEYKILCPGGEGFRPNPITVILEDIDECQELPGLCQGGKCINTFGSFQCRCPTGYYLNEDTRVCDDVNECETPGICGPGTCYNTVGNYTCICPPDYMQVNGGNNCMDMRRSLCYRNYYADNQTCDGELLFNMTKKMCCCSYNIGRAWNKPCEQCPIPSTDEFATLCGSQRPGFVIDIYTGLPVDIDECREIPGVCENGVCINMVGSFRCECPVGFFYNDKLLVCEDIDECQNGPVCQRNAECINTAGSYRCDCKPGYRFTSTGQCNDRNECQEIPNICSHGQCIDTVGSFYCLCHTGFKTNDDQTMCLDINECERDACGNGTCRNTIGSFNCRCNHGFILSHNNDCIDVDECASGNGNLCRNGQCINTVGSFQCQCNEGYEVAPDGRTCVDINECLLEPRKCAPGTCQNLDGSYRCICPPGYSLQNEKCEDIDECVEEPEICALGTCSNTEGSFKCLCPEGFSLSSSGRRCQDLRMSYCYAKFEGGKCSSPKSRNHSKQECCCALKGEGWGDPCELCPTEPDEAFRQICPYGSGIIVGPDDSAVDMDECKEPDVCKHGQCINTDGSYRCECPFGYTLAGNECVDTDECSVGNPCGNGTCKNVIGGFECTCEEGFEPGPMMTCEDINECAQNPLLCAFRCVNTYGSYECKCPVGYVLREDRRMCKDEDECEEGKHDCTEKQMECKNLIGTYMCICGPGYQRRPDGEGCVDENECQTKPGICENGRCLNTRGSYTCECNDGFTASPNQDECLDNREGYCFTEVLQNMCQIGSSNRNPVTKSECCCDGGRGWGPHCEICPFQGTVAFKKLCPHGRGFMTNGADIDECKVIHDVCRNGECVNDRGSYHCICKTGYTPDITGTSCVDLNECNQAPKPCNFICKNTEGSYQCSCPKGYILQEDGRSCKDLDECATKQHNCQFLCVNTIGGFTCKCPPGFTQHHTSCIDNNECTSDINLCGSKGICQNTPGSFTCECQRGFSLDQTGSSCEDVDECEGNHRCQHGCQNIIGGYRCSCPQGYLQHYQWNQCVDENECLSAHICGGASCHNTLGSYKCMCPAGFQYEQFSGGCQDINECGSAQAPCSYGCSNTEGGYLCGCPPGYFRIGQGHCVSGMGMGRGNPEPPVSGEMDDNSLSPEACYECKINGYPKRGRKRRSTNETDASNIEDQSETEANVSLASWDVEKTAIFAFNISHVSNKVRILELLPALTTLTNHNRYLIESGNEDGFFKINQKEGISYLHFTKKKPVAGTYSLQISSTPLYKKKELNQLEDKYDKDYLSGELGDNLKMKIQVLLH

SEQ ID NO: 500 - DNA, 366 bp, Homo sapiens
  misc_feature (23)..(23): n is a, c, g, or t
  misc_feature (337)..(337): n is a, c, g, or t
ataaggtgtcaccacagcctttncttaaaagcaccattccacctctgagaataagctgatattttacttaaggccaaatccttgagaataaaaaagggggaggtttaagtcacttgttgcaatgccctttttaatagaggcaataaatctaaaggccataaatttagagtgacttacagaagatcgaactttggagtgtggcagagtaagggatggaaaccgggccctccagttcactatcagtagcttttgcactggtctgcccttcctaaattaagtatgcacttcaatttgatgagtggaaacagtctatctgggcagtaaccagggagctttngtgcctagtagattgcttctgttctgcac

SEQ ID NO: 501 - DNA, 2870 bp, Homo sapiens
cattggactgggtttccttccaccgaagagtgaacttctgcctctttcgagcaccttccgaggcgtagtcctttggatgttggggagcgtcagactgggtcgttgtagaggggaaaggagggcccagaagggcgagagagcaggccgggacgcaaatcctcagcccccgcggcgcgccacgtcttcagaaacgccaggacctccgggctgggccgccgcggtttggcctttggaactcaagggttcgtctacctgaccattgggtggctccgcggttgacacttttcttggcatgcccccccaccccgcgccacaccacccccccagccccagcaatccaaatcggccccacggacctagagggctcttgggcgagatgagacatcacccactgtgtagaagctgttgccattgctgctgtcacagccactccggatggggctgccaccgtggccaggacagtctcctccgaccgcttcctgggctgcgctagggttcgggggcgctgcccgcacgctccggcggggaaggaaatcgccccgcgcccgccggaggaaggcgacggggagggaagggggagggcggctaggaggcgggtggaggggccggccgcccgggccaggtcgtttttgaatggtttgggaggacgaattgttagaccccgaggaagggaggtgggacgggggagggggactggaaagcggaaactttcctataaaacttcgaaaagtccctcctcctcacgtcaggccaatgacactgctgcccccaaactttccgcctgcacggaggtataagagcctccaagtctgcagctctcgcccaactcccagacacctcgcgggctctgcagcaccggcaccgtttccaggaggcctggcggggtgtgcgtccagccgttgggcgctttctttttgggacctcggggccatccacaccgtcccctccccctcccgcctccctccccgcctcccccgcgcgccctccccgcggaggtccctcccgtccgtcctcctgctctctcctccgcgggccgcatcgcccgggccggcgccgcgccggggggaagctggcgggctgaggcgccccgctcttctcctctgccccgggcccgcgaggccacgcgtcgccgctcgagagatgatgcaggacgtgtccagctcgccagtctcgccggccgacgacagcctgagcaacagcgaggaagagccagaccggcagcagccgccgagcggcaagcgcgggggacgcaagcggcgcacgagcaggcgcacggcgggcggcggcgcggggcccggcggagcgggtgggggcgtcggaggcggcgacgagccgggcagcccggcccagggcaagcgcggcaagaagtctgcgggctgtggcggcggcggcggcgcgggcggcggcggcggcagcagcagcggcggcgggagtccgcagtcttacgaggagctgcagacgcagcgggtcatggccaacgtgcgggagcgccagcgcacccagtcgctgaacgaggcgttcgccgcgctgcggaagatcatccccacgctgccctcggacaagctgagcaagattcagaccctcaagctggcggccaggtacatcgacttcctctaccaggtcctccagagcgacgagctggactccaagatggcaagctgcagctatgtggctcacgagcggctcagctacgccttctcggtctggaggatggagggggcctggtccatgtccgcgtcccactagcaggcggagccccccaccccctcagcagggccggagacctaggtaaggaccgcgccgctgcaccccttcgcctctcaggtggcagacggcaggccggccaggccgcggttcccagtccacctcgatttcctcccctctcccactctccgctcagccttcccacctcacttggcaccgttgcctcgcgccccagcgtcccggaaggccggtctgaccccgctagggagagcagtctccagggggatgcgccctggtgaggggtgtgtgtgcgcgtgagtgtgcgtgacaggaggggagacagagacacccagggtcacgggtaaggaccgttttgtcagcgccaccctttctttcggctttcaatttttgttctccttaaaacaaatgttttaaaacaaattccacctcctcctcctttccacccacccacttcctcttgcccttgggctgaaatccttccaggttgttcagcttaatttctcagtggtggtgataagaacagtgctcactagtcttagaaaacagccgcagagacctaaacaataaccgactccccccccccctctgggtttttgcagatgtcattgtttccagagaaggagaaaatggacagtctagagactctggagctggataactaaaaataaaaatatatgccaaagattttcttggaaattagaagagcaaaatccaaattcaaagaaacagggcgtggggcgcacttttaaaagagaaagcgagacaggcccgtggacagtgattcccagacgggcagcggcaccatcctcacacctctgcattctgatagaagtctgaacagttgtttgtgttttttttttttttttttgacgaagaatgttttatttttatttttttcatgcatgcattctcaagaggtcgtgccaatcagccactgaaaggaaaggcatcactatggactttctctattttaaaatggtaacaatcagaggaactataagaacacctttagaaataaaaatactgggatcaaactggcctgcaaaaccatagtcagttaattctttttttcatccttcctctgaggggaaaaacaaaaaaaaacttaaaatacaaaaaacaacattctatttatttattgagga

SEQ ID NO: 502 - protein, 201 aa, Homo sapiens [sequence omitted]

SEQ ID NO: 503 - DNA, 577 bp, Homo sapiens
ggccggaaggtagctgtactgtttgatgatgatatgatcatatacctaggaacctaaagactcctcaaaaagctctagaactgataaatgaattcagcaaagtttcgggggacaaaattaatgtacacaaatcagtagctctgttataccccagaagcgaccaagcttagaatcaaaccaagaactcaaccccttttctgatagctgcaaaactaaactaaactaaaataaaatacttgggaatagacctaaccaaggaggtgaaagatgtctacaaggaaaacaactttagtatttttaatgggttaaaatgaggggcagcaggtacagcagaagaagtcagtgcgtgggcatccgcatccaatgggtactgcacctttgatggtaaggctttggttttgacttactaaattactaggtacgattattttctagtttttgtcattaaaccttaaaacaactaagtaaccccttccatttcttgttaaatattgtgaaatttcatactctcatttatgctgcctgacgttagagtgtgtgtttctattttgtgactaccttaaataatacctataaa

SEQ ID NO: 504 - DNA, 455 bp, Homo sapiens
  misc_feature (324)..(324): n is a, c, g, or t
  misc_feature (336)..(336): n is a, c, g, or t
  misc_feature (409)..(409): n is a, c, g, or t
  misc_feature (426)..(426): n is a, c, g, or t
  misc_feature (431)..(431): n is a, c, g, or t
  misc_feature (448)..(448): n is a, c, g, or t
aattgtctagtcaggagcccccctccacacttctgtgacgggctggggcttccaggtactgctgctacaaggtaatgtatagatataatttcttctgtctcttacaaaataaactgaccatgaaatatcattgtcccttcactttcttgtttcagctggcaaaggatgtaaagattccagatggatttacatctaagtcagaaatattcattacctatgagccactttaaatattttctgtcctttctaaatgattacctaacatttcggatctccctttttgacatgtgcccaggttccattctttatttaacactttatccntttaaaggctcnggttatccatttacaatctctcttactggggtacttggggggcaccatgtaggattcaggggtcacttttggnccattttttacccaggnttaancgccacaaagtggcaanggggggg

SEQ ID NO: 505 - DNA, 378 bp, Homo sapiens
  misc_feature (242)..(242): n is a, c, g, or t
  misc_feature (291)..(291): n is a, c, g, or t
  misc_feature (341)..(341): n is a, c, g, or t
  misc_feature (348)..(348): n is a, c, g, or t
  misc_feature (375)..(375): n is a, c, g, or t
agttgaataggttaatatttaatacgctacatctagacttactaaataatttatgccatgagatgaatacataattttacagtgtcacatctaaagttcctttctttagagtgcagcatagtaaaacttaaaaataaatatcttaaatagcattactattaaggcacagtataaaccacattatcattaacctttgaagaattgtaatctcagtaaccttgttgtctcatgtactgtagtcncctaataaataggttttaaaatatgactctgaaaatagggcaaactttngcctggcctttaattccataaggcccacggagtcggacaccattaaattnggaaggngaagggctgttggtgggtaaaaggccngga

SEQ ID NO: 506 - DNA, 1863 bp, Homo sapiens
gggggccaaagggaagtgctgcgaggtttacaaccagctgcagtggttcgatgggaaggatctttctccaagtggttcctcttgaggggagcatttctgctggctccaggactttggccatctataaagcttggcaatgagaaataagaaaattctcaaggaggacgagctcttgagtgagacccaacaagctgcttttcaccaaattgcaatggagcctttcgaaatcaatgttccaaagcccaagaggagaaatggggtgaacttctccctagctgtggtggtcatctacctgatcctgctcaccgctggcgctgggctgctggtggtccaagttctgaatctgcaggcgcggctccgggtcctggagatgtatttcctcaatgacactctggcggctgaggacagcccgtccttctccttgctgcagtcagcacaccctggagaacacctggctcagggtgcatcgaggctgcaagtcctgcaggcccaactcacctgggtccgcgtcagccatgagcacttgctgcagcgggtagacaacttcactcagaacccagggatgttcagaatcaaaggtgaacaaggcgccccaggtcttcaaggccacaagggggccatgggcatgcctggtgcccctggcccgccgggaccacctgctgagaagggagccaagggggctatgggacgagatggagcaacaggcccctcgggaccccaaggcccaccgggagtcaagggagaggcgggcctccaaggaccccagggtgctccagggaagcaaggagccactggcaccccaggaccccaaggagagaagggcagcaaaggcgatgggggtctcattggcccaaaaggggaaactggaactaagggagagaaaggagacctgggtctcccaggaagcaaaggggacaggggcatgaaaggagatgcaggggtcatggggcctcctggagcccaggggagtaaaggtgacttcgggaggccaggcccaccaggtttggctggttttcctggagctaaaggagatcaaggacaacctggactgcagggtgttccgggccctcctggtgcagtgggacacccaggtgccaagggtgagcctggcagtgctggctcccctgggcgagcaggacttccagggagccccgggagtccaggagccacaggcctgaaaggaagcaaaggggacacaggacttcaaggacagcaaggaagaaaaggagaatcaggagttccaggccctgcaggtgtgaagggagaacaggggagcccagggctggcaggtcccaagggagcccctggacaagctggccagaagggagaccagggagtgaaaggatcttctggggagcaaggagtaaagggagaaaaaggtgaaagaggtgaaaactcagtgtccgtcaggattgtcggcagtagtaaccgaggccgggctgaagtttactacagtggtacctgggggacaatttgcgatgacgagtggcaaaattctgatgccattgtcttctgccgcatgctgggttactccaaaggaagggccctgtacaaagtgggagctggcactgggcagatctggctggataatgttcagtgtcggggcacggagagtaccctgtggagctgcaccaagaatagctggggccatcatgactgcagccacgaggaggacgcaggcgtggagtgcagcgtctgacccggaaaccctttcacttctctgctcccgaggtgtcctcgggctcatatgtgggaaggcagaggatctctgaggagttccctggggacaactgagcagcctctggagaggggccattaataaagctcaacatcaaaaaaaaaaaagaaaaaaaaaaaaaaaaa

SEQ ID NO: 507 - protein, 520 aa, Homo sapiens
MRNKKILKEDELLSETQQAAFHQIAMEPFEINVPKPKRRNGVNFSLAVVVIYLILLTAGAGLLVVQVLNLQARLRVLEMYFLNDTLAAEDSPSFSLLQSAHPGEHLAQGASRLQVLQAQLTWVRVSHEHLLQRVDNFTQNPGMFRIKGEQGAPGLQGHKGAMGMPGAPGPPGPPAEKGAKGAMGRDGATGPSGPQGPPGVKGEAGLQGPQGAPGKQGATGTPGPQGEKGSKGDGGLIGPKGETGTKGEKGDLGLPGSKGDRGMKGDAGVMGPPGAQGSKGDFGRPGPPGLAGFPGAKGDQGQPGLQGVPGPPGAVGHPGAKGEPGSAGSPGRAGLPGSPGSPGATGLKGSKGDTGLQGQQGRKGESGVPGPAGVKGEQGSPGLAGPKGAPGQAGQKGDQGVKGSSGEQGVKGEKGERGENSVSVRIVGSSNRGRAEVYYSGTWGTICDDEWQNSDAIVFCRMLGYSKGRALYKVGAGTGQIWLDNVQCRGTESTLWSCTKNSWGHHDCSHEEDAGVECSV

SEQ ID NO: 508 - DNA, 297 bp, Homo sapiens
  misc_feature (234)..(234): n is a, c, g, or t
  misc_feature (290)..(290): n is a, c, g, or t
tacaaagctgctgatcctattgatcctccaggtccacctgctaagataagaatcgcagattcaaccaagtcatccatcacccttggctggagtaagcctgtctatgatgggggcagtgctgttactgggtatgttgtcgagataagacaaggagaggaagaggaatggactactgtctctaccaaaggagaggtcagaactacagaatatgtggtatccaacctgaaacctggngtcaattactacttccgggtatctgctgtaaactgtgcttgacaaaggggaacctntaggaaa

SEQ ID NO: 509 - DNA, 5354 bp, Homo sapiens
atgatccccaccttcacggctctgctctgcctcggtgagatttaaagagggggaggggagacccgagtcttggaggaaatttgcctcacagccaggccctggttctttaggagactcaaaaatctcagggtagccgggcgcggtggctcacgcctgtaatcccagcactttgggaggccgaggcgggcggatcacgaggtcaggagatcgagaccatcctggctaacacggtgaaaccctgtctctactaaaaatacaaaaaattagccgggggtggttgcaggcgcctgtggtcccagccactcgggaggctgaggcaggagaatggcgtgaacccgggaggcggagcttgcagtgagccaagatcgcaccaccgcactccagcctgggtgacagcgagactccgtctcaaaaaaaaaaaaaaaaaaaaaaaaaaaaaaatctcagggtaaaaaaaggacctgctcaggcttccggggcaaatccctcacagggaactctcttccagggctgagtctgggccccaggacccacatgcaggcaggtgattctgtccccagctgtcccaggtccctcctcctcactgggacaaggggccacccatgggcagctgggggaggagacagcagttctgggtgactgatgaggatgacgggggggtcctggggctgagagctgggatctgagggctgaggaaggtcttgggatccagcctctgattttcttccagggcccctccccaaacccaccctctgggctgagccaggctctgtgatcagctgggggaactctgtgaccatctggtgtcaggggaccctggaggctcgggagtaccgtctggataaagaggaaagcccagcaccctgggacagacagaacccactggagcccaagaacaaggccagattctccatcccatccatgacagaggactatgcagggagataccgctgttactatcgcagccctgtaggctggtcacagcccagtgaccccctggagctggtgatgacaggtgagaggacactcaggggtcccagccccaggctctgccctcaggaagggggtcagctctcaggggcatctccctctcacagcccagccctggggatgatgtgggaggtgggagccccatttaacacggtgcctccttctctcctaggagcctacagtaaacccaccctttcagccctgccgagtcctcttgtgacctcaggaaagagcgtgaccctgctgtgtcagtcacggagcccaatggacactttccttctgatcaaggagcgggcagcccatcccctactgcatctgagatcagagcacggagctcagcagcaccaggctgaattccccatgagtcctgtgacctcagtgcacggggggacctacaggtgcttcagctcacacggcttctcccactacctgctgtcacaccccagtgaccccctggagctcatagtctcaggtgaggctcctgaccctgtcctctctgagctcagtggctccgttcatgccctgctgccaggagagctctgggcagggatggagggagaggggctcagccagtgggggactcagccctcagaggggaggaggacaacaggggccctcccaggcatgcccatgctcttctccctcacctagggtccagaaggtgccaggtggacagagaaatggtccttgggaagctgcagggcagatatagggagaggttcaatttgatgtggagacccaagggcaaccccagactctcaccctcctcttgtccttctacccaggatccttggagggtcccaggccctcacccacaaggtccgtctcaacagctggtgagtctcagaggcctctgtccagagagtttccaaagcccgaggcctgtctcaagacatgctcagtggatctaagtcctcgttccaattctcagctgggcttgcttccacgggtgtgggagtcgggcagcgacttgggaggcaccacaggctcccaaggccctgaggctgggctggtgaggggtgagggggtcaaggctgaaggagatgttgcggggagaaaccgacctgatgcggggagcagggcagccccagccctcacatccctgttctaacccagcaggccctgaggaccagcccctcatgcctacagggtcagtcccccacagtggtgagtgaggggctctgagtgggaggtgggcagggtctaggggagccaagggtgggttctgtcctaggttcaggctcctctggaggtggtgatgtggacaggcccctcccctgcatgggcctcagtttctccaagtgtaaaggagagaggcctgtgggtgggaaagttcctttcagctctgactcccagctgtgccctcctgggagaggaggcctcccagggaacctcccagacccgattccgcaggggcctgtccggtcccacctgcagcagagacggtgacctggggcaggggaggggagcagggcggtggttcaagacagtcaggctctttccctgcaactctggggcttggctctggtgcaggaacaagggctgcagctcagactcccgggtttccttcccagctctgccgcttcctggctggaggggtctggggcaggcgattcccctctctgagcctcagtttgtgcatctgtgaaatgggtggagagagggtggcaatctcaggttgcacaactgctgtgagggttggaggtaatgaaagaaagacccagcacacacagtaggtgcacacacagtaggtgtgcacatcaatgacatcatccccattcctgatgtcatcacgcccaaggtctgagaaggcactgggaggtactgatcggggtcttggtggtctccatcctgcttctctccctcctcctcttcctcctcctccaacactggcgtcagggaaaacacaggacattgggtaagtaggaaattgggggacccgtgggctgatggagggtgggctcagggcaccagccaaagggactccagataggagaggtcatcttagaaactctgctccagaaattcccagtgagaaaatctagaaagaagaaaatgaatgagggagtaatggaagtgctttattctttcggtttttctaaacttagaaagtatttaaaacatccttgcaagtgtattttcaggtttcctttcctcttgacttgcatgtgcaaggcaggtggttctaacgttcccagagctgagactctgtccatcttcccccagcccagagacaggctgatttccaacgtcctccaggggctgccgagccagagcccaaggacgggggcctacagaggaggtaattctgcccaaagacctcagactcccacccatcccaacagccacctcactgtccccttacactcccgtatcctcccccaggtccagcccagctgctgacgtccagggagaaaacttctgtgagtgagaggcagagaaggtgcacctggggtggagctgggggtcccaaaatttcaatagcaatgggggcaggagcacaggctaggattggtcagggactcagggagaagtggtctgaacccacattgtgggacctcggggacatcgcagcccctccctgcgttgcagtggcactaatgggaacagggcagggaccagcaggaatgagaggtcccagggaaccttcccaggagatgaaccccttgctctactccagcaggtgctgccgtgaagaacacacagcctgaggacggggtggaaatggacactcgggtgagaacccgcccctgtccccagcaccaaaggcctcctggtgccagatctaatcctgcaggacttctctgtcctccttcccccggctctcagcatcgtcacggtggacccctccttgtccagcacgctgcctcctgcctgctgggacctcactctctcctgctgtcctgggacctcatgggcctcctcccgggtccccttcctgctcctcatcctctgtttggccatctggttgttagagagctccccaggcctcaggaggatgacgaataaatgaaccactccagtcccctgggctccccttcattcattcatctagtgagtgttcccagggagctcactgtggatggggctccccatgggagctgcagacacagcagggagcaaagccgcccccgcctcctgagctcacctcgtggtgggagacaaaatgcaaataaatgcatcgtgtccaggagtgcaacgtgctgtaaggaacataaaccaggtaaagggcagagagtgtggggcagtggggccagtctgaatggaaagggagggctgtctgctcagctgtcatctgagaagcctggacggagagggccacgtgatcctctaatggacgagcccctgcaggcagaggaaacagccgtgcaaaggccccgaggcagcagcgagctcttgcaggaaggccgcgtgaggctgcagccaaatgggcaaggtcagagtgaggagcagagaccagaaccacagggagggagcggccagaccctccacggccttagggcatccctgagattccgtcaggaaagggatgtaatcggatcaccctgggaacagtggggaaaattgactccagggagtcaggaggattcaaggacaccccccaccactgtctctctccagcagagcccacacgatgaagacccccaggcagtgacgtatgccgaggtgaaacactccagacctaggagagaaatggcctctcctccctccccactgtctggggaattcctggacacaaaggacagacaggcagaagaggacagacagatggacactgaggtgagtcctttcctctccaggcccccaggcctcccccacccccaccacgttccttccctctcactctcccccgctgcaggctgctgcatctgaagccccccaggatgtgacctacgcccagctgcacagctttaccctcagacagaaggcaactgagcctcctccatcccaggaaggggcctctccagctgagcccagtgtctatgccactctggccatccactaatccaggggggacccagaccccacaagccatggagactcaggaccccagaaggcatggaagctgcctccagtagacatcactgaaccccagccagcccagacccctgacacagaccactagaagattccgggaacgttgggagtcacctgattctgcaaagataaataatatccctgcattatcaaaataaagtagcagacctctcaattcacaatgagttaactgataaaacaaaacagaagtcagacaatgttttaaattgaatgatcatgtaaatattacacatcaaaccaatgacatgggaaaatgggagcttctatgcaggcaggacaaaaaatagagggggatccactagttc

SEQ ID NO: 510 - protein, 448 aa, Homo sapiens [sequence omitted]

SEQ ID NO: 511 - DNA, 658 bp, Homo sapiens
ggacgcacccgttggccaggtatgaagctgggagctgattgctgcacattactcagctgaattaaatgtgccctcacatctgtgtgtgtgcgtacatgcaaatgtacatgtgtatgagttagttggaggggtagacctttattttcctgtcctgtaactttcctttgcaaactaatctgtattcagaacagtgttgcagttaagaaccacccagcttgtccatgaaacaggttctctcaccccatctccccagttttagagaaggcaggaaagaaaaggcagtgcttttcttttttcctggccgtatgcggggcaggaagaagccagcagagcttgaaagagaaagtaaaccttctgggaaataaacggcttggcttccctattgtggaggggagtgcaaattattagggggatgtttgggtagtttttgtagaagccatttctgaaaactgatttggattagtgaaggtaagcccaatttaggaaaaccctgcccagtctggtgtcagccacctgtttcccgctttgtttgattgatttgattagtttgtggtattctgacctctcatttttattaccagagttggacgatttgagtctgaacttgagcacctgcttcggtgaaagcttcctaaattgctgttttttcacttttcct

SEQ ID NO: 512 - DNA, 447 bp, Homo sapiens
tgttttcataccaccactctgactttattacatttatttttaaggccattcccaaggaatcaaacattttaacagattcatttggatattaaaggattattttatataaaataagaagtgcaatatcagaatttaatattctatatgcctaaattaacagaaaaaaactttacagttattaagtggaaaattatttgagattatttggagttggtaatggcatagcattgaactggggaaaatgtgataaggtttctttcagttttagagtcgattatttttaaatgcactagatgattttctgagggccattcacattcaatgtttagattcattttattagtggcatatacaaagcaccatataatatatgaaacgtagaacaatcatgactatgtaattaactgtagaaataactgctaagaaaatatagcaatatttaacaca

SEQ ID NO: 513 - DNA, 530 bp, Homo sapiens
tcggggacggtagatggcccagccccaagtgttccgatcttcctgcccaaacatattctgtgacggaaagcctatgttgacctcgtccggcactcaaggcgtgggcagcggcctaacgtctgctgcgggaacacagtcgcgttgaatgctattctcaagacagacaaaacagtgggaagacactacgccaagctgctaactccctggccattgccggactctttcacccccatggactttccgctggcattttaaacaacatagtttcttttctctgtctctttctctttctctctctctttctctttctctctctctctctctctctctgtcaatctcataatttctctctctcgtgccacgttcccacccaacgctctctcgcccacttctactggggcccacttcctctcccgctctctctgtctcaacgtgattgactttcttgtgctgcccaggacttcttgcccacgtgcgccttcaaaacggtaagagctgcaactgaacgtgtgagacatggtgcagatagg

SEQ ID NO: 514 - DNA, 480 bp, Homo sapiens
aggaaagcaacacaggacacagcataccaggacacagctactaacaggaacagccatagccagcaaacaacgctgacactcacggatcacctgacgaagccaccgcctgacgcaacacacgcttacgtgacagccaaggatggccaaacaccaagtaaagcggcaaaccaaatacagggacgaaaccaatcagcaataaccagctgcgtgcagcactaggggtggttcgtgctggaatccaaagcaacgcaaccaaacggatcacccaatccaatgcaaacagccaagttccttccatccaaacctacaaagaactttcctcagcacaaagtcaggacggctctatgtcagaacctttcggagtcatcgcaaagcaaccaactagcgcctgactccaccagcacagaagatgcaccacactaagaaaacggaaatgacgcttgacaaatagcatctctaaacaaaataaaaaaacaatca

SEQ ID NO: 515 - DNA, 442 bp, Homo sapiens
cggcacgaggctctagagtgccaaaaaagaaaaaaaaaagtgctgaagagtcctagggagatgaggctatttttgtttgaagctgatacttctagctgagccacaagtgctgcttggaaagggcttaggttgtttccagggggagaactctgcagaggagaggcaaagttcaacaggacaacaaagaagcagcagaaacagccaggaaaacgaagagcccccaggttttgacacagaaccctccaccagagttctcaaatccccaaatactctgcaaagtgcaacttgacgggaacttttcaactgacttttacttttgacgaccaccatgactgagatcactgctgaaggaaatgcatctacaaccacaactgtgatagacagcaaaaatggatctgtgcccaaatcccccggaaaagtgctgaagaggacagtcacagag

SEQ ID NO: 516 - DNA, 377 bp, Homo sapiens
tttttttttttgatttatacaagaatgttcatagcagttttattcataataggaaaaactggaaacattcaaatatctatcaatacaagaatggatcaataaactgtgatacattcattccatggaacggctaaaggaacaaacttttgacacacaaaacaagatggatgaatctcaaaaacattttgagtgcaataggagccatacgcaaaagagtgtgagaaaaatgataaataataatggtttcaagaaatgcagagcagagagcccagaggcaaagacccacaggacagagggtcagtcccaggctgtggatcctaactaagaaactcctgctggattttgcccagctccatttccaaactattttgggttat

SEQ ID NO: 517 - DNA, 468 bp, Homo sapiens
taagttctgggatacaatggcagaacgtacaggtttgttacataggtatacgtgtgccatggtggtttgctgcatttatcaacccatcatctaggttttaagccctgcatgcattagctatttgtcctgatactctccctcccctcgcccccaaccttccaacaggccctggtgtgtgttgttcccttccctaaaatataataaatttttaaagcaaaacaaatcctactcatcatttagttacttaatgcctaggatgtgcaaaagcactttactaggggttgaggatatagtaaatgaataagaaatagatcctgccctcaagaaaatcacagtgggttgaagaaagatacataaaccaataataatagtactttacaatagacaaaaccatgagaatgaaagaaaggcctcttttaactagcggacagatggagaaggtttcaccaattaaaagtgaaatctgga

SEQ ID NO: 518 - DNA, 550 bp, Homo sapiens
cgagcaacaaaaaccaaatatttctgttatgacacacctatgggacaaaattcatttagttttctacatttttgtctttgaatgctgcattagttaaattagatgtgtttggtcccaaaatataatgtgggatatagaagataacaattatttcttaaaatgggcaaagtgagttttgtagacctgaaacttcgtaaagaaaatatttataactttcccaaagcctcaaaccttatatgacaaatgcattgtcacattttatttgaagtcttttcagtggtctgggttgtaaatcagagttaggaagggtgtgatagctcctatggttagggagtttagagccacaggaatttaagagatttgccatgctgaatgggccctgaacccacgacctgacccgtaggtaatttagtttcctaaaccattggatccatctttatcgataaaggagcatctgtttcggtctttcagatcatactattagctccaaaattttttaacttccaaaattaaatacatattagtcagagaaatggtccttacttaagtc

SEQ ID NO: 519 - DNA, 454 bp, Homo sapiens
gagacatggcccgggcagtggctcctggaagaggaacaagtgtgggaaaagggagaggaagccggagctaaatgacaggatgcaggcgacttgagacacaaaaagagaagcgttcctctcggatccaggcattgcctcgctgctttcttttctccaagacgggctgaggattgtacagctctaggcggagttggggctcttcggatcgcttagattctcctctttgctgcatttccccccacgtcctcgttctcccgcgtctgcctgcggacccggagaagggagaatggagagggggctgccgctcctctgcgccgtgctcgccctcgtcctcgccccggccggcgcttttcgcaacgataaatgtggcgatactataaaaattgaaagccccgggtaccttacatctcctggttatcctcattcttatcacccaagtgaaaaatgcgaatgg

SEQ ID NO: 520 - DNA, 466 bp, Homo sapiens
  misc_feature (405)..(405): n is a, c, g, or t
  misc_feature (426)..(426): n is a, c, g, or t
aagagtatcaaaggttcctaaggaaaagaaagcagtgcttttatttgacttgttccaaattaaacactccgccttgtgactcagcaatgctatctaccttcacactcctgagctccgccttcctttgttttgatacagtcattatatttgattagtattcccaggaatacccccacctagttactcaaatatttttcacttaactttttatactcttattttggtaataagcttacaatattaagaagctggggacttttttttaactgaagacttgagtcccctataccgggaatgcagctattaatagattcccatattttaaaaggaggggaaagggacaatttaataaaaatttctgtttgtgcatttctgacagggccattattatctggctttgacaangcctttctggaaacgcgtgtnacaatggatcttaatggtgttatggaaacgagcttgcggg

SEQ ID NO: 521 - DNA, 624 bp, Homo sapiens
ggcgggccgctcccacttcggcacgaggggcacgaggtaaatcttttctgcttactgaaaaggaagagtctgatgattagttactgatcctctttgcatttgtaaagctttggagatattgaatcatgttaccatttctgtttttttccaccctgttttcttccatatttactgaagctcagaagcagtattgggtctgcaactcatccgatgcaagtatttcatacacctactgtgataaaatgcaatacccaatttcaattaatgttaacccctgtatagaattgaaaggatccaaaggattattgcacattttctacattccaaggagagatttaaagcaattatatttcaatctctatataactgtcaacaccatgaatcttccaaagcgcaaagaagttatttgccgaggatctgatgacgattactctttttgcagagctctgaagggagagactgtgaatacaacaatatcattctccttcaagggaataaaattttctaagggaaaatacaaatgtgttgttgaagctatttctgggagcccagaagaaatgctcttttgcttggagtttgtcatcctacaccaacctaattcaaattagaataaattgagtattt

SEQ ID NO: 522 - protein, 160 aa, Homo sapiens
MLPFLFFSTLFSSIFTEAQKQYWVCNSSDASISYTYCDKMQYPISINVNPCIELKGSKGLLHIFYIPRRDLKQLYFNLYITVNTMNLPKRKEVICRGSDDDYSFCRALKGETVNTTISFSFKGIKFSKGKYKCVVEAISGSPEEMLFCLEFVILHQPNSN

SEQ ID NO: 523 - DNA, 723 bp, Homo sapiens
atgaatcggacgagggcggcgctagacttcgtagggttagcgaaattgaggtttctggtattgcgcgtttctcttccttgctgactctccgaatggccatggactcgtcgcttcaggcccgcctgtttcccggtctcgctatcaagatccaacgcagtaatggtttaattcacagtgccaatgtaaggactgtgaacttggagaaatcctgtgtttcagtggaatgggcagaaggaggtgccacaaagggcaaagagattgattttgatgatgtggctgcaataaacccagaactcttacagcttcttcccttacatccgaaggacaatctgcccttgcaggaaaatgtaacaatccagaaacaaaaacggagatccgtcaactccaaaattcctgctccaaaagaaagtcttcgaagccgctccactcgcatgtccactgtctcagagcttcgcatcacggctcaggagaatgacatggaggtggagctgcctgcagctgcaaactcccgcaagcagttttcagttcctcctgcccccactaggccttcctgccctgcagtggctgaaataccattgaggatggtcagcgaggagatggacagagcaagtccattccatcccgaggcagctcttctgcaaccctgtgaactcagttcggaggacatatgtctgtgagggagtggcaaatgagaccacggaaaaaaaagcccgaacctgatgg

SEQ ID NO: 524 - DNA, 540 bp, Homo sapiens
gctggcggttccgtttggtctgagggagcgatggcggtacgcgcgttgaagctgctgaccacactgctggctgtcgtggccgctgcctcccaagccgaggtcgagtccgaggcaggatggggcatggtgacgcctgatctgctcttcgccgaggggaccgcagcctacgcgcgcggggactggcccggggtggtcctgagcatggaacgggcgctgcgctcccgggcagccctccgcgcccttcgcctgcgctgccgcacccagtgtgccgccgacttcccgtgggagctggaccccgactggtcccccagcccggcccaggcctcgggcgccgccgccctgcgcgacctgagcttcttcgggggccttctgcgtcgcgctgcctgcctgcgccgctgcctcgggccgccggccgcccactcgctcagcgaagagatggagctggagttccgcaagcggagcccctacaactacctgcaggtcgcctacttcaagatcaacaagttggagaaagctgttgctgcagcacacaccttcttc

SEQ ID NO: 525 - DNA, 556 bp, Homo sapiens
ggatcccccgtgacgtcacaatcaacccatttgtgtttgttttcttgagatcactgtagttacatactgttcataatggcagttttctctgaaaattttgcacaaaatttctttttttttagagttgataagtattcttcatttttttcacttggtcatgtgttttttctgtgacattttcttttataatcatttgtgttctttctgccattctgattttagaaatatttggtagtagtttcccctgcctatttgaatggattagattgtacgttcggcaaccattaaagaaatgattcctaacttctgagttacaggccagcttcccagaaccactaaatgttaatgaggaaaatatattgtgaagggcactcgaggtcactgcagatcacattatattaagtaagggacaataaataaattaaacaggtttctagccacatgtttcccttcttcaaaatgattacattttactgagtccaatgtaaaaagtattcattcttacaacctagattgcctattttaaatatccatattcttttccattcttattaaa

SEQ ID NO: 526 - DNA, 405 bp, Homo sapiens
  misc_feature (79)..(79): n is a, c, g, or t
ggaaagctgcgaaagtgctttggcggtttgtccatccgcagcttcggcttttccagtctggtggccctttcggccaccntttaaccccagctttccctcccccttctttcgatcagagatcggccggagacccctcgaagtgcgcaaacttgacactcaccctgaccggacctggggttttaaggggtgtggcaggaggttttggactcgatgagtttccaccgaaatgtcggagaagtcaggccagagcacaaaagcaaaggatgggaaaaagtatgcaacactcagtttatttaatacttacaaggggaaatcattagaaacacagaaaaccacagttgcagctcgacatggattacagagtcttggaaaagtcggtatttcacggcgtatcctccacctgct

SEQ ID NO: 527 - DNA, 155 bp, Homo sapiens
tgaggtgggttgaccctttgatttccgtttcttctcaccttgtgagtagaagtcacagacgggcacacacgcacaccacggtcaggagtcccgagacagcacgaggtggaggcctggtctcaccgcctctcacgctatgtccatcacctggcagg

SEQ ID NO: 528 - DNA, 953 bp, Homo sapiens
tttctttgcgtaaccaatactggaaggcatttaaaggacctctgccgcctcagaccttgcagttaactccgccctgacccacccttcccgatgcagtccctgatgcaggctcccctcctgatcgccctgggcttgcttctcgcggcccctgcgcaagcccacctgaaaaagccatcccagctcagtagcttttcctgggataactgtgatgaagggaaggaccctgcggtgatcagaagcctgactctggagcctgaccccatcgtcgttcctggaaatgtgaccctcagtgtcgtgggcagcaccagtgtccccctgagttctcctctgaaggtggatttagttttggagaaggaggtggctggcctctggatcaagatcccatgcacagactacattggcagctgtacctttgaacacttctgtgatgtgcttgacatgttaattcctactggggagccctgcccagagcccctgcgtacctatgggcttccttgccactgtcccttcaaagaaggaacctactcactgcccaagagcgaattcgttgtgcctgacctggagctgcccagttggctcaccaccgggaactaccgcatagagagcgtcctgagcagcagtgggaagcgtctgggctgcatcaagatcgctgcctctctaaagggcatataacatggcatctgccacagcagaatggagcggtgtgaggaaggtcccttttcctctgttttgtgtttgccaaggccaaactcccactctctgcccccctttaatcccctttctacagtgagtccactaccctcactgaaaatcattttgtaccacttacattttaggctggggcaagcagccctgacctaagggagaatgagttggacagttcttgatagcccagggcatctgctgggctgaccacgttactcatccccgttaacattctctctaaagagcct

SEQ ID NO: 529 - protein, 193 aa, Homo sapiens [sequence omitted]

SEQ ID NO: 530 - DNA, 482 bp, Homo sapiens
ttttttttttttgtttgggtcatttaagaaatttaattgatcacagtaagacattcaggctacaaaaaccttctatacagtggtttaaaaagtgacacccatctcccagaagccactcatacatacaacggggacatcattctcccaaaaagcgttgcacacagtccagttcgtgcaaataatctttgtacataaagaagaggcatttcagaggcaataaccccctacacagggccccgagaatagtcactgaacaaatacagcaaccagggtttgcaaaaataaatagattttatatatatgtgtgtatatatatatataagtgataacagtttcaaccaatatacaaagtgcaaacataacaaaaaatccccactatctgtacagggacgcatttacgtgctccgaaaccagaaaggcttatcacggttccctgcactgggggggacacagtgttttgtccctggggacaattgccaatc

SEQ ID NO: 531 - DNA, 143 bp, Homo sapiens
tcggcctcctttaatcaagcagcggagaaggaatgtgaccagctaggtctggagtttcagcattggacactgagccaagcagacaacgcaaagcaagccaggacacaccatcctgcccaggcccagatatctctccatgacct

SEQ ID NO: 532 - DNA, 443 bp, Homo sapiens
aattttttttttttttttttttttgacatgaaaacctttctttttaatttggttgatacacatttgacaaaatattttagaataaaataatccatgaacaggtacaaggtatttacagtaacataattgaaaaacataaaatcgatatatttctttaacagaaatgtctataaaattttctactgtgaatctggaagactttcagttcctacttatcaacctggtcttaagccccaacaggcgacatgtaaggcccaggagtaggatatacaaactctaacacatttggcaattaagaatcatctattagtgtgagctggcaggcgctgggtggggggtggggatggggagggaagaaccagatcttagggtaagatacagaatggaagactccactgaaaacaactatggacaagaaagatctaaaatcacacttatctttc

SEQ ID NO: 533 - DNA, 239 bp, Homo sapiens
  misc_feature (36)..(36): n is a, c, g, or t
  misc_feature (179)..(179): n is a, c, g, or t
cacaagctcacctcttggagctgcttctcctacacnttctcagcccattgctttgccaccccctcatgtgccagggcatcccattccaggcttcctgcaaggaaacggttggaagtgggaaaggggagctagggattgaggggttaagggacctcacactaagaaggggctgtgctttnatcccctgcctcttgcactaccaatgtctcaagacataatattcatctcttgctgtcaga

SEQ ID NO: 534 - DNA, 4670 bp, Homo sapiens
gatcctctgtgtcttccacagagccctagtgcctgttattatttgtagaattaaatgttaattatacaaaaagaaaaaaaccctcctagttctcctccccgcttccccataaggggacccagcacacagtgacagagttgagatctacaggggacatcgcaggaacaactgaagaggtgctgggcttgcaggtgctgtgctgggagggtggggtgcaggagcctagtgtggagggcggccggggtgtggctacaaccaccacctcccaccgcaagggctgtgaccaactttgggacccctggaggagtttctggggaaccagagtgacaccagtctgtccaatttgtgaccttccccagtggcgggagcctgggtgggtgtctctggaggttccagatgggaattctgccaggtgagaaagagggtgagggagtgagggacgggggtgggggacagggggcagcaggaggactctgaggttggagagggatgggggaaggggctgtgagcaagtgtgctggagggtccggaggaagatgggaccctcgaggggtgacaagctcgctggtcgttggcttagacactgcagcagtgcccaccacgcagcctgtcctggacttagtcacccccagctccagacttgtcaactctacacatttctcttgtggattctcttccctatagccctggatgagcatttcaaaccctctcctccctcgccaacctgcaaatgcccccttctcactctcagttgcttgttttgtttcttgtttcactgagaaagtagaataatcacaataaaaccctcatcctcccccaaatgaatcctccagcccacctgtgcctgcaatcgtgcgacccgcttttctttccctgcctcgagtgagctgtcccaagtctgatgcccaagtctgatgccctcttgcctggacgaggcaagacactctttttcttgcatcagcaatttttctttctgttgagtcattgccatcacatacgaagtccaataatatcccctaccttaaaaaacaaacaaacaaaaaactccttaatgctgcatctgtgttgttccctgtctcactggacaagctgtctacacctgctgtagggacttcctcaccgaacgagctgtctacacctgctgtagggatttcctcaccaaccgagctgtctacacctgctgtagggacttcctcaccgaccgagctgtctacacctgctgtagggacttcctcaccgaccgagctgtctacacctgctgtagggacttcctcaccgaccgagctgtctacaggtgctgtagggacttcctcaccgaccgagctgtctacacctgctgtagggacttcctcaccgaccgagctgtctacacctgctgtagggacttcctcactgaacgagctgtctacacctgctgtagggacttcctcactgaacgagctgtctacacccgctgtagggacttcctcacaactcattctcttcaatccgccccactcgggctgctcctctgtggaaactgctgtccgggtgatgggcacctctgtctttccactctgatggctgaatgtcggtcctcatctctatggactacacgcactcctccctcagctccgggacagggcactcccccgagcccccacagccctggctgctcctcctcaccggcttcattcttggggagtggcagcatcctctgtctctgacttcggtcgcttcctcggtggtgatgcatcaggcaggatgacacttgcaagggaccatctaccacaatctgtgcgatctgtgcaaggcgcagggaagtcccaagggccaggattcaccatgcctgcgtgatgccatcccccgctggcaggaacaaggggaggacgcaggaactggaactggagagagagaaaggagagtggtgggtgcctgacagggccggagcttcaattgaggtgcacagccaaccctcggtgacctggcaggaggaagtcaggggaatagtagacaccttggccttgctctttccttccctcaagggcctttggtgctcctgttgggctagcataaccagaaaccacaggtcaaggaacaggctaatgtggctttcaaaggccagctccagcgtcacgcagcacggagggaagggcagagcagatgtggcgagcccagcctccaggcgcagggctgcagcagtggcctctcgtcttggcatccctcgagaaactccaccccgtcatagcatctccacttctgtccccagtaggcaattcttaatttccaccctgtgactaacaagctcttccctctgtcttccccatctcggcaaagggcatccccctcgactcagtcactcagaccaaaaatgaagagcctgtgtttctatctctccttcacatttacactggacgcactctctctaagagaaagaggcactgctcatggcccccatgttcaaaccacatcatctctctctgtgctgctgtcaaaacccctccctgggctctgatttttctctgtgacaggccagttggcagcctccccgacagccttagcacctgcttcccagctaaagcgaagccctgattttgtttggggccaactatgtgctccgcctagtgggggctggcccatcctggtcccactttgaacacatgttcactttcccaccctgttaaagtcagggccggccacatggcccatggcctaacggggttaaagagacacttgcagggggagcctgtgagaagcttttcctttgttagaaaagaaaatcgtaacctgattcacaaagtggtcatcctttgtacacctgccacttccttcccgtttgagatgctggtgtagcggtgtgatgccctgtgctatgacagccaccctggggcatgaggcaacaggcaggaaggcagaaagtgtatgtggggattttggagggaggagagatggtggcttcgtattcagtgagatcacaatggcatcgtgcaagctgctgctagctgggaagcgggttgttcgcctctgaatgcatcctaagtgattcagcaccccagcctcctgcagtccacactccacacggcagcccgagggacccttcagaggcctacgcgcctctgctcggaactgtgcggactgcctccctctcagaaggcgcagcccgcacccggcctcactctgcactcagcgccttgcgagcgagcttcaggtccgagagggtcccttgttcccgaaggtctccccgaccccggggccgcctttttggaggttgtgaggacccacgggcctgcacgaagtgagcgctgtgtaaatggttgctgtgctttgtacaaaacggtcagctccgtgagggcagagctgggagcccaggacaggcccggcccgcggtgggcgctcaaggaggcctggggaatggcagtgaccgtgacaggttccctaacggggcgtggcctgcaaggcggtcagaggcttctctgagctgagatcccggagccagccccgtgcgtggaaacagcaggtcccgcacccgggctgggggcccccgacagaagcgtccgcgtggcaccaaggccgcgagccgagcgcacccggagggttgggaaggccggggacccggcggggacggggcgggccggcccaggcctggcgcccagctctgggctgcagccccagggctggtggcgcctccgggcggagcgaggggtccgtctgggccgagtttgaggagccgagggcacccaggggcggtgcggccggcagagtgggctccggggacggcccggctggcgctgagcggccgtcgaggacacacaggctcgtccgctcctgggcccggcccagccccggggtgggaggcgcggggcgagggagcgcagccggaggggccggggcggggcgggggcggccgcggggcggggccggcgcggcagggtgggcggggccggcgcggattggccgggccccgccacgtgaccggccccttatagggcgtggcggggccgcggagtcgggtgaggcggcggcggctgcggcggtggggccgggcgaggtccgctgcggtcccggcggctccgtggctgctccgctctgagcgcctggcgcgccccgcgccctccctgccggggccgctgggccggggatgcacgcggggcccgggagccatggtccgcttcggggacgagctgggcggccgctatggaggccccggcggcggagaacgggcccggggcggcggggccggcggggcggggggcccgggtcccggggggctgcagcccggccagcgggtcctctacaagcaatcgatcgcgcagcgcgcgcggaccatggcgctgtacaaccccatcccggtcaagcagaactgcttcaccgtcaaccgctcgctcttcgtcttcagcgaggacaacgtcgtccgcaaatacgcgaagcgcatcaccgagtggccatatcctgccggggcgggccgggcggggccgggcggggaccggggtgggggccggggccggggccatcttcccggtggccgggagggcgcgacctggggaggcgtcgggagacgggcgaggggcgtacggagcgccccagggcccctcggagcggcgggtgcgggagcatttccgtgagtgcggcggggggagcccctctgctccggactcgtccctccgcacgccgggtcctggggatccaagctt

SEQ ID NO: 535 - protein, 94 aa, Homo sapiens
MVRFGDELGGRYGGPGGGERARGGGAGGAGGPGPGGLQPGQRVLYKQSIAQRARTMALYNPIPVKQNCFTVNRSLFVFSEDNVVRKYAKRITEW

SEQ ID NO: 536 - DNA, 319 bp, Homo sapiens
  misc_feature (128)..(128): n is a, c, g, or t
  misc_feature (236)..(236): n is a, c, g, or t
  misc_feature (244)..(244): n is a, c, g, or t
atgctgggaaacgcggcccctctttcctccagtgccaagaagaagggcagagaagcagaggtgttggccaaggacagtgccaagcttgccaaggccttgctgagggagcggaaacaggcgcaccgctngccagcaggttcaccagccagacgcaagccacgctccaacaggcgtcccagcaggtgctggcgtcttgaagcacgcagacaggagctgggagggaagctgagcaggtngggtgctngggttgagcgagatgggagcagcagatcccgggattcgcttttctcacttggagaagggacatcgagactttttc

SEQ ID NO: 537 - DNA, 314 bp, Homo sapiens
  misc_feature (34)..(34): n is a, c, g, or t
ctttcaagtttttctttttaaactgatgaaagtntcctgtttttaaaagctatgtttccttccacccaaactcacaggtacaagggatttaaaggcaactgttccatgaccttcattgatcagtttaaagcactacaccagtgtaacaagtattgcaaaatgctgggactgaaatcccttcaaaacaacaaccagaaacagaagcagccgagcattgggaaaagcaaagttcaaacaaactctatgacagtaaagaaggcagggcctgagaccccaggcgaaaagaaaacctaacgtccccgggtaacctaatg

SEQ ID NO: 538 - DNA, 358 bp, Homo sapiens
  misc_feature (34)..(34): n is a, c, g, or t
cacgagcggcacgagccacgagtggcgagtgtangtgctgccgagcggatcccagtgtgcggcggcacggcggcggcggcgctcgccgggctccggctccggcttctgctgttgctcttctccgccgcggcactgatccccacaggtgatgggcagaatctgtttacgaaagacgtgacagtgatcgagggagaggttgcgaccatcagttgccaagtcaataagagtgacgactctgtgattcagctacttgaatcccaacaggcagaccatttatttcagggacttcaggccttttgaaggacagcaggtttcagtttgcttgaatttttcttagcagttgaacttcaaagtattc

SEQ ID NO: 539 - DNA, 367 bp, Homo sapiens
tcttatgaattattcattcaggattttttaaatgattcagatgctttcagtctgttaacagtatttataaaacatgtttcagtgatacaacataggtgaactaaaccaaagatgcaaatgccttggaggaaaagaaattgtattatagagaatcctgagatatatccttttgggttgtttaatttaaagcctatcacaaaacaaagagaattgtcgcactttaattccaacctcctgcagtacttcacaacccttagcataagattctgaaatttgtaataggtggtacctagtttgatgcagggttttgcagcagttgtgcgaatgcctctgcgcaacggcctttcagtcagactaaatgagaaaa

SEQ ID NO: 540 - DNA, 738 bp, Homo sapiens
agaggatctccccgaacatgtcgcggctgttaagctctgacaggttaggccttagtcctaggtgctaaaggttgacttggttacaggattgaagctagatttggagtttacagattgaactctgtgctgagggaatgcctgttgggaccagtgggtgtgtgtgtctctagaagagatctataaggttaccaccttaagtatcttggccaagccgtataaaattggcagtagtcatccatttttacctacagacatgatagttctctatggttcagcctaatatctacaaaggagttggtttaagggcaattcatagttagtcctgaagctgggagaatctccttgtgtgtctctaggttgcaggttagatgggagagcgagcacagcagatgagctgtgcaggaagagacatgcaatggaggctcctctctctcacagaaatacattttctgtgatagtagaacgaaaccctttcactctgatccattcagaaacttttcatacctggactttattaaagggactgtcccttccccattatccctctttgggagaatgcaaggtatgctcctttgcagaagttgttactgtttacagagttgacattgtggacacatccagtgcatacatggattgggaatgtgggagcccctgcttaaaaggtgcttctaacctacctggggtgaataaccctcttctgtgggcaggggagtgtggttctaggtccaggtttccctg

SEQ ID NO: 541 - DNA, 1826 bp, Homo sapiens
ccccgcggaaagataataaatcatcattgatcaagatgtcttcagcacctgagcctccaacattcaaaaaggaaccacccaaagagaaagagtttcaaagcccagggctcagaggggtgcgcacaacaaccttatttcgtgctgtgaatccagagctcttcattaaacctaacaaacctgtaatggctttcggattggtaactctttcactttgcgtggcatatattggttatctacatgcaatacaagagaataaaaaggacctctatgaagctattgatagtgaggggcacagttatatgaggcggaaaacatccaaatgggattagtagtgctggttagtgcagatggacctttattaaaggttctgaaatcttcaaatgaaagaccttgtgagtgtacagtatcatgtttcttgttctagaacatgctaatgaagagagaagatagcagttgcaaccagacaactgtcgtaaattttgtcctttcacagctgcagccattatctcattctttttccacagagtgagcgtcataatatttttctttccttacctcttataaaagtgccatgagaatggaagttgtttttgttaattattaaattctgtataataaaagtacccatgctgttaaatttgcatgatgttttaaatattttaagatgaattatgccggtgcagctgtcgtgaaagtttacttgtgttttgctacttgcaaaggaaatgttcatgttctccctggcatagaacctatatttttaaagaaagataaatagaaattttaaggcctgaagtcaatattaaaaatatgagatatgagaaactgagttggctctgacaagtagtttttatagtgtcacaaatggttcatatatttcagtttccattttagctatttttgggacagaattttattttaatggaaaagatccttccactcagctactaaaataaggattaagaatatcccagagtaattggagtttttctttaaaaaaaaaaaaaaagtatgttttactgaggtatgatgattttgactacaactaaatgttatctattttagtgtttatgttaattaatgttaattaattttgtttatgttaatttgtgttaattaatgttactgtaatgttataaacataagaccaagtgttcttatagttatttaaaaactacaactactcaatggataaggaatagataaggtctccttattgtaccttttttttcttttgaagtttatatgccagcaggcctttttgtttttttccttttcagaatgtttcttattctctgaagcatcagcattttgaagtgtcttttatggaagtggggacagaaatgggggtaaaaatgagtgtaaacaaagcctagccctacggtcagcacccactggaggtgagaagcagaatggccttggttgtcctggcacctggcccggggcctaggacagaggtcaaggctaggcccctgtgtctggccagattctgccttatagaattcaaatctttcttacaaggtttctggacccgtttcatttctagatatatacctaattctccaaatcattgtcattgggcctcagtagtaaatctcacctctgaagtcttgcttcagtcgctattaatattaccaagtaataataacagcacaggcagagtttatcataatgttatttttaatttgtcatactttattatggttttgtaaggtacatgaaaatgtaattatgtgtgattggtaggtattaaagaacttagctaattgaatttacatggaactaaataaaatctttactactgagccccaaaaaaaaaaaaaaaa

SEQ ID NO: 542 - DNA, 4834 bp, Homo sapiens
gatgtggagctggggtccctgcaagtcatgaacaaaacgagaaagattatggaacatgggggggccaccttcatcaatgcctttgtgactacacccatgtgctgcccgtcacggtcctccatgctcaccgggaagtatgtgcacaatcacaatgtctacaccaacaacgagaactgctcttccccctcgtggcaggccatgcatgagcctcggacttttgctgtatatcttaacaacactggctacagaacagccttttttggaaaatacctcaatgaatataatggcagctacatcccccctgggtggcgagaatggcttggattaatcaagaattctcgcttctataattacactgtttgtcgcaatggcatcaaagaaaagcatggatttgattatgcaaaggactacttcacagacttaatcactaacgagagcattaattacttcaaaatgtctaagagaatgtatccccataggcccgttatgatggtgatcagccacgctgcgccccacggccccgaggactcagccccacagttttctaaactgtaccccaatgcttcccaacacataactcctagttataactatgcaccaaatatggataaacactggattatgcagtacacaggaccaatgctgcccatccacatggaatttacaaacattctacagcgcaaaaggctccagactttgatgtcagtggatgattctgtggagaggctgtataacatgctcgtggagacgggggagctggagaatacttacatcatttacaccgccgaccatggttaccatattgggcagtttggactggtcaaggggaaatccatgccatatgactttgatattcgtgtgcctttttttattcgtggtccaagtgtagaaccaggatcaatagtcccacagatcgttctcaacattgacttggcccccacgatcctggatattgctgggctcgacacacctcctgatgtggacggcaagtctgtcctcaaacttctggacccagaaaagccaggtaacaggtttcgaacaaacaagaaggccaaaatttggcgtgatacattcctagtggaaagaggcaaatttctacgtaagaaggaagaatccagcaagaatatccaacagtcaaatcacttgcccaaatatgaacgggtcaaagaactatgccagcaggccaggtaccagacagcctgtgaacaaccggggcagaagtggcaatgcattgaggatacatctggcaagcttcgaattcacaagtgtaaaggacccagtgacctgctcacagtccggcagagcacgcggaacctctacgctcgcggcttccatgacaaagacaaagagtgcagttgtagggagtctggttaccgtgccagcagaagccaaagaaagagtcaacggcaattcttgagaaaccaggggactccaaagtacaagcccagatttgtccatactcggcagacacgttccttgtccgtcgaatttgaaggtgaaatatatgacataaatctggaagaagaagaagaattgcaagtgttgcaaccaagaaacattgctaagcgtcatgatgaaggccacaaggggccaagagatctccaggcttccagtggtggcaacaggggcaggatgctggcagatagcagcaacgccgtgggcccacctaccactgtccgagtgacacacaagtgttttattcttcccaatgactctatccattgtgagagagaactgtaccaatcggccagagcgtggaaggaccataaggcatacattgacaaagagattgaagctctgcaagataaaattaagaatttaagagaagtgagaggacatctgaagagaaggaagcctgaggaatgtagctgcagtaaacaaagctattacaataaagagaaaggtgtaaaaaagcaagagaaattaaagagccatcttcacccattcaaggaggctgctcaggaagtagatagcaaactgcaacttttcaaggagaacaaccgtaggaggaagaaggagaggaaggagaagagacggcagaggaagggggaagagtgcagcctgcctggcctcacttgcttcacgcatgacaacaaccactggcagacagccccgttctggaacctgggatctttctgtgcttgcacgagttctaacaataacacctactggtgtttgcgtacagttaatgagacgcataattttcttttctgtgagtttgctactggctttttggagtattttgatatgaatacagatccttatcagctcacaaatacagtgcacacggtagaacgaggcattttgaatcagctacacgtacaactaatggagctcagaagctgtcaaggatataagcagtgcaacccaagacctaagaatcttgatgttggaaataaagatggaggaagctatgacctacacagaggacagttatgggatggatgggaaggttaatcagccccgtctcactgcagacatcaactggcaaggcctagaggagctacacagtgtgaatgaaaacatctatgagtacagacaaaactacagacttagtctggtggactggactaattacttgaaggatttagatagagtatttgcactgctgaagagtcactatgagcaaaataaaacaaataagactcaaactgctcaaagtgacgggttcttggttgtctctgctgagcacgctgtgtcaatggagatggcctctgctgactcagatgaagacccaaggcataaggttgggaaaacacctcatttgaccttgccagctgaccttcaaaccctgcatttgaaccgaccaacattaagtccagagagtaaacttgaatggaataacgacattccagaagttaatcatttgaattctgaacactggagaaaaaccgaaaaatggacggggcatgaagagactaatcatctggaaaccgatttcagtggcgatggcatgacagagctagagctcgggcccagccccaggctgcagcccattcgcaggcacccgaaagaacttccccagtatggtggtcctggaaaggacatttttgaagatcaactatatcttcctgtgcattccgatggaatttcagttcatcagatgttcaccatggccaccgcagaacaccgaagtaattccagcatagcggggaagatgttgaccaaggtggagaagaatcacgaaaaggagaagtcacagcacctagaaggcagcgcctcctcttcactctcctctgattagatgaaactgttaccttaccctaaacacagtatttctttttaacttttttatttgtaaactaataaaggtaatcacagccaccaacattccaagctaccctgggtacctttgtgcagtagaagctagtgagcatgtgagcaagcggtgtgcacacggagactcatcgttataatttactatctgccaagagtagaaagaaaggctggggatatttgggttggcttggttttgattttttgcttgtttgtttgttttgtactaaaacagtattatcttttgaatatcgtagggacataagtatatacatgttatccaatcaagatggctagaatggtgcctttctgagtgtctaaaacttgacacccctggtaaatctttcaacacacttccactgcctgcgtaatgaagttttgattcatttttaaccactggaatttttcaatgccgtcattttcagttagatgattttgcactttgagattaaaatgccatgtctatttgattagtcttatttttttatttttacaggcttatcagtctcactgttggctgtcattgtgacaaagtcaaataaacccccaaggacgacacacagtatggatcacatattgtttgacattaagcttttgccagaaaatgttgcatgtgttttacctcgacttgctaaaatcgattagcagaaaggcatggctaataatgttggtggtgaaaataaataaataagtaaacaaaatgaagattgcctgctctctctgtgcctagcctcaaagcgttcatcatacatcatacctttaagattgctatattttgggttattttcttgacaggagaaaaagatctaaagatcttttattttcatcttttttggttttcttggcatgactaagaagcttaaatgttgataaaatatgactagttttgaatttacaccaagaacttctcaataaaagaaaatcatgaatgctccacaatttcaacataccacaagagaagttaatttcttaacattgtgttctatgattatttgtaagaccttcaccaagttctgatatcttttaaagacatagttcaaaattgcttttgaaaatctgtattcttgaaaatatccttgttgtgtattaggtttttaaataccagctaaaggattacctcactgagtcatcagtaccctcctattcagctccccaagatgatgtgtttttgcttaccctaagagaggttttcttcttatttttagataattcaagtgcttagataaattatgttttctttaagtgtttatggtaaactcttttaaagaaaatttaatatgttatagctgaatctttttggtaactttaaatctttatcatagactctgtacatatgttcaaattagctgcttgcctgatgtgtgtatcatcggtgggatgacagaacaaacatatttatgatcatgaataatgtgctttgtaaaaagatttcaagttattaggaagcatactctgttttttaatcatgtataatattccatgatacttttatagaacaattctggcttcaggaaagtctagaagcaatatttcttcaaataaaaggtgtttaaacttt

SEQ ID NO: 543 - protein, 818 aa, Homo sapiens
DVELGSLQVMNKTRKIMEHGGATFINAFVTTPMCCPSRSSMLTGKYVHNHNVYTNNENCSSPSWQAMHEPRTFAVYLNNTGYRTAFFGKYLNEYNGSYIPPGWREWLGLIKNSRFYNYTVCRNGIKEKHGFDYAKDYFTDLITNESINYFKMSKRMYPHRPVMMVISHAAPHGPEDSAPQFSKLYPNASQHITPSYNYAPNMDKHWIMQYTGPMLPIHMEFTNILQRKRLQTLMSVDDSVERLYNMLVETGELENTYIIYTADHGYHIGQFGLVKGKSMPYDFDIRVPFFIRGPSVEPGSIVPQIVLNIDLAPTILDIAGLDTPPDVDGKSVLKLLDPEKPGNRFRTNKKAKIWRDTFLVERGKFLRKKEESSKNIQQSNHLPKYERVKELCQQARYQTACEQPGQKWQCIEDTSGKLRIHKCKGPSDLLTVRQSTRNLYARGFHDKDKECSCRESGYRASRSQRKSQRQFLRNQGTPKYKPRFVHTRQTRSLSVEFEGEIYDINLEEEEELQVLQPRNIAKRHDEGHKGPRDLQASSGGNRGRMLADSSNAVGPPTTVRVTHKCFILPNDSIHCERELYQSARAWKDHKAYIDKEIEALQDKIKNLREVRGHLKRRKPEECSCSKQSYYNKEKGVKKQEKLKSHLHPFKEAAQEVDSKLQLFKENNRRRKKERKEKRRQRKGEECSLPGLTCFTHDNNHWQTAPFWNLGSFCACTSSNNNTYWCLRTVNETHNFLFCEFATGFLEYFDMNTDPYQLTNTVHTVERGILNQLHVQLMELRSCQGYKQCNPRPKNLDVGNKDGGSYDLHRGQLWDGWEG

SEQ ID NO: 544 - DNA, 4918 bp, Homo sapiens
ccaccgactcctgcccgcctcaacacaatgccttacctgtgaagcttgaggccactcaagttccaaatttgtgacaaatcccccagggctcactggagtggcagatatagacctgcagctaactggatttgatttataagagagaaatctgcagtcaatgcccactcttgccacactgctaatatggaaaacagaatgttcaataggatatggtctgataaatagtgatgattgaagatgctgctccaatacatgtgaaatcaatgggagatatctgctgtctgaagatctttcagagcttttctcgacaagctcccctgtaagaaatcggaggtatattctaccattatacagtctttctcaagtggatataaatacgtttgcctcactgtaaccagacaactagacaactaatgtgggaccatggcactgcccagatgcacgtggccaaattatgtttggagagcagtgatggcatgcttggtacaccggggattgggtgccccattgactctctgtatgttgggatgtttgcttcaggctggccatgtgctatcacaaaaattggatgatgtggacccactggtggctaccaactttggaaagataagagggattaagaaggaactcaataatgaaattttggggcctgttattcaatttcttggggttccatatgcagccccaccaacaggggaacgtcgttttcagcctccagaaccaccatctccctggtcagatatcagaaatgccactcaatttgctcctgtgtgtccccagaatatcattgatggcagattgccagaagtcatgcttcctgtgtggtttactaataacttggatgtggtttcatcatatgtgcaagaccagagcgaagactgcctatatttaaatatatatgtcccgactgaggatgatattcgggacagtgggggtcccaaaccagtgatggtgtatatccatggtggctcatatatggaaggtactggaaatttatatgatggaagtgtcttggcaagttatggcaatgtgatcgtcatcacagtcaactatcgacttggagtactcggtttcttgagtacaggcgatcaggctgcaaaggggaactatggactccttgatctcatacaagctttaagatggactagtgaaaacattggattctttggtggtgaccccttaagaatcactgtttttggatctggtgctgggggttcatgtgtcaacctgctgactttatcccattattctgaaggtaaccgttggagcaattcaaccaaaggactttttcaacgagcaatagctcaaagtggaacagccctttccagctgggctgttagttttcaacctgcaaaatatgctagaatgttggccacaaaagttggttgcaatgtttcagatacagtagagttagtggaatgcctacagaagaagccttacaaagaacttgttgaccaagatattcaaccagctcgataccacatagcctttggacctgtgattgatggtgatgtaataccagacgacccccagatattgatggagcaaggagagtttctcaactatgatataatgttaggagtgaaccaaggggaagggttaaaatttgttgaaaatatagtagatagcgatgatggtatatcagctagtgattttgactttgctgtttcaaattttgttgataatttatatggatatcctgaaggcaaagatgttttgagagaaaccattaagttcatgtatactgactgggctgaccgtcataaccctgaaaccagaagaaagacattactggctttgtttacggaccatcagtgggtggcaccagctgtagccacagcggatcttcactcaaactttggttcacctacgtacttctatgccttttaccatcattgccaaacagatcaggttccagcttgggctgatgcagcccacggagacgaggttccctatgtactgggaatccccatgattggccctacagagttatttccttgcaatttctccaaaaatgatgtgatgctgagtgcagttgtaatgacatactggacaaattttgctaaaactggtgacccaaatcaaccagtccctcaagacacgaaattcattcataccaaacccaaccgttttgaagaagtagcatggaccagatattcccagaaagaccaactttatctccatattggattaaaaccaagagttaaagaacattacagagccaataaggtgaacctctggttggagttggtacctcatctgcataatctcaatgacatttctcagtatacctctacaacaactaaagtgccatcaactgacatcactttcagacctacgagaaaaaattctgtacctgtcacgtcagcctttcccactgccaagcaggatgatcccaaacaacaaccaagtccattttcagtggatcaaagggactactcaacagagctgagtgtcactattgcagttggagcatcactgctgtttctgaacatcttggcctttgcagccctgtactacaaaaaggataagaggagacatgatgttcacaggagatgcagccctcagcgcactactaccaatgatctaacccatgcacaagaagaggaaatcatgtccctccaaatgaagcacactgatttggatcatgaatgtgagtccattcatccacatgaggtggttcttcggaccgcctgtcccccagattacacactagctatgaggaggtcacctgatgatgttcccttaatgacacccaacaccattacaatgattcccaacactataccagggattcagcccttacacacattcaatacatttactggaggacagaacaatactctgccccatccccatccccacccccattcacattcaacaaccagggtatagccagataagagaaacaaactattttttttgatggattgcagtaaacgatcactgaagattccttggctttcaacctacaagacttactatttaaataaggaggaatattatgtgaatatacatatcaagaactttgggggttttgaaaaaaatgaattgtatatatacaaatcaactttaaaaacaaatttcaattgcttgaagcaattgttctgaatgatactttttcattcacattcaagaattaattttttgaagatttaagttacataatggaattaggcatgtggaacaccaaacaggaaagaactatgtctgaaatataaaaaataaaaataaaaaaacaactatgaatatgcacaagggacacaccagtggaatgtcagataattttcaccagtttttatttggagccgttttattgtgtagaccatatttacatatttggataagtacacaaagcgtcaatgctgttaatggccttagcaaaggctcatgctgaaatttgccagtaaaacaaagaagtttaaagactggcaggtacaccattatcacataagtgctgtcagtataaagttgtggggataaaggaaactggatatttttagcacgatgtgcatgataatttatatgcttggtggctgtgctgctgattaagccgtaattaaaattcttctcatcccattggagtttttaatagaagcttcctccatcaattggcagaacctaaagaagattttaaggggcaaaagtaattacaataaaataattcacagtagtttcaatatagaaggaattagctattaaaggtatttgaagaaactataggtatagtggtgaatactcgctgatatgaatcccagaaaaaaatttcctgtttttaatgttcttttcaatcccatctagataatttatagaaatataaccctaattggacatgtggtacaggatctataagttgctgtgtttttttgttactctgtattttgttccttttggtaaggtgaagtgtgtccaaagagttacttgcaacagtctttcatgatatgaggatgcccccgtattaccactctgattatagttctgagttctttgatttactcatgctgcatgacaaaatgtttactaataacaattcattataaagttatatccctctttacatcacttatctttctcactgaggttcattcactggaatttactcacgcaatctcagtagagtacaacgtagatacagaacctaggagagtcaacatctggaggattttagtctttcttacacatatgtgtgattttaaacgaatattctcagaccacaggaaactcttcatccccctgttgtttaccagtaacagtatatcacagacctttccaaatgtttgtatatgtaatcagatgtacatttatattgaaaaacaaatgagatggacttaaagagcacatcctgataaatactttctctctcacctgtactatatttctattagactaaagttatgtgattttttttttacattttttcagatgactagcaattttgatagtttataagataatgcaaagaactttctctgacaaactaactgcagtaacagaaacctttcttttcagttactctttttcaagaatgaaagattattatacaaaaaattgtatactacttgatggaaccaactttgtacatcttggccatgtcactggtcattgtgtgaaataaagataatctggataatgactattagtccaatgctaagaaacatgatctttgctcattaaagagctaaaatgtttattgctgttttgtctttcttttttctaaaaaaagaaaaaaaagaaaaaaaggaaaagaagaacaaagaaacatgactgtctcaaagagtaatttttctagattagaccagtcaggtttttgaagacatataggtaacttccacagaaaacacaaacatgtatttaaaggcaagtctcatctaagatgaaactcataaaaattatttaatgtttgttatgaatttaaaag

SEQ ID NO: 545 - protein, 823 aa, Homo sapiens
MALPRCTWPNYVWRAVMACLVHRGLGAPLTLCMLGCLLQAGHVLSQKLDDVDPLVATNFGKIRGIKKELNNEILGPVIQFLGVPYAAPPTGERRFQPPEPPSPWSDIRNATQFAPVCPQNIIDGRLPEVMLPVWFTNNLDVVSSYVQDQSEDCLYLNIYVPTEDDIRDSGGPKPVMVYIHGGSYMEGTGNLYDGSVLASYGNVIVITVNYRLGVLGFLSTGDQAAKGNYGLLDLIQALRWTSENIGFFGGDPLRITVFGSGAGGSCVNLLTLSHYSEGNRWSNSTKGLFQRAIAQSGTALSSWAVSFQPAKYARMLATKVGCNVSDTVELVECLQKKPYKELVDQDIQPARYHIAFGPVIDGDVIPDDPQILMEQGEFLNYDIMLGVNQGEGLKFVENIVDSDDGISASDFDFAVSNFVDNLYGYPEGKDVLRETIKFMYTDWADRHNPETRRKTLLALFTDHQWVAPAVATADLHSNFGSPTYFYAFYHHCQTDQVPAWADAAHGDEVPYVLGIPMIGPTELFPCNFSKNDVMLSAVVMTYWTNFAKTGDPNQPVPQDTKFIHTKPNRFEEVAWTRYSQKDQLYLHIGLKPRVKEHYRANKVNLWLELVPHLHNLNDISQYTSTTTKVPSTDITFRPTRKNSVPVTSAFPTAKQDDPKQQPSPFSVDQRDYSTELSVTIAVGASLLFLNILAFAALYYKKDKRRHDVHRRCSPQRTTTNDLTHAQEEEIMSLQMKHTDLDHECESIHPHEVVLRTACPPDYTLAMRRSPDDVPLMTPNTITMIPNTIPGIQPLHTFNTFTGGQNNTLPHPHPHPHSHSTTRV

SEQ ID NO: 546 - DNA, 143239 bp, Homo sapiens
agcttctccgccgggtgcggtgcctcacgcctgtaatcccagcactttgggaggccgaggcgggcggatcatgaggtcaggagatcgagaccatcctggctaacacagtgaaaccccgtctctactaaaaatacaaaaaattagccgggcatggtggcgggcgcctgtagtcccagctactagggaggctgaggcgggagaatggcgtgaacctgggaggcggagcttgcagtgagccgagattgcgttactgcactccagcctgggcgacagagcgagactctgtctttaaaaaaaaaaaaaaaaaaaaaaaaaagccgctccagtctccttagtgggtgggcacgaccccaggatgccccccgggggcaaaacctgtgcggggtgcagcctccacagcccctgcagtaagagatcccgcccctccccctaaggtgcaaaatgctgcagcttccaattccttaactattgagacccccatcccgcaaacgaacaagttccaagacttttgaaatactttagagctggtagagccacgcggctttgcagaaagctccgccattggagatggacaggggcgggggagggaggaggcgccgggaatcagggttttgctggatctttctccaggtggccgcgcccggaggaggaggcggcagcgagatctgcggccagaaacccagtggccagaggactgagtgggcagcgcgggggtcgggaggtgggcatcgtggtgtgggggtgtcctcttagggaacttctgccgcctgccctactcggggagcctagaggtgtctcctccagagccggcccgttctgggaccccagactccaacatggggctgggaagggggcatccgcagtcattctggacggtgcccctcctcatcgaggcctggccccgagagccacgccccagccgctctggagtctgagtttaacgtgaagaagctggactccgagggtgcggcgaggctgcggtggggatggggaagacaggggaaggagaaggggagggaggtgggcagaaaggagggaggaggaggagggaggaggggtaaggaggaagaaggagggggtaggaggttggggaggaaggaggaggggctaggaggctggggaggaaggaagagggggagggcggcccagcaccaggccaccgggaggcggggcggggcctcctacggattcctgggtggagtgtggacaagcggcctttgcatccttcgccgctggttggaaatgcagttttggaccccctcctcccccgccagggctcccacccaaccggaatctgcattttaaccggacacccaggcgattcctgtgcacattaagtgtgagacgacctggtaaacataacgcttatctgcagctcactcttacactggggagtggagaagggaggcagaggaggcagcaggttgctttttgtaacagaagagaggcgagaagaggagcagcttctccctttcccttataagctaagggcagggctggcgcggtggttaacacgtgtaatcccagagcgttgggaggcgaaggagggaaggtcgcttaagcccaggagctccagagcaccctgagcaacatagcagacccggtctctacaaaaaaaataaaaattagccgggtgtagtggcgcctgtagtccctgctacttgggaggccgaggcagaaggattcatagaacccaggaggttgaggctgcagagagttataacagagccattgtactctagcctggataacagagcaagatcctatattattaataataataagtaataagtaataagcaaggggaaggcctggccaagggaaaagctcattcctgtccgtcttctaaacatcccctcactatcctgggtagagtttgataaaggaacttttgtagacccttgagggtcagcacttggcttccatttggaggcctgctgaggtcaggccattgggcacaagatgttccaggaccctcagccgcttgacctgctgaggctgtccaagccccgtgtgggagaagtgtaaactcatgggggcgaggggtggggtaggacagaacccaagtgaaaatgtacattcacgggcagggcaatgttttcctcacccgccgggtgcaaatcctatctggcttcatgttgccgtctgtaaagctccttgccagttactttcgtaagacaggcctcactcatctcctcaagcaactttcacctgtataatattagctctgccttccccccaggttggggtggcgatggttggaaaacaagcaccagatatttctctggaccctgtatctatcccagggagagcgttagcctggccccaggaccaagcagacctggtgctttgaaggcacaagcctaggaaggagaagacaagatgcgaaggagagctcagggcctgagagctcacgaggtggtcagtttttgtcagctttaacatgaacgctttctctggagctgaatgccaggtttggaggcttactgtaggctatatctgccagtaatgccagtaaacgtataacatccttgctgtagacttaaaaattacaacgtccataaatttgcaaagtagagttttatttcttaaaaaaagttgcaacttgcaggctgggaagtggagcctcctgtgcagactaaaagcaggcactctgccagagcaagggtgggacaggagtgttatgctaaatgggttgaatgtaatataatattcatcaggttacaggaggagctatgaatattcatgaatagaggatcgcgaacatatgttgtaagcaaacatgcatgttatgcatgtcccatgttcactgtgaagtggagacatttaaatgcattaaaattaggctctataagtgaaaaggtaaagcaaaggacacagagtgtcttgtgcacagcatctgtaaaccagtccatggaaaggagaattttatctgaaaggaatgcatggtgaaaccagttacctgctgtgtcaaaaccacaagaagggaggggagttgggctgtggtatctatctggcaattggctgacatcaaggatggagcaaagcttccattctttgtttctccaggaccagtttctgtttaattgttaagaaataatctggtaaagattaataagaaagacggcataatgaggcatgaccaacctcccgtctcttcatggctgggaaacttaaaggttttctgggatctccttggccaagagggttccttttaatctgctgaaggtggggggagttggattttatttttattttacaattcattcattcattcattcattcattcatgacatactttctgagtacctattatgggccagataccatctttaggcccttgggatgcagcatttacaatactaattttctgttttcacagtggcagatgattttttaaaaaatatatgctggcaacataatgataccccatctctaaaaaaattcaaaaaatgggccaggtgtaatattgcatgcctgtgtgatcccagctactcaagaggctgagttgggaggatcactggagctggggaggtcgaggctgcagtgagctatgattgcaccactgcactccagtctaggtaacagagtgagaccctgtctcaagtacacacacacacacacaaacacacacacacacacacacacgcatatgctatgttaggtgatatgggctatgggttataatgaaaaatgaagtttggtaaatgggattgagttggcaggaaggttcaattatgccttggttggtcagggaagctttctgtgttgacatttggacagagacctggaacaagggaggaggaaagctgtgcagacaatgggttaagtccagcccggggactctgaagtgggagcatgcttaatgtgccggaataagaatgaagagactggtgtggccagaacaaaatagacatggtgagaagtgaggggagatgaggtcagggaggaaatgagtagatcagatggggccttacaggcttggcgaaggctttggattttactatatgggagattgaacaccatgggaagccctgggagggtttctagccatgctgtggcaagaagtgacttatatttttaaaagatcactctggctgctgtgttgaggataagttgcggaggctggaaggccaattacaaggctactgacttaaatggaagtgagaaataatggtgatttattattgggtgattgtggtgggtaaggcgggttattgtaggactctgcatgtatttgaaggcaaagccactggaatttcctggaagattggaaatgggagaatgagcagagtcaaggatgactacaaagtttttgatctgagagaatgagagaatgatgtttccatgtaacacaatgggaaaacagaggatgtaacaggttgtgggagttgcagagttggggggcggcggacatcaaaggtcagattttgtctatgttacatttgaggcagatgtgtggcaggagatataaatctcaatagtgttttaaagttctctccctcaacactctaagcccttataagaaagttctccatgaatgcatagtgccatagaattagagaattcaaaaattatagaagctacttaagaaatatttttttgttttacatatgaggacattgagaatcagggcaggggggacggtaaagtggtttaccaaatatgatgtaattggtaataacagagttgggattagattccaaaactcagtgcgtttcccctgcactaggcagcactgcctcccaagaaatgatattattattcctgctctttctttggtggccaagatcaagtagactgtgtagtgaaagatagtcttgttcagttacaatgacattggtataacaatgggtggtctgtaccatttaacatggaactttccctccctcccttctgccctccttccctatctctctctctctttcccttccctctatctctttctctctcttttcctttccctccctccctccatttctttctttctttctttttctttctttctttctttctttctttctttctttctttctttctttctttccttctctttctttctttttgtccttccttccttcctttgtcccttcctccttcctttcctctctctctctctttctttccttctttctttttcttcctttctttctatcctatctttctgtgtttctttatttctttcttgaattttaggctttattactgataatttggtagccactccatgaaatagttccatcaagggtcacttattgacttggaagtaaatgtacaaatcagaaaaattctgagtattgttgtattagtccattctcatgctgctaataaagacataccggacacagggtaatttataaaggaaataggtttaattgactcagttcctcagggctggggaggcctcaataaacttgcaatcgtggtgcaaggggaagcaaacatgttcttcttcacatggtggcagcaaggggaagtgctgagaaaaagggggaaaagcccgttttaaaaccatcagatctcgtgagaactcactcactatcatgagaacagcagcatggggataactgcccccatgattcaattacttctcagtgggtcccacccatgacatgtggggattatgggaactacagttcaagatgagatttgggtgggaacacagccaaactgtatcagctgtgagcctcgtctttttttttttttttttttttgctcttcagatcaacaatgaattgttcatgtaaaagaagtgctcaggctgggtacagtggctcacacctgtaatcccagcactttgtgggggctgaagcaggttgaccacttgaggtcaggaatttgagaccagcctaaccaacatagtgaaatcctgtctctactgaaaatgcaaaattagccaggcatggtggtgcacgcctgtaatcccaggtacttgggaggctgaggcaggagggtcgcttagcctgggaggcagaggttgcagtgagccgagattgcaccattgcactccagcctgggcaacaagagtgaaactccatctcaacaacaacaacaacaaaatactcagttcaagaaatcacttgaaattttcttctttttaatggatgcttgctttggaaatagtcaagctgcgtttaactatttgattttcaattcaatcaactggttaaatacattggacttcacacattgggattcattttgtgctgtttcctgtagaagaatcctgacattctaggatggagagtgaggaggatgagttgagtccatgcactgggtgatcttggaaaggatggagctgtcactccagtgacaccaagcttggagctctgcctgttgtaagaattcccttctctcaagacacacatgtggggcatgtcattgaacaaggctaaagcatcatgaaatacagccaaccatttcttccttgagcaatcaaattgctagtcataattcctaaggaataaaagcagatttttcggactaggaataatctgattgtgaagcatcaaaataagataattactttgaaagactcgaaaatcacatgggccagcagcccaatacatcatctccaaggtcacattacactgttaaagcaaacacattcattttacacctatgcagtcaagcttgttttctcctctgtcccaacctactatccatatgggtcccaattccccatctgtcaattccttttgttcttcacagttgagattttaatttcagggataataaaaattatcaccatcatcaggtttgggtttgatggtgtgttttgcttttagaagcactgtcatcctttcccacaatgcagagaattgggaggacatgtattccacacattttacaggtggaataagaagcacagggccgatggcaactggtctctcttgagataccgtctccactttaatgtctcatgggcagtcaacttctcatggcaaagccactgtctgggtttcccttcctcttccttaaccctgtccacttctaaagatgtctcactcattttcacatcagtagatggaaactccatcctttttcttctccagcacacacattctggttcacctttgtttggtttctcttttctcttactctctacacatcaccagtaaatctcatggccctcactttcaaaatgtgctcaaaacgctgcctagtagttctcttaatcgccaattggtcctagacaccaaaatctcttacctagattattgccatagcttcataactaaccctatcatcctcaactcttcctgtcccccagtagacactcaacagagtaactagagtgcttcttcccaaatttatcagtgtcacttttttgctaagaaccctccaaagccttgtatgtactgtggcctacaaggttctccatgactgagcccctcttatcactggcctggcttccctcttgttcatttccttcctacgaacctggcctagatgttattctataacttgccaatagaatttttgccttagggcttttgtacttactctttctgactggaatagattctctcatatatatccatgtatctttcatagacatctgcatatatatggttcataaataatctatatgtttattagagcttaactctcctttatgaaagaccaacccttttctccccgttcaacccttcctaatctttttatctttttttatccaaaacaattatcaccctctgaatcctttatatttttcttttgcttttttcctacgttcttgtacaggaatataaattccgcaaaggcagggacttaatttgttcactgctatattgtcagagccttgagctatgcctctctcatgcaatttttgtgcttattaatacttgttaaatgaataaattgatgaattcagagccatccaaagacagaatggacctccctggatgatagtagacactggggggtttccagtattggtactatgttataaaatgaacctaatgatctgaagggttggactaagctcgatgtcctttaaggacagcagcatagttgggggttgagatcatgtgtcagagataagtgatttgagttttttctttgatactcctgtgacattggataatttatttaactctcctaatctcagtttctttgttggaagggattttatgctttctatttcatagtgtggttatgatgataaaattaaacaacatgatacaaaccagagaacacatgtaagatgtttagcctggttcctgagacttacttaataaataatgtggcaaacattaactatttacttattcctatttcactcctatagctggtatgtctcctgcatactctggatgctcaataaactgttgattatgcattggtagtgtggttttcaagaaagggccaagcacaatcatgtctcttccagcctctggattctgaggatctgggaaaggatgggcccaaggctacccaggatgtgaatggactttttggctctttgttgggttatgtttttcctgccaaataaattgttagttcttttcctttaggcttccttctttaattctggtaagattcctgactctcctgatcctcacttggtctctaaatttgctctttatcttgaatttttttctcaaacctatctgtattaggccattcttgttgtgctataaagaaatacttgaaactggtcaacttataagaaaataagtttatttggctcatggttctgcaggctgtagaggaagcatagtgtcagcactgcttctggtgaggcctaaggaagctttcaatcatggtggaagatgaagggggagcaggtgtttcacatggctgtagtgggagcaaaagacagaaggtggtgtggggggagatgccacatgttttaacaactgtatctcatgagaactcactcgctatcatgagaacagcaccaagccatgagagatcctgcccccatgactcaaacacctcccaccaggcctcacctctgacattgggaattgcatttcaacatgagatttggggggatgaatatcccaactatatcattatcttgcttacatcttgacctttgcctctgatatttattttgtctaatgcaaatttgtgaacccctaaaaaattccaccacagattgctcatgctgactcagatttaattgggatgagtcaaataccagctccctcattcctatagctggtatttctcctgcagaaactggatgctcaataaatatctgttaattatgcactggtagcatggtcttcaaatgagttactaaatgaaattatcagaaatgatcacagccatatcaaatttgggcatatggaaatatcagaaagacatatgctgaaatataacagttatctaaggtggcaggaatatgggcaaacacaaagctattattctacagcaaatatttgttacacttagaaattaaaaagtaaaatatattttcttaaaaaaaatgccccagtaatgcatatggtaggtcctactggtgactttcttctgatagaagttaatcacttctctcagcttctgcgtctgcagattgaaaacagagagcacaatatctgtctgacatactctaagatttgaacaggatgatgtatgtatcagtctgttttcatgcggctgataaagacatacctgagactaggcaatttacaaaagaaagaggtttaatggacttacagttccacatggctggggaggcctcacaatcatggcagaaagcaaggaggagcaagtcacatcttacatggatggcagcaggcaaagagagagcttgtgcagggaaactcccatttttaaaaccatcagatcttgtgagattcattcactatcatgagaacagtgcaggaaagatccacccccatatttcaattgcctcccactgggatccccccacaacatgtgggaattgtggcagttacaattcaagatgagatttgggtgggtacacagccaaaccatatcaatgtatctgaagctactttctaaactggagaaaaatatatgagttttaggtgttttagttattggcattgctgtggagatggatgttatattgccatacggatatacaactgccatactttctgatcttctgtcttttttttggacacagtcagctctcattgggcaaacatgtttgatgtgctcatgttcaactcttcaggagagaggcctggaataaaaagctattactaattccgacaagattctgtctttcctggcacatttgtcctgaaacaattccttattgagactttccttgagtggctaaaaactggattttgaatcagtttcctgaggacttcctgtttgtggtcactcagctgtgtcctaattgattactcactgcatttgcatctgatgcccatcactgttcttgttctacaagctggatagatgctcttgccttgattaaagcagagaatagccctagcctcctcctggagatcgctacttttggcctctttttgtctgcaatgtgcaatttttctagaaactgagaagcagagtgcttgagatccattcacatttgccatcttccccacactgtctcttcctcgtagggaaggatatggccttggtagaatagtatgaccttccttttggcagagcagttcatgtggagggatcataagctgagggtcttctagtgtccattatttgtctttcgttattaagggacatctgctaagaccttcagtcctgagcaaggtgagccattccataaagaagatatctacacagagtgcctatgcattccctgggtctaaggatgcagctggggaaaatgtctaaatggattaaaaatccattaattatcaatccattgattaaccatcttgattatcatacacaggcacacaggtacagaatcttggaacttttgcacaagaagggacttgtgggtgagaggaaaaaatgagcctctgatggaaggaggtaacgagggaaaaagaagtagagagcagaaaggaagcatgagtggacactcagaagttgttttaaccttcccagaagcttccctttataaacagctagacagcttggttcaaaccaatatttggatttttcctgaaactagctaaaataaaagttccctaactaataataagcagcatttatttagtgcctaccatctactagagaactgacactgccctaagagcttccaaataattttattcctaatgctgataaaagaaaaactttacctcaattaaacttaaaggagtttattgagcaatgaacgattcatgaattgggcagcctcttaagccaaagtaggctcagagactccagtgcacccaggtggtagaagaagatttatggacagaaaaaggaaagtgatgtacagaaaatggaagtgaggtgcagaaacagccggactggttacagctcaacatttgccttatttgaatatggtttgaacagtgggttacatttcattggcccaacttggtgattggcaaaagtgtaggctacagtctgcttatacctccacttgttatagttcatgatgtacagaactctaacaagtgcaggtataaacagactgtagacctttaggcctgtgaacactgaatatctgaaacaggtctcggttaatttagaaagttcattttgccaaggttgaggatgcatacctgtgacacagcctcaagaggtcctgacaacatgttcctaaggtggtcagagcacaggttggttttatacagtttagggagacatcagacatcaatcaacatatgtaagaggaacactggtttggtctggaaaggcagaacaactcaaagcagggagggggcttacaggtcacaggtagaaaagagacaaatggttgcattcttttgagtttctttttcttcttcttcttttttttttctttgagatggagtctcactctgttgcccagactggagtgcagtggtgtgatcttgcctcactgcaacctctgcctcccaggttcaagtgattctcatgcctcagcctcccaagtagttgggattacaggcacgtgccaccacatctggctaattttggtatttttagtagagatggggtttcaccacactggccaggcttgtctcagactcctgacctcaagtgatccaccagcctcggcctcccaaagtgctgggattacagatgtgagccaccatgcccagcctcttttgagtttctgattagcctctccaaaggaggcaatcaaatatgcttttatctcagtgagcagaatagaatgggaggcagatttgccctaagcagtccccagcttgccttttccctttagcttagtgatttttggggctccaagatttattttcttgtcacaggccaaacttaaaatattccaagaggcagctttaggctaaacttgatttaacagtgatcaaattatcttttattggccccatgtttcagatgagaaaagggatgtgaagaaaagtaggatgagtcgcctaaagtcacatggtgagtgtgccagtcatctttcaatgcttgttctcagctcaatttctcacactgaccctgctctactctttatcacaggagttgcatagttcaggctcccttcttgattagattgcatatgctactgggtcatgggaggaaccagagaaagggtagaaaagggaggagggacaaatcagagaatacctgccaccatcacctccccacctttctttcaggccccacgtccagcagaggtagtgtctccttttcctgcttgagttcttgagtatgacttcccttggacacctctcccctccatggtctcagttctcaccaggctgcccctgctgccataattctagctccctctggatgatcctgggttctggtctctggtagcaacatctacttcttgtgtgctgcaaccccagaggtgataatggcttttttccattgctaatttctgagttgccccattatcccctgtgatgaactgaactgttccctctcccccaccccaaattcatatgttgaagccctaagctcccaatgttactgtatttcgatatagggcctttaaggaagtaaataaggctaaatgagctttaagggtaggaccctgatctgattggattagtgtctttataaaaagagacactggagagctcactcttgctctgtcatgtgaggacatgatgagaaggtggccctctgcaagccagggagagagccctcaccagaaactgactgtgctatcacccagagctttctgtcatttaagtcaccaagtctatattttgttatggcagcccacactgactagagttgaatttgcttcttacctttcccttaacttgtggtatatttccttgtattacattccattctctctggagctcttagaatgttctttcacctcctcctcctcctcctctttgtcctcctcctcttcctcctcctcctcctcttcctccttctcctccccttgactggcccctaacatgctaagtccactaggaagtttaaaactggaagttgaaccaagatctaattggacatcaaaatctgtgttcttaaaagctacactgtactttctagattgttttggttgtctgaagagatttgaggaacagccaagtaaataatatgaaagaggctctgtttgattaatgacactaagagggatggaaatggaaaaaagtttcaagttttcagtggttctaaatgtgacattttagacccatcctttgtaatgacaggctggaggttgggggtctctgtggagagacagcattccagttagtggccctgctgtcatggacagcaagaggggtagggatattgtactgatggaatgtggacattggtgttccttgacagtatcttgaatggtatcatgatatggcatgccaagccctgaaatatatattagcttggcagtgaatatttatgtttttcttttctgataacacatggagttataggctgttaatgtgggcaaggtacatgtctttaatgttgttaactattctcattctttgacaaatctttcatttctcccaagcaatatcttgttcacatctgttgccagaaaaagggattccaatccagaccccaagagagagttcttggctctcatgcagaaaggaattaagggcaagtccttgagtacagtgagaagacagagtttattgaagctgctcagtaacagagtaggccatcctcagaaagcaagaggaggaatatgccatctttgttttaaactctccttatgtaggggtcttatctatgtaaaagtaagctatgtctatgtttaggtggactgagagcatgacaacatttattactttgttgacttaaagaaagttttacttggcattttagtgagtaagtacatcaaagcatgactatagctatcataaaagcacacactgttatgtgatagtgtatcacataactttatctttaaagttatgggatctttagtgtatcacttttctggccagaaacctctgtggctggaggcacctttgcctgagttcttatcttgtgtacaggaagaatgaggtatgcttacaagtagagggtgagcaagacaaagagaagctttattgagtgttagaacagctcggaggagacacacagggggcagctcctgtctgtaggctggtcatctgattcagtgttcagctctcagcagaggggaggccctggagtgggtggttcctctctgcaggcaggtggtcctgtttggtctgcagctctcagcagagaggaggtcctggggaggttaactcctctttgcagctggttgtcctgtcctttgctctgttctggctgagcctgcggcttttacaggcctcagagaggggaagtgcatgctaattggtccatgggcagccacgagtgggcctaggataaagcaccatgagttccccctcctttctacaggactggcagcccagcctccaggcttcaggcgtgccctagcctgaaggtgaggcttcattggggatctacccacttccacccaggagcctgtctgcctcccacaaccatctattgcaccaagggacacctgcagggcagcacctagctgccctcagctcccctcagcttcccctctcatgctcctcagctgatcagcacccaaagtctggagggggccaagatggcaggaggctggcatgtcaacacttccccaagcatgtgcatacacagccaggttgtgacagcacctgggtttggccccaactctggtccgagattgaagcgcgtgccagggagaggccaggcagcaggaacagtcacttccaagcctgcaagtgcaagagtgcagggaggcctgggtctgcagccttggtttgggtggctgcacctacgcagggtggggggtggggtttctgtgtgctcctggctcccaagagaataggggtgcctgggctgcagctgtgactggggcggctgcagttgcacctggaaagctccccctcaccaggcacgtgacctggcctggccctatctcagcggccccagggcagaagctgctggggggagggtgctgtctgcctcctcctgcgccctccctgtagtggccagtgtgatggcagatggctcactgctgccatcagtattggtacatctggacattctgctgtcacagaagtttgtccttgctgtcatgactaagctgcttccttagccataaacatcttatgaccatgggttgtgactggtgaggaatgtgccttgctagttttaagatggagttgattttcaaatgatggcaccctggctctcatgtgctccttttcccctaacacttctgtccaccaaagttgaggaggaagcatatactttgggtgacttcattcacttttccttccttggccttactttttcatatgtctcgatggtgattttgaaattcatgtgttttcttgagcaaatcctgtaagcaaattcctgacaaagaattggcaaagcagtttgctaattgccaatgagaaagtgttactttagaatcatttatggcatatttaatgggtggctgatgaagaatggagatcggcattagctctgcaaatgtcatggacacacgatttccttctaatggtaatattcattcgaatatgccaagggaatgaactcagtgggtggacatggtcaactgctttcccaggaacatggtgattattaagcttcataatcaacaatgcccagcaaaggaaatttaatctcaaactatgatagtaacagatgacagtgcgtaggatgtgaaagtgccatacaaatttgtccaaatttctaacatgtgacattcaaggcattctttattagaactgtccaaacctgtctaattgctgatgcatagaaataatttctcttgatgcttaatcactttaatccagcctaaatacttccttcgttgctatcgctgaagaacaaagtgtcaatcaaaggcgataggcagatacatgttgctgctccccatgaaactggttatgtgttatgggtgaataactactagaagaaaaacttatttgttagggcattgtctacttaagaatctgagaatctgagaaatggaaaaatagagacatgaaatagctcatgcgccaatcagaattttaatttattttattttgtaaagaagataccacaaaatagtgttatatatccaggcacagattagtgaaacctagactgtaacctagggtaactcattgttgagtttaaaattcctgccatctatatagcaatgagttttaaagtaacacttccccagatcagttaattttgacataaatgaaaaactggagaatggggactacttgagactggctcggctcaacaggtagaaggttcattccaagggtgaacaagtgtagttacatatgtttgctgttttgtctattaaagtataaagtagaaaagtcatgggtttgatataaaaaaagcctgggtttattatgcccaaacttctgcaaaaaaatggtgttaaaaataatacctgcatgtatgtttgttatgagaaatcatggattaattacaggtgatgtgcttagaagagtacctggtaggtagtaaactcaacaatggtcactactgctatgagctgcttggatttggacatggccatctgttttagtccatttgcgttactctaaaggaatatccgaggctgggtaatttatgaagaaaaatggtttaattggctaacagttctgcaggctgtataagcagcatttgtgctggcatctgcttctgctgaggtttcaggaagcttacaatcatggcagaaggcaacggggagccaatatattacgtgagagttctcgagcaagagagtgaggtgggagatgccacacatttttaaacaaccagatctcatgagaactcactcactgtggcaaggacagcaccaagttattcatgaaggttccgcccccatgacccaaacacctcctatcatgagatttggaagggacaaatatccacactatgctaccttcatctctctgaaagtccattctggggaaaagggaagtaggatttatatgactccctggaatttgcatcagtgggtgaacgttacaggggatcagagattagaacaatgtaaagaagttggactgcaaacagtccaagttatctgttgggatggcttgcagcaaagtaacttccctgtcactgtagatattcaattataggttaggcagctgctttttaggcataagaaatgtgggttaaatattatcagctaattcaacctttagggttttatgattctgagtagcatatatatagtaagtaaagtttagtgcgaaggtatctactcttctacttcttgaagctttgctacaggtttaatttttgtgtgtatctcttattgacatggtaattaatatacatggctattttagttattacttgtatttatttgtttatttttatttatttatttattttgagatggagtctcactctgttgcccaggctggagtgcagtggtgcgatctcagctcactgcaagctctgcctcccaggttcatgccattctcctgcctcagcctcccaagtagctgggactacaggtgcccaccaccatgcctggctacttttttgtattttttagtagaatcggggtttcaccgtgttagccaggatggtctcgatctcctgacctcatgatccgcctgcctcggcttcccaaagtgctgggattacaggtgtgagccaccacgcctggccagttattacttttaaaacgaatattaatgacggcaatgaaaatttaccactaattaagtgcctactatttgtcagacattgttattctgtgtcttatatttgtaattttatttggggccactgagaagtccagttcagaagtaactaggcagccatagttagaaagaaatctggggaagagggaggtcagttttctatttctcttgctgatattcatacattatatacttacatagataaaagtaaattttttttttttttttgagacagggtcttgctctgtcacccaggctggagcacagtggcacaatcatgcttcactgcagcctcgacctcccaggctcaagcagttctcccacctcagtctcctgagtagctggaatacaggtacacggcaccatgtctggctaatttatttttctttttattttttgtaaagagcaggtctcccagtgttgtccaggctggtctccaactgctgggctcatgcgatctcctcccacctcacactcccaatgtgctgagccactgtttcccgcccaaaagttaataacttttaactttttgttcttccaaatgttagcacacagtattttaagtgcaaattctccttaagctgaattactgtttttggataagagtaagtttttgacatatgaatcgaggaagatataaacgcatcatcacagaattcaacatacacttgaattttccaagttaaaatgggaggtgtggaggtgttgtcacttgtatagagggcccaaccttctagatcccagggcaaagaaggctctttgtgctatactccgtggtttcaactaatctgtgattttccagaagagatgatgagcaattacaattaagcatattccaaagcactaatgcaaaccagtaattttaccctcctcaccgaaatttatttgaaatttgagaaccaataggaaaaggagcccttttcagtccttatctctttttgttgtcagggtttactctcttaggaatgtgagaacaccaaaagtagaacctatgatacttgaagttggcccctgacttgtgatcttgtgatctcaatgcagaatcaaaaattcccggtgtttgccttctggacacaatgttgtcactcgaattctggggcccttgattttctgttctcctcccactacccacctcacccacccacatacaaaacaagactatagcatgggcctatgtaagtggtccttcctacttagccctttagaatgattatgcttttcataagcttaaaaaaaagcctttttatgtagtcggctgttaattttttttcaactctgttctcttctaagataagaacgctaattagagttagggaatgatttaaggagcattacctaaaatgaataccttattgaagatatgatgtggtaacttttcaaaatacctcaaataagtcaaagagaatcctgaaagccctgcattatggtgttgaacacagttagcatggatctgggaatttcatgtcttcagaggcctagcacaaaaatatttctctctcttactcttaatatggttttaaataatttccatcaataaacttttttttttttttgacgcggagtcttactctgtcgcccaggctggagtggagtggcacgatctcagctcactgcaacctctgcctcccaggttcaagcaattctccagccgcagcctcccacgtagctggaattacaggtgcctgcctctatgccgggctaatttttgtatttttagtagagacggggtttcaccataatggccaggctggtctcaaactcctgacttcaggtgatccgcccacctcagcctcccaaagtgctgggattacaagtgtgagccaccacgcctggtcaagaaacttttaagccccatgattatgtagatggattcttgggtgtctaagcagcctatatagattaatgcaatgaaaaatgcagcgattttccacccaaattctctatatgggtaatgaaattatgtgtacactgatgaagaaatatatgtgcacatgagtatatttatattcatattgtgtacttattttggtaaactcatcattgcaatctgtattgaaattatatataagaaaattaaggtaccagttaatttctactctttaaattaaaaattctgtacctatagctgtgatccaatttaaaattcattatctttaacaaatggttttgattggctaccaaatgcctgttacagtgtggaacattttcataggtaacaccccatcacctcggcagccctgttttacagatagggaggtgaaggcttagagggtaaatataatggacccaagacacacaattttgctgtctacagcccgggacttgaactctcgtctgttatttttgccaagctctaagggttgaggagccctaaaaatagacaaattttaggcagatctaatagaataattcacttaaaaatagctcctggttccctttgggcaaattatataaaacactaggaaaaaaataacttgttctaaactggaacaaccaacctatttgttgtggaaatgaatatcctaatgttttaatactgtttctgtctgcactgactggcaatagaaggaaatgcactagaaataactctgtctattgaacatgaaagttactatgagaaaattgtttggcacttgcaagctgttgagatagaaagaatcaccacttattttgcatttgagtatttattcttttcctcaagatgcaaacacagtgccatagagaagtgatattgtatctttttttaaatgtaaagagatatgcaagtatattaaatgaatgatttatagtattcctctgttttcttttttttcaattttaaaagaaagaaatgaccctagcttaacatccttataaatggaggtggccacagtggatagatttgaggattactacaggactgaggttaagagtgtatgctttgggctgggcatggtggttcacatctataatcccagcactttgggaggctgaaatgggcagattgcctgagtccaggggtttgagaccagcctgggcaacatcacgaaacttatctctacaaaaaaaccccacaaaaatagttagctgggcagggtggcatgtgcctgtagtctcagctactcaggaggctgaggtgggaggatcacctgagcccagatgctccaggctgcagtgaaccatgatcatgccactgaactccagtctgggtgacagagtgagagcctgtcaaaaaaaaataaaataaaataaaaaataaaataaataaataaaaaagagtacatactctggacctttcctatgagttaaatcccagttctgtcatctactagtgtgtgacccagaggaagtttttcttaaaaaaaatctgttcttatatgttttaagattgagaataaatgaactttgataatcctcacaatatttaaagtaaaatagtgtctccaagacagtctactggcaaggtagaaattctgtttttcaatggcttgatgtcattgtgcccagagaccaattgtcgtcagaggaaaggtactcttatatcctaaacacgtggagatttgtgcttagtttaaatgtagtttctccctgtcactgaacatatttggacacatgaatttcaaattgctttctctttcaataatagtgtgatggctggcagtgacaacaaagtaagtaattttataagagaagaccattgtatctccaagctctagtcctcaataaacatttattgaattaattaatcaaccaggcaattgattgacttagaaatacttgcatgggttattaaaggtatgttgttctatttatttatttattttagagatgggttcccactactttgccagggctggactcgaactcctgggcttgagtgatcctcatgtctcagcctctggaacagctgtgactattggcctgtgccactgcagccagaggtgttctgtcatttttaaagaatagaaaatagtgatttttttttatggaatatgtggcaatattattgaatgtcttaccttcttaggaaagaaaatgaagtggttgaaaacaaagttagagctgaagagttaagtttctggtgcctgcgttggagagttttgctgattgatcctgtcatttttaaacaatatatgctaccaaaaaagaaagtcttctaagccccagggtccagtgctggtaagtgagatgattttaggtgcaaatgagtatttttatagtaatgattgtatatttaatgggcatttaaaaaattcacatagatcgtatcacataactccagcctccattcctacttctgataacagctcccagacttttctgtgaagagctgcagtgctgtcattggagtcagtttgggtgagactatcaatcaaggtgctcctctttgctagcaaaggtgtgtggcaaatagatgatgctctgttcctggaattccaatgaagtgtcacagagttttcagtttaatccgccctgtgactgcgtgatgattcctgcgacctctgaccctggggctgtccgagctcctctctcccaacccctgactcctctgctgatgttttcactctaggagttaccctgtgtccttccaatatgctcttttttattttttaattctgtatcactagatcagtttttttttttttttgctgattatatttaaataatcctgtgtcactttgcgtgtcatggatatttttgcttcagaaaaattaacatcttaacttaaaacataaattgttttaaagaaagaaatctgaatacataattgtacagataatactcagatgtagccaaaattgtgaggattggcaaatggctaatgattgggaaacaataaaaactgccgttaacaattagcttcctgggtatgtttaggcattaaaattggagttatcttgaaaaagtcattgaaaatatatcaaggattgtattattgagctgatcctattaatgaaaaaacatggacttggacaggataatgtgctaattaatatattaatggtcttcaaggcctaaaacaagttttgaaaaggggatgatagtatttccttggtcaagatcatgtctttttatttaaaaacacttattgcctatgtcacagaatctcatttttcttttctcaggtagggtattttatttattttttatatcattttccacaattagtaaaatactaaaggtgtaaatctctgtcagtcaaatcaagcattagtgatgcagacaatgtgtatgtgtgtgtttgtgcacaggaggcatgcctctgaggctggatagttccgggtaggagtgttagtgatgtcagccctgtccccactggacacatcgtcataaatgccatgagctcctctgtctctgtcccaactccaaggcacaagttatgaacccctcctttattggtcctcttacctagaggttctgagttctgttttgggatagaaacaaacactgaagatttctatcccaccagattcctatttgtatctgatgcttttatttttatttcaaaaatatgattttaaaattttgggatgaagaccgggctcggtgaagatgttgacacctgaaaatatcttcagcaattacgttttccaagtaattgctgtcagggaaatagcaataagatgtgcagtttacttatgattccccccaataatctatttcagggcaagaaagcttcaggtagtggagatttcactttgaaatggcataacaggctgggcgtggtggctcatgcctgtaatcccagcactttgggtggctgaggtgggaggactgcttgaggccacatagcaagaccccatctctaaataaaaataaataaataaaaattagaaaaagagaaatgacataagactcagcaattgactatgtttccaatatgacctttattgagcaagtactgctgtgacgtttaacatcgatcaacataagattgcaaactgtgcatgtcaacgaggttctcccatgaacaaaagtccattttaaatgcaccagtgaggtaaacataattattcatatatagctttcttaaggctgagttctgtgtttcgtttattgtttttggctcagttggtactttgcataatacatctcaagacatccccccttaagtgacccccttccaacagcttaggaaatcggcaaatttcccaggtacatacaatatcatgcatttgaatcccccaaagactgaggagggagcaccctgagcttgcatgcagtcccctcatattgcacaaagtaaaatacaatgtctggagcccccatgggagaacccgttctgttttgaagctgccaatcacatgcattttgaaattgtcatatggcttaaccttttgcaatggactcaaatcttagtcactctgggtgacttcctttactatggcgtgtgaagtgactttttctacctttttagtagacactagtttctcctcaaaggtctcttcatgctcttcaaccttttgagtgacggttacagatttagtgatgtatttggtagcaccatctcccccctcactggtgattttttctaccgttttggtcaccaccactttctcctcacttttatcaccccccttcttttcatctgctgggctcaagtctaggccattggtgacaacgcctttctcctcttccctcccactgcctttttccttggtctcctgctctacctcctcttttccttctacctccccattgacagctatgtcttccttcctggatcccttggcacctttatcactcccttcctcctcacttcctccctctcctcccgctttctccttctctttctcctgctgcagtggcttcccctcttctttggtctctttctccaagtgcacctttaccgatttggtgatggtgaccacctctgccacagcttcctcctttacaggggactcagctttcttcttctctggcacatcctttggtttctcttcctttttctctaccttctcttccttgggagcttccttgacttccttttcttcttcctctttctgttcacctttccccacttctgcttttgactttgcctcttccactggtgattttggcacaggagatttggctttctcttccactggtgattttgacacaggagacttgcctttctcttccactggtgatttcggcacaggagacttgcctttctcttccactggtgacttgggcacaggagacttgcctttctcttccactggtgacttgggcacaggagacttgcctttctcttccactggtgattttggcacaggagacttggctttttctggcttttccaccttggcatctgccaccagctcctccttggtagccacttcctcactcttttcctccactttcttttcctctttagcttcggcttcctctccttcagcttcagcttctgtttctccttcttcctgctcaccttcctctttttcactagagccttccttctcggatcctccctcttcggcttggtctgacttagctccctcatcttcttcctcctcttcttcctggccttcttcttcctccttttccccttcctcttctttaacttcaggtgcagttgctttcactggagactttttggcagctacttcttcttcttcagcttcgggttcctcttccttttcttctgctgcttctttcttctcttccttcatggaaacggccaattcctctgtaatggctgtcagggcctcttccatttctgacttctcatcctccactttggtttcctctatgatctcctcgacaaatttgtgttggaccttaagcttgggagcttccaccttgggtttctgaatcttactggatattgtgattgggggtcggtgtgtatacagtggcccagtgatgcttcctgcaaatgtgctaaatctagtctcttcaccctccaggagttttctaaggagaaaatccaagaacataagacatagtaaaaatttcactaggccttctgagcttcattacattctgggtattgtggtagctacctttgaataaatagaattacataagtagaatattctatgaattcactataatacctgctatcacttactggcatattacattatactcagtgacagagaaagattctcctggactgccagacagttgccccctacaatgactaaccttgcccaatagtccactaaccacacccagctactaagtcttggccctgcagtagagatccattaggtacaacatgaatatgctgaaaaacttgttagtggccaaatagcaaaaaacaaaaacaaaaacaaaaaaacaaaaagccataaacaaaacgcccccaaactccaaagccaaacagcctttctgagagtagtcactttcttaaacgtttagattttcaggtgtatcgagttataaatttgttgataatttttatcataaagtgtctatttaatgtagttattcagctttcctgaaaagagagatagctctgtaaatgcaatttattctcgttatattataactaccttattggtagcagaaaaattttaatcaacgattttgtcctttgcgcttagtcaacagcaaggtcacttcagttaatagacctataacctatctcactatctataaaacgatcatatatatttgtgtctatatatctagatttatatgcatatgcacatatgtgtatctatagatctagattaatatcatacatgatatattgatataatttatactacagtctagcataaaatataatacatataaattatctacatatataaaagaactatatctatattctatcattctatatctattctcagccagatgatggcaatagtaagctatataacagagaaacagagaaatagaacgtcctggtgtttgtccttgacattatacatttgaaaagctgaaaccactagatgaaatattagaaaccaaaactctgttcatgcttccagcatttgaaaacatttttccataaaaagtttaagcatgtgcattgagattaatctgcacctcctttgtgtaattcaaaaaccttttgtttctactagtattcattcttttaaagctgcataaaaagagataaaactacacttgcaattctttagaataatttctttttaagtaagcaagataaccaggtgctgagttgatgcctgcaccctgcctgctttaacttaagtggtggaagctctgccggaacagcctctgcactgcggttagtgttccggccacgcacgtagtaagcatcgtacctgtacgcagcgatttctatatccagagccatcttgacgttgaggaggtcctggtattcgcgcaaatgacgagccatttcccactttgtgccccgaagctcattttccagctgctggatggtgtcctgaaacagacacagagaatctccccagactcatccttgcaaacagcaacttccttcgcaaaccacttgctaccccttccccctggcctcctcccgtctccctccacttctgcaaacctcgctgacacctgactcccagccccccgtcccaccccctttttcttttaaatctaagcgattctcaaatgaacatacaagatcagtaagacaataggacacttcctgggcacatcacgcacggagaccagtggacttagaacacgtctcaacaggacacaaacatgcatggggaaactccatggctgacctggccattcccatctgagccctttgggctgaagccaattttgagagctcttccgatcactgccggaaaagtagagaatacacgcgtttctgcataagctatcctaaagttgctgatttatccactaccgaattcatccctcctgctttaaacgtgcaagcgtgcaaaattagaactggaaaagatgcacgtttctgaaaaaggtcaagacccttagcagctggggcaggtgggtgggggcggagtgtggaggatgagatgggcgaggacgctgatccgcaaataccctaggtctgcggcgcgcgtgctctagcgagcggccaccagggagcgcggcggagagggcgcctgggcacgagcccaagtgtcgggggcgcgcggcgctggcgctggcgcaggctggccgcgcagccgcggttcctacctggtagctgctgaggtcgtggttgtggcgctcctcgatgtcgctgagctgccgctccagggactccttggtgccgcgcaccgactctagctcgatgctcttggactgcagctggcgccggtactcggcgatctcttccttggcggagcggatggcctccttgttctgctcggccgcctcggtgagcttggcgtagcggcatttgaaccactcttcggcctggtgcatattctggtctgagtggctttcgagctgggagcggatttccttcagcgccgtcgagatgtctgtcttcaggtagtctttgcgctccaccgtgatgtgcgatgcctggatctgggccagaaggtcggccacctcctcctcgtggttgctccgcaggaaggccacctcatcctgcagcgactgcaccttcttgtccagctccaccttgaccagcgacgcctcctcgatgtctttgcgcagcgcgcggatggccgcctcagtgtcgtcgcgcaaccgcgcctcctcctcaaagcgctccttgagccggtggatgtcttcctccaggtggtccgagtccagctgcacctgagccttctcgtggttcaccatctccagggtggcgcgcagctcgcggatctcctggtcgtacgcgtcgcccagctgggcgtgcgaggcctgcttctgccgcagcgcctggatctccgcctcaatctccttattctgctgctccaggtagtgcaccttctctatgtagccggcaaagcggtcgttcagcccctgcagctgctccttctcgttggagcgggacagcttgtagtcgccgccgggtccggagccgccgttgagcagggacgaggactggctgaagtcaaggctgctctcggcggagctgagcatggccgagctgtaagcgaggcgcggggcgagcatgctgcgcttataggaggaggacacggtgctgggcgagccgcgggaccacgactgcgagcggaagccactggacggggagccgctgacgcggctgaagctcgagcgggtctcggttacccgccggtaggcggacgggttgcccagcgagtccaacgtgtagctcatcttggaggccttggggcgtgtggctgtcacagcgttctgccggcctcgccgcagcccatttatagccgcggcgctggtcccgggccagggccccgccccgtggaggcggcggccgaggaggcggggactgcgggcaccggtcggggaggaggggaggggggcggctgaacggtgattcagcgcccgctccacgtgggcccaggccgcatgggaacctggacttttctgccctgggcccagcccctcccccaggtcccctttcagtcccaggctacttgtagccgggcattcgccttctttccatttctcacctcccgattgcgtttcgcacccttggtgcgaatatcgccagcgccctttctttgtcactgtcccgccgttcaggcagcgcttccccgacccagtggtccccttgttctttagccttctaccctcttatcctcaaggctttctcttattttgccctttccctgatacttttttctttacccatcttctgtgcttaatttcatccccttcttttttggcccctcttctccttcctactctggcctttagtccagttcaccctgcccttctctcagccccttcctcggagatccttttcttccaatctttccttctccccgtctcctccctccttccccttgcattccctcttttcccctcccccaccctcatcttttcttgcctccctccccttcccccaccccttgtcttaaagcagctggagatgagcgccgaggagctgggtctagaagacaaaacaaaacaaaaaaaaagactttgcggaacggtctgcctgaaggcttcgggaaggggacaaagagaacaggccggggtagttatttgtataaaaagtgggatatggcgtttttaacgtttgggggacgtccgcagcttccgcaggggcagaaggtaaggcgcttgtgctcgctatggcgccggcagcaccaaggacagcgcccaggtcggcgagtgggaggtgcagccacccggggggcttgtcacccagcctggcctgtcaggttggcagggggcagggggttcccttccccctcttctctccgagtaaatacaatttaaacctgcctgtagtgactatctttgcaggagcgaagctggaatcacaggctaagacttccctgcaatgcagggttggcacaatggacagatcgcagattttgaaaacaaccaaaattcattaaagtcagttaacagaaatatatacttgtagcccagtttgagttttctaacatatggtggtataggaaatgaagagatacagggcctgaaatgtgaaggtcaaatactccttggaaaggagaatttgaaatctgttgggatgaaaagtccagggaaatatagtttttcttaagtttggacacagacaattgccttgtcatctttcggttcagtattccctatgtgtaactgcaatgattgaaaaggcatctgaattaactttaaattgatttaaaagttgcggaacagagtcaccacaaccttgaataaaatcagatgttttcccttcatttaaaatgtaatatatttttcgctttagattttaatgattgatttggaatagattttctatatcattaaacatgtttatgcaaacaagaactctacacagacttcttgctgtctggtgtactcctgttaaaatgtccctttattttgggtagtgctttgggggtaattcaggttaaaaaagttcagaatactacaagataaagtgaagaagagattgcagaactaacaacagcgctggggccacaggtacaagtgactgaatgtgcaacgcttgctatgggtgagaagaaactactgcttataaaaagtagggactccagaccgaaatagcttcttttcacagcatgtttccttaagtccctgttttattaaaagacaggatcatattcatcagtaagtaatcaggaaaggggtgggtttctagaggttttattttttatttttatcagctcccttggcccatctgtattaaaatagaaataatgttttaaacaggaggtgctaattttgggagttacttttggtttattaatatgaaactgcagtatcgcaggccatgtaggagaaggatgttctagtttgctgagagaccttaggcaagcagagcccatccatgtcttgagttgttgagagagacagatgatggaatgaggggactgacttgtgaatactgtaaaaacaggattttctggttttatgtagataaataaaggcaaggagaaagaaaattccctgccttctgtaaagtattgcggatgtcaggctggactcagcaggataccatctagataaggccaaatgctaattatgcagtaattttgcctttgttgcttattactttctgcttttattgaaatatataaaaatccttggcaatttcatggtgcacattcactgcaaactctgcaatgagagtacatggttaaccggcagccttctgctgttaattttctttagggctttggaaacgagatgactctgcagagagacatttacaaggaaacacatgtctaacttcacaattacccagttttgccttgtatctgaagtagctgagaaattgttcagcttccagctggttacagaaggaggaaagtgttgcgtacaaacaaaataagtcagttactcaggctacatctagtgcctataacttaaaattgtaacttcaatgtcacatgatatattgttcaatctgggcactacaggataatgcaaagaattaaaacagttgttttattaagaaaaaacagttcccatggcttaaaaaatgatggatccagtttcacatttagcaaaatgttttcttttatattaaactcttccactttaactactcttcctaaaggtgatttgaaggttatacccatcagtaaatttagtatgaaaactttttttaaaaagctataaaagatgtttttccctttttgtctcatagttttgaagaatatttaccatcttaatagttttcacagaaagaaatgcttttgcatttttttaaaccctaagaacactaaggctatgaaatcttctcaaaatattaaaaagagagaaaacaatcatggcaactcacccggattaaccacactgcattcatggaattaagtttgactacgatacttttgtaatttattctaaatagaaaagtttctcatatgatttagatgtaagacattttaaatgaaattatctctgaattgttgtttcataagctacagtctgttttgaatcactttatagagaaatacaaggcatgctccaatctatatgttccttcagtagggaaagtgaaaatgttaactttgcagctaagagatgatagccactgtcaggttttgtagggtgtcatctaatactgggaaaatatcatttgcaaaggtggtatatttactgggtcataaaataaagataaaaaataaggagttaggcattttctcccatctttccctatttccttacatttcttcttttaaatagcatttttggatataaaaaaatgcaaggaggatgggatgtaggaactggatagcaagaaagatactccagatggacaacgtcactttcaaattggtaggctgaatccatccaagatgagatgatctgtactttctttcaacctattgtgtcttgaacttaatccgtttgcctgggatctggttctagaactcataataattatttataacctgtcctctgctaattgtttaaggggttgttgatgtaggaagctagggacttagtctgccgaagcaggaacacaagaaaaaggaagctatattacatatttctacttgatcctcaggatgtcaaactttaaaagcagtgttgacttttgattttgttgttgtcaagagttgaaagcaaaataaaaatattctcaggggagaaagactgtttcttgtcagggaaattgggatgtatatgtatgtccctattgtctttgatcaaaacaaatccatctagaccacagtgttccttttctgtcattaggccactgaaatggtgtttgtttcccttgccaaatattttattctttgaatattgccttctatttgtcagttactgttatgatgaagttaattgaagtatttacaaaacttaaaacatttaatctttattatattccaaatgttaaattaatcagttttaaaattctatatctggaaatttcatgtgtgtggtgggggaaaatttagcttttggctttaacatagcttgctgatttttttgctgtgtaatgctttcacctctccactgtgaatcctttctgtgaaagccaggggagaaagatttagaattttaaaaaagtacttaatagagccttggtaaaagtgactctaaaaataaagttcagtagatgcataataaaagagtactcctgtattaattttcagcatgtttttaactgaacccattagctttacctataaagcagcaacagatgttgatgatatgcacttgaattttgaaaaccctgccttgcacgtaactgcaccagtgcagctatgaaatatttatgacatattttatcccaagcttaccaaggcctgacttagcaagagacataattcttttattagaaactcttaattaaaatgagcttcgtaaaactagagcagatcaatgatctttggaccaaatttctgaaaagagctaaacctgggaacagaaagtcacaaagaagccccacctaataattcagtctcattgtcccaggactgggtgattttttttcaatctctgcaaatttgaaaatcaatattctttcataatcctttgaaaatgggctcactgtcatagctctgtcttgtcacttagcttattaagaagagcatctattttagaatacttaactcacttttttggttaaaatttatatatatatggagtgtagaaatttgcaaaatggagagagacaataatttaagtattttcttctagtctttttctctgtaacttaaatataaataggatctttctgtttatataatcccatgccctgttttgtaaagtaaatatatctgaataagtagtgtgctatctttagaggaaagaacatggtcctgtttgccatgagagctggactgtagctcggtatttaacttgaatttttctcttaaaaaagatttggaaagactctttagatcaagaatgataaaataataatagcaataattaataacaatagtagatcgagaaagcctaatcaggactgatattaatttctgtctcttttctgcctgcctgtctctctctttggttattgagaggaatgtcatcatgaagctgagggcggtggtgtgacagctggaggtggtaacttgtaataacttgtaatgtggtctagtcaggcctaaatactgtgttcttttacacttagtagtaccctaaatcccaagccatcatcatcaccaccaccatcagacttttacatttggacaatgctttatatcaaagaagcaaagcaaaacaaaacaatgtattctcatctgagctgtgcacaaattattatttccattttagagttgattaaattgctgatttgtccaaggtcacacatctggaaagcagtggagcctaggccagaactcatatcttctgacacccatgccaacattagaacaagtttctttagtagaatataaaatccagtctcaatgagcatgaaaaataaaagtaggtggatcatagtcatatcaataaaaataactggtatttattaactactcactagatgcttggcactgtgccaaaactttacagagttctctcatttaatcatcttcacaaccctttgagatgacacttttgtggaaagtgcaattgagcacagaggcacagggaggttaagtaccacacacagcttggaggtggtggaatgaagacaggaatttaggagactctgactctggaggacagtcctcagcatgatcatcagtaggccatacccacgttaaaaatctcatttaaaagctaattgttgaactgctaggtcatattaaaaagattaaagggccagctgggtgctgtggctcatgcctgtaatcccagcactttgggaggccgaggcgggtggatcacgaggtcaggagttcgagatcagcctggccaacatagtaaaaccccgtctctactaaaaatacaaagattagctgggcatggtggtgcgcgcctgtagtcccagctagttgggaagcagaggcaggagaatcgcttgaacctgggagatggaagctgtggtgagccaagatcgcgccactgcactccagcctgggcaacagagcaagactctgtctctcaaaaaaaaaaaaaaagattcaagggccactatacattcttttgctgcatttttactatttatataaaaataaaacatttttgtattttttcagctaaacattatttcatcgtttctgactttattaaagacattaagaataaaaacattgaattacttgtctttgttatatcatattctaaattaattttctatgtaatttgaagtacataaaattcattcggctagtccatgctctatggatgatatctctaatcatgtagctattattttttctggtatatatttatcattcacatttatattcacttttggtttggtttttgggagatttttaatttgtactatacattaatttatcatgatatcatttatttacatttatgtatatatttatacacagttgaaaagacaatcttttaatcatgtattcacaatttttcgtagatgtcagactctttaaactaaatctactttgagagatccaataacaagcttttgaatcttggcagaagaaaaagcttggcccacaatcttcagcagcgaaggtttacaataggattgttggcaaggaagcagcttttaaaatctattaaaatagtgaggagccagacgtgaataattttaagtgaatctcttgatcatctattttatatactaaaatcagggttatgtgactgtacttacataggttgcctagagaccagtcagccttcatccatttttgttatttatgggacaaagtgctctgactcaaccttattttcatttgtataaatctgcgttggtttctactttatcagatagggtcaaagaagagaaccgtttctcatttttccagagcaaaagttggccttgaaaagaaacatctatgctatactagtcatggcagcaagcagcttctgtctggatctagattacctaaaattattaaggaatgaatgcctagtgataaaaatccttcctcagccaacgtgactcatttcatacaatttgttgtgttttctcttgcctcttggtaatatctgtggccccttctctcatgctctatataccttggaaacctgcacttttggaaactctaaagggtgagacacttgtgtactttcttgcacaaggtacactcatgttaccaccaagccatttgaagtttagtgaagaccctatatcatattagcgaaactcttctccttctggctagccagtctcttgcatgcttccacgaccgggtcttaggaaacctctagttacccttccctgtttttgacccatgcattcctcctctcagtccctgaacttgattgcctgtggtctagttgggtactaccacctgctggtcatttagataatgtctcaacactgaccacaaaattctaactgcagtcttacctatatttgtacatcccacagtgttttactgatagtgagtgcccaataaatatttgttgtgcaaatgagtaaatgaagttctatctttttccccctaaaactttcattcaacaaacaatgtcttcagtatcaggcactgtgctggccactggggaaacatgaaaggcaggatcttagcttggatggacacagtctactggaggattcaggcaagtaaagacctagttacctcgagggaactgtccctaacatagctagaggtaaacaacacgtgtcatgagagcacagaggatgggcgagtaaaccaattggtaagagaggaggaccctctgtgagagctttctggagcagacagcatctaaggtaagttttggggcataagcaggaattgtatagggaagaagaggaggggagggcaggcacagtgtcatcaaaaacctgcaagtgactgaaatagcagggagcataccagaatagagggacggggttatgtagtacaggctggaacgcatgagacacagagtccaggctggaaagaagcgggggacgtgtagctcaggagagaaaggaagcatttagccaaggttgacaagacagagaacatggagaccaggctggagagggaagaagaggagaggccatagggggcttcctgtgtcatgaccagacctttgcattcatctcatagctgattagaggcagttgagtatttaagagggatagtgatctggtcagactggtttgttagaaaaatcactttggcagaggcgagtggaatactttggtgggtgaaagggatcagaaggtggaaaataaacttggagactatggcaggaatccagatgagattagaggaagatgcaaattaagaaaggtggatgagaagaggcaggtactactagagtggaatggaagggcttgggggcagagggagacggcgatgccatcccctgcatttatttcctgtttctgctgtaacaagctgccacaaacctgctagcttaacagaacacacattaattctcttacagttctggaggtgagacgtctaaaattggtctcagtgggctgaaaccaaggagcgggcaggctgcgttccttccgggggctctgggagggaatcccccgccttatcttctctggtttctaggggccacgtgcattctttagctcatggcccgttcctctgttttccaaaccagcaacgcagcatcttcttgcctcactgacctctgctccatctcacatgcccgtctctcactctgacccccctgccttctctaagacccttgtgatgacactggccccctgataatctatattaatttgctagggctgccataacagactcagtggcttaaacaacagaagtttatttatttatttatttatttatttatttatttattttttacagttctggaggctggaaatctgagatcaaggtgtcagcaggattgatttcttctgaggcctccttaggttgtgtaggtgccgtcctctccctgtgtcttcacatggtcttcctgcaatgtgcctgcatcataattttctcttcttataaggaacctagtcattggattagggcatatcctaaggacctcattttagtttaaccacctccttaaaggccctatacatattcagaggtactgggggttagggcttcagcatatgaatttgggtgtggacacaatttggcccataacaggattcttatcttaatcacatctgagaagtctcctttgccatgcaaagtgacatattcatgtagtgtggggaatggatgtgaacacctttagagaggggccatttttcagcctaatacatcccccaaaatataaagtacaggagaaaaaccaagtctaggggttgaggctggatgctggaatttatgtatgccaaacctgtgatgcctatgaagcaaccaaggaaagaatcttccaggtgattgaatttccttgactatagagaaaggcactactctccactctgtgtactgcatacagtgtagggcctagttatatattaggctggtgcaaaagtaattgcagttctcattgaaagtaatggcaggctgggtgcagtggctcacgcctgtaatcccagcactttgggaggccgaggcgggcagattacgaggtcaggagatcgagaccatcctggctaacacagtgaaaccctgtctctactaaaaatacaaaaattagctggtcatggtggcacgtgcctgtaatctcagccactcgggaggctgaggcaggagaatcacttgaaccagaaagttggaggttgcagtgagccgagatcgcactactgtactccagcctggtgacagagtgagactccatctaaaaaaaaaaaaaaaaagaaaagtaatggcaaaaaccacaattatttttgcaccatcctaatacagtacttttcaatgattttcttaccccagttggtcttagattcctagctagattgcaagcccgttggtgctgttgtcttgttactctgttgtgtctaaaccactccaaacttcattttcttaatttgtgaaacagcaataataatagtacctatttcataatgtggttttgggggttaaatagtgtgtataaactgctagtgcctttgacagtgccagataaacagtagttattattattataattatgatgctcataaacctcccctatagtggttggcatcgctctgggcgtgtggtaggttttcatgtgctaacgagacgtatatcacataaccttttcatgaagagtttaaagacttgtcagagagataagaatttacctagggtaaaagagaaggaaattgatgtgctttagctcaccaggtttggcaacaaaaatgttagaatgaagataattagagacctattcagccacagtgttattgggtgcttgattttaggcacacagttcaatatcaagataagaggaaaaaaattatttttgcataagaccgagtatgtgcatgtatctaacaggacaccccttctttcccctgcactcaattttttgcatatggacatacataatgagatagaaagttgccaggttgcagattctttcttttgtaggagctacgtgttgccttaaagtgaacagatcatgttaccctgaatctgcatttagccttgaatatagatgaactcttttgtctcagtgacacaagtgacagatctggcaaagcacaaagctgaagttgcaaaaagatatagacaacagattataccgtaacaagcatttggtataatctatgaattttttgataacctaaatcctaattttcttgctaatataacacttagattcttatccattttgaatgcttaggtttatgcctttcatgttttttatttataggcagatcctatcaatagatgagaatcagagagaaacaataaatacattttagcaaaaatagtgtggagggaaaatagttatttttcacaacatgtttcatgtgaaaatatctgacagacagcttattttttttttggcaaattgctaaggatccagaaggattagaaagtcctcttcctcatgtcatttgtctaaaatactaattgtcagaacactccaaaacctcctgtgcttgccagagtttttttttattttatttttataatcagaaaaaaatacagtaatgtgcaaatctggatgcaaattacctcctgtttaattacattataggtgtaaattacccccaatgccaaacatttctgccctgggttccagaactgtgtgttgcaattacatctttcgtgctcctttaaattttgcagtggtaacaaatgtgtaataccaataattatgaaaaccacttgctatgtgcagctaatttaaaatctaggttcaggattctatatttgaaatgtgaaattcaaccctgtcaaatttccatcaacacttaaatctaaatggttcttctgttcacaatgtcagaaataagaagtgacaaagttaccaaaggcaaagactaagactctgggaatcagtgaacaggacagcatcagaaggttccgtgaccttgaacttcccttggccttagtttgctcatctgcctaatgggagatgatatctattctacttaaatgaaactgctttttcaaagactaagtgagatcttgcattagttgggtaaaaaggctaagctgattaacgagagacccaatattacagtggctaaaagaacaaagaagcttattcttcttttgtgtactgatcctggtggggaggtggcctgttttgtactgtgtggtcatcttggggttctagttggaaatgcgtccactatatctgggttcagaaaatgagattttaatgaattgattgggccagagggcatgcttagaattccgatattatggcactctgttcttcttgaatgtttcatccattactcaccccctatccagattctacccactagaccacagctccatttctgctttctcaggaagacttcattgcctcctctctcctcttaagttctcccagcatgtagttggcatcatgtgatttggtaattatcccagctcgtattgttttatattgcatatgcaaagaaatcttgttcctgcaattaaactttaggctctttaaaggcaaggacctcttcttactgctgctttatccttttccactttcctcttctcactgggtataaaaataacatgcaatgtacacgtcttataaatagacatatcgaattaaacaaaatcaaagagcacattagagctgtgatttcctagactcagaggaaacagagggttttgacccttttccttgttttttattaataacatggttaggtttgcttaagtttagattttggattcctgatgtcctgatcagacttctctatgatatcacttgggaactctttcctaagtcccgaagtgtaggtcaggtagtctaaaaacaagctggcaagagcctggaattgtggccctccaggtatgtggcttgcactagaattaattgttgacaatggcacttctggattctctccatatttctgcttgtcccctgtattatgaaggctgtatacagccacatcacctttataaaatacattttaactagaaacaatcacggggataattatgcatttctgcatttcatttacatagtcaatggccaattaatgtttggtgaccagatggtaaactggaaagtaattgatcttttccaatcaatatgtggaaaacagttgactttgaccttttggatttgcttatcttgaggtgttgtatataccacaagctgggcattacaggcacccatcaattacatcgattgcccttttgattttcccttgctgctgagctggagttgaaatcatgcattgtatctactctaagctggtttgcacagaggaagagaaaaaaggaggaagtactttggtgagtgttgatgtttgctagggaccattgtggacagcttgaacctcagttttcagaggaagactaagaggggacgccttaaaaactagtggtttctctcaaggaatctgcctcattcctgagtgtcaaggacagtcgtaatgggttccaatcacgcattgcctctgaaatcaaagtgcagcatttgatatcttgactgatttcttcttggcctgtaactctgctattttagacaaatctgcgtgggctcttgatagacaggtagtaaaaatagcaactgtgtcacatgtaactttttctaattaagcatttacatcacattttgtatttctaaagtgatttggaagcactcagattctttgccagtgacgatgcttttgtgagccatattggtgaaagcattttaaagctaccttaatgtaaaagagatttgagtgagcagcattggaacccactcttgggtcctagtttttttttgttttgtttttgattttgagacagagtctcgctctgtcacccaagctggagtgcagtggcacaatctcggctcactgcaagctctgcctctcgggctcaagctattctcctgcctcggcctcctgagtagctgggattacaggcatgtgccactacgcccggctattttttttttttttttgtatttttagtggaaacgggttttcaccatgttggccagactggtcttgaactcctgacctcgtgatccacccactttggcctcccaatgtgccaggattacaggcgtgagccatcgctcctgtccgggtcctactttttcttagctcctgatttgctctgcttcaattgataaaggaaaatgtggagtctgaggatgcagaaaaggcctttgaaagattaattgactctaggcgtaatggtaacaaaacggttctaggtagatgaaaattatcttgctctaaaaaactattttaagaggagaagtctacatttgaattaaaaagaagcattttcttaagtgggtgaataaaaggctgctaaaaatacaggagtatctcttggggtaatgctaactaaatacctcattaaaaatcacaatgtagaaaatttacccccagaaacgttgatacctttctccttggaacctaatgaaagatcctgaaacattattatttatcccattcttttccatctagtttataagaagataattatttcctttcatgtactattcctctggtttcacttttggtcattgttcatcatattttgggataacttgtagttcttacaatttaaaaattacctcattttttttctagtgcctaaagcctttctttgccttgtaccaattaggtcactaaaataaaaattgttccaaaacatggttatttgtaatttgagccacctcactgctcaaatcactccgtgatttttgtcaatttcatcttaataaactgcctcacataattgttttttaattcactcgctcatttattcattcagtcaaacagtcagttaccattccttggagtcctataatgattaatatgttgggctgggagctgtgggtttttcccataggccccagggtgaagggctggaagttaaaaagtttaaatctgaatattgtcagataagtttctgattgtcaatgaagggttgtttctttttcagaatgtaaaagtgactaagtatagagtccttctacagttcaaagcaaatgctatcccattttctcttacagtatgctagacagtgtggtcatcattggaaaattagaaacaaatgttacttaacctctgttctgaagaagccacagtggagacgacattgtgatatcattaggtggagaactccagctaggagcaatatatagaaaggtcaatcatgtttgagacactttatgtagatttgctttaatcctccagttgacactgtaaggccagtattgttgttcccattttagagataagaaaataggctccaagaaatgtgtcacagctagtaaaccaaagagctggaactggaacacatttttctcacatatatgatttttcttgtggattcgtcagttcacgccaatctggggaatactctggagttagcatgacaaaaataaaacacagtctgtatttttctggttccttcctataagcccggagcctagccccacccctgctcaagtcttctatctggatcaagtgacatgatcagatgggtgagtgtgtgtatttgggggctggtgtggatataagggtgggctgggaagaggtgcgtgggcattttctctagtttgtgagtgctaccttcactcattcatctattggagcacgtccattcctccctcactgaagccatttttcctttgcacttctgcagtctctgtgcggaggctggtgggtggaattatcctatgcctgctgggtcgatatgctcaagtgtaatttggccacaaacccacatggtcagttttgttctgaaaatctgctgattttcatatgttgcttctctcatcctaggattatgccattttccggagggtcactgggctgggagatcatctgagaattcccacagcatgatgagcttaaaaaccactgaagttgcataagcccccaaagctacaagatttatgtactctgacttctcctttttaggtgatcaaggggttaggaggttgagtgagaggaatgagtctaccaacgtgggtaaaatacagaccagtacctgggtagatctggatatacagggggcacatagcttggtgtatgttctggaattcagtttactagtttgaagcctactttcattttgtaagatggtaaattacagacattaagttgtaagagcttttacgtctttatggataaatggaccctgagtactaaattttgaccttgaactgcttaagacttctccaggatgatctgctgatcagtagcactcaaatatctgaaaccaaactcttggtcttctctcaccactcttcctttctctattcatgtcaccatcattttcccatcattcttgtctgaaatctgggtatcctatttgatgcttcccttcctagttttcctaccatcaaatctgtggtctagtcctgtcgttacatagataacatttcttcctagacttcactcaagatgtatctgtcagataacaaaaatgtcctcagcatcaaggcagatttgggaccggcacactgtgtgtcaagacagtccaccgacagtatctatgtcaacagggacagagaatgacctgcccactcctagtctctttatgcaaaagacagcctgaataatcaacttcttgatgttcttctacgttttctgaatttttttttttttttaggggaaaaccctcttcttgatattagcagggcttgtccatttatgcctctgatccacatagaatgctttgtctggccaaatcataggctcttggcagcattaagaaaatagattcaagatcatctggtctcagtttgtacgtgaaaaaatggaaacgttaaatgacttgttcaggtgtatttacctagaaaacagttgattttggaatccaaatgcctgtctcctaattccagagatgggactttgtttatttgacacccacttttgtttatcttctaagttgcagtgtgaggagtgcagtgcagtatgtgatggaagagaaccagcatgtatgtggtggggtgaaagacagacagaggtgtatgaattcacattcttctgctatgcacagtcagctatgggcacctgtaagtacagtctccaaggccactttgctcatatgtaaaaaaaaagaaaagagaaaggaaagcaccaggctttctttctcagttttctttttgctataaatatcagagccatagaaaccctttatttatcaaatatttattgaatcagctctgtgacaggcaccgtgagaggagccggagatgcagacttgagtaaagacgtctcaacccccaggagttcaaagcctagttcaccttctcctcacactcattgaagacagacaaatcttaatttgtaaaaagcctgatttattgaacagaataatgacaattgagaggtggaaggggtcttaatatatattatttagtctgaacttataatttcacaggtaaggaaacgggccatagcaaagttctgatcttccaaaaggccagaacttgcttcttagcatttgagttaaacctagaattcagacttcctggctcctaggcacgatttttacaattatactctatttacctcaaagtgggctgagaaaatggctgaatagctgttttcagaaacggaaaaatcaagtgagaaactgaaaacaaaaacccatgactggcccctgtaggcagagttgagtggggtctggacacagtttgtagtttgtttttaagtttatcaggaatttctaatgtgcagcctatgttgaataatgatgatagtagaagctatacaggatataaagtgaataagacatctcttgatctccagagactccttttattttattttttaaaggacagggtcttgctctgtcacccgggctggagtgcagtggcataatcatggctcactgcagcctcaaactccaggactcaagagatccttccacctcagcctcccaagtagctgggactacaggtgcatgccaccacacttggctaatttttaaattttttgtagagactaggtcttgctatgcttcccaggctggtctcaaactcctggcttcaagtaatcttcctgccttgttcccccaaagtgttggggttacaggtgtgagccaccacgcccggcctagttgctcccttctaatgggaggagagagatgccctttatgtctaccatggctctgataaaaatgtatcaatgtaaagtaaaatcatttgcattttaatcttgccaattaattctgtagagttgtagctttttactttatcagtgattgtttcttgaaattgagttggatcttatttatatgcctatattatgtctcaattttaatagtagacttaattagatttcaaggatagagtttattccactttccgaatgaacttactctctgatttaattataacattggaaagttgggtggctctggtgaaatgtagtcttccaactgaaaaaaaaaaaagaaaagaaaatgagtatctttaaactatgaggagatcaaagcctaaacataattgataacaaacatctttcaaccttatcttctctgttctacccgaactatctcagtgtgtttgggctgctgttgcaaaataccatggacttggtggcttataaacaacagaaatgtatttctcacagttctggaggctgggaagttcaagatcgagatacctggtgaggacctgcttcctggtccatagacagctatcttcttgctgtctcttcacatggcaaaagggaagagagatctgctctggggtctgatttatttatgtatttatgtatttattgatttatttatttagagatggagtctcgctctgtcgtccatgctggagtgcagtggcgtggtctcagctcactgcaagctccacctcccgggttcacaccattctgctgcctcagcctcctgagtagctgggactacaggcgcccgccactatgcccggctaattttttttgtatttttagtagagatggggtttcattgtgttagccaggatggtctcgatctcctgaactcatgatccgcccacctcggtctcccaaagtgctgggattacaggctctggggtctgttttataaggacactaatctcattcatgaagactccacacttatgagctactcacatcccaaggcctcaccacctaatgtcatcatactgggggttaggatttcaacatataaattttagagggcacaaacgttcagtgaatagcatcaacctagacaactctttaattattcattggttttcttccttgtggttagagcacaagtaggggtcttaggggttgagatgaggggcacttgcttcatcatgggactctgtcaaatatgtaaaggagcaaatttccccttgttatcagtagctccttagctcccttggttcacactaagctttctcttgactgcccatatttcagacagtaaccagctaccttctgacttctcattctacatccatagtttacagaattttactgatatatcactaaagaaaacttttagggtaggaccccaaaagttacctatgtgaagctgcaaattagaaataaaaacctgtatgacataggtaaacctttgcagtgctggtttcattaatgcttacattaactgcatgtctcaaagttaaatctaatcgacttgtttaagacaaagccagcctgtgggctccgtggtaagtctgtcctattccaaatttctttttttttgagacggagtctctctctgtcacccaggctggagtgcagtggtgcaatcttggctcactgcaacctcggcctcttgggttcaagtgactctcctgcctcagcttcctgaatagctggggttacaggtgtgcaccaccaagcccagctaatttttgtgtttgtagtagagacggggtttcactctattggtcaggctgatcttgaacttttgaccttgtgatccgcctgcctcagcccccaaagtgctgggattacaggcgtaagccaccacgcccggcttccaaatttcttaagctggctactgtgtacatggtttgctttcccaaaatgacattgtttgtgagttcaaggacagatccttacttgaaaacagctctccgactggctcgttggtggtgtctgaaactgtacagtgaaaggaactttaaaagcctgctattagcataaagtacttaattgaactttgacatcttagcagtagcaaatattattatagaaaaacaagagggatttgtgatgatatggataaaacagtgataagagacaggtactctgtctacttggtgagaaaatgtcagtgactatcgtaatgatgactattgagagtacatcagttggggaaaaaagagattggaaaaacctttgggagcttggcaatagcttgaaagtctagaaaacaggaatcttctgacagatgtcatgaaacatattgagtcaattttaggactacaatgacttatttaaaaatatttaaaaatatttatttgctatttccctgtaataatccattccaattgcataatcatttataacttacaaataattcttgcttcacaatttcattttgtcctgtcggcatcttggtgatgttaactacttctgttttatagataaagagactgagcctcagagaccctaaatgatgcttcaaggccccaaggtcagtagagtaataaatctgaggccatttctcctaaacgggggggaggccaaggcttttctcacgattctgcattctgcggacacttcagatggctgtaatttcatgtgaatcttactgtgtcccacgttgattggaaggtactgtggccaggggctatgctgacccttctcattggtttctccaagtgtctacagtggggcatctcagtcttggcggcccaataaaatccctgaggctcgaggctcactctgagacattctgatttaatttgctgaagatttagcctgggtattagtataattgtaaaaatctccctgggtgatgctgatgtgtactataaaccagattctaatgggcaggatcaccggtttatagtaatggctctcagtatgccagaaataggggtaggatgtttgtttatgagtgtgtgtgtgtgtgtgtatgtgtgtgtgtgtacccatgcccaccagattcacctaccagactttcaaagaatattctgaacaaggctctctcccctgggtgtatcagagatattgtctttgttcattacagtgtgatggggtcaggagagaagggagaagggtgttagatagagatttgtattttgaaaaaaaattatagatgattttattaatgacctgccttcttgcaccataaaaatacttcttgtgattgtgaaaacataaagtaccctcaatggttaattaacaaactgactgatttttcttgttcacactgtccaactacttggaacaggtagagttgtgcatcctaagagctgaggaaatgaggatgcagagaggaaagttaccctttgtcaggggcagaatgaactgcagagtgaatctttctgaaagacttgacttcagggacaaatcttcaggaactgaagggagattatcatctttatcaaagcattctggctaccaaaatattttcggagggttgtctggttcagtcgttcacgcagcaacaatttattgcatgtccaatatgtgctaggcacctgcctcagcactgaagatgaaatggtgagcaaagcagatgagtgctaacttgtggttccagaaagttcgattattgtatggagagaatgcttcagagagcccttgagggcttgcaggtggctcacagcacatctcagcatctgtggttgcaagagcaaggttcggggtggctggctagagtcaaaagaactagtgacaaagttagttagccaaacgatgccagctccaggggaaccagcagcctggagtgtgagacaattggggctgaactgcaatggacagttaggaaaacatttctacagtcagcactgccagtttgcaggttcagctcagtagccagattaggaattaaatatgcagacagttccctctactgggaagatgctattactgcataccaagcgccaggtggaaacagagatggcagtgagattttctggtttctgagaggcaccccattgaaagtacagatcaccccacaactcttgcgcatttacccctggctcctttattacatttctctttttactttatctggccatcacactgtcttttcagccaatcgcctgatagtactgagcgtgcactgggataggacaaggagctcctgtctggaaggtgcctattgtcttgttggggagaccaggcatgcatacagaaaccagctgagaagagctctcatgtgtgtccctctttcagtttttcctttgaagaggcttctttcctcttccagtttcctcttgtccccctgaatccatcctctcataatctccagcctagacaaagacagtagcccaaggcctgttctgtgcctctgttctctcatcgtagccaggtcatcttgctgcgtgcccttttgttatgcccctcacttgcttaatttaagagcccagacttgtgtggacacctcttagttactgtattactttgaaagtgactgcttattgtctgttcctctagcaaggtgtaaactcattaagagcaagaagtgattctgatggagcgataggcacataggtattttctctattactttatgttggaagtccttctatcttagtcttttttcttttgctagagggcagggaccttatttaattcatcttcgtttccttaacatttactacagtacctgctaatacttgggtctcaatgaacattctgatagaaattctcgaacaaagatgttgataacagcattattgataatttacttaaaaatgaaaatgaaaaaatgtattcaaacatagaggaacaggtaagtgaataatgttatctccatggtatggccagttattagtcaataaaattatactttgagggatgttcaaattcatggtgataagtttttcgtatcatggtaaattaaaaaaggaagctgtttaaaaattgagctaacctgtacaaaataggcacaaaaatagtgttggaaggaaatactaaaaaatgttaacagtggatctctaatttcctgtgggtccatttttttttctataatgaggttatattacttcttcagtcaaaaaaaacagctattactaaattccatggtataatcagtccacgtccatttttttttcaaggccattaggattccctgttgcatatagaatgaaaaccaaattgctttgtttggcaatttagactaggctcaataactaccatttagcttcatttttttccagtcttctttttctatattccatatttcagtcatattaaatttcttaatagtttgtattttaaaacaattttattaaaaatgcatacccaatgataaaaattttgaaaattctgaaaagcataaggataagcgaaaagtggctgtgagatagacactatcaatatttgtcaatttcctgtcttcttatatatatcagaattaatttgcttgcagatttatattcacatatgttttatatgtaaatactttgccacatatatataattctgcatattttgtctttcactcaaaaagcatgttttctgattgcattacaatttattgaaaattgtttttggcaaataatctctctccttaaatgatctcattgacttcgttgagtttaaatgtatatctctggctgagaattttcttttttgcttaataccttcctatcaattaccagttggacatctacatttgttactggccaggtccaggtccattctgcccaaatggagtgaatcaatcactgtggcataggttttgcaaaagaggaaagctttatctgtaaggccaccaagaaaagaggtgagaaaacagctgtcaaatctgtctttgtgaagataaggcttagggatattgacagtttaggggagtgggtggtctaagggatgggaagaggtggttggtagtgggggcaaatgaagtaaccaattcattctacacgagtgtagtcagagttcatggcatttcataggacatatgcacaggaaatggtggtgttagcatgatctggaggagttttttgccctctgatgtcaaaaggccacctctcgggtacttgcgcaggcccagttgaagggttagtggtctcaaccagtttgaatgagataggaggtggcccaagttcctgaaaaacaactgaatctactgttgccatggcgacctatggatgttatctatacagtagccagtgaaggttaagtttcagtgttcagtggtgtggcctttagctgctacagccttcagcttcacagaaaaatgaagaaaaaaataatgaaaaacaagcaaccaaaagcaagcaggcaggcagccctgatcaaattaacccgttggtttcacactgattggtatttcaaatgtaacatgccgtaaattggacccaatcctgcttctcctcaattcttcccaatttaggagttgagcacgtccattgaccaagtcactcctgagagaaactccgaagttatacttcacatctttacttcctgtcgggggttgaattatgtcatctctccttttcccccacaaaaaagacattcccaataaggtcacattcacaagtcctgacccccagtccttgtgaatgtggtcttatttggatatagggttcttgctcatggaaccaagttagataagctcataatgattcgggtgggccctaaagccattgactggcatctttataagggaaaaaagaatgagatttggatacagagtctcagaggcgacctagaggcaatagggccatgtgaagatggaggcagagactggggggatgcatctgcaagccccagagtgccaggagccaccaaagctaggaggaggcgaggaaggatcctccccaacagcctttggagggagcatggccccgccaacaccttgatgtttggacttctggcctccagaactgtggaaaatacgtttctgttgttttgagccaccaggtttatgtcgcccaggctggagtgcagtggcgtgatcttggctcactgcaacctcctcctccccggttcaagtgattctcctgcctcagcctcccgagtagctgggattacaggcgcctgccacagtgcccggctatttttgtatttttagtagagatggggtttcaccatgttggccaggctggtctcgaactcccgacctcgtgatccacctgcctcggcctcccaaagtgctgggattacagatgtgaaccaccatgcctggccctctctctttttttttttttttttaaacaccattccccagtataaaccaccttcctgtatgtctcttccatgccactctaatagccttcctaatgacctcgctcttatcccaatccttataacagcccctgtgagcttccaacaatgtgtctcccataccaggtctttcaatggcttcctatttcacctgggaggtgaacaggaatccctcaaaatgctaaatgatcctcctcctgccccctggccagcccatcacctgctgtttcccctgcttgccactcgggccaccttttaggtcctcaagtgctttagtctcctgccctcctcagggccttcacacgtgctgctcccttagcctggagtgcccttgctcccacccttcctggttaactcctaactgctgctcacccttctgttcttggagaggcctctccagactacctcatatatattacatttctgttgtcatctctcatgacactgaatacgtctccatggccttatcccagatggcactttatctttacttttgtgacagttggcttattgtccactgccccactgtcctagcttctcctctgatctttattttcatctactagagcagttcctgacacaaagtgaatgctttgaaactaaatattcaattaaacatgttccctctgactgcacctcaaggttattgagaggactcacaatagacaatgcttaaacccatctgtaggtcttgaggctttgaaagaggctgatgttcctgtgaatatgatggtgagcaaaagcaaagctggttaaatatgacctcttagaggaggtcagtggcttagagtgagggctctggagtccgttgcacttggatttgaacgccagttctgctattcataaatctgtgatccagggcaaattgtacccatcattggtaaattaggttaatcgtgcctacctcccagaattgtagggattcactgaaagagtaaatgcacacggtcagtgatcagtagaacacagctgcttttatcctcctcatttttgccatcaaaccatcattcctaagactgtgttttcccacttgaaggttgctggggagttccttgtactgtgtttgggcctgcagtgcctgcctaaaccatttctgatgaagctacacctttgggtaccatgctttgtcccacctgcccatctcaggcagagacggtctctgcctcccaggcattccagactgttcctggccttggctcctggtctccctctgagggctgtcatgctgcagccagtcccagcgagtgccaagctttagcccagacaccagagagtgagaactctggtgagaggctcgtggcaggaaggaggaggcttgtgggaagaggtggaaagggtagggttgggggtggagagtgcaggtgaggagcgggaattaaatccagcttttgactctgtaaaaatttctccaggaggagtagtctttcaaaggatggttcccagagtgacagcctgggctaattgcctggagaaataaacgagaggacaggcaatgaataaaagccagctctcagcaggagtctgtgtatcacatccttccttttcacatttcatgttcatatttaaagctcccatccaaagacccataaaacaacagtctctaccggtaatgatttcctggaggccccctggaaagcattagaaaagatgtttccttttaataggcttttcggggaagagaaaatcaataatttctagggagatgctttacagatgcaaatttatattatccaaatactcctggttactaccctatttcctctaagaaatggctgcatgttaatgttgtctctggtaaagacagacaatgacttgcagttctcaatatggatacaatgaaagacatgctcaaggtagtagataccttgcagagccttcttacgtggtcttagttacctctagctgcttttggctattgcaaataaatttcttcacgtgatttacataatggaatatttaatagaattattctttttaagaccctgacaaattaaaccagtacctaatgcagatagctctacatttaatagaggcttgactaatgggtctgtaataaagatacactatattataaggacctgggaattgaggtataatcagaagatgagttttctaagaacactgcttttcaatcaagttgtaagttgctttgaaaaatcaaattcattagtggccagccatggttctacaatctgcagatgtggttttctcttttctccatctttgcatattttattctaatgatcctccatctgttctttcttctgagaaatgggctaaatttcagaaaatacaaatcagagatgaatgtaaaacaaaggtgtctctcatattttaacacaccccgtctctccatgctatcccacagcgcagcccccaccatgcttcacaccatcagtctctgttccctctacttggagaagaccttgtccattccaaagtgaagtgaaaaaagaaatgtaggaggggaaacctggacattccatggacgcgactgggggtggttcaaaagagctccttacccagagtgatgggcttgacattttgtccttactgttgtccactgaaaggttaaataacaggtagtataacttacataattttaaagttctttttattttgagccaaggtggagtactaacagcccaggaaatacggactcagcacaaactaagaatgtgtcccagagtgacctatacaagacatagtatttttttaattttaattttttttttataacatggggtctctgttgctcaggttggagtgcactgatgcaattacagctcactgcagcctcagcctcctaggctcaagcaatcctctcatctcagcctcctgagtagctagggctacaggtgtgcaccaccatgcctggctatatatatatatatatatatatatatatattttattttttttggtaaatttttttgtagagatgagggtctcactttgctgcccaggctggtctccaactcctggcctcaagcaatccccctgctttggcctctcaaagtgttgggattagaggcatgaaccactgtgtctagccataagacgtggtctttatacgttttgttcatagaaaatggaagaatgggggtagtgaagtaaaggtgatatttttataattctgattggtgcacagtgacgttagatataagacaaaacaaatacatggtcagcacatataggttaatgagcatgtagatgtgttagggtctagagagggatgattgattttatcttgcctttatgttctaatgaacaaaattataatcagtatctgtcgataaaatatttgacaaactcttgctttgcagatgagagttcagatttaatttataggcctagtttttattacccatatgtctcacctatagtcatcttgggtcactttattttatttatttaacattttattctaattttccttttcttgacactgttgctaatctgtggatgactttgggcaggtcctttatcccctacattagttatctctctgtattagttatctactgctgtgtggcaaattacctccaaatttagcagcttaaaacaataaaggcttattatctcagattctttctttttatttcctttttaacaaataggatttgcaccaggatcacataatttctaagggttaggaatctggaagctgctttgctgggcggtttcagctcagggtctgtccttgctcttcccactggcctgcttacaattcccatcaccagccactacctttaataagggcactgacactaccagaaaataaaatacttttggaagagacatttggaagaagaaaagttaatgcaatgtacgattgtcagctcctagcgctcccctccaaaccagctgaacatgttttggctccttcgcacaggtgagaggccacgtggcaaatgcaaagtgcctagagtgtaaagtagcagaaggctgccttaaaaccccagcttccccacgtacactgtgagcctggccaagttccctgagatctctgaacctcagttcctcgttcgttacatgacggaaatcgtgttgacctcatagggtttactgtgagaattgaatgaggtaattcctttatatgtatatgtaagtattttattttatattcaaggggtacatgtgcatttttgttacaagggtatattgcttgatgctcaggtttgggcttcagttgatccccaaacggtgaagacagtacccaataggaagtttttcaatgcttgtttcccttcctctctcctcccttttggagtccccagtgtctattgttcctgtgaacgagataaattttctttttttctttttaatacaggctcttgctctgtcactcaggctggagtacggtagcactgtcgtagctcactgcagccttgaactcctgaactaaagcaactctctcgtgccagcctcccaaagtgctaggattacaggtatgagccaccacacccagctagttttaatttttttttttttttttgtagagacggggtttcactacgttgcccaggttggtctggaactccaggactcactcaatcttctagcctcggcctcccaaggtgctgggattacaggcgtgagccaccgtgcctactcgaatgaggtaattcttgacaaaataaatgtgtggctagtacatcttaacatgcttttcttgctgtacttgtctctgtagcaagtgctggctgtgcattagctttcttgtccccttcacccctttggtagtggagcctggagagaatttacttgggaactcaagtgtgccagcaaaggagacacaattgatgagggtactaagcacactgtttgggtgatgatgtttttcaaaacaatatcattagatcttcacatacagagctgggagataacatagtccctatgacagatgttagactaggaccccaaatgacctcgtatggtgtgccagtgtcttcttcatttgctccaaggacacagcatgaatagaataggctttgccatcagcaagggccctctcctagtttttccctagcatttcagatgcttggcacctgtaaccggattttccctgcactgagagtcagtgtgtcttgatgaaatgagcactggtttggagtcagaagacctgggctggtatcatgcccctgcagcttagttgacatgtgtttggatgagtcacttctctgaacatatctttatcatctataaaataggcatcctaataatatttcctaaacacttattctgacaaggttttatgaggaccagaagaaataaggaaaggcaaagctttgtaaatcggagatgcctcaccagcactatcattcctgtgacttccgatcaccaaggagaagggaccagcttttagcacacagagcctgggatggtagaatgccagacatttcacagtccattgggggtgatctatggcagatggtgttcctagcacctttttcaaattggctttactgatctaatcacattatggaggcagccacttgctcagccagaaaggcaacattaatactcaagacaatgctgactcagttacaggcttaagcatgcttagcaattatagctgttacttattgagtctttcaaaggtggcatacatggtgccaagcacttgacatgcattatttcatagccaggactgccatgtgaacaatttcagtgtgtatgaatgttctctggagttgtgcagtgcccagtatgcttgactgttcatggaagtcctgctcacagaaaccctatgaggtatatttgcatgggcttgttgaggaatcttggttatctaatttatggaagagaaaataggagatttggagtaattaacattttcatagccataataccaatgggtagtagagtcagaattctaaagcctctgcttttattactatgctatgtattatttcatgggtttaatgaaattggcaatgtctttgagccaaagaccacgaggagcacacctgtagttgaacaagttgggcttattactcctcgcagtgaggaagaacacataccacaaataatttgtctaagatttgtgcttgggttaggtgatcttggggaaggcttatggaagcagagctttgctctggatttgatgctgctaggaagcagagactgggtattttaataacttcactaggcagggcagactgctaaacagctaaagctattaatggcaaagaagcaatagtcatatattaactaggagaaggggatgtttggcattttgtgtcttggacaatgtccgttaactgttcaaacatgattatgagggattttgtttttgtcttgatccattgtggttgcagagtggacttgtctgatgttcatgttctaagaaatcgtgcgtttgaaaggagaacgctaatggctagctgtatcaggctagcccctgatggttttctatctctcaggataaaaggactggagggcactggggtatacacctgttaagtgcgttcagctgtgtagctcaaaagtgatgctcaccgttctgtgataaaagaggcaatagaatatgcagatgccatgtggagtcatcacattttactaaataagaaacactaaatgagaatcagaaatagctggttgtaggaattttaaaaataggttttgttttgttttgttttgagacagagtctcactctattgccgaggctggagtgcaatggcgtggtcttggctcactgcaacctctgcctgccaggttcaagcaatgctcctgcctcagcctcccgagtagctgggactacaggcatgtgctacgacatctggctaatttttgtatttttagtagagatggggtttcaccatgttggccaggctgattttaaactcctgaccttgtgatccgcccacctcccaaagtgctgggattacaggcgtgagccaccacgcccagctaaaaaatagttttttttacagcttagtataactcatactttttctcacagcacaattgtctggtccagacggcagttcctatgttaaggtgctatttaaccgtttttgaatgattcaagtcagccttgatgagtgaagatagtataatatggtggtaaacatatatgtttggcaatgaaagacatgggattgagatccatccatgacataaggagcttctgcggatgaagaaaatgtatgggaattctgtagcaacttgaggttagaaggtcaagcatctatgacacatccatacagagaggttgatggaacgagaactgttaagatgcacattcttgtgatgcataaggagagacataatgatttttacagcacaatcatcatgaaagataaaatataagttgaagaaatggaagccatctgagcaaggagctaccctattgcggcagggattggggatgagatagtgagaaattcagcttttagtttatttttagagatgatgtgcccaataaaccatgggcttaatttatctgtggcttcaagatagtttgtcttagggaagtgaaggcaggtgaacatcagccataaaataaattaagtgaattaaataaagttcccaagtgcttctaaatgtggcagccagacaggaacatatttagctagggccacactctaaaacagttgtctggtctgcccactcgaaacaccaaatccttactgcaattgtcagcagtcaccttgatctaaaatataacaatagttagttttttttaacttagaactttagaaatatgacaaaagatttcatagaataagttaaacaaaaggtagttcacagactgggagaagacgtttgcgatgtttaaaactgacaaagcattagtatacggaatataaaaattctagacaattcagcaaaaaaggcacagaaacttctataaaaatggacagttgaagaccaggaatttcaaagaagaacaaatattaatttgctaacaagtgtagaaagaaagatctacctcctttgtaatcattttatagcaaattgaaatggtaagatactattcaacatatataagtcaggcaaaaatggacaaattgcacaatacaaagagtggataaggatgtagggaaacaggaatcacttctggttggaatggataagtgtatccattagtaggaattgatacagtcatttacaagatgcttggggcaggacttactgaacgtaagttaatatataatttaagattcagaaatcccacttctgggtatttgccacggagaaactcacaggtttctatatgtgaatccatataagactgtttatgtaggtgggacaacctaatcatccatcactagcgatatggtttgactctgtgtccctaatgacaccttaaattgtactaatccccatgtgtcaagggagggacctggtgggaggtaattgaatcacgggagtggatttttcccatgctgttcttacggtagtgactaagtctcatgagatctgatggctttataaagggcagttcccctacacaagctctgtcttgcctgctgccatgtaagacaggactttgctcctccttcattttccaccatgatggtgaggactccccacccatgcggaagttcattgaacctctttcctttataaactacccagtcttgggtgtgtttttattagaagaatgagaacagattaatacaactagtgggatggataagtgaaaagaggataatgcattccgtggaatgctatgcagtaatattataatgtgtatatatgcatctatcatgtaataatatatacagctacatagagaaatgttaatagcacagtacatagtgaaaaaagaagacaaaaagaaatagtaaaaagcagcagaagaaacaaggcataagaacctttattcaaattgaacacacatgtacttacaaaactatttttacactgatgcatatttaagaagtatcaaattcattagagtgggtgtctataggagagaaggagggtgatgagagcaggggtggggatgaaaaagaaaagtaaaatgcaataagacaagggcctagtgtaaatcagtaggtaagtcaagtgtctactctgaggtccctcattcctcagtaaaaggtggccaaagttgctcactgaaaatgagtacttttgcaatatgaacaagttcccacattccatttattccattgtcaccattagtatgggtcaatattcaacaaacaacataaatgaatatataacaagcagaataacttatctttaggtcattagctaagatgcttcatcaggtctgactcgggccttattggaccacttgtctccacctttgttgtctatgttctgctgatttctcctctgtgttcttgtgttagatctattctgaacttaggatggttgtagagaatactaaatgtctggtctgaaatttctcacagttcaatcgtgatatagtgtctgtattccctcaatttcaaaagagactttcttcttccagtatgctctacagaatgtctgacactagttacttaccacatgataggaaaaggatctgtttttcccagcacttgggggttcccagttaacagtgaacagctgaagctatgggaaggttgagctctacatttttctaggaagagtggcatctagatgggattgaatgaatggctccccattcatgtaaacttattttctacttcattttattccttgtgattattctaaaatactgcttctgactatagcattttgagattttactatttaacatatcttgcttattatcactgaagttattcctgcatattccacctcttgtaaattgtaaaagattcttgtcttctaggtctttcagccacctgcagagaagaggattagttagaaagcctaggcttttttggatttgatttttagtttaccaacacaaccttttagcataggtaagcataagtagggtagtttagtaggaagaacactaattttgtgatcgtaggttaatgaaaatctcccagagtacagtttacttattaataaaattataaagtaacatgtggaggaattgagtgaggtaatatgaaccatagctgttacacagtaggctctggataaataatagttctgttagggaccaaaaccatatatgattttctataatattactaaatcagatccatctgtagagtgatgcatttcttgacaacatacagaaaatacaatacctgagtcattttttctcacccactctgctgatgcatttctttatgtgattgtctttctcagctctgaggaggagaaggcctatcattaccgcgggcggtggtgatttgttgctgcctcaagaaacagcagcactttttcccccccctcaaattgtcaagtacatcaaactttaataactttacttcccaggagaagtttcttagctgtggtgaatgggttcacctgctggtaatctctcttatttcttcaactcctagggtggtttttcttacttgcaatgaggataggttgacacttgccctccaggaatgactttcaagactccgccataggattaacccgccatgatctggaatggacagcagcaaatacatcaataatataatgactaagcaaaaacaaccactgttctcttagtgaagggatggatggcaggattttaatttcacttatcaagaggccattcatcttgataacctcagctagtagataaaaaagggtataacttgcaacatgaaaataattctcccatttccctcctgttcttgtattctccttttttttagagtttattttcttaagaggagatttaagttcatggcaacatagagtggaaggtgcagaaagtttccatatatcccttttcccacccatagacaggatcccccattatcaacatcctccaccagagttgtgcatttgatgaaccttccttcacacatcgtcacccaaagtccctagtttatattggatttcatttgtgatgttggacattctatgggtttggagaaatgtgtatctctctacaattatactatcaagcaaagtagtttaattgccttaaaaatcctctgctccacctccctcttcactgacccttgatcttcattcctccctccccactgaccccgacctttttgccgtctccatagttttgccttttccagaatgtcatatagttggaatcatacggtatgtagttttttcagattgacttctttcacttagtagtatgcatttaacattccttcatgtcgttgcatggcttgatagctaatctccttttagccctgaatattctattgtctgggtgtaccacattttattattcacatactgaaggacattacaattgattccaaattttggcagtgataaaaaagctgctataaatgtgtgcaggcttttgtgtggacttaagtttttaactccgttgggaaaataccaaggagcacaatttctggatcctatggtaagaatacatttggtttctgtaagaaaagctcctgtcttccaaggtagctgtaccactttgcattctcacaagtaatgaatgagagttcctgttgctctatatctttgtcagcatctgatgttttcagtgttctgtttcgtggccattctactagacaaatagatgcgtagtggtatctgattgttttaattctcatttgcctaataacatatgatgtggagcatattttcatatgtgctatggtctaaatgcttgtggcccccccaggattcaaatgctgaaacctaatcatcaagttggtaagattaggaggttgggcctttgggaaggtgattaggtcatgagagtggagtcctcatgaatgaaattagtacccttataaaataggccccagggagcttgtttgccccttccaccatgtgaagacataacaagaaggcaccgtctatgaaccagaaagcagccctcaccaggtattgaatctgccagcatcttaatcttggacttcctagcctccagaattgtaagaaaaaatttctgtttataagccatgcagtccaagatattttgttatagcaacacaaatagtctgagacaatatgcttatgtgctatttttatatgttttttggtgaggtgtcttgtattttaaaaatatctcatcctgcctttttttcttattaaatttgaaatctttgttatatacaaggaatacagaatgccacatagaagttcatgattcatagtggcctgcctagagccacgtctttggggacaagcccctctcctaatttggtgaccacctcctccaagtggaaactcaccagcctcccacagcctcaaccctagtacagatcccatgttaaaaatataaaacacctctgaaatgggaaacaaggatttacaggtaaaggtatgttatttcttcacaggcacacaatatgatgttaatggcctgcttccttgttcaggttgttgttaactccagtttgcatcccctcagcacgtgggtcaagaaatggtgcagtgttagggatgggggacagctagtaagaagcatagttgacagtgaattaacccgtattgagaccaaaggaatattatagaaaatccagagaggagaaaacccacaggcagataatttgcacaccaactctttaggaaattcatagattgttattcttaggcagggttctcagaatttataagttccttaataaacccatcccccagcttcctgagaagagactttaggttttatccagcttctgaaacttgctgaccatggacaaatacaggaatttatgcaagctggtagtgttaagtttttaatatacagatcgtagtcattaagtgctgttagaagaagatgaatatgcaatttagagagaaacttgcatctaattaccagcttaattaatacggggggactgcagcagtaaaaaaattatttcttcttcaatttgctaacgtgtattgttgcttcctcctctccaggctcagggacctgggcttcaagggtaagcagatgatgatgagcaggcaggctgatcctgagcaggcagtgaggtgggtgtcactgtcacatgggggttatgccactgtgcattcatggagtccaggctttccctccctcctggataactgcctctgtttctccccttttatcgttcatgggcctgacatttctcttttgtgtgcttctcaatgtgattctattttgaggtttctggatttacttcccttcttccttttttttttttttttttttttaatttccataggttattaggaaacaggtggtgtttggttacacgagtaagttctttagtggtgatttgtgagattttggtgcacttatcacctgagcagtatacactgtacccaatttgtagccttttattcctcaccccctcccaccctttccaagtccctagtccattgtatcattcttaagcctttgcatcctcatagcttagcttccacttaggagtgaagcaaacatagggtgtttggttttctattcctgaattacttcacttagaatactggcctccaattccatccagggtgctgtgagcatcattatttcattcctttttatggctgaatagtatttcatggtatatatataccacaatttctgtatccactcattgattgatcggcatttgagctggttccatatttttgcaattgtgaattgtgctgctatacacagtgtgtgcaagtatcttttttgtatagtgacttctttttctctgggtagatactcagtagcggaatcactggataaaatggtggttctacttttagttctttaaggaatctccacactgttttccgtagtggttgtactagtttacattcccacctgtcgtgtaaaagtgttccctttttaccacattcctatttttgattttttgattatggccattcttgcaggagtaaggtggtatcacattgtggttttgatttgcatttctctgatcattagtgatgttgagcatttttgcatacatttgttggccagttggatatcttcttttgagaattgactattcatgtccttagcccatttctcaatgggattgtttgttttttacttgctaatttgtttgagttccctgtagattctggatattagttctttatcagatatataaattgtgaagattttctcccattctgtgggttgtctgtttactctgccgattgtttcttttgctgtgcagaaactttttagtttaagtcccacctattaatgtttttgttgcatttgcttttgggttcttggtcatgaagtctttgcctaagctaatatctagaaacatttttctgatgttaccttctaggatttttatggtttcaggtcttagatttaagcccttgatccatcttgagtttatttttgaataaggtgagagattaggatccagtttcattattctaccagtagcttgccaattatcccagcaacatttgttgaacagggtgtcctttaccctctttgtttttgcttgctttgtcaaagatcggttggctgtaagtatttggctttatttctgagttctcaattctgttccattggtctatgtgtctatttttataccagtactgtactgttttggtgactatggctttatagtataatttgaagtcaggtaatgtgatgcattcagatttgttctttttgcttagtcttgctttggctatgtgggctcttttatgtttccatatgaattttaggattgtcttttctagttttgtgaagaatgatggtggtattttgatgggaattgcattgaatttgtagattgcttttggcagtatggccattttcacaatattgattctactcatccatgaacatgggatgtgtttccatttgtttgtgtcatccatgatttctttcagcagtgttttgtagtgttccttgtagatgtcttttacctctttggttaggtatattcctaaatatttaattgttttgctgctattgtaaaaaggggttgagttcttgatttgattctcagcttggtcgctgttggtatacagcagaactactgatatgtgtacattaattttgtatcctagaaatttgatgaattcatttatcagttctgggagtttctcagaggagtctttggggttttctaggtgtacaatcatatcatcagcaaacagtgacagtttgacttcctgttatttcttgagtcctgtgtctctctgctccctgtgtgtccaccctggtgctgtgaccatcagctccagatcctagcctgatgagatgttcaagggactttgaggttccttgtagataaggagatgtcagcacatgactgccactgaaaacttgcacatgatttgcagatgagagcatgctccagtaggaatggccttgagccagttgcaagtaggggatggccacctctgtgcataatggtgctctcttttggcctcttgcaatcttaaactttctcactgtgattccccattacacttctgaacctttcctaattcctcttcctcacctgtcatgtttcctattagtttaggatcctgttaactgatcgaactgaaagtccacatgttacccattcctcatggctaagcttaggattcaatagttcaatgaaatcttttctgaccaccacagagcttagtgattttatctttttctggctgtagagtccttagtcaatgcaatttctttgatccctgatgacacttcacaagtatatctgtcatctctactctgtgccaggcactgttgaaggccctaagaatacacaggtagataaaattggataaacttgcaagctggccaagagagacagccaataaaacagaagaaagataatgtcacattataataaatgctattgcaaataaaactgaggataggacagattgtagaggaactcccttagaatgatagatatcagaagaggtgactgttgagctgagatctgaaaggcaaaaaggatccagctatggaaagactttagggtggaggaaacaaccgcaaagatcctgtggttgaaatgaccctgttgtagccaaggataggagagaattcctgtgtagccatgcttggagctcagcaaaggcaggcacacagacatgcagtgaggctagagggttgagcaggaaccagactatgcagcaccttgtatgccagggtgaatactctggagggcttaaagcagagaataaattgacctaatttgtagttttagaagaccacctgtttgctgtgtaaagactggactgtctagggacaagagtggaagtgggagcaccagctttgaggcaactgtagcacatggtccaagcaaatgatgcaagtagcttggacggagaaaaagggatgaactccaacaatattttagagacagagagaaatgagacaatttgatgacaggttggacgtggagaataagggaagacgccatcaggtatgattctgtggtgtagagcttgaggatattggtgaactgaggagagtcaggagttctacttggccactgtggtggacattggtcattcttcttagccactgagcataactgagcatccttcctatgtttggggatttccctactttaggaatctgtttctctaagatataagtcagaatcctgctttaccagtggcccccagagctgggttgcagcttgtgaccctggctcaatcagacacacatgtgaagctccaagttggcatccattctggccatggagtcagcagcctcatcagttttcagaggcagcaaatgcagagattttaggcataccatctgagtccagtgtctacccagcaatggtagtactagtatctccctccagcagttccacattgtgatatggggattgtccctggctgttggcccttaaatctgagtctcttgtcctcctaggaatcttgccagctatctaataccctacaaataccatatctgcataaatgatcaggataggactttgcttgttttcgacaagaacctcaaatagttctgccatgtcgagaagaaaagtattagacatgtaaggagagacataacctggcaatggaaatgacaaatctgttgtttagtggacaggtcataggtggggttatatatctgagagacactggcatagagtggtatttaagtcatactgagagcactgaaggagagaattctcagagaagtggacctaccctggggccgtactatacaaggagctccaacaggaaagctaaagccaatgaaaggactgagagaaagctacggtgacacagaagggctgtctgtagcatgagttctcaggaaagccaagtgaaattatttcaggaaggagtgaatggagttgtgtcaaattcaaccaagaagcactgactggcattgctgattagatttttaggcatagcattaacaatttcttaggcaataagttagaatatgggtttggtgttagtcagacctaggtatgagttacagctttataatttacaaaccatgcaattttgatcaggttccttagtccctttaagactgagtgtttgcgtttaaaaatgaaataacaccctccacaaaaattaatgatcttaaaatcatggattgaattatataccccccaaaagatattttaatgtcctaacctccagtacttgcaatctgaaaataggtctttgcacatttaattgagtgtaaatgaggtcattaggttgggccttaattcaattttgactgatgtccttatcagaagagggtaatttggacacagacacacaaggagaatgccatgtgaagacacagagatgcacagacacagacaagatgaccatgtgaagatgggggcaaagatgagagtgatggagccacaagccaaggaatgcctggggccaccagaagctgggagaggcaaggaagggtcctctcctcaaagcttcagagggagcatgggcctgccaacaccttgagtaatttggacttctaggtttcagaactgtgagagaataaattactcttgttttcagccacccaatttgtagtacttttcttaggcagcccgaggaaactaatacagattttggtaccaggaagtgtggtggtgttataacaaaaacccaaaaatgtgaaagtggctttggaattgggtaatggttatagattggaataattttgaaatagttcatagcaaaaacctagattgccttgaagaattgatggtagatacatggacattaaaagcaatttttttgtgggctcagaacaaagagaagaaagttgtagagaaggcttctattgcccaagagaatatgtgtactgtcacgaacagaacattgctagaaattgaaatactgaaggaccttctggtgaggtctcaggtggaaatcagcattattgaacactggaggaaaggttaaaaatcggtggaaaacttgtctgaattatgttctgtcattgggtggaaagtagaacttgcaagtgatgaacttggatattgagctgaggagatttccatgcaataggatattcatatcctgttggttctcaaagagccctgattggtaaagcattaaatgagattaaatgaaacaatgcatgtaacacagagcatggtttctgcacagactaagagctcaacaaataataaagtgaaggttaagggtgtggtctccaactttccagaaaggctgtggacaaattgaactgcaacttgcactctcagaaacaaaacaaacaaaaaatgcaaaacaaaacaaaccaaaaatacaaaacaaaacaaaaattgctgtaacatctattaatcattcttgtcaagatcacagaaatttttcttcctattggtcaatggtggaaaaatataaatctgaaatgtgattagaaacttaacagctctgagatattttaccttattttatgtttctgaggcaatatcaaagcccttaggataaaaagcctatttagacaattaggctcctggtttgttttttccctgcaaataattttgttatttaatgccatactggagtaaattagtcttttctaagtattttatagctcataatactgataaaatctggatattaaggtacatttccagggatatctgctatcataaatgtatttagtgttccctgaagttcaagccaattcagtaacccaagtaacagaaatgagaactttacaatttttgggggaagagataaaaatattacttgcaggtgatacaattacccttttagatctagtataatcctattaaaatgccaaaggtaatttgcaaagactgagaaaacctaacatgtagttttcaaggtcatctcatagactagacagatgagaaaatacaaataatgtgtgcgtgtgtacagtgtgccttatcagatattaaaatgtattatgagaccatagtacattaaaataatgtgatacattaaaataacataacgtgataaggatagggagaaacagctttaacaaaataaggtcaagcaatagatcttagtgcacatcacattaagtatatcataaaagtagaattacaaatcagtagagaaaggaatgttgcgttcattccaattaacatttttaagcaactttcttgtgtctgacactggaagatataactaagaatatgataagtcctataatctcaaaaagcttagtctttatgggagacagataaataaagataaacttagaaaatgtaagtcacctgagctatggcatcattgcagggaaggcacaaacttgatgcagcctcaagagttaagttcagtttctttgcgggagttatgtctgagttggattctgaagggcaagtaggaggtaagcaggggaagggattctgaagggcattttgaaataagcagaaggcgtgaaggcctgaggtccgggaagggcacagcacatttgcggagccagaagtgctcaatctggtccttgtcagttggggaaggttgtgaatgcaggctgggagacacaggtaatacaaaagttaaggagatcttaacttttgcttgctaaagagatcttaaagaagacccagagccctattagacatagtaaaaaccactggaaaatgtgaagatgacttctaggattccgacttgggccactggagaatggtgagaggtatgtttgcagagccagtaggaggtgatgaattaacttgtgtacacgttaagcatgtaatgaatatttgtgtcttttatccaataagcatcgctggctaactagttgaatttattgaaggcttataagaaatacaaaaatggaatcctcatggattagaaacaaaacttaaaaaaaaccctagaaaatataaaacatgcattgataatatttcttagttttgggtgataacctattaaggtacctttatattttcctttatatatttgccaaattttctagagaacatgtagcacttacacttttagggaaaacctaagtcatgaaaaaccttgcttgcagtttcctattaataacaacacgctgaaatctgaaggatagtatctgaatatagtgacatgctcttaagtgcctgcaaagataataggggataggcttaatattgggaactagaagcctggatttttaggagacagattcactcatagattgtctaaatacatattgtgtggacactctctagacactggtgatgtggcagagccaaacctccaaagtccctgctctgtggggcttacgtacaatatcagaggcacattctagcagcagagttggacatgggttgcactgctgggcaagctgaaatctcggagctggcagggaactcagaagtctattttattttacagatgaggaaacaaagactccagttgaggggcttctcccccatgtcattaattgtcacaagggcaggaccggaattcaggtttcctatttcctgaaataggattgcctcataaatatattgcttcatcaattcatgtcttagcatttactaagagagcaaagagtattcacagaatgaggtttgtgtgtcacagaagggcccctgtggtcctggctttgcagtaaacggtcatacaagaatgtatcctggctgggtgtggtggctcacacctgtaatcccagcacttgggaggcaggggcagggtgtgggaaccacttgagcccagatattcaagaccatcctgggcaacatgtttgagaccttgtttctgttaaaaaaataaataaataaatacaaaacttagccaggcatggaggtgcacctgcagtcccagctatacttgggaggctgaggtgagaggatggcttgagcctgggagcttgaggctgcagtgagctataattgaaccagcacactccagcatgggcaacagtgagaccctgtatttttttgttataaaaaatacattcttgctattagaagatgctgttcattttcattcattcagcaaacacttaccaagattcttctatgtacaaggccccatgttgagaatacaactgtgattaagacaaactgttcctgttcttttggagtttacattttgtcgggggagagataataaaaaaactaattgcaggggctttcattttttttaggtaggaaagttctataaagtcacctggaacactaaattagcaaacacggcgccattgctcttagggggaaacacagagttaggttcctgtgagcctctggtcacgacatttttgtcagctaatcaatatataaccttgttttatgtgtgtttctgtttaaagacgtcttatttaatatagttgattcattaacatgaactcagggctaacagcatatcactcatgcctgaatgaaatttacctattttctctgtaaggcacatcccagcctttttgcacttagaaacactagacagcactttaatgcttggggaccatttttaaacaatgaaatcgtcaaaaaagacacaaaaatgtgaaaaatgtggcagtaactagatcacaaaaagaatatttacagtatgagagtagaaacaagaaggcagaatgccaccatgttggacctcagctggtccgacatgtgcatcagacaactcaaaatttcttctactttgtgcgtgtcaatgaatgaccatgaaagcatcataagtattgatttggaggttactaaactaaattttagtgagtgggcaaatttgcagacatgaaatccttgaattaaggcactaacctgcatcagacattgactgtatgttattaactgtttctataccattgcaattgtgctgataattacggtgatgcaatatcctttcacagggagtctggaggtcagagaagattttctgagaaacagacactaaagctgaaatcttaagggcaaattggtgtcagttgggttgagtggggaatgatgacagtctatttcaggcagagcaaacagcatatgcaaaggtctgagatgggaatgagcattgcatatttctagggcctgaatgaagtcccttatagctgaactacccagacccatggggagggaggagccagattatgcaggaacttgtgactccagtaaaggattaaagaaattgagacagggttttactccatcacccaggctagagtgtagtggcccaatcatgtctcactgcagcttccacctccccagctcagttgatcctcacattttggcctcccaagtagctgggactgcaggcatgtgtcaccatgcctacctaatttttgtattttttgtagagatgggtttttgtaatgttgcccaggctggtcttgaattcctaggctcaagtgacacacctgccttgtcctcctataggctgggacagtaaaagattttgatctttattctaagagtaatgggaagccaggctaagagatagtatatatttgtgttttaaaagggtcattccctctgtttgagtgtaaagaaaggtctagatggggctgagaggatgtggggagggcagttggaagattatttcaatcactgagcagagacagtactaaggttaggctaagggcagggtgcgagggaaaagcggcattaggatcagagttgggtttctggtgtgtgcaactgcatagatgagggtgctatttccagaggtcaggaacagttggaagaaagtgagttttgagggaattagctcaattttgttttgtagttaaagtgcctatgagatattgtggtaggtgaagaaatgtgccaccgagttcccccttcagggaaggacttgctatccagcccagcggaaggcaggctgcagatagccatcagcagtcagcaacttcagggtctgccggaggggcagagctgcctccctagagggcgtgcccctcttggagcagctcacgtctggtgaatgagtaaggcgggacactcggtgggcaatattggctccagagctccttgcttagggtccaaggggaaactgtaggacgttcaacttcttccttggacaggttcatataggaaacaccttattactcacatttcaggtcagtgtgtgctctgcaggctctggcctgcatcagatagccaagtggagaccaaatcggacacatggatgtgatctaaagatgcatgttcacaaatggtcaatatgcaggtggcgaatgaagatatgagagtggctgattttgtgtagaagaaagaatgaaaaggagaagtagcctaggaatcaatcttgggaaactccaacctttgaatgtgaaacagggaaggataaactaaaagactgttcagaaaggtgggaggatacccaggaggagaccatgaaagacaaaaaagaaaatagttaactccacagagtgctgctgagaggctacggaggcccaggtcaaaagtataccttgcagaagtcattggcaacttagctcagtggttgggtgggctgttgaggggagatgcaaggtttcagtgggttgtggaatgagtgagaaattaagaaatagagacagtgagtgtagacaactccttttagaaatgcgactgagaaaaggacagaagacatagggctgtaattgaaagaaaaaataaggcttgagatattaaaaaaattacactttttttaatttaaatttaagtttttttatttttaattattgcgggtacatagtaggtgtatagctttatggggtacatgcgatgttttgatacaggcatgtagtgtgtaatcacatcatgtagaatggggtatcccttccctgaagcatttatcccttgtgttacaaacaatccaattatactcttttagttattaaaaaatgtacagttaaggtattgattatagtcatcttgtgctatcaaatagtaggtcttattcattctaattttttttgtatgaattaagtatgtttgaatgaccatgggggaaccaagcaaagatggtgagttagaagacacagaagagagaagagattattgataggagatgattctcgaagtgggctacagaacacagacagagagattggaccgaaactaggaagaagggagttggctttcacaggaattgaggagaggagagaagatacagataggttgtaggtttgaaagtaggtgctggaaagttgagggctcctctctggcagcttcaaatttctctgtgaggttggaagtgaggtcatcttttgtgactgagggagctttttggggtggtggtgaggcaggagaataggatctggaggcagagaacctaaggctgattcatgttgacttcctataattaaaccaaaaggaaaaccccaactttccatgcccaagtaacaagaggaccataggctacaccctttgcaacagccccatccccccttctctgcgtggcaggtgaaaaattgaaagtacctctgattggttccctcctgcaaccaatcagactggtcacaggccaagttttcatttgcctaggagtgtaacttcacttcagcctctaattggtcccctcccacaaccaaccagaatggtcgtgggccaccacatcatttacatagggtgtacaccaagtaacaaatgggaaacctctagagaatatttcaaccccagaaaattctgtaatggggctcttgagctgcttatttgagcccactcccaccctgtggagtgtacttttgtttcaatagatctgtgcttttctttcattcattggtgtgttttgtccgattctttgttcaaaaccccaagaacctggacacccttcatcagtaacaggtttggatgaagagaatggaaaaggtttaatacagtcaccaaggagcatgggaaaattaattgactaaagaaattcagtagtaggaatatagaactatgttgtgaactcggctgaattctgaatgtagacttgttagcccactgaagtgtcttttgggcattttgaatcttaagggcacgagatctaaaatagcaccatttccccacaccattgatgtcttacaggaacacagaaaactgacaagaaaatgctttgccacagaagaagtcaatattctaaacatataaaactatgagttcaagtttcatcctatgatttccctacttcttaatcttcagatatttctgtgttaagttcttaatataaatgttatttgtcaagcaatttgcagcatataaaaatgttgacattaacttttctcatctaatcctctaacatccttctaaggtggatgatattatttgccacttaacaggtgtttgcaaagttatgggcatgatccaaggtcaaactattggtaaaagtcaggacaaggacatgtgctccggtcttctccattcaaagtctgtgatctttcactggctcatgttcctggatctcagaaatgtactagatttgggctcgtttgtgctgatgagtttaattagtgaaggataaataatttcttttctggtttgtttcatttaatatttccccctgagtttgagtttgtgatccattatgataaattcttgttcctttgtattcttagcaatggcaggcttggaatactaaaggaagcaattgacttaaaatagtgaataagcccactttccatgaagttgttcttgtctgtgctttgcctgagttatggctaccttaatgtggtaactggcaccacttcaacagctgtaatatctcttcaattacagctgcctgaaaattacttaaagtttcaaatgcttggtgcatcaagatagggccatggggaggacagatgagtcatgtgaagcttgtcttttcagggaagagacatttccttaagttccttgtgccactgaagcttcgagaacggttgaggttactctaagagcaacaaagaaagataaatagaaggtcttaaaactggtaacttggagcaaattatatatttttgaaatagatttttaagatactaagttgaagctgataattttgaaacacaataattcattcttttttgaacacacatttattgagcatctgttgtatgccagctaccgtgcttgacattggaagtgaaaagggaaataaggcaccttcctcattatcaaggatatggggtcttctagtgggcaagattgactcatatgcagataatcaaaacatcagtgcacagataggacttagtagccaataagtatctgctccatcatatccctctatgtgcaatcttagaagagtacatgtattaaatgaaaacacttaaaattggtttcttctgggttggaggagaccattattttagagaaatctttagttaaataatatatttcaacatatttaattaaataatatatttcaatcatataagaaaataggacaaatactatatgattccacttacatgaggtacctagaatagtcaaattcagaggcagaaagaatggtggttgcccggggctgctgggagaagaaacaagtagggagttgttatttaatatcatggagtttcagttttacaagatgaaaagggttctcaggatgatgctgatgatggtactacaatgatgtgaatgtacttaatgttgctgaactgtacacttgaaaacagtcaaaataacacactttatgctgtgcatattttaccacaatgaaaataatacaaatgaaatagaaattaataaaagagattaccatgttccaaccatggatatatgtgttttgtcatatattctttagatttctctcattttaaagaaataaaatgctaaaatacagtaaatgcctcccttctctctgcctcacacttttctcctctttttctgtctcgtcagctataggtactatcctaaagtttgggtgcattatttctacgcgtttaaaaatacttttacggctgggcgcaatggctcacgcctgtcatcctagcactttgggaggccgaggtgggcggatcacgagctcaggagatcgagaccattctggctaacacagtgaaaccctgtctctactaaaaatacaaaaaactagccgggcatggtggcaggcgcctgtagtcccaactattcgggaggctgaggcaggagaatggcatgaacccgggaggcggagcttgcagtgagccaagatggtgccacagcactccagcctgggcgacagagccagactctgtctcaaaaaaaaaaaaaaaaaaaaattgcttttactacagtcaatgtcctctttacagagactactagaaacacatctgtagttgcatgcaaactgtggaaaagtctggggtgtcgcaacacaatgatggcagagaggacttagaacaggatttgagcttgcagtaggtgattcttgggagggtttaaggaaacagggttttactctgcattgatgatttcaggaagtagggtaattctgtgattacatatcttaacaaatctcaagcctagagcaacactaaagttgtaattgtttaagaagcaacagtcacgcattagctaggatagatggatatctggtcatttttgtggtacatatttttgttagtgtgcaaatattattatggcatggttgtatttttgttttatcccatgatggtcacagaacggccttgtctgatgttgatgctctttgaagttgtttacagtcaacaggaggatactaaggcctagctgtgtgtgccaggctcctggatatcagtggctatattttctttgttgctacgtacgtacttctttataagcaataaacattattttatgggtcttagtttgaatggattataatatgctgtagctttttttactccatagtgtgagattagcttaggttgataatagaagatctagtccatgtctttttgtttgtttgttttgttttgttttgttttgttttgttttgttttgagacaaagtctcactctgttgcccaggctggagtgcaatggcgtgatctgggctcactgcaacttctgcctcccaggttccagtgattctcatgcttcagcctcctgagtagccaggattacaggtgcgcaccaccacacctggctaatttttgtatttttagtagagatggggtttcaccattttggccaggctggtctcaaactcctgacctcaggtgatccacccacctcagcttcccaaagtgctgggattacaggcatgagtcaatatacccagcctagtccatgtcttttatatgctgttgtgcattcaactgaaggatggttaggttgcttctatgttttcttgttaaaaattgtgctgatacaccttgcatacaaataaaagtttctctataccattttttgcaaagagagcaaccaggtgtcagaaagtagtaaaatgctcaacaacgttgaaagactagacaccagcttgaactggctcccaggggcaaaatctgggacaatctgaggaataaaataataaaaataatggattataatccatagaatagaatacaagttcatgctacttgaaataattgaatattatcaaatactcacatgcattgcaattttaatcaaactgttcctttattgctgtgtttttgtgatatagctaagaaatcatttcttatccaaagaacataaatacattttcctataaaagttttaaagttttgatctttgcatgtagctttctaataaatgtaatttgtttttgcttatgacgtgaggaagggaatctaatatccttttccacatgggtaaccacttgttccagaactatggaatgctttcagtatgttaaacaaaaatttcaaggctctttattctgatttactgatatatttatctcttaattaactgctctattaattatagctattaactgatatatttgtctcttaattagtataaagctttaaattaagacttgatatctggttagtcatctgtcactattcttcttcaatattgttggctctttttggccataatctttgatacacatttaagcctcctgttaagtaaattctgtgaaacatcttactgggattttgatatgaattgcgttgaatttacagatttcaataatcataatatcaaatgtcttcatttttaattatggaatatttctccattccttttagtcttactatattctatccttttcttcataattattttatacatactttttagatacatacccagatatttgtattagctgggaattgcctggctgcctgagagagacctttatttcagtatctttaaaatattagagctcaaccctctaaatagaacccagtgttaggtagttgctggtatctcactgaatccaaatgctaagggtaaggtctctggattttctcttcttctctgtcatggtccccaaatggtttctggaacttctgctgtagtgtctgattccaagaggcttggaaggagggagtacagaaggacaaaaagggattcctatccaacgatgtttgctcacaccgaattagaaaatttaacttccaatagaggctggaaggtagagtttttcagctggatatattgtcactctgaataaaatcggagttcttggctgggtgcggtggctcatgtctataatcccagcactttggaaggctgaggcgggcagatcacttgaggtcaggagctcaagaccagcctggccaacatggtgaaaccccatctctactaaaaaatacaaaaaagctgggcatggtggcctgtacctgtaatcccagctacctgggaggctgaggcaggagaatggctggaacccgagaggcagaggctgcagtgagctgagattgtgccaccacattccagcctgggcaacagaaggggactctgtctccaaaaaaaaaaaaaaaaaaaaaaatcgagttctcttattaagaaagaaaaggaaaagtacatatgggatgtactagcagttgctgctataggttcttttaacttttgttatttaaaatatctttttcagattaaaaatatcttgttgattggtattcatagggatacctatcctatttctattcttaaaacataatttacatgcagaaaaacttacccttcttagtacatttctgtgagttttgagaaacacatggtcattgtttagcttgaggaacacatcagacagagtgagaaacagactattatgaagtctggtcagagaagtaggcaagacctcactattagggggcattataggtgatgttagagaggctggttttagtctaaatgcagtaggaagccactggagagttttaagcaggggagtgatgtgatgtaattgatgttggaaaactcattttgagttttctctggagaatagattgtagaggacgcagggaagaaaagagttcaagcatgaggctcttgaatattccaggcaagagttcacagtcattgaacaagggtggtggcactggagatgccatatactcacagatgcagtgagtatatggcagtcaacaggatttgctcttgaattttcatcttcaatgatttctattacttggatgtgattccctctggaatcagatgttcagaataatcaccgtaatttgtgaatttccttgcttgcatacactctgctaatttggcaaagctgttattttttctcatttcccctcgatgatcccaagtgtgatctacaagctgcgtgatatagttacttttatggataagagaaaagaatgaaaaaatattctatttaataaaagaattttaaacatgctcatataatctggcttttacatgaggatttaaaagtgagttaaaaaaaaaaactactggatggagaacttttctcaggagctttgggaaggtcttgccctcttaaatctcttccataaattgcttaacttccattaacaatattctttaacattttttaatgtagctttcctaagaagaatggcatattaaatcctcaacactgtgttatacatttctttattaattcactttgccttctgaatcatttctgattgcacgtagaagttgatatttctaacaatcagtttcattaactcaagcagagtaaaaagggacagaatctatttgaaataaagagatgaacaaatgcaatgaatagactgcaagaagttctctagtcctgaggccccctggccacctggtctacaaaggttttggtagaactgtaataaaaatgcatatcataaagcagagatagactatgcaaataaatagggaaagaataccaataaaatatgaataaaaaatggaaagccatcacattaataaaaaaagaacgtaactttgaaccataaaagacagcataaatactgtatttgagctataaatttgggtccggacttcctggaaccaatattaaaaaagagtcctagccaattgcccagttcttattataaatatatcaggaatcccagtttgagcctaagaagggtttaatgtagaattgaagtttgtctaggtctacagtgtaccggctgtgtgtctcccaggtacctcctggaaatagacttctaaaagaagtgtcctttaggggcaatgcatttgtgggcaggaatcagacatccatgtgtgtcatgtcacccagtagtcttctgagcaattcctctttttggagccctagtgtgtaaataaacgtgatccagacatgaaatgtcacagtttgaaagtcaagctccatagcagaatttcccaaaatgatatatgttgggacattttcccacaggatgttaatacatattttgaaaaacaaaatgtgtgtgttaaacatatctaaataggagcctttttagcagctgagtcctattaacaatcacatgagcaggcttaaggcagattttagtaactgttacttccaactgcttatgcaaaacagccttgcaaagtctattctctacagtaattctgggtgttcccagagggtttctgaacagttctggagggcttccctgtgatgtctgctggatacagctgcaagtgcttttgatcattactgcttctgggttgcacctctgtctgattctgtttccatcttcacacatggcacagcaatctcttgccggggaatatggtctcttttcaggtcatacattactgttacccttgctagatattgcagtacatccaggaccttacactacactgcttctgcttctgctatttcctactggcgacaaggttttctgcttggagcaactattacttccactatatcctctgggcctgctgtcctgagggaatatgtattacaaatacatattcaccaatgcactagaaattttaataggctaagttggctgcttatcagcgatgaagtggagataaatgacaaccgaaatggtagtacttcaatatcttacataatttggggtgcaacggccctgcattaattggagtgagaggccgttaggtcttaaaggctggcatcttggctccacttcccacatcaaagacgtcagagcactgggcttggtggtttatggcaggctcaggtccttgtccattgtgggctgggtaaacagactcaatctgcaatttcactattttagaggaagggaagaagtagaaagccttgtttaggtctccagttaagctatatgcctcaggactcaccagaaaagctctgcattttgtgtataaattgcttgttcagcggttaaggaagtggtactttgtttgccattggtctattgtcttttgtctattgcccctccccttatagaaaacccgtggaaccagaaacctacatcaaattactagtattaatactaattgctaatattaatactaattactgatattaattactaatattaatgctaattatcaatgtgttataaagaaaaaatgcaaaccaaaatggaataaatacatttttcaaaagtgtgtatttgagaaaactgactgtaacaaactctagtgactcatgttaaacttacattaaacacactaatgtggtttacaggtcaatgtaaaagccaaaaccataaaaatataagaaaatacacgtgaatattttttattaggatggagaagaatgttgtctgccaaaacacagtaaacaaataaaaaaggaaaagatcagtagctttgaccacacttaaaaaaacaacaatccgaggccgggcgcggtggctcacgcctgtaatcgcagcactttgggaggccgaggtgggcagatcagaaggtcaggagatcgagaccatcctggctaacacagtgaaaccccgtctctactaaaaatacaaaaaaattagcgaggcgtgatggtgggctcttgtagtcccagctactcaggaggctgagccaggagaatggcttgaatccggggggcggagcttgcagttagcagatatacagtcactgcactccagcctgggtaacagagtgagactctatctcaaaacaacaacaacaaaaaatcctctttgtaagtcaaaatgtaccagaagcaatattactgaaaggaaggttgaatagtaattgagatcacagactttacataatcttatctgactttttgaaaataagagttgatgaagtcaatgaatcatttagcaatagctttcaaaatataaaagggtaaaaactttttgatctagcaattgcactgttatgaattgattgtgcatatatatttgtaatgtacaaatatgtttattggtgtattatacaatatgctaattgctattgtatgacaacaataacaacaactggaaacaactttctatcaagagcggacttgtgtgatgtattttgttacatccgcacaatgggataggatgcagccactaaaaagaatgaagtagctttatatatatatatatatatatatatatatatatatatatatgtatatatttatttgtatatatttatatatatttatttgtatatatttatatttatttatttatatatatttatatataatatatttatatatatttatatataatatatttatatatttacatatatttatatatttacatatatttatatatttatatattttatatacatattttaatatatgtatatttatatatttgtatatatatttatatattttgtatatatatattgtatatatattatatatttatatatttacatatagtatatatatatttgtatatatttatatatttgtatatatttatagatatattttatatatatttttataaatatatattttatatatatatttatatatggaaagatttccagaactgctaggtgagaaaatgatctatagacgtatgcttgatttttttttttttttgtttaaaagatctacatattagtatttgcagctttttcttttcctgatataatcagagaaaccattgacagaggctacttttggggaatagaactggaatttggtggaaggaagatgtgtaactttctgtttaattttttcatatgtctatgattatttagaaatggaaattttatttactttttgagatggagtcttgctctgtcacccagggtggagtgcagtggtataatcttggctcactgcagcctccgcctcctaggttcagctgattctcctgcctcagcctgctgagtagctgggattacaggcatgtgccaccacacccagccaatatttttagttttagaggagacagggtttcaccatgttggccaggcttgtcttgaactcctgacctcaggtaatctgcctgcctcggcctcccaaaatgctgggattacaggcgtgagccaccgtgtctggccaaaaattttatttattttatagaaaagcatatacttatattttaaaacctcatgctgttactataaatacattttatctgtcaattttaaaaagagagcatataccataatctgacacctctgaggctaatcctgttataaatttgggaaaattactttatttctcagtcttattttactcatttgtaaaatgggaaaaataatgtgtacttcataggattttttgaagattgaatgagataatggcatatagaaacactcaataagtatttgctattattattaatgtaattagaaattatccactggcttttaaactgttcttatttgcattatattgtgtgtcattgctgtgggattaaaatgcaattcttagtttttcatattctactcagagttaatgttgtaccaattcccataaaatatataaacttgcaattgtaaggtctgtttatcccctttgccatgcctttatgctattgttattacaggtattgaatatgtattataaaagcaacaagatgatattatcatcttgctttaaggaatcgtatgtatttttaaaaaacgaacaggaaaatgatcttttttttatcagatatttaaagcctctgatgcgttttattttttggtgaagattcataattccatctgttatttgctttcagactgaagagtgttccttagcatttcttgttgtgcaggtctgctttatggatccttacatatcccacttattgtgtattttcttatattgcagaaatattaatgtgttttattatggagccctgaagcagatcctgcttgggatattatattgtgtcacttggataaattctacataacctcaggagctgactcaacaagctttggtgatagtctatggcagtggaattagtaaaagagaaagaaagaaggcaaagatgattcccagttctattgcttgggcaataagggtgagtgcagtgtcatttaatgagaggagtgacaaaatagccattttaatggggaattggagtgagaggggttgccaagtttagttttgtacatgtgaaagtggcacatccatgtccaggaagtaggtaggtacacaggtctggagcctagaagggaggtctacattagagatgttcaggcctctgtgccatcacagtgggtgataattgaagcagtgagatcacgcagttattcaaagataatgtacaggacaaaaaaaatcagacctatggtaaatcttagcatcagcagtttcaatggagtaaagggggaaaaagcagatttcaatgagatgaagaatgactggaaggagaaaataaaacagtgagtgtagatggctcatttaagaagcctggttgtgaagagagagaaccaaagaggttttaatttacttagtttttcaacatgtatgagacctgagtatattcttcccatgttgatagaagaaaccatagagggagaggtttaaagatatttgatcaaggaccattctccaaaggggggatgagatctggaggacaggaggtggagaaggagatgtgaacattagggaacaggttaactcttgtaacaaaaacaggaagacaagggtaaaaatggatgcaggtgagggcattcttgcctaacagctccaattttctcagtgaagtggaagatgagtactgagagtggaggggatagatgagctgcttagatggtttcatgagaacagataggttttgaaacagccactgtggagactcagagcaagagttaattagggaaatggaaggtcttgtagatggaaaccaggatctcgtaaatctgtagttacaccaacaattccttcttcccactatgaaaatcggaagaagaatctgcctgacatcataaagtgtccctcaatccatatgtgtttgtgacaggatgttcctctctttctccttgtgagttctcagcatccagtgacattctgcagcctcctataaccactgaagtataagcatgaaattttcagccatttgacactaaatctttcctcttgggtcttctcacatcaatggctatatgaatacagcattataaagatctaagcataaacctacctgagagaagaacacctaaatgttagcttcggtgcatgatttaagcaaagtcattgcctgaaagaaaaataattttctactctaggaacagttcccatgagacgtgacagccaaagccctatgagctccccaaaggcttctccctgagactaaaaatgcttcattcagggtatttcatgtgggatatctttagtagccattgatttcttatagaaactatgcatcatgcttccccgttcctttcattcatgtgctcttgacagcctttttgctgaaccttacaagggaaataaatgtatcacagtaggctctgaaaggacatgaatttagagatctacttgagttttatggggaccccaaagcactgtcaggaaaggtctgaacttggagcctattcctagagagcagatgccatcagctggcagatgatcttggggtcaatggatttggctttaggggacaggaaggcagaagagcagagacctacagctgacaagctgactgacgttcataagggatgtcacagaaccaaattagcccacgtgctagtggaggagtagggaaaattgtcctcacttagagaagcaagaggctgtatcagagacaaagccctgctaattggtgaaagtctaagtagatgacaagagcagagcaggggagataccagagtcacttcagtttctttgtgcatttgttcattcattcatgcaggaggtatctgtggagctagccccagaaaagaggcatgccttagaaactggctaggaaaggatgggggattttaaatggagggagtgagaggaatatgatgcaaaagtagaaaactacaaatataacattaagaatggtgaatggtttcatttgctgagaataaaatgattttttttttttgagatggagtctcactctgtcacccaggctggagtgcagtggtgtgatctcagctccctgcaacctctgtctcctgggttcaagcaatgatcctgtctcagtctcccaagtagctgggattacaggtgtgttccaccatgccagcctaatttttgtgtttttagtaaagacagggtttcaccatgttggtcatactggtcttgaactcctgacctcagatgatccacctgcctcagcctcccaaagtgctgggattacaggtatgagccgctgtagctggctaatgaaaagaatttggagagaagtttggattagattgggtagaatcttaaatgctgggataaagtctcccctgctttccatggcattcaacaggagtttttattaggttgatgcaaaggtaattgtggggtttggcattacttttaatgtaatatgaaacaacctgatacaaaggtcaataggaatggacaaggtgcactggaaaggagagactgaagatcaaaagaccagctgggtaagttttggaaagcccacctgacagaggctaaggagtcagggaagccattgtgggactggaggagaggagaacacataagacatcaaggagttataaatacgctgacaggatatggcacaacaacaaataggatgtgattgataagggaggaaagacttgaggttacaaacccgggaatctgtgaggatgctggtaccttgactacccagagagaaaacagtccccagtgattgtcccacgtgtcacctttgtcagagcacttagaactttcttcttccctttctttgttttattttttttttattcactagaaagtatgcttcatgcaactggagaaatatgtcttcatcaatatatccgttcctcctaaatcctcaacaatcagataattggtgctcaataaatatgtgttgaataaatgctgagtggtgcccttttatataaatggaaataaaaatgatgggaataataagtaatctaagagaaaataatttcagaagttacaatagcttagctctgccaataaccagtcaaatggatttagaaatatcacatagtgcctattcacaatagcaaagacatagactggattaagaaattgtggcatgtatacaccatggaatactatgcagccataaaaaaggatggggtcatgtcctttgtagagacatggatgaagctggaaaccattattctgagcaaactatcataaggacagaaaacgaaatactgcatgttctcactcataggtgggaaatgaacaatgagaacacttggatacagggtggggaacatcacacactggggcctgtcatggggtgggggggaggggggagggatagcattaggagataatacctaatgtaaatgacgagttaatgggtgcagcacaccaacatggcacatgtatacatatgtaacaagcctgcatgttgtgcacatgtaccctagaacttaaagtataataaaaaaataaagaaatatcacatagtggctcttgtctcagttttctgatctaaatcagggataatattatttcgcccccccccattttatggttttgaacataaaatcatacaatgggtatgaaagcactttggaaaatgaaaagtggtgattcaaatataagattttatcaggggaggaggcaatgttatttgtaacttgttctctagaagtataacaattttggaattgaatcatctttagaaattattaaaagcactaaattattgttttctttcttttttcatcccttaacatgatattgtgactaagagtgcttgttggataaagctttgatgtatgagtctaaaggggcttggagtagcctctcaccaattaaatttcctctagacaaaccccgcataactttaaaatgagctaatgataataatacgaggtacgattttctggaaagtgaatcttttgtcagaaagaagattgggcagtaaatatgtctcaggagggagctgaggtctctacacagttcaaactaaatgcacaacagtatttcagatgtcacaaggtgactgcatctcctagaatatcattaatcaatgttctagggttttgatagagaaagcatcctttgctctcctggggctcttgtgctttttccactgagtatttcctttggaaaagttgtcatccttctttctgcattttatgagaagctgcctctctgcctgagctgttggtttgtaggtcagagttgagtggtcacatgggaagagctaggaagaaaaaggtttggagtaagactgctaagtctaccgacctcaaccagactgggtgtgggtttggggtgggtgggggaaaagagaaaccaatgttcccggttctgggtgcttgagggtctcctctatggggacagccagggctgagttgctcagtgatcaggtgacaggtcaggagggagaacagggatgacagtgttgggtcatataacatgcaatggaaggactatctaatacaaaacaaaaaaaaaagcagctcatgcaaaatagttatcttacattcacttaaattttgtttattcacacccacccttgaggctgctggttgtctttctgtgaaactgcccaggatggctggttttttgtcttgatatagtggaaatcacatgaatttggagtcagataaatttgggtccaaatcccagctctgccttctcacagctgtatgaccttggacacactatctaaccccagtgtgcaatatgggaaatgggctcctcctcaaggatttggtggaaggattaaaatgatatattaagttggtacaaaaataatttcggcttttgccattacttttgcaccaaccgaatagcttgcagctcatgccttgtattcaatatattcagtgtcactatcactattctctccatctcccctactcctgttgcttctatgatcagttagtctattacatttatcatatcagtattttatgcttttgttgtgtctcaactataggaagtattaaaagggaagaaagaagttgaagaactacatagtaggaaatatcccaaatccaccatctcttctctctgggaggtggtcttagtttctggaaacgttaatactaagtcatcagcaacccttatgcataatagtaaatgagacagtcactattcttattaggatgctatcttagttggattgggctgctatgacaaatgaccttaaactgggtggcttataaacaacaggtatttcccacagttctagaggctgggaagtccaagatgaagacactgacagattcattgtctgctggggggcccatttcctgcttcatagatgatatcttcttcttgtgttctcacatggtggaaagggatagttgtctctcgggtctctcttataagggcactaattttattcatgaatgctccaccattgtgacctaatcaccttccaaaaggccccacctcttaatagcgtgggagttagaaattcagtatatgaattttggggaaacataaatgttcaaaccatagaaagtatgggtttttccaaccaagagaacttttggtagggggcttttctgtgatttactttagcctactagctgttgaaaaaattctccattgcataatattctagctgaattatttatattgcctacaacttgatagcacatttttactctagagaagacattacaaaatagtaactggccatcacagagtatttacattttatgacaggttatttacaaactagcttatttcttacaaccaatgcataaagtagattattttctttgtaagtgaggaaatagaggtttagagaaattgagtgttgatggacacataaagaagagatagcattcatgtttacatcaaatgactccaaaacccatgctctgttaaataagacagtcaagtaagtctaacctaaatagagctgctttctttgagacttctggttgtgtagttcaattagagctggaacgatcacttacacaaaatcatttatattttagtgctactggaaaaattgagcctctgcagtgttctgcttttatcttgctttactttcattaggctggacttacctttactgttttacttttgatgccattgacctggcacacaaacctagggcatgatgtcccagtttcagaggcaagaagaaaagaatctgctttatttaaaaactatatgctatatctggagtttttctagtgagcttttagtgctcatgaaaggcagctacatggaatttcaaatgacaacttagacaaagatatttaccaaataaacacataaagattccataggtttgcaaaccatcttctttccgggaagacgtagaaaagactttcaaaaggcatggatgactcagtcaatataaaagccttagacctctctttctcagttccaccaagtcctaacctgaactcaattagttaacacagtctctgttgctatcatcctagttcaaaccaccacctgggctgacaccttttatattgcccagtatccagttttcccgtaacccctatgatctagcacactgcaatgtctgagttactacaccagggtaagcttatttttcttactttaagatatttcagctagcaatatcctctgctgagtattctcttcctttgacaattacatcattagcttgttgggtcttagcttagttgctatttctgcagaatgacttttccaactttcccctctaaagcagccatcgagtgactctctgtctcatctgcctcttacttttccccacactatgtattatgatttattatgttactgcttatttatagacttatttcttaatcttgaaacaaacttttcagacttctttgttcaggaacttcagaaccatgaacagtgccacacacctagtgaatattaaatatttgttgagttcataatagagatcttattttttttaaattttattattattatactttaagttttagggtacatgtgcacaatgtgtaggtgagttacatatgtatgcatgtgccatgttggtgtggtgcacccattaactcgtcatttagcattaggtatatctcctaatgctatccctcccccctccccccaccccacaacagtcccccgagtgtgatgttccccttcctgtgtccatgtgttctcattgttcaattcccacctatgagtgagaacatgtggtgtttggtttttttgtccttgagatagtttactgagaatgatgatttccaatttcatccatgtccctacaaaggacatgaactcatcattttttatggctgcatagtattccgtggtatgtatgtgccacattttcgtaatccagtctatcattgttggacatttgggttggttccaattctttgctattgtgaatagtgccacaataaacatacgtgtgcatgtgtctttatagcagcatgatttataatcctttgggtatatacccagtaatgggatggctgggtcaaatggtatttctagttctagatccctgaggaatcgccacactaacttcctcaatggttgaactagtttacagtcccacctacagtgtaaaagtgttcctatttctccacatcctctccagcacctgttgtttcctgactttttaatgattgccattctaactggtgtgagatggtatctcattgtggttttgatttgcatttctctgatggccagtgatggtgagcattttttcatgtgttttttggccgcataagtgtcttcttttgagaagtgtctgttcatgtcctttgcccactttttgatgggttgtttgtttttttcttgtaaatgcgttggagttcattgtagattctggatattagccctttgtcagatgaataggttgcaaaaattttctcccattctgtaggttgcctgttcactctgatggtagtttcttttgctgtgcagaagctctttagtttaatcagatcccatttgtcaattttggcttttgttgctattgcttttagtgctttagacatgaagtccttgcccatgcctatgtcctgaatggtaatgcctaggttttcttctagggtttttatggttttaggtctaacatgtaagtctttaatccaccttgaattaatttttgtacaaggtgtaaggaagggatccagtttcagctttctacatatggctagccagttttcccagcaccatttattaaatagggaatcctttccccattgcttgtttttctcatgtttgtcaaagatcagatggttgtagatatgcagcgttaattctgagggctctgttctgttccattgatctatatctctgttttagtaccagtaccatactgttttggttactgtagccttgtagtatagtttgaagtcaggtagcgtgatgcctccagctttgttcttttggcttaggattgacttggcgatgcgggctcttttttggttccatatgaactttaaagtagttttttccaattctgtgaagaaagtcattggtagcttgatggggatggcattgaatctataaattaccttgggcagtatggccattttcaagatattgatacttcctgcccatgagcatggaatgttcttccatttgttgatatcctcttttatttcattgagcagtggtttgtagttctccttgaagaggtccttcacgtcccttgtaagttggattcctaggtattttattctctttgaagcaattgtgaatgggagttcactcatgatttggctttctgtctgttattggtgtataagaatgcttgtgatttttgtacattgattttgtatcctgagacttcgctgaagttgcttatcagcttaaggagatttttgggctgagaaaatggggttttctagatatacaatcatgtcatctgcaaacagggacaattggacttcctcttttcctaattgaataccctttatttccttctcctgcctgattgccctggccagaacttccaacactatgttgaataggagtggtgagagagggcatccctgtcttgtgccagttttcaaagggaatgcttcctgtttttgcccattcagtatgatattggctgtgggtttgtcatagatagctcttattattttgagataggtcccatcaacacctaacttattgagagtttttagcatgaagggctgttgaattttgtcaaaggccttttctgcatctattgagataatcatgtggtttttgtctttggctctgtttatatgctggattacatttattgatttgcgtatattgaaccagccttgcatcccagggatgaagctcacttgatcatggtggataaggtttttgatgtgctgctggatttggtttgccagtattttattgagaattttcgcatcaatgttcatcaaggatattggtctaaaattctgttttttggttgtgtctctgccaggctttggtatcaggatgatgctggcctcataaaatgagttagggaggattccctctttttctattgattggaatagtttcagaaggaatggtaccagctcctccttttacctctggtagaattttgctgtgaatctatctggtcctggactctttttggttggtaggctattgattattgccacaatttcggaacctgttattgatctattcagagattcaacttcttcctggtttagtcttgggagggtgtatgtgtcgaggaatttatccatttcttctggattttctagtttatttgcgtagaggtgtttgtagtattctctgatggtagtttgtatttctgtgggatcggtggtgataacccctttatcattttttattgtgtctatttgattcttctctcttttcttctttattagtctagctagtggtctatcaactttgttgatcctttcaaaaaaccagctcctggattcattaattttttgaagggttttttgtgtctctatttccttcagttctgctctgattttagttatttcttgtcttctgctagcttttgaatgtgtttgctcttgcttctctagttcttttaattgtgatgttagggtgtcaattttggatctttcctgccttctcttgtgggcatttagtgctataaatttccctctacacactgctttgaatgtgtcccagagattctggtatgttgtctttgttctcgttggtttcaaagaacatctttatttctgccttcatttcattatgtaccccgtagtcattcaggagcaggctgttcagtttccatgtagttgagcggttttgagtgagtttcttaatcctgagttctagtttgattgcactgtggtctgagagacagtttgttataatttctgttcttttacatttgctgaggagagctttacttcaaagtatgtggtcaattttggaataggtgtggtgtggtgctgaaaaaaatgtatattctgttgatttgggttggagagttctgtagatgtctatttggtccgcttggtgtagagctgagttcaattcctgggtatccttgttaactttctgtctcgttaatctgtctaatgttgacagtggggtgttaaagtctcccattattattgtgtgggagtctaagtctctttgtaggtcactcaggacttgctttatgaatctgggtgctcctgtattgggtgcatatatatttaggatagttagctcttcttgttgaattgatccctttaccattatgtaatggccttctttgtctcttttgatctgtgttggtttaaagtctgttttatcagagactaggattgcaacccatgcctttttttgttttccatttgcttggtagatcttcctccatccttttattttgagcctatgtgtgtctctgcacgtgagatgggtttcctgaatacaacacactgatgggtcctgactctttatccaatttgccagtctgtgtcttttaattggagcatttagtccatttacatttaaagttaatattgttatgtgtgaatttgatcctgtcattatgatgttagctggttattttgctggttagttgatgcagtttcttcctagcctcgatggtctttacaatttggcatgattttgcagtggctggtaccagttgttcctttccatgtttagtgcttccttcaggagctcttgtagggcaggcctggtggtgacaaaatctctcagcatttgcttgtctgtaaagtattttatttctccttcacttatgaagcttagtttggctggatatgaaattctgggttgaaaattcttttctttaagaatgttgaatattggcccccactctcttctggcttgtagagtttctaccaagagatctgctggtagtctgatgggcttccctttgtgggtaacccgacctttctctctggctgcccttaacattttttccttcatttcaactttggtgaatctgacaattatgtgtcttggagttgctcttctcgaggagtatctttgtggcattctctgtatttcctgaatctgaatgttggcctgccttgctagattggggaagttctcctggataatatcctgcagagtgttttccaacttggttccattctgtccgtcactttcaggtacaccaatcaggatgtagatttggtcttttcacagagtcccatatttcttggaggctttgttcatttctttttattcttttttctctaaacttcccttctcacttcatttcattcatttcatcttccatcactgataccctttcttccagttgatcgcatcggctcctgaggcttctgcattcttcacatagttctggagccttggctttcagctccatcagctcctttaagcacttctcttattgattattctagttatacattcttctaaatttttttcaaagttttaaacttctttgcctttagtttgaatttcctcctgtagctcggcgtagtttgatcatctgaagccttcttctctcaactcgtcaaagtcattctccatccagctttgttccgttgctggtgaggaactgcattcctttggaggaggggaggcactctgctttttagagtttccaggttttctgctctgttttttccccatctttgtgattttatctactttcggtctttgatgatggtgatgtacaggtgggtttttggtgtcgatgtcctttctgtttgttagttttccttctaacagacaggaccctcagctgcaggtctgttggagtttgctagaggtccactccagactctgtttgcctgggtatcagcagcggtggctgcagaacagcagatttttgtgaaccacaagtgctgctgtctgatcgttcctctggaagttttgtctcagaggagtgcctggctgtgtgaggtgtcagtctgcccctactgggggatgcctcccagttaggctactcgggggtcaggggtcagggacccacttgaggaggcagtctgcccgttatcagatctccagttgtgtgctgggagaaccactgctctcttcaaagctgtcagacagggacatttaagtctgcagaggttactgctatctttttgtttgtctgtgccctgcccccagaggtggagcctagagaggcaggcaggcctccttgagctgtggtgggctccacccagttcgagcttcccagctgctttgtttacctaagcaagcctgggcaatggcgggcgcccctcccctagcctcgctgccaccttgcagtttgatctcagactgctgtgctagcaatcagcaagactccgtgggtgtaggaccctccgagccatgtgcgggatataatctcctggtgtgccgtcttttaagcccgtcacaacagcgcagtattagggtaggagtgaccgaattttccaggtgccatctgtcacccctttctttgactaggaaagggaactccctgaccccttgcacttcccgagtgaggcaacgcctcgccctgctttggctcatgcatggtgcagtgcacccactgtcctgcacccactgtctagcactccctagtgagatgaacccggtacctcagatggaaatgtagaaatcacccgtcttctgtgttgctcacgctgggagctgtagaccagagctgttcctattcagccatcttggctgaccctcgatagagatcttatttatattgagttgaagatgaaagacaaggagatatatagtcagcagtatctttcaatataaaagataaaaatgtgtgtataatgttatacattattgtattgttaatacatgaaacaatatttaaatatattatgcacataaaaatacatgtatatttctataatgaattaatcagaatggctttttaacaacataatccagatcatattactcttattcttaaatcctttcaagacttaaaggccctacatgacttgcttcctgtttcaggtgtattatctcctataattttctctcttacacattctctttgagccatttctggccttcacgctgtttctcaaacatacaaggtccatcataatttagggtatttgcaataattcctcattctgtctggaatggtcatcccttagatcttctgtaagtctttgcttaaattttaccttttctttatttttttatttttatttttgagacagagtctcgcttggtcacccaggctggagtgcagtggcgcactctcggctcactgcaacctctgcctcccaggttcaagtgattctcctgtctcagcctcttgagtggctgggactgcaggcacaccaccatgcctggctattttttgtagttttagtagaggtggggtttccccatgttgtccaggctggtcttgaactcgtggcttcaagtgatctgcctgcctcggcctcccaaagtgctggaattacaggcatgagccactgggcctggccctaaatgttaccttttcaatgaggtaatcctatttttcttgttggcaattccaatctatttcattgccgatcttttgcactcctcatcttccttattctgcccactattccctgatagcatttgtcaatctctaatacactctgtatttacttacttctatatgcttatacattttattatttatctactttaaaattgtatgtattatttattgtctgtctccactagaataaaaccttgggagatgaggaaaacatgggtttttgacattttatttcactcttgcagcagaagttcctcaaacagtttctgggatataacaggttttcagtaccagttgcttgtgaagtaaggagggccagtccaagtctcaaactgaagaacttggaacctgatgtttgaaggcaggaagcctctggcacaggagaaagatgtaggctgggaggctaggccagtcttgcttcttcatgcttttctgcctgttttatattcactggcagctgattagattgtgcctaccagattaagggtgggtctgccttccccagcccactgactcaaatgttaatctcctttggcaacatcctcatagacacacccaggaacaatactttgcatccttcaatccaatccagttgacactcaatatcatccatcacagagggccttctaagcctttggaatttaaaagttgcattatgacctcagttccctgatgggttgaataaaatatatgattttgtgaattgtttgattttttttcattgtaagggagagatattctcttgtaaatttctatattctaagttcaagtggagactttgttctgtttattttaatgtaattcttgctatggttaggtttgtctatcatttttctagttgttttcaatttgtccaatctgtactttaaaaaaatagcaatgtgttacccataatcaggaaaaataactcaatagaaacagacttagaaatgatagatgaaggaattagtaaacaaaaacttctagataatgaatataattatgttcaaggatataaagaaaaacattcacacaatgaggaatctcagtagaagtaaaaacaaaccacgtagggattttcagttttagaattaaaaaatacagtatctgaaataaaagtttcactgatgggcttatcagaagattagcctttataaggaaattccagtgataatgaagataagacagtagaacttgaagcactgagggaaaaacaatataaattgaagtgaactgaaccaacatcaagtgagacaacatcaggtgtcataacatttgtagaattttatctcagaaggacagaagacagagattattcaggaaaaaattgagaaaataatgacttaaaaacttccaaatttaaagaaaaatagcaaccctaatcagtgtaaacacaaaaatgccataagtaggtacacacatgaaatcagtaaaacatatgaaaaccaaggataacaagaaaatagcagctagagggaaaaaagatgtatttcctatagagggtcaatgttaaaaatccctttgacttgtcagaaataatgcaagccaaaaagccatggaatgacactttaaaatgctgaaagaagaaaaaatgtcttacaatgtgcacatgtaccctaaaacttagataataataaaaaaaaaattaaaaaaaaaaaaaaagaaaaaatgtcttgtgttctatgttcatcaaacttttttttttaaaattggaggtaaaataaaaatgttttcaaataaacaaaagctgagagaacttgtcaccagaggcttacgctgcaaaaaatgtttaaagaagctctcaggctgaaggaaaataatacaagaggatatttggacctacatgaatgggtgaagtgaaatcagaatggtaaatatgtgggtacacattaatgaatgttctcatttctcaatttatttgaaaaataattggctgtttacagcagatattggtaacagtgtattgtggagtttctaacttagggagaagtaaaatgtctagtaataatagtgaaaagtggggaatgggaattcactgtgtaaagattatcagattatacatgaggtggtatagtattcatgataaaatgtgtttaagggtgcatattgtaatctctagagaaatcactaataattatacaaaatattatggcttaaaaaatccaacaaagaagataaaacaaaaacctaaaaatggaaaaaaaaaaaagacagcagatggggaaatcatttgatttttgtttgcttgggtgacatgggattacatattctttttttttttttttacagatttaataatacagtaagctaaacattttaattgttatttattacttcttactttctagatgtcagtccttaggaaaatcactgtaatcctctgagcttcactttcttcagtggaagaacacgtggttaggctacatgattgctaagagcccaatgattcttaatttctctaggttttagctctttgccctgtaactgagattgtaatctgagcagaatttcaacatgtcctttctttgatgggcagtggggagtcttgtgttacccatgttgtcagcatgtaattagatttatgtaggtccaagaaagtagggatgcttggggtctcatggcagcttcagattgataagaatctgctttcacctgacttaatggtgtctctaattgagccacagaatgcagaaattatagtttcatttttctgagagcatcttatgttctcagtggcatttgtggcttcctgaataattaagctaggactaggataaaatttcttcctgtagcccataaaggttaccagtatgtggccacaaaataggttcgacttccttatagtaacttttttttcagtataattccccaccaagttgctggaaattagcccctctttatagctggtaatgtctgaaatttagtgtgtgtcctgcaacaaatttctcagatatgtctttctggtcccttcaacttaatatgttgcttctgaagcttgtaatatggccgattttgtctctctttctctctctgcctttctcactctttgttagccatgtagagggcagaaggtaattcctaactcccttcagcaaaactgagaccacaactatgatttttaacaaggctttggttaaggcttgggtcaacaaaactatggttcagaggtgccataaatggagacactaaacctgcaggtgcaaatttgacatccaaattccttagcacggcatctttctatgtagcttcaggtctgctttctcctagaagggattcacttacctccacgcttggcaatgttccaagcatttccattctttggagtcaactattccctcttctctaggctcttctcaatgatttctacagactaacctattcccagggttatttatttttgttcagaatatttatattttcactatgcatcaataattatttagacctaactataggttttactggtttatttgttaccattttttgcttaagcctaaattattctctttttcctgtttctatttttgctggagtgtatcctaaatatttcttttatagatgctctgtgattgggtaactttctgagtcttcagaaatctgaaatagtctttattattccttcctggttgaatgttagcttgactgtctaatatttcagtctcatataattttccttaagtaatacaatttccccattgtcttctggcaatcagtgctaccagttagatagcccatgatggtctatttcttttttcttagtggctaatttctccatttgatttcccgttttttgaaaaggctttcatgacctttttcctttattttgggggttttgaaatgtcatttgccttttttctaactacagaacacggctctttcttttgaattcccattgtctgacattctttgcgataaagatcctttttagcactgagaaattttctcctggaagatacttaattatttcttctccaacatgtctattcttctcttttgacttctttttagatagaatctgggcattccagatatctcttctatgtcatttaatttaactttttcttcatcccaatctatcttgcttgtttctgttttgctctgggagtagtccgcagcccagtcctccaactcattaatttcattcttcagttgtgttaattatgtaattcagcccaactatacattctttctcttttttattacttttttttaaagtttgaaaatcatttttaaatttccaggatctctagttgttttttttcatggatttgctgttttcccaaatatgaaattatcaattacatttattaaatttgttctacttgttctattacatgttctcttcaaaatgtagttctcctagttgttgaattagttgactgtgtcgcagtgaaagatattagtcagagttcaccagagaaacagaatccaaggtacacacacacacacacacacacacacacacacccacacagatttattataaagacttggctcacattattatgaggctgagaaggcccatgatcatctatctccaagcaggagacccaggaaacccagtgctatatagttcagtctgagcctgaaggcctgagaaccaggactgtggatggtataaagcccagtccaagggctggagaagactaatgcagagagagaggtttcaaacttcttcctctcctttgccctatttgggctctcaaaagattggttgattctcacccaccctgggaagggcaatctgctttacttacaccttcagttaaaatgctaatctcttccagatgattattaaggaagggtgagctactattctgggtatcctgtttttctaatgcaggagcttgtgttccattagcattgacggcattacccaggtgttcccaccaagtcttagctgctgttttgtgcagggtggggaaagcgcatcaacctttttgctgctggctgctcagtacaaactcaggacgtagtagggatcatcctacttgctactctctgcttgtagaacctctgcctccaatttcatctacctacacacttgcctctggcaggtgtcttgggctatagttttctttgtcaatctgaccctgtgtcctcattcaaatctcatcttgaattgtatctcctgtaattcctacatgtcatgggagggacctggtgagaagtaatgaatcatggaggtggatcttacccatgctgttcttgtgatagtgaataagtgtcacaagatctgatagttttataaaggagagttcccctacacgagctctctcttgcttgccaccatgtagacgtgactttgctcctcctttgccttctgcaatgattgtgaagccttcccagtcagtggaactgtgagtccattaaacctctttttccttataaattacctagcctcgggtaggcctttgttagcatggtgagaacagactaatacagtctgatttctatttttgcaaaatttttacagaatttccattacatggatgacactctttcttgtttccttatgttataggtttcttatttttgtaagcacatattttattctatgtctaataatttgggatattaggggaatgtggtatatgtgttcaattcagctcaccatgctattctctgatccctccaatggtttcttatctctgccacaattatagaccctcaagtcctctccacagcctcttttgaccttcatgatctgtccccaggctacatttctggcctcattttctattaatcttcccctgttgattctgctccagttttcttgaccttgttgctgggttcacaaaaacaccaagctatgctcctgtgtagtgccttcgctgagcacttgctgtttgctctcttctggagttctttccccagagctgcatgagttgttcacaattctgacagctccctcctgtcctaattattgagatagtttctggcatttcacctttatttagtgtgggccattattgacttcaggttacagtaaaaaacaactgaatgtaattaaacaattagaactactcttagctactcaagccaaaacatcaaatccagtatttctcatgatgataaattcctgaagcgaaattgtgtttctttgtctctaagctagaatactcaaaatccattctgacataagtgtcttgaggtgtttttcaatataaatgataggttttggctctgtgtccccacccaaatctcatcttgaattgtaatctgcatgtgtcaagggagaaacctggtgggaggtgatttgattatgggaatggcttccatcatgctgttctcatgacagtgagtgagtctcatgagatctgatggttttacaagtgttgacagttcctctttcagtggctttcttttagctcctgctgctttgtgaagaaggtggcatgattgtcagtttcctgaggcctccgcagcctttcctttataaattacacagtctcagggaagttctttgtagcagtgtgaaaacagactaatacagtaaatttgcaaaactttgttactatttatgtataaaccttcttctctctggtttgattttgtaattaggaccctagagacggatgagatcaattataataatagagttgaaggcaatgaggggcagtcaagggtgggggcatagagaaaataatcatttccttaaatagtaagtcttttaggtgacattattatgtgggctctacacaagtcacgaccagccttatcacacaagggagcaatggctacttctgctggcagggaagaattagtggacttcaggtttgcggtactcctttaaatgtcacccttccagttctcagcaccctgtcatttacaatcacaaccttaactttcacataagagaggctgtgaattgcatctgtgttattacttagcaattgctttgcagaatcatactctgttttcagttacaacagctgtatggagctgcaagttgaagtttatttaagaaaatcatagaagttgcctggttttcttactgtgtcttgagcagaaaatttaaactgccaaatatgtcattttgtttatttaaacttttcagtggaggcagagtagccacctcactcacagaattctaatcatcctgacaatcttttcactatgctataacaattgatattcagtctgattaaatcataacatcaaaaagcactgtaattcagatgatcacaagtaattctttaagttgctgttatgccactatttggagtccaaactttaaaacctccaaatccaagaaggggggaagatagttttagattcctgtccttgttggtctgttgcctataatcttccctgctaccaaattctttttaatgttgagttctgttgtagataacagaaaccactctagctattttaataataaaggcatttaacatattatgtactcttaaaattgtgggagtagctgaagagagctctgtggaggctttccagggatccttcaggaatggttcctagaacatcactggaaaagtggctaagagagcagttgccttttctatttcagaataaaagaatggttagaaagttggagagatggtttagctttgtgtccccactcaaacctcatctggaattgtaatctcccagtgttaagggagaaacctggtgggaagtgattggattacagggacagtttcccccaggctgtcatactgttctcgtggtagtgaattctcaagagatctgatggttttataaatggtagcttttcctgtgctcacacacacacttctctctcctgccaccatgtgaagaaggcccttgcttccccttcaccttccaccatgattgtaagtttcctgaggtctccctagacatgatgaactgtgaatcaattgcacccctttcctttataaattaaccaatcttgggtatttctttatagcagtatgaaaacggactaatgctgctggggaattaggaaaccattatctcaattgctgggtccagaaaacaggagggagccatttccagaataattgaccatcttagctgtaatcccttctagcacagtggatgcacaatagcctggctctcaaagggcatgagtctagggacttgacactgggaccattgctaccactgccacaggaaagctctgttattcccacaactcacctttccagaagacacagtagaagcagaaaaatcctatttctgcctcccttttttcttccacatctcacaaggatgtgaatgcttggtggtatctaggttatgtatcaaactccaactgtacaggaatctgggagatgtaatcttggctttcctgttctaaagggtgcagttacaatacagcataatggagttcagggggttaatctataacatcaatcatactggctgttgttttctcttttgcacttgctgcagatatgtcaaatatgttttacatatttttaatgaagtcatttgttagcgattttgaattttgatgtggccaaatttagcaattttaatttataaattttctttgcttatctcttggttaagaagacctttcctattttagtaggataatatatattctcatccaattgtttcagctttttgttttgtgcaaatgacatgagttgggacctaaatttattttttgggcatgtcatcacttgtattaacactattagttaatagttgattctttcctagtaacttgaaataccacttttataatatactaatgttccatatgtgcatatgggcttgtttctggactttttattctataacaaatatttatttgtctggtttcatgcattaattaccatagcttctaattcatcttaatatttggaagggcaaatcacccctatattgttctcctttttcataattgtcttggctgtgcgtctgcatttactttttcatattaattttagaattagcttgtcaagttttatttaaaaatccttgagacttttattataattgaattaactttatagattaatttggaaagtttgatatctttataatattgagtcttcccatccaataacatcaaatatctctccatttattctggcctccttttatgtctttcattaaagttttgtagcattttccaaagaaggtcctgtgtatttcttgtaaagtttattcctagaagctttatagtatttgattcttttatggtaaataggatctttttatagaaaatatattgattgtgttatattgctcttatatctggttttattgctgtaatctttctaattagcttaatgattaaagtttatgtgatttggggactgggaaaagccttctactaggacagtaaagcagaaaccatgtgtacagattttgctagttttttctgcagaaaaataaagattataaaacatgataaacataaatggaaaaatagtactgagacaacatttgaaatacataagacagaaaaaatactgatattacttacaggtgaagggcttcataataaacaaaggaaaagatgatcaccataatagaaaaaaaaggctaaggtcatgaataaacaatctacctaaacaaaaagaaataagtatttgcaagaaatgtgaggcaaaggtcaagctcattaataaacaggaaatgctaacgaaaatgttttaatccaccacctacaaaactggggaagctgaacaagggataaccctcatgttgtcattagtttggagaaagagaaaaaagaaagaaaaaagggaaaagagaaagtcttttacacttgtagacccttcttgaagattctttagtaataaatatcacgagctttaagttgctcctgcacgttaacccagcaatttcacttttaggcattctaagatgtgtatttctgagacatcttaatggatatacatgactatgaggaattttctgtggtttggcaaaaagctaacttaaagtttttaagtaacagaactcaggatttgaaatgtgctaatgtacattgtaaactgcaaaataatatattttaaaagttctcatttaaactttgattatagaactatttttgggcagagagtacttcaagagattagaccaccatacgcaatatgatttgagaggtatgggcttgacattatcataaaagcatgtaacaatgagctgtaagtgtgttcataatagcattgtacacaataacaaaaatagttactataaatgtgtaagaatatgtaatgtttaaataaggcacactatattgatttcattgaatcttatagtcatcaaatacattttagaaaagtaattaatgcagagaaaatgttcctgatactttttaataagaaaaaccaggctataagctttatgtatagtatgtaaaatactttgggggtacatatatgcacagaaacatgggtgtaagtaggattatcaaaatgtgaatagggataactgttactttgtgttattattagtgacttatttcttacctttactgttttgtttttcctttaattaaacatcaatgacctttattctaggaaatatgttttcttaaagttattgcaaataaatcatccttttattttcatgaattaatgttgaatgtgtatcctcccactcctctatttcttttttttttggttttgggtctttactgagttctgttcatattacgcattgtttttaattgtatttaatattctatgcagctgtccttgctctttcgaggtgacatttaatacatgaatttttaagtcagactttatctttggtgcagaaaataatgcccttttaaagcatctgctgcattttaaaatgtgttttcagataatatctcttccattcatcactaacctcataagtgagtaggttacatgaaatctgaccacttcctagtcctgaggacagtgtgtcatataaatggcaggccaacagagtttgacccttgggcacagtgtctattttgcagttctttctgctttccaacaccattcacaaaaatgtaggcactaccatgcagctctttaaagaactcactggccacttcgttttctctttgaacgaggctcccccttgtaaaaagccagccttcactgtttttgcacttctgatccagcttccttgtcctccttctcatcctagtattttttattgttttatagtacctgcccatgtcgtgataagcagcaactgtgtttcagaacctttccaccatatttgtcttctccacttgcaattctttctcttattaccacgaacagtttccctcagttctctgaccattcgtaaatcaatctcataaatttatttgtgctcttgtcttaataacttataatgtatagtcttactgatgggagctctcagggaactctcagtaactctcagaaaagccatatctactgttagtgtcaggcccacatctcaggcccccaaagacttttcctctctgcattttggattcaggctgcttctctctctcagtgaccaatcattccctctaacttctcattgttaggtctgacatgttcctgtcattggacgtttgcactggctactctcactacttgggatattttttccctagttatcatcttctcaaaatatttgttcaaataagatctcgatgcaacgtgtctgagcacctctctttaaaattgcaggccccttcctacctcctgacctcttgtcatttctcttttatctttctgagttcaccttttccttatagcaggcatcattttgaaacaactctgacaatgtacttatttattatgctgtcctgaatgtcttctatgtattcttccagatccactcttcacacctctttgctctataccctaaaagccggcttgtgagcacctgagctcagggcaggatcatcacacactggctgagttcctgacccacactcacaatcctgtaaggtaaccttatcctgttttcacatttctgtaacagcttcctccatcatcatacatctattgtttactctctgtttctctgtattttcatggaagctccatgagggcaaaattctgtctgttgttcactgacagatcttgtgcgcccagagcacagcttggcgaataatagatgctcaggaaatacctgctgaatgtttaatgattattggctctggcttcaaaaaaatacagtttcagcccatttaccatatccctcatcactccttttttttccctaccttcagagtttgataatttacattaattattcctcttgcctttttaactttaaataatatgcttaaaactttattttttgctctataaaatttagacaatatccttgatttcctcctttttgaaaaaggattagagctgctcttctcccctccccctgttccattgtttcacatctttataatattaagctcaacaacaaccctgctgttttaagctctatattagctgccataacctaatactgcagactgggcggcttcaatgacaaatgtttactttcttgtagctttggagactggaagtccaatatcaaagtgtcagcaggtttggtttctcctgaggcctctgtccttagctggcagttggccgcttctcgctatgtcctctcttggtgttttctctttgcacgtgcgtccctggtgtctcttctgtgcgtccaaatgtagtctttttataaggacaacagtcagattggattagggcctgccctaacggcctcatgtaaatttagccatctgtttgaaggccctatctccaaaggcagtcatattcctcggaattggggattaggtttcaacatctgaattttttttttaatttttaaaattttctttctttctttttttttttttttaagagagagggcacaattaagcccatgacaagccccagtgaattctgctgtatttttatttatttattcttagtttccacgtacaacactgaattcagctttattttgtctacagtttggttctaaaagtttaaggccaacatataatattgtatattgaatatttaaatctactaaaggctttatcaagctgtgtgttagaattgcattcccttcacaggacttctgtagcaatggaggaggaatattcctagggtgatgtaaatggattatttccccacattctaaaatcatgccactttttatttgctttgtatttcaaatgacttcccaattcagttgcatgatctgcatggctcacagaatatcaaacttaacgtaattttctcttgacatcctgtgagcagtgtctccttctctggcacccgctgcttacatttagatgcatttgtctttctttgcaggtgaacaatttctttttctctctggaactttcgaatatcgtgtccatctttgcagttctcaaattttataagtttttctcatcagtcttcttaagtctcctgtctttctttagtactagcaaattctattccattccattctattttaatttttctttttaaacacctgttgacaatgaatttttggtctcttcatgtctcttaaactttctgtcatattttagagctccttgtgttttaacttcacgtaatggctaattttcttcttactttccaatcttgggttgagttttctattttaagtactatattttaaatttcaaagagaagtttcttatatagctgtcgtaattacccttaagaagaaaactataattaaagttacgcttctttatcaatatcaatgacaaaactccttcttgtatcataaaaatcaattagtaaacttttactgcctctattttttcttctgtttatccttttaaagtctgaaaaatttggaaatttttactggcttatgaatattaccttacacctttaaaaattatttaacacaaaattaaatgtcttcaaatgttatttatggtatatacaataaaacatatgagatttttagatttaattctacattttagcattttcagtgctcactgccagtccttattgtagtatgtattttctcatttttggttattaatattgaccttttctcattactttgagaatagtccccccaccccgaaacattatagatgttatttcctgagtccttgtgcgtatgatcacctttctgttggttttccatgtaaatgacaaagtgaatggcctcagaactcttgatatttttcactcacgaccataaagacattagaaatctccttgacaattggagttgcttgaagagaaatgggagtccagctctatattttcttctttgtggctgtctgaattcttataccatgattactttttttagtccttgaagaaaaataatcactggaataaagctaaatgctagtttttttcagaatattgttttcttaatattctgtgctataaatttgtaggtgtaggtcttctgcataggaaaatatttcttttatgtagttgatgattgcttttgtaatattgattctgatctctatggaaacactgactattgctattttaaatcatgagctattcttcataatctgtattctttctgattgctttcataacttatattttttctgcattttgatagaatttgtcatttctatgtttgtaatctacaacagaatatagattctgtttcttattgctttcaatgtcatcttaaatcttattatatcataacttacctatattatttccttacaataacttctcagttttcatttcagtctcatagttgttacatattgtctttcctctgtgttttgttgttatttactttctatgagagtataaagcagatgtttgctagagtaaataattttcaaaaataagctctttctctggtgtgttttgtgtttatttctcatttatactgcttttttatttttcagactttgctgttatttatgcttacttatttttaaatgagaaaaggtctattctcttctgatatttgtcctgatatgagtgacttctctttgggcttcagaactagtctaacagaaattgatggtatcttgtaggaccctacactaaaaagccatgactcatcttctgttagggtgtgggtttgtggaaggatctgggccatgggcagttatagcagggaactccatctgtgtaaatatccttctcttctggagtgttgaaactgccctactggcactaaccattaatcctgaaggcaattgattatgaaggtttatgtagtatattagtccattttcaaactgctgataaagacataccagagactgggaagaaaaagaagtttaattggacttacagttccacatggctggggaggcctcagaatcatggtgggaggtgaaaaacacttcttacatggtggtggcaagggaaaatgaggaagaagcaaaagcagaaacccctggataaatccatcagatctcgtgagacttattcattaccatgagaatagcactggaaagatgggtctcatgattcagttacctccccctgggtccctcccacaacacatgagaatcctgggagatacagtcaaagttgagatttggatggagacacagtcaaaccatatcattccaccctggtccctctaaatctcatgtcctcacatttcaaaaccaatcatgccttcccaacagtcccccaaagtcctaactcatttcagcactaacctaaaagtccacagtccaaattctcatctgacacaagtcaagtcccttccacctatgagcctgtaaaatcaaaagcaagctagttacttcctaaatgcaatgggggtacaggtattgggtaaatacagccattccaaatgagagaaattggccaaaacaaacggattacagggcccttgcaagtctgaaatccaatggggcagtcaaattttaaagctccaaaatgatctcctttgattccaggtctcacatgcaggtcacgctgatgtaagaagtgggttcccatggtcttgggcagctctgcccttgtggctttgcagggtatagccccactcccggctgctttcacaggctgacattcagtgtggattttccaggcgcatggtgcaagctgtcagtggatctagcattctggggtctggaggatggtggccctcttctcacgggtcccctaggtggtgccccagtagggaccctgtgtgggggctccaacacatttcccttctgcattgccctagcagaggttctccatgagggccccacccctgcagcagacgtttgcctgggcatccaggtgttttcatacgtcttctgaaatctaggcagaggttcgcaaacctcaattcttgacttctgtgcacctgcaggcttaacaccatgtggaagctgccaaggcttggaggcttggggcttccaccccctaaagctacagcccaagctctacattggccactttcagccatggctggagcggctgggacacagggcacctagtctctaggctgcacataggcccagcccatgaaaccctttttcctcctaggcatgtgatggcaggggctgatgtgaagatctctgacatggtctggagacattttccccatggtcttggggattaacattaggctccttgcaacttatgcaaatttctgcagctggcttgaatttctccctagaaaatgggttttcttttctatcacatagtcagactgcaaattttccaaacttttatgctctgattcccttataaaactaaatgcctttgacagcactgaagtcactgcttcactgcttagaaacttcttccgccagataccctaaatcatctttctcaagttcaaagttccacaaatctctagggcagaggcaaaatgccaccagtctgtttgctaaaatataacaagaatcacttttactccagttcccaacaagttcctcatctccatctgagaccacctcagtctggaccttattgtccatatcgctatcagcatttggacaaagccattcaagtctctaggatgttccaaactttcccacatttttctgtcttcttctgagccctccaaactgttgcagcctctacctgttacccagttccaaagtcacttccacatttttgggtatcttttcagcaatgccccactctactggtaccaatttactgtattactccattttcatgctgctgataaagacatacccgaaactaggaagaaaaagaggtttaattggacttacagttccacatggctggggaggcctcaggatcatggcaggaactgaaaggcacttcttacatggcagcggcaagagaaaatgaggaagaagcaaaagcagaaacccctgataaacccatcagatctcatgagacttattcactatcatgagaatagcataggaatgaccagcccccatgattcaattacctccccctgggtccctcccacaacacaacacatggaaattccgggagatacagttcaagttgagatttggatggagacagagccaaaccatatcatgtggcaaattataaaggctgctccctgtttcccttcagtccagggagtggagatggtgatctaacttttctcccctttgactgcctcctgtgactttgcatttgtttctcaggaagaggaattgtgaattgccccttggtaaggcctgtgaggtttgctgcaagtggacacctgtcccctcacactgtgtatccttcatttcttgggctgatgcccattttccttattactatgtttgttacatacgtggctatagagaagtttctatgttcctatgagtctcagtatgaaacaatcagtaaaatgttatccttttttaaaatgtgaaacattcagaaatattttataatccaggaaagcttacaattgacttttaaatcaggaaagtcacagtatgtgcctcaaaggcttgttgtgaggattgaatgagattagcctggtgctgcacatggtaaactcttggaaaattctagctcttatcatccatagtgggtattattaattttcgtgtttatgccattttattcagctttttttctgtccacatggccgctgttcctggaaatccataattaagatcttagtttggcctgctttgatgctgcctctgttgttggtgggccacttgtaaattcatatgccctttggatgagacttcaaagagactgaaaggttattttggacagcacagcctccacagagaaagctaatatattctttctccacaaatgtctcgtcctacccatctcacatcaataacaaatcacttaagatagctgatgactacagatttattagattatatgcagtcatcttcaagggcaacataaaaggtttggatggaatctaaaataagccttctgacatgcaaaatgctgatgttatactttaatcattgggtttttatttattatctgaaaatatttttatgagtatgtctttttcttatttactatttggttactcagtgattacatggaaaatggaggataaatgcatgatttcttccctttaccagtttttaaggtaatgagttggtttcctgtcttaagataagttaattttttgcatcattataaattcctgatttgatatagaattttatggacttcaattcattgtatttttattgatgcccaaactgaaagatcatatcatgcatctgaaaatatagatccagaatgaatctatatgacccccaaggtatattctagtaaaattactggactttaaagagaaacaaaaatcatttgggcatataagcaaaagagaatgtgatatttaagggggaagttagattatcctcagacttttcagcagcaatcctttatgacaaaggaaatgatgtgaatatatttaagatattcaaggaaagaaaatgtgagctaagaatgtattagaaactgaattttgttgatgaaggacacaatctgtaattaaaatgcaagaaataaagagctattatttccataaacttttcctgaggaatctactaaagaacattccagacaaaaatgagaaggaagacctcagcattaggactgatgatgaggatagaatatatagttatctttagaaatcagagtaaatgggggttacctttagaagtaaggataaatgaggattaaaagagagagtatggtctgcaatgactacatgctctgacaatgttgataaaatacaatgtctaaaaggagggcagattggggaaagcatatgtaaacatttttaattggtttcagtaatcagaattggctatgttactatcatctttctgaaactgtttgtataatgtggggcagagcatagataaattatgaggtattctaattctatatcatctgtgccttgagaaccagaattctcactgtggaagaaggacagtacagaagtaatataggacaaggtaggaaaattcccattgcattaatttgaaaaggaaatgtttgtgtgaactcataggacatcttaccttaaaaaaatctttctctttttctttctctttctttttcttattgtttctgtttctctctttacctatcacctgtctgtatcctagctttgtcctctgaaaaggccataaaacaatgaccagaccagtcacaatgaatattggtagcactgagattcttgcctttaaatattgtttcccactgaattgtctgtttctaggtcagggtagatgagcttgcaataatcatgtcattacaagtagcaggcaagctgtcaaagactactagattcatgtccaaaggactcaggagcaaaactgaggaggtgtccactggccaaatttgggccaatatgcccacagtttgttcaccattttattaggaatggtttcacaagtagagcaaaatatccccacttttcctgcatctctggattgtaccattaacattttactacactggcttcatcacacatctatccagctatccacccactaacctatcttatttttggatgcattttaaagtaaattgcagccatcttaactcttcttcctaaaaacttcagcatgaaaatgtccacttctaactcacaacactagaaatgaaacacaaaaatgaccctgatgacaggctgagagcactgaggagcaggggaaggacagaaacaggaaatctaacaaaggcagagattcagggtggctggaaacaagttcctagccttgacagttttgcctgaggccattcacaggggcatggttccccctctacctgagctttagccatttatcttcatatacatattttcccccgtcatctctgactttattcttattggatcctttatataatagagcagagcattcttgatattgcatttttaaacctaggataaagcagcttcttttatatatatcaagcttcgagcttgtaatagtggaaggaaaaataacgagtaagttattctctgagattatcatgtccccttaggtatgaggaaacttgttggctttgtctgccacattccagacactcagtaccactcagaactccctctgttgactgtgtttgttgctttttcacctaaggagcttgaaacatgctgtcactcctgccaggaaagcccactctctcagaatcacctttgccaggctaagtcctgtggcagagtgtgtatgtttgtgtggagctttgtgtatgttagttacattatgcaatacgcactttcacatacacaaatatactatttctctatattccccaacatttagtgtttaaatgtgacacacacacacacacacacacacacacacacacacgtatttacatacactcacacactcaccatatgaataaactgtcaatctaagtcattttctatggcagcctcagctgatgagagacagcaataaactctcccctatatatttcctttcagctgtgggttcctctggttgtgttgttttgatcaaggacttaggatgataccttctcaataactcagtgaaaagtcagttggaatgcaaagacaccagcttagttactttatatattaatgacagtttaagggattaataagttttgctttataagggccatataagattcctgaggctaagtcgtgttctgcaatccacagacctgcctgtgtaccttaatcactgcttaaatctttcattcataactaaggctggtaccagtttctggagcatagcatgtttttggtaccaaaatacttgaatatccttttaattgaagataatattatctgcctcataatagaagctgtggagttgcttttagacaattcttaaactttattatcattgacatttgctcatggggtatggaatatttagactaagccattttaatgaaaacatttcagttacaattatgccacagatgattatttgccatgacagtcatttccagagcaaattgtaccaaatcaatttaactccatgactgattttttaaaaagagcagccaagccacttccaatttttccattttcatttttatttcataaaattaattttctcagaatcaattctattccatttaaattttaagactaacatttgattcatcaatcaaatgtttcaatttgaattttaagactaacatttaattcatcaatcaaatgtttcagtctgaattttaagactaacatttaagtcatcaatcaaatgttacaccttggctttctgccatgggaagttgctttagtggctattatttcctctaagtctaatatgctttggttacttttatgggatataaattcatcaagaatatataattctttgatctacttttaccaatttttcaaaattcaagttttaacagttaatacatttatcttatatttatttctttaacagtgttcatcatgagttagatatgaaattgatttatgggtatacattagctaatctaagacaaaattgagagcaattttgggacaaagtaagggaaacacacaaactaagaaatatggtgactaggaaagggagaaatgtgggaagagaaaagagaaggagcactttgggaggctgaggcaggtggatcacttgaggtcaggagttcgagaccagcctggccaacatggcgaaacctgatctctattaaaaatataaaaattagcctggcatggtggcatccacctgtaatcttggctatctggggggctgaggcaggagaatcacttgaacctggcaggcagaggttgcagtgagcagagatcatgccactgcacaacaatggatgtgaatgtggtatgtattcagggtgaggtactcagtgcagccttggaggtaagcattgtacacttttggcctgtcaacgcaaaccattttttttgtagctattatatttgaacaaaactcccgtattcacagcagcttgaaatcaaggaagaagaaaccggtttgaccatcttggtttaggagagacatgagaggaaacaatattccatagtgcataataagtaacaagtaattcagagagagagaaataagcatattaattaccagaagacaactgcaaataagttttaatttgaagttgctcataattctctatacttttttgggaggaggggggtggaaatagaagaaatgcatccttaagatctatagcatatttcataggaggtgcacttttttatgagccccacactgggcacagctgcatttttgctagaaggtcatctgaaatggcatggtgtgtggcaaggtcataccatctggacctgccccgaactcactgggtaatctaaagtaagtggtgtttcctcacgaggccacagcttcctatacaaaagagtgttcaattttgagatttttctagcccttgtattacaagttggctgttttggggatgtttatatacctccttttgggcattctgtaaatgaagagagagcggtgttgacacagctttgcctttctatgtactatctgatgacggtgatgctttcatttttgagcggctgccattccttctattatcgactccagctcgtgataagtcagggggcaggggcttggcctggctgaccccggttaatgggaatggagtgtaatcacattagctcagttgagagtttggaaaattacattagctcatccaacaaaagtgaatctgccaataatttatgtgatggatttgcaattagaatatagaagccttttcttcttctttgtgtctctctgataaagaaacaaaaggaaaaaacacccgaaagagattaaaatgtcaaacagaccttacaggttatattttaatagaatttcattctctaactgttggtttgggccccctaagtaatattttaggaaataattttttgatgattattttacataatttactaagagttcttggtaaaggtagataaatacatttgaatggttattaaaagtatttgtcagagttaaacatttccagaatactgattttatctaaaattctcagaggtatatttttttgctaggtctttataatccaattatattaaaaatactacaattgaaagagtatgagatactactagtaccttgagtttggagcccttaactctgtctttgagtggagaaagtgtttaaggtaaaccaggtagggtaagtagacatttgcgtggtagaatctgccaagaggtacctaccaattaaatattaattttttgtcaataatgtgttaagtgttttgtaggtaatatataaaaagccctataggagagttgctatttcatttcacaggtgagaaactgaagctcacacttcttaaacagcttgcccatatcacataactgatagatgactgagtaaaacttcagagcctcgagtattgttctgaattctggctgtgaattaaaaatcacctatgagcttaaaaacagctatatcaatgacagcaatagcaataaagacctattgaatcatctttggggtaggagccatctttagttttcagaagacccacagatagctctgacaggtggccaggactgacaggtgtggatgagggttagtatgggcattatggacagtttctagttttggaaaagtcctagagtgtaactagcaatcataaatgaatggatctttcagtggcctttaggagatgagatatgcttgtcttctggtggtagacaatgatcagctgtacagttgacccttggacaacgtgggggatagacatgctgaccccctgcacagtcataaatctgtatgtaactgtttttttttttttttttttttgagacagagtcttgctctttcacccaggctagattgcagtggcgcaatcttggctcactgcaagctccacctcctgggttcacgccattctcccgcctcagcctcccgagtagctgggactacaggtgcctgacaccacgcccggctaattttttgtattttttagtagagacggtgtctcaccgtgttagccaggatggtcttgatctcctgacctcatgatccgcctgccttggcctcccaaaatgctgggattacaggcgtgaggcactgcacctgacctgtatgtaaattttgactcccccaaaactttatgactaatagcctattgttgactggcagccttactgataacataaacagccaattaacacatattttgtgtgttatatgtatttaagactgcattcttataataaagctagaaaaaaattattaagaaaatcataagaaaggaaaaatatatttgctattaagtggaaatggatcatcatgaaagtcttcatattgagtatgccgaggaggagaaagaaaagaggtattggtcttgctgtctcaggggtggcagaggcagaaggggtggaagaagtagaaggagagacaggaagggcggacacactcagtgtaacttattgaaaaacttctgcttgtgagtggattggagcagttcaagcccatattgttcaggggtcaactccataggtatatattgcaagttagtccctgcactctagaggcttgacaaatatttctcaattaggtttactgggagaattggagttaccttttttcttccacaaagaagaaaggtgaggaacataacctagaactctcaatttccatggaaggaaagaggagttcttccccaggagggtgagttgcagcctcctagggaagaagcagcaccacagtccctggagaaggatgaggatgtaagtggagcaagatgctggaggcagcatcacacaggtggagaatggagaaatatctgaaacacaggcaatctcagtcctcttcctctccgtggtggcagacaattaacggggagggctgtatccgcttctgtacatcactcttgaagaggaacatagtaaaactggatgactctttcagagagtgacagggagttaacggattcaaaaaagttatacattaccgaaggaatttgaattgtcccttatctcagaatggagaatagccaatgtagagggatacttgtaaaatctacaaaatatttgaagatactgttggaaaatagaacaggtaaattctgttttaccctaaggggtgcaactaaaagcaatgaataaaagtcaggagacatgaaattgttaaataaaagaaaatatcttctaagagtcagaaatagtaagactagttataagttcccagtggacaggcagggctgggctattacattattattgaagtaatagagtaactttgaacgttaattgcattttaaaactaggtggctgttagtttctctttcaacatgttaaacaacctctgacaagctctggaagggggaaatcattagtctcaggcagcataagtaatccttaagtatgagttgcctcttgtctatgtggcttatggatatacagaacgcatagcaaaatcttcttgcccagtttgggtaggtgaagaatggtatgctgctgtaagccaatattcggctgctaatcacagaggctagaaaagcaatctacagagcccaaatggggagatgattgatagattaatcaggaaagccaagagcaagtagcagtaggagtcagagatgaacagaaagtggtcagaagaattcctggaatagtgcttctgcctatgacacctttattctctgatcccaatatactttcatggataagctgggctctttgagattcagtgcaatttaattttaattcattttcatttaagagtcattcagcacttttatttatttatttttttgagatggagtcttgctgtgttgcccaggctgcagtgcagtggcgccatcttggctcactgcaacttctgcctcccgggttcaagtgattctccagcctcagcctcccaagtagctgggattacaggcgtgtgccaccatgcccagctaatttttgtatttttttgtagagatggggttttgccatgttggccaggctggtcgaactcctgacctaagataatccatccacctcggccttccaaagtgctaggattatgggtgtgaggcaccacgcccggccagcacttttatgttaatgtactttattttgccaaatggccatacagtacctaactttcaaaactgttgtatttatgcatctggataaataaaaattgctttagtgtggcaaagtagaggagtctctgaattagaagtcagaaaacataggtctgataaaaatattcatttgatcttaaattcatcatgaaaatgtgttagtgactcagttttgtcactggcaaaatgtctaaatatgactgtgaaggtccatttttcaaatttaagattacataattatgtcatatatttaaatcccttacatttaattatgatgaccactatgcttgttattgttcttaatgttctctctcaaacagcctaagactcaaagtcttggtttcatgaaactgccttggaccaggattgtaaatactaggtagagatgaattgtctgagccaattatgtttgtggcagtctaaaaaaaatagaggtgtaacccaaatgacctcagaattctttcgaagccgtgtcttgttaagataatacactattgttttttaagagaatggtgcctggaagaatttatcgtcctcttcaacagattgcatctgtcataattactttaccatttatcatcttttcaatcttttttaaaaattgtcatagaatatatctaacatataatatttaccattttagccatttattaatatacaattcagtggcattaaatacattcacaatgttgtgtaaccatcaagatgatctgcacccgagactttttcataagtcccaacaaaaactttgtacacagtatataataactctctgctttgagccattggtaacccactttgtctctatttaactactgtgggtacctcatataagtgacattacacaaatacttactattctgtgtctagcttattacctatgttttcaaggttcatccatgttgtaggatgtatatcaaaatttaatttttttaatggctggataatattccattgtatgtatagaccatgttttgtttgtccttgtatctgttaatgggcatttaggtgactcctaccttttggttgttctaaatctgttactagcattgttgtacaaatatctgattaaggcccgtctttcaattcttctagataaatattaggttgatgcaaaattgattgcagttttcgtcattgaaagtaatagcaaaaatcacaatcacttttgcaccaatctaatacataggcgtggaatcactggggcatatagtagtgctatgtttaaccttctgagaaactgacaaactattttacatagtaactgccccattttacaaaccctctagcaacgcatgagtttcagtttctccccatccttgaaaatacctgttacttttgttttttgtttttattatagccatcctaataggtatgaagtggtatctccttgaggttttaatttgcatttccttaatggctaatgatgttgaaccttttttttcatgggcttattggccatttgtatatcttctttgaagaaaatgttcattcaaatcctttggctactttgaattgaattgcttttcatgccttccatccacaaatttaatgccttttctatcttaagtaagcacttgtcatgcatggtcatgtaaattttgtagtttgaggcatgacagcaaagctagcataaaattctttttccttcttcacaatttcatagatagaagattcattcttactgtagatcataacaacctcagcatataatttttattttcttatgaaagttgagaactttcactttttcactgaaaggaagcattttacagcttctctttgacgtatttgaattgcccccactactagtcttgccctttggagccaacattaagtccaataaggtttacctgaacacaagcacgagcataagattgttatgctactcagaacatcatgcaatttaaaacttatgaattgtttatttctgaaatttcccatttactatttttgtacctccgttgaacaagataactgaaactgcataaagcaaaaccatggataaaggggaggaggggactactatacttactcaatctcattaattgtcattgttctcttcagattttctatttcttcatgattcagtcttagtagatggtatgtctctcagaatttatccacttcagttatccaatttattggcatataatttttcatagtagtcttttatgatttccgaggtatcagttacattgtgtccattctcatttataatttttcttcagctctcttttttttttccttggtgaatctagcttaaatgcttgtcaagtttatgtcttttcacaagctcagttcttagttttgcttgtcatttcagttgctttcctcatctctacttaatttatttctcttctagtcttcattggttcctttcctctgttgcctttatgcttagtttgtttttctttttccagttccttgagatgtgaagttacattgctcatttaagagttctcttttttttcttagtcatttatcactacaaatttccctcttagcacaggtcttgcagcatctcatgttttgctttgctgtgtttcaatttttcatttgtgtcaatgtatattttgatttctcttgatttcttctttgacacattggttgctcaggagtttgatgtttaatttccacatatttgtgaatttttgaaaatccctcctgttgttgatttctactgttatactactatgcctaggaaggttgagatgatttcaacttttctaaatttgttaagacttatttcgtggccgaacatatgatcactgttggagagtgttccacgtgtgcttcagaataaagtatactacattgcaatcagatagaatggtttgtacgtggaaaacatgtacaaaatgtttggtccatttggtttatagtgttattacactccactatttcctcatggatgttgtatctggacagtccattgttgaaagagggatattgaagttctctggtattattgtatcattgtctatttctccctttcattctgttaatatttgccttatatattttggtgcttcaattttgggggcatatatatttataattcttataacctgttgatgaattgacttctttatcattatatagtgatcttctttatctctcgtgacagaatttgactcaatgtctatttgtctgatgtgagtatagccactcctgctctcttgtggttaccttttttctcctttcacattcattctgtgtgtgtccttttttggttaatctgaatctcttgtaggcagcatattgttgaatctttgtttttaaaaaaatttattcagccactttatttcttttaattggagattttagtccatttatattaaagtaattattgatcggtaagggcttactattgttattttattgttttattttgtagtttgtttccttattcctctcttgctgtcttcctttgtgatttatttaatttttatagtggtattctttgaattctttctctttatcttttgtgtatctactaaaagttttttctgcttgtggttaccatggatttacataaaatatcttatatgattctaatttaagctaaaacaatttgaactcatccaaaaactaacacttttatttatctccacattttatactaataagttcacactttacctctttttatactgcgtatccattaactattttagctgtagttatttttaataattttgtattttatgttttatactagagttaaatgtgattttcacaccattgcagtattacagtattattctgaatttcacttttttttaactagtgaattttatactttcttacgtttttctgtagttacctggcatccttttgttgcaacctgagggactcccttcaatatttcctgtaagacaggttttatggtgatgaactctttgacttttgtttgtctaggaatgtctttagctctcatttttgaaggacgaccagtatttctttaaataaaccttctgatctcttctctcttctccttctggggcctccattattcatatattcatgagcttaatggtgttccataagtttcttaaactttcttcattatttaaaaaatatgatttcttttggttcttctaattgaccgattagaaatgacttgtttttcagatttcaacttctttcttctgcatgattgagtctgatatttcaactctcaattaaattttccagtcctgtcattgaattttccaggtctagggtttcggtttggttctttttaatggtttttgtttcctcagtagacttctaagttttatcatccattgttttttaaaatttcacttagttgtctctctgtgtttgcttgcatctcattgagattacttaagatgattattttgaggcctgtgagtatacagaaagatgagtttaaccaggatacatggaacatatgagaaatcccatttctccataatctcagcaatgctagatattatcaatctttaatttttgtcattgtaatagctaaaacatgaaatctttattttacttttcatttttctggactgtagtgagactgaatatcctttcatatgtttatcaactattgaatttctacttctataaattgttggttcatgtcctttggctattttttctactaagttattttctcttattagtttttaggttttatataatggacattagcatattatttgttatagctctttaccattttatctcaggctgtagcttactattgatttcaagtatcttttgctatgttgatgatttttaaattcacacagctggtcatattttcttttgagaattctgggtttatggcttgcataggtttcttctttaccaccccacctgaagtttataaagttagtctcctatattttattatagtatttttccaaatttttatttttagaacttgattattcaatcatttaatttcagtttaattttgtataaagtgtgtggtagggaatctcttattttgatagatgaatagcccgttgttcaataacttttttcactgctttaaaagtcactttatcacattttaaatttgtatacatacatgtatgtaaatatatagttacatatgacttctcttctgtgtccctttgattttcttgtgtgtcattagtcttcttttaaaattttgttggctatccttacatattcactcctccagctgagttttataatctgtttatcaattcttatgggccttggcttgcattaaatttatagattaatttgaggaaacaattcaatttttatctgagagaggaaaagaagaacacagggcatggcaccctatatatgctcgggtgagctggtcctatgggtttcaaggcattgtcaaaaaaattcctttgtaggagagttccacaggaagagagggggaagatatcgaaatcagctttcccttatccatacatttaccaaaattagacttggaggttctaaatgcagcaattttgatgaaactacctgctggaatggaaagttgtattactttcattttttcccatactgatatttacctctattgaaataaactgatgttctcaaattacttatttatttagtaaaaacaagttcaaaagagaacagaaacagatagggaaatgaggcaaaaatgctgatgtgtgggagaaggagtttacaatagagagagtaaggcaataagaatattgacaaatttttaaaataatttatattatatgtgaatgttttgggtgaaagaacccttgtgaggaaattaggccttcctataaaagaaaagatactagattactgtattaatcctttcttcatagacccatagaaggcaggcattagatgccaaccccaaagtatcagaactgaccacctacctagttgaacactgggagcaactacacattatttccatagcagcaggagtttaaggaacaactcctctaaaatagaagcactgcagttcttgagctatgctgtgagctatcaactttttctttcattttctttcctgtggtgttttttctttcttgctttccccaaaaaagaaagagaaataaatggttagaattaaatttctttcagcagcgtgcagaactgcagtgttgatacagaacctcatttctgttggggctaatagtaaggagctatttttagactggatctacagtttccttagtaacaagggttgaaagagctctgttctcctgctcgaaatatccccagccagtagttttgcccttgattcctctaactttggaattcttctcaagtgttcataggttcagtatcattttcttccaccttcatgtatttcatagttggagtcctttcattaatatttaccaatccaattgtgtagtatattttgttttgatgataatgtgctttgttgaattgggggatatttcattttgattgctaagctttgtactgcagcagctaaggtctatgcttaagtttctcaggcattgagatttataagctttctcttatatttcatatttctgggcattgtccagaatcccaatcttttcctttaagcatttttttcttccctttatgtttgttctctttttcattccctccagcttgaccatctgtctccctcttattgcttccgcagaaccatgcactaagtacctaggggtgaaatggcacatgccatcaaaagattcagtttacagaagtcatcactgatctatgataagtacagaaggacttctccaaagtactctacgtcttgtcaccatctgggcctgttccctcacctagttagaacacagcaaatgaggccaaggtcacagattcagaccccatacgattcagttcactttacacaaggaagaactttgttttgtttccatagtctgcaaccgcatatgctggtggacccaacttgaaaatgaattcatgctggaggacctagtgagagttgggttggagccagcccctcaatattatcatagaaaactcaaaagcatatgttctgggctggatactcagcaggactcttccctccatgcactctttatgttaaactttggaatagataagtcgtgaacaatcatctgttctaacttgtggtcccacagaagaaaataaaaacccaatgcttggtcccgtgctctgtgtcatttgcctcactattcatttttcctagccacacttctataaagtggatctccatggagttacaaattttacagatgaagattaatggaatggtgcaattaaacctggtgaaatgagctgccttatgtaattgggaagagagttgccattagttaaatataatatccgataactttagtgagcagaaactttgagcatcttctttatttggcttgtgtaatagtagtaaaatatttgcaggatgatttaagatttacagaccatttccatattccccatcttatttggttcatccaacatgagtttggcttgacaggtgttatatttttcagattagaaaaaattatgtatgagattgcatgacttactgatgattacataatttataaagtctttgaactcagatccagggagctttccatgatatcacactacatttcatttcttgacttgtacctacagaaatatttcaacagaaatttgattatattgttgacactatttctattttatttttgatttgattagggatggcagatttcatacaacttctatagttgcaattacacccaaaatcagatttgtgaaactttgatataacctcagaaggagttagaatagctggttccaaaggctcgttccacacaaagcacttttaggtaggtcatctgacatgacagttgacaataaagtttctgaaaatagatttgctttcaaatcctggcttgaccttagtttattcctcaaacaattctaccctacctgcttgggaaataaccttggcaacagtctttctaacaccaatttgccaagttgtgtgctagctctgctcagaattgaaattcaaaagtaaaaaaaagattaaaggaattttagctcagaatcctgggaacaggaaaaagcaagatgttcttagtcttttgtcccccaagaccattgcacttgaattgtgtgatatttctgttccaattaaagggatgccttacgttcaaggggtctaatttacattttcctgctttgcaagctataacattattttatcttagtttttacaacattacataatgcattgtgtcttgatgcaatttaatgcctcctgctgactattcaaaattgctaagcagaaggtcagaccagatcagtgaacagctattaaaatgcataggcggcaacacaaacagtagataattagcacttaatgtaagccaaagctgtgtgaaatgtgaagaaaaaaataacaaggtgtttccttaattctgtgagtgcatcttccattcacattgctggctgtggctttagatccatcatcaatttgcccttttgaaattggtttgttttacttcttgtgaaatattttacacatacagaagagtagatagaactcatgtacagtttaaaaaataattacaaagcaagcattgtgaaccactcagaccaagtagaaatctgctattgttgttctctacagtccgaacagaatcttccctctcctgatgcaacatcaaccaatgaaatttaccataagtccctgcgtatcgctatagattttatcttttcaatagtttgcccactaaaaattttaatttcattttgtctttgaaatgtacacaaataaatcataaaatgtttttcttctgtgattgctactttcattcaatgggatatttgtaagattcatttatgttgatgggtgtatttatagtttgtgtatgtttatagatgtataatattaatatttaatttctgtattgattctatcttgatgcccttggattatttccagttttagagctattttgaataatactgctatgaatatatctctatctcctggctatgtactagagtttctccagagtgtatatttaggtgtaaactgttacatggcagggcatgcatagtttaaatttcccagatagtgccaaactatttccacagtatttgtaccaatattcactcccacaagagagttccaattactctattactaaaacttgaaactatcagatactgcaattttggccaatctaatgagtatttagtggtttttcattgtgtccttaatttggatttggatcaactaatgagttgatcatgtctccttttataggagctgtttgggtatcccatttgggaagagcttattcaaatcctatgcccattttcttacagttgaggtatttgacagattacaagaactttttatttgttttgtataggttacatgttatatgtattatttagagcaatgatttgaaggagatgaaggaattcaccatgggaatatctaagtgaagtgcattccaggcagtgcaaaggtcctagtctagaagtctgcttggagcaccatagtaagagataaattactagcagattaagtcatagggataatggaaaggaggccttgtaggccttatagaaatctttggctgagattctgaataacataggcagtgactaaaattttgagcaaaggagcgacatgacctgactcctcccctccacatttaaaattaatagactttatttttttgagcagttttaagtttagagaaacattgaatgaaatctaatgtcctgttggaagagtctctgcttcccatccctgcaactgtgggttctgcaagattggagaccttggcaccccaaacaagccatactcttgctaaagtatgcaagaggatcttattgaactacatgctatatatgctgccagggcatattggattcctttatataagggccaggtaaaaagaagagtaataatcttggaaggggtgattgatcctgacagtaggaagaggcaggtctgcttttacacaatggaggtaggaagaaatagctgtggcacccaggctatatgcttggatgcctcctagtgcttccttgccgaatcataactatgaatgaacatgtgcagcaacccctgaggatggtaagattaccagggactcagatccttagaaatgacctgcataggcattagctgagaggagggaaatttagagtgaatgatggaggagatgatgggtatcaattgtggacctaagaccaactgcaacaacagggactatagtttatctcgctaagtttacccaaaggaaagaaggtcagtggaaccatggcatgtgtggaggtgtggatctgtgcagagcaaagctgggctatggtggccatggagatttgctgctcaatctctgttcaagcaaatcttctgtagggagcataggtagtcagtcacttccagctataccttcagatgcaacatggagctcacactgttcccagcatgatggggttatgagaattgggaaatttctgcttctaatgagcaacctttcctcagtgagcctccattagcctggctgtgatagtctcagaagtgtgtgatagtctgaggctcttcatactcaattctcctttcttctttctcttctttgacagatggcaggcctacattgtaatcaaaagcttctcccacctatccaattgtcttcccttgctccttcacacacatttcccccaataaatctcttgctcatcctaattccaacttgacatctgtttctgggaagacataatctgaaataaggcatgtttaatgtaattatcaacatggtctaatttaaacctaccatcttgctatttcttgtctatttctcccatctgcttttccttccttcccctccttcttttggatttagtttttttaaaaaaagactcgtttattatctctaccttgctttattttttggcacttgaaaggtagggtttaactttcaagcaatgctattccacttcacatatggtgtaagaaatgtacagcagaacacacccaattcttccctcctgtcctttatgctattttcacatttatagcacattttacttctgtatgtgctataaacctcaaaacacattgccattatttttatttgaaacaatcaaatatcttttgtggagactaaaaatgataaaatgtcttttatttttatacataatatatatgtttactttcgccagcattctctattttgtgtatatccaatatccaactattttccatctgccttaactttccgtaatatttcttatagtgaaggtatgctgctgatcaatagtttcagattttgtttgtctgaaaaagtgtttatttccccttcatttttaaaaagttgtggtaaaatacacataatataaaatttatcattttaacaattttaattagtttattcaaccattaatctgttgaagaacattttgggtatttccagtttggggctattatttaatacaaataaagttgctatgaaatttgtgtacaggtttttgtgtaaatgtaaattttcttggattacatggtgagtgtatatctagttgttttaaagaaactgtcaaattgttttccagagcggctacatcattttactttcacacaggaaggtatgagaatatatgtatcctttgcatactctccatgtggtcttaatttgcatttccctaatgactaatgattctgaatatcatttcatgtttttattttccatctgtatattctcttagtgaaatgttgatatctttttcccagtttctaattggactgatttctttttttcctgttgcatttttagaatttaaaaatatattctacatatgggttctttgaattgagttgtagtttgcaaatgttttctctgtctgtagctggtcttttcatcctcttaacaaggattttctcatgataaaagctaatttggatgaagcccattttattaatttttttctattatggattatgcttctgatgtcatgtcaagaactctgtcaagccttagatctcaaatattttcttttatttgtcaaaaacatttattctgagaatctaaaatctgttcaaagactattggactttagaaaaagcctccacaaaattgtcttatttcttccctaatacagtaataatctaagaataaggaggtaaaaaaaacccttaaaaaataacattgctccagtttgtctgcaggtatgtgattcttttattggtataattatcttttctgtttttacaattttcatgtgatttcagaaaattttggccattacttaaatattttcttctctcctcttttctaggactgtgatacatacatgaaatcacttgattttgttccatagtccctgaggcttcaagttatttccttgattgtgcatccatttggatagcgtctattgctatatctttaagttcttggatctttttatacaatgtttaattggttgttaatcctttgtcatgtattttcattttaaagct

SEQ ID NO: 547 - DNA, 512 bp, Homo sapiens
agcggccgcgggggcggcggaggatatggagtaaagccagagtcagtggccaggcacgaaggcagagcaggaacagccaggaggcgtttattaggggggcggggggaaagagccccagcaccgcccctcctggaagaaggaagaggtaactataactacccaatattgcagccatggagtccatgcttaataaattgaagagtactgttacaaaagtaacagctgatgtcactagtgctgtaatgggaaatcctgtcactagagaatttgatgttggtcgacacattgccagtggtggcaatgggctagcttggaagatttttaatggcacaaaaaagtcaacaaagcaggaagtggcagtttttgtctttgataaaaaactgattgacaagtatcaaaaatttgaaaaggatcaaatcattgattctctaaaacgaggagtccaacagttaactcggcttcgacaccctcgacttcttactgtccagcatcctttagaagaatccagggat

SEQ ID NO: 548 - DNA, 465 bp, Homo sapiens
  misc_feature (383)..(383): n is a, c, g, or t
ggcccgcggggcggcggcgggaggatgcctcgcgccctgcctaggcgttaacggcctcagcgcgtcccgggccgcgccgggaacgcctgagagccgagcccgcgctgaccggggcccgggccggatgggcgctgcgggccggggcgcggaccgcggagcggccgttacgtttttctctcgtcccagctgtgtggacagtgccacacgccctcctggacaacgacggctcttgcgtgcattttccagtgttgcttttgtcagagaggccagcagagccacggttcttccagaaccagccctgagctgagtgaggagtgcccaggagagatggtgaaaatgacaaagtccaaaacttttccagcgtatctgccgaactgtcaccnaacgtacagctgtatccactgcagagcacacctggccaatcatgacgagctcattctccagttctttcaagggacccagggc

SEQ ID NO: 549 - DNA, 551 bp, Homo sapiens
gcaccaggccgaacgaagcttgaagccccggaaggccaccaaaaggttccgggtgccacgcacaagagaccatgtccgggggcagcagctgcagccagaccccaagccgggccatccccgccactcgccgggtggtgcttggcgacggcgtgcagctcccgcccggggactacagcacgacccccggcgggacgctcttcagcaccaccccgggaggtaccaggatcatctatgaccggaaattcctgatggagtgtcggaactcacctgtgaccaaaacacccccaagggatctgcccaccattccgggggtcaccagcccttccagtgatgagccccccatggaagccagccagagccacctgcgcaatagcccagaagataagcgggcgggcggtgaaaagtcacagtttgagatggacatttaaagcaccaaccatcgtgtggagcactaccaaggggcccctcagggccttcctgggaagagtcccaccagccaggccttatgaaagtgatcatactgggcaggcgttggcgtggggtcggacacc

SEQ ID NO: 550 - DNA, 588 bp, Homo sapiens
gaatgtgaggtttctctcaaaggcatcttgcatcagcctgtggatgtatgcctaccaccgggctccttcaccagcaaagtggaaaaagaagcgtttcacaacaaattcttctttttgggtcggggaaacgcagtggattatagctctgttttcttctttccaaaactgtgcacccctggatgaaacctccatcaagggagacctacaagttgcctggggttcagtgctctagaaagttccaaggtttgtggcttgaattattctaaagaagctgaaataattgaagagaagcagaggccagctgtttttgaggatcctgctccacagagaatgctctgcacccgtatgatactccagttccaacaccatcttctgagatgatcctgattcccagaatgctcttggtgctgttcctgctgctgcctatcttgagttctgcaaaagctcaggttaatccagctatatgccgctatcctctgggcatgtcaggaggccagattccagatgaggacatcacagcttccagtcagtggtcagagtccacagctgccaaatatggaaggctggactcagaagaaggggatggag

SEQ ID NO: 551 - DNA, 1165 bp, Homo sapiens
gctgggagtagagggcagagctcccaccccgccccgcccccagggggcgccccgggcccggcgcgagaggaggcagagggggcgtcaggccgcgggagaggaggccatgggcgcgcgcggggcgctgctgctggcgctgctgctggctcgggctggactcaggaagccggagtcgcaggaggcggcgccgttatcaggaccatgcggccgacgggtcatcacgtcgcgcatcgtgggtggagaggacgccgaactcgggcgttggccgtggcaggggagcctgcgcctgtgggattcccacgtatgcggagtgagcctgctcagccaccgctgggcactcacggcggcgcactgctttgaaacctatagtgaccttagtgatccctccgggtggatggtccagtttggccagctgacttccatgccatccttctggagcctgcaggcctactacacccgttacttcgtatcgaatatctatctgagccctcgctacctggggaattcaccctatgacattgccttggtgaagctgtctgcacctgtcacctacactaaacacatccagcccatctgtctccaggcctccacatttgagtttgagaaccggacagactgctgggtgactggctgggggtacatcaaagaggatgaggcactgccatctccccacaccctccaggaagttcaggtcgccatcataaacaactctatgtgcaaccacctcttcctcaagtacagtttccgcaaggacatctttggagacatggtttgtgctggcaatgcccaaggcgggaaggatgcctgcttcggtgactcaggtggacccttggcctgtaacaagaatggactgtggtatcagattggagtcgtgagctggggagtgggctgtggtcggcccaatcggcccggtgtctacaccaatatcagccaccactttgagtggatccagaagctgatggcccagagtggcatgtcccagccagacccctcctggccgctactctttttccctcttctctgggctctcccactcctggggccggtctgagcctacctgagcccatgcagcctggggccactgccaagtcaggccctggttctcttctgtcttgtttggtaataaacacattccagttgatgccttgcagggcattcttcaaaa

SEQ ID NO: 552 - protein, 314 aa, Homo sapiens
MGARGALLLALLLARAGLRKPESQEAAPLSGPCGRRVITSRIVGGEDAELGRWPWQGSLRLWDSHVCGVSLLSHRWALTAAHCFETYSDLSDPSGWMVQFGQLTSMPSFWSLQAYYTRYFVSNIYLSPRYLGNSPYDIALVKLSAPVTYTKHIQPICLQASTFEFENRTDCWVTGWGYIKEDEALPSPHTLQEVQVAIINNSMCNHLFLKYSFRKDIFGDMVCAGNAQGGKDACFGDSGGPLACNKNGLWYQIGVVSWGVGCGRPNRPGVYTNISHHFEWIQKLMAQSGMSQPDPSWPLLFFPLLWALPLLGPV

SEQ ID NO: 553 - DNA, 9645 bp, Homo sapiens
atgcccaagcgcgcgcactggggggccctctccgtggtgctgatcctgctttggggccatccgcgagtggcgctggcctgcccgcatccttgtgcctgctacgtccccagcgaggtccactgcacgttccgatccctggcttccgtgcccgctggcattgctagacacgtggaaagaatcaatttggggtttaatagcatacaggccctgtcagaaacctcatttgcaggactgaccaagttggagctacttatgattcacggcaatgagatcccaagcatccccgatggagctttaagagacctcagctctcttcaggttttcaagttcagctacaacaagctgagagtgatcacaggacagaccctccagggtctctctaacttaatgaggctgcacattgaccacaacaagatcgagtttatccaccctcaagctttcaacggcttaacgtctctgaggctactccatttggaaggaaatctcctccaccagctgcaccccagcaccttctccacgttcacatttttggattatttcagactctccaccataaggcacctctacttagcagagaacatggttagaactcttcctgccagcatgcttcggaacatgccgcttctggagaatctttacttgcagggaaatccgtggacctgcgattgtgagatgagatggtttttggaatgggatgcaaaatccagaggaattctgaagtgtaaaaaggacaaagcttatgaaggcggtcagttgtgtgcaatgtgcttcagtccaaagaagttgtacaaacatgagatacacaagctgaaggacatgacttgtctgaagccttcaatagagtcccctctgagacagaacaggagcaggagtattgaggaggagcaagaacaggaagaggatggtggcagccagctcatcctggagaaattccaactgccccagtggagcatctctttgaatatgaccgacgagcacgggaacatggtgaacttggtctgtgacatcaagaaaccaatggatgtgtacaagattcacttgaaccaaacggatcctccagatattgacataaatgcaacagttgccttggactttgagtgtccaatgacccgagaaaactatgaaaagctatggaaattgatagcatactacagtgaagttcccgtgaagctacacagagagctcatgctcagcaaagaccccagagtcagctaccagtacaggcaggatgctgatgaggaagctctttactacacaggtgtgagagcccagattcttgcagaaccagaatgggtcatgcagccatccatagatatccagctgaaccgacgtcagagtacggccaagaaggtgctactttcctactacacccagtattctcaaacaatatccaccaaagatacaaggcaggctcggggcagaagctgggtaatgattgagcctagtggagctgtgcaaagagatcagactgtcctggaagggggtccatgccagttgagctgcaacgtgaaagcttctgagagtccatctatcttctgggtgcttccagatggctccatcctgaaagcgcccatggatgacccagacagcaagttctccattctcagcagtggctggctgaggatcaagtccatggagccatctgactcaggcttgtaccagtgcattgctcaagtgagggatgaaatggaccgcatggtatatagggtacttgtgcagtctccctccactcagccagccgagaaagacacagtgacaattggcaagaacccaggggagtcggtgacattgccttgcaatgctttagcaatacccgaagcccaccttagctggattcttccaaacagaaggataattaatgatttggctaacacatcacatgtatacatgttgccaaatggaactctttccatcccaaaggtccaagtcagtgatagtggttactacagatgtgtggctgtcaaccagcaaggggcagaccattttacggtgggaatcacagtgaccaagaaagggtctggcttgccatccaaaagaggcagacgcccaggtgcaaaggctctttccagagtcagagaagacatcgtggaggatgaagggggctcgggcatgggagatgaagagaacacttcaaggagacttctgcatccaaaggaccaagaggtgttcctcaaaacaaaggatgatgccatcaatggagacaagaaagccaagaaagggagaagaaagctgaaactctggaagcattcggaaaaagaaccagagaccaatgttgcagaaggtcgcagagtgtttgaatctagacgaaggataaacatggcaaacaaacagattaatccggagcgctgggctgatattttagccaaagtccgtgggaaaaatctccctaagggcacagaagtacccccgttgattaaaaccacaagtcctccatccttgagcctagaagtcacaccaccttttcctgctgtttctcccccctcagcatctcctgtgcagacagtaaccagtgctgaagaatcctcagcagatgtacctctacttggtgaagaagagcacgttttgggtaccatttcctcagccagcatggggctagaacacaaccacaatggagttattcttgttgaacctgaagtaacaagcacacctctggaggaagttgttgatgacctttctgagaagactgaggagataacttccactgaaggagacctgaaggggacagcagcccctacacttatatctgagccttatgaaccatctcctactctgcacacattagacacagtctatgaaaagcccacccatgaagagacggcaacagagggttggtctgcagcagatgttggatcgtcaccagagcccacatccagtgagtatgagcctccattggatgctgtctccttggctgagtctgagcccatgcaatactttgacccagatttggagactaagtcacaaccagatgaggataagatgaaagaagacacctttgcacaccttactccaacccccaccatctgggttaatgactccagtacatcacagttatttgaggattctactataggggaaccaggtgtcccaggccaatcacatctacaaggactgacagacaacatccaccttgtgaaaagtagtctaagcactcaagacaccttactgattaaaaagggtatgaaagagatgtctcagacactacagggaggaaatatgctagagggagaccccacacactccagaagttctgagagtgagggccaagagagcaaatccatcactttgcctgactccacactgggtataatgagcagtatgtctccagttaagaagcctgcggaaaccacagttggtaccctcctagacaaagacaccacaacagtaacaacaacaccaaggcaaaaagttgctccgtcatccaccatgagcactcacccttctcgaaggagacccaacgggagaaggagattacgccccaacaaattccgccaccggcacaagcaaaccccacccacaacttttgccccatcagagactttttctactcaaccaactcaagcacctgacattaagatttcaagtcaagtggagagttctctggttcctacagcttgggtggataacacagttaatacccccaaacagttggaaatggagaagaatgcagaacccacatccaagggaacaccacggagaaaacacgggaagaggccaaacaaacatcgatataccccttctacagtgagctcaagagcgtccggatccaagcccagcccttctccagaaaataaacatagaaacattgttactcccagttcagaaactatacttttgcctagaactgtttctctgaaaactgagggcccttatgattccttagattacatgacaaccaccagaaaaatatattcatcttaccctaaagtccaagagacacttccagtcacatataaacccacatcagatggaaaagaaattaaggatgatgttgccacaaatgttgacaaacataaaagtgacattttagtcactggtgaatcaattactaatgccataccaacttctcgctccttggtctccactatgggagaatttaaggaagaatcctctcctgtaggctttccaggaactccaacctggaatccctcaaggacggcccagcctgggaggctacagacagacatacctgttaccacttctggggaaaatcttacagaccctccccttcttaaagagcttgaggatgtggatttcacttccgagtttttgtcctctttgacagtctccacaccatttcaccaggaagaagctggttcttccacaactctctcaagcataaaagtggaggtggcttcaagtcaggcagaaaccaccacccttgatcaagatcatcttgaaaccactgtggctattctcctttctgaaactagaccacagaatcacacccctactgctgcccggatgaaggagccagcatcctcgtccccatccacaattctcatgtctttgggacaaaccaccaccactaagccagcacttcccagtccaagaatatctcaagcatctagagattccaaggaaaatgttttcttgaattatgtggggaatccagaaacagaagcaaccccagtcaacaatgaaggaacacagcatatgtcagggccaaatgaattatcaacaccctcttccgaccgggatgcatttaacttgtctacaaagctggaattggaaaagcaagtatttggtagtaggagtctaccacgtggcccagatagccaacgccaggatggaagagttcatgcttctcatcaactaaccagagtccctgccaaacccatcctaccaacagcaacagtgaggctacctgaaatgtccacacaaagcgcttccagatactttgtaacttcccagtcacctcgtcactggaccaacaaaccggaaataactacatatccttctggggctttgccagagaacaaacagtttacaactccaagattatcaagtacaacaattcctctcccattgcacatgtccaaacccagcattcctagtaagtttactgaccgaagaactgaccaattcaatggttactccaaagtgtttggaaataacaacatccctgaggcaagaaacccagttggaaagcctcccagtccaagaattcctcattattccaatggaagactccctttctttaccaacaagactctttcttttccacagttgggagtcacccggagaccccagatacccacttctcctgccccagtaatgagagagagaaaagttattccaggttcctacaacaggatacattcccatagcaccttccatctggactttggccctccggcacctccgttgttgcacactccgcagaccacgggatcaccctcaactaacttacagaatatccctatggtctcttccacccagagttctatctcctttataacatcttctgtccagtcctcaggaagcttccaccagagcagctcaaagttctttgcaggaggacctcctgcatccaaattctggtctcttggggaaaagccccaaatcctcaccaagtccccacagactgtgtccgtcaccgctgagacagacactgtgttcccctgtgaggcaacaggaaaaccaaagcctttcgttacttggacaaaggtttccacaggagctcttatgactccgaataccaggatacaacggtttgaggttctcaagaacggtaccttagtgatacggaaggttcaagtacaagatcgaggccagtatatgtgcaccgccagcaacctgcacggcctggacaggatggtggtcttgctttcggtcaccgtgcagcaacctcaaatcctagcctcccactaccaggacgtcactgtctacctgggagacaccattgcaatggagtgtctggccaaagggaccccagccccccaaatttcctggatcttccctgacaggagggtgtggcaaactgtgtcccccgtggagagccgcatcaccctgcacgaaaaccggaccctttccatcaaggaggcgtccttctcagacagaggcgtctataagtgcgtggccagcaatgcagccggggcggacagcctggccatccgcctgcacgtggcggcactgccccccgttatccaccaggagaagctggagaacatctcgctgcccccggggctcagcattcacattcactgcactgccaaggctgcgcccctgcccagcgtgcgctgggtgctcggggacggtacccagatccgcccctcgcagttcctccacgggaacttgtttgttttccccaacgggacgctctacatccgcaacctcgcgcccaaggacagcgggcgctatgagtgcgtggccgccaacctggtaggctccgcgcgcaggacggtgcagctgaacgtgcagcgtgcagcagccaacgcgcgcatcacgggcacctccccgcggaggacggacgtcaggtacggaggaaccctcaagctggactgcagcgcctcgggggacccctggccgcgcatcctctggaggctgccgtccaagaggatgatcgacgcgctcttcagttttgatagcagaatcaaggtgtttgccaatgggaccctggtggtgaaatcagtgacggacaaagatgccggagattacctgtgcgtagctcgaaataaggttggtgatgactacgtggtgctcaaagtggatgtggtgatgaaaccggccaagattgaacacaaggaggagaacgaccacaaagtcttctacgggggtgacctgaaagtggactgtgtggccaccgggcttcccaatcccgagatctcctggagcctcccagacgggagtctggtgaactccttcatgcagtcggatgacagcggtggacgcaccaagcgctatgtcgtcttcaacaatgggacactctactttaacgaagtggggatgagggaggaaggagactacacctgctttgctgaaaatcaggtcgggaaggacgagatgagagtcagagtcaaggtggtgacagcgcccgccaccatccggaacaagacttacttggcggttcaggtgccctatggagacgtggtcactgtagcctgtgaggccaaaggagaacccatgcccaaggtgacttggttgtccccaaccaacaaggtgatccccacctcctctgagaagtatcagatataccaagatggcactctccttattcagaaagcccagcgttctgacagcggcaactacacctgcctggtcaggaacagcgcgggagaggataggaagacggtgtggattcacgtcaacgtccagccacccaagatcaacggtaaccccaaccccatcaccaccgtgcgggagatagcagccgggggcagtcggaaactgattgactgcaaagctgaaggcatccccaccccgagggtgttatgggcttttcccgagggtgtggttctgccagctccatactatggaaaccggatcactgtccatggcaacggttccctggacatcaggagtttgaggaagagcgactccgtccagctggtatgcatggcacgcaacgagggaggggaggcgaggttgatcgtgcagctcactgtcctggagcccatggagaaacccatcttccacgacccgatcagcgagaagatcacggccatggcgggccacaccatcagcctcaactgctctgccgcggggaccccgacacccagcctggtgtgggtccttcccaatggcaccgatctgcagagtggacagcagctgcagcgcttctaccacaaggctgacggcatgctacacattagcggtctctcctcggtggacgctggggcctaccgctgcgtggcccgcaatgccgctggccacacggagaggctggtctccctgaaggtgggactgaagccagaagcaaacaagcagtatcataacctggtcagcatcatcaatggtgagaccctgaagctcccctgcacccctcccggggctgggcagggacgtttctcctggacgctccccaatggcatgcatctggagggcccccaaaccctgggacgcgtttctcttctggacaatggcaccctcacggttcgtgaggcctcggtgtttgacaggggtacctatgtatgcaggatggagacggagtacggcccttcggtcaccagcatccccgtgattgtgatcgcctatcctccccggatcaccagcgagcccaccccggtcatctacacccggcccgggaacaccgtgaaactgaactgcatggctatggggattcccaaagctgacatcacgtgggagttaccggataagtcgcatctgaaggcaggggttcaggctcgtctgtatggaaacagatttcttcacccccagggatcactgaccatccagcatgccacacagagagatgccggcttctacaagtgcatggcaaaaaacattctcggcagtgactccaaaacaacttacatccacgtcttctgaaatgtggattccagaatgattgcttaggaactgacaacaaagcggggtttgtaagggaagccaggttggggaataggagctcttaaataatgtgtcacagtgcatggtggcctctggtgggtttcaagttgaggttgatcttgatctacaattgttgggaaaaggaagcaatgcagacacgagaaggagggctcagccttgctgagacactttcttttgtgtttacatcatgccaggggcttcattcagggtgtctgtgctctgactgcaatttttcttcttttgcaaatgccactcgactgccttcataagcgtccataggatatctgaggaacattcatcaaaaataagccatagacatgaacaacacctcactaccccattgaagacgcatcacctagttaacctgctgcagtttttacatgatagactttgttccagattgacaagtcatctttcagttatttcctctgtcacttcaaaactccagcttgcccaataaggatttagaaccagagtgactgatatatatatatatattttaattcagagttacatacatacagctaccattttatatgaaaaaagaaaaacatttcttcctggaactcactttttatataatgttttatatatatattttttcctttcaaatcagacgatgagactagaaggagaaatactttctgtcttattaaaattaataaattattggtctttacaagacttggatacattacagcagacatggaaatataattttaaaaaatttctctccaacctccttcaaattcagtcaccactgttatattaccttctccaggaaccctccagtggggaaggctgcgatattagatttccttgtatgcaaagtttttgttgaaagctgtgctcagaggaggtgagaggagaggaaggagaaaactgcatcataactttacagaattgaatctagagtcttccccgaaaagcccagaaacttctctgcagtatctggcttgtccatctggtctaaggtggctgcttcttccccagccatgagtcagtttgtgcccatgaataatacacgacctgttatttccatgactgctttactgtatttttaaggtcaatatactgtacatttgataataaaataatattctcccaaaaaaaaaa

SEQ ID NO: 554 - protein, 2828 aa, Homo sapiens
MPKRAHWGALSVVLILLWGHPRVALACPHPCACYVPSEVHCTFRSLASVPAGIARHVERINLGFNSIQALSETSFAGLTKLELLMIHGNEIPSIPDGALRDLSSLQVFKFSYNKLRVITGQTLQGLSNLMRLHIDHNKIEFIHPQAFNGLTSLRLLHLEGNLLHQLHPSTFSTFTFLDYFRLSTIRHLYLAENMVRTLPASMLRNMPLLENLYLQGNPWTCDCEMRWFLEWDAKSRGILKCKKDKAYEGGQLCAMCFSPKKLYKHEIHKLKDMTCLKPSIESPLRQNRSRSIEEEQEQEEDGGSQLILEKFQLPQWSISLNMTDEHGNMVNLVCDIKKPMDVYKIHLNQTDPPDIDINATVALDFECPMTRENYEKLWKLIAYYSEVPVKLHRELMLSKDPRVSYQYRQDADEEALYYTGVRAQILAEPEWVMQPSIDIQLNRRQSTAKKVLLSYYTQYSQTISTKDTRQARGRSWVMIEPSGAVQRDQTVLEGGPCQLSCNVKASESPSIFWVLPDGSILKAPMDDPDSKFSILSSGWLRIKSMEPSDSGLYQCIAQVRDEMDRMVYRVLVQSPSTQPAEKDTVTIGKNPGESVTLPCNALAIPEAHLSWILPNRRIINDLANTSHVYMLPNGTLSIPKVQVSDSGYYRCVAVNQQGADHFTVGITVTKKGSGLPSKRGRRPGAKALSRVREDIVEDEGGSGMGDEENTSRRLLHPKDQEVFLKTKDDAINGDKKAKKGRRKLKLWKHSEKEPETNVAEGRRVFESRRRINMANKQINPERWADILAKVRGKNLPKGTEVPPLIKTTSPPSLSLEVTPPFPAVSPPSASPVQTVTSAEESSADVPLLGEEEHVLGTISSASMGLEHNHNGVILVEPEVTSTPLEEVVDDLSEKTEEITSTEGDLKGTAAPTLISEPYEPSPTLHTLDTVYEKPTHEETATEGWSAADVGSSPEPTSSEYEPPLDAVSLAESEPMQYFDPDLETKSQPDEDKMKEDTFAHLTPTPTIWVNDSSTSQLFEDSTIGEPGVPGQSHLQGLTDNIHLVKSSLSTQDTLLIKKGMKEMSQTLQGGNMLEGDPTHSRSSESEGQESKSITLPDSTLGIMSSMSPVKKPAETTVGTLLDKDTTTVTTTPRQKVAPSSTMSTHPSRRRPNGRRRLRPNKFRHRHKQTPPTTFAPSETFSTQPTQAPDIKISSQVESSLVPTAWVDNTVNTPKQLEMEKNAEPTSKGTPRRKHGKRPNKHRYTPSTVSSRASGSKPSPSPENKHRNIVTPSSETILLPRTVSLKTEGPYDSLDYMTTTRKIYSSYPKVQETLPVTYKPTSDGKEIKDDVATNVDKHKSDILVTGESITNAIPTSRSLVSTMGEFKEESSPVGFPGTPTWNPSRTAQPGRLQTDIPVTTSGENLTDPPLLKELEDVDFTSEFLSSLTVSTPFHQEEAGSSTTLSSIKVEVASSQAETTTLDQDHLETTVAILLSETRPQNHTPTAARMKEPASSSPSTILMSLGQTTTTKPALPSPRISQASRDSKENVFLNYVGNPETEATPVNNEGTQHMSGPNELSTPSSDRDAFNLSTKLELEKQVFGSRSLPRGPDSQRQDGRVHASHQLTRVPAKPILPTATVRLPEMSTQSASRYFVTSQSPRHWTNKPEITTYPSGALPENKQFTTPRLSSTTIPLPLHMSKPSIPSKFTDRRTDQFNGYSKVFGNNNIPEARNPVGKPPSPRIPHYSNGRLPFFTNKTLSFPQLGVTRRPQIPTSPAPVMRERKVIPGSYNRIHSHSTFHLDFGPPAPPLLHTPQTTGSPSTNLQNIPMVSSTQSSISFITSSVQSSGSFHQSSSKFFAGGPPASKFWSLGEKPQILTKSPQTVSVTAETDTVFPCEATGKPKPFVTWTKVSTGALMTPNTRIQRFEVLKNGTLVIRKVQVQDRGQYMCTASNLHGLDRMVVLLSVTVQQPQILASHYQDVTVYLGDTIAMECLAKGTPAPQISWIFPDRRVWQTVSPVESRITLHENRTLSIKEASFSDRGVYKCVASNAAGADSLAIRLHVAALPPVIHQEKLENISLPPGLSIHIHCTAKAAPLPSVRWVLGDGTQIRPSQFLHGNLFVFPNGTLYIRNLAPKDSGRYECVAANLVGSARRTVQLNVQRAAANARITGTSPRRTDVRYGGTLKLDCSASGDPWPRILWRLPSKRMIDALFSFDSRIKVFANGTLVVKSVTDKDAGDYLCVARNKVGDDYVVLKVDVVMKPAKIEHKEENDHKVFYGGDLKVDCVATGLPNPEISWSLPDGSLVNSFMQSDDSGGRTKRYVVFNNGTLYFNEVGMREEGDYTCFAENQVGKDEMRVRVKVVTAPATIRNKTYLAVQVPYGDVVTVACEAKGEPMPKVTWLSPTNKVIPTSSEKYQIYQDGTLLIQKAQRSDSGNYTCLVRNSAGEDRKTVWIHVNVQPPKINGNPNPITTVREIAAGGSRKLIDCKAEGIPTPRVLWAFPEGVVLPAPYYGNRITVHGNGSLDIRSLRKSDSVQLVCMARNEGGEARLIVQLTVLEPMEKPIFHDPISEKITAMAGHTISLNCSAAGTPTPSLVWVLPNGTDLQSGQQLQRFYHKADGMLHISGLSSVDAGAYRCVARNAAGHTERLVSLKVGLKPEANKQYHNLVSIINGETLKLPCTPPGAGQGRFSWTLPNGMHLEGPQTLGRVSLLDNGTLTVREASVFDRGTYVCRMETEYGPSVTSIPVIVIAYPPRITSEPTPVIYTRPGNTVKLNCMAMGIPKADITWELPDKSHLKAGVQARLYGNRFLHPQGSLTIQHATQRDAGFYKCMAKNILGSDSKTTYIHVF

SEQ ID NO: 555 - DNA, 548 bp, Homo sapiens
aaaaatatataatgttttattgtcaaaaatagacaaactttaatttcctttaacaggaatattaatttaacagccttccataagccatcaccattttgtaagcataacaggcaagagagtcaaagataactgttagtgggaaaaggacaacagttctacatccatgcccaagaagccttgcccagtcagtggtgacaactccaggacagcggcagaaacacagtgaacctttggagcttaacaatagccatgcaaaacaacatagatttatcttggcccaattctataaagattggctttgtagtatctttccaagcatttgaagagtttagtttgttagaacactggctaatttgaacagtgacattttaggtcacttatagtatcagtaacaggatcacacctgtttttcagtaacaccaggatgaatacatctgtccctacgccggtctccagcatgtgaagtggagctaatagctagggcaggaaacctgaataagctccttaatcacgacccacagcaaggatatgaaagccttgctgaattg

SEQ ID NO: 556 - DNA, 354 bp, Homo sapiens
gagcggccgcctactactactactaaattcgcggccgcgtcgactgtttgtgttccacttcaagaattgaactttcctcttgacagagcagctctgaaaccctctttttctagaatctgcaagtggacatttggagggctttgaggcctgtggtggaaaaggaaaatcttcacataaatactagatggaagcattctcagaaactactttgtgatgattgcattcgactcacagagttgaacattcctatagatagagcaggttgtaaacaatgtttgtgtagaatctgcgattggagatcttggattgctttgaggcctactgtagtaaaggaaataacttcatctaaaaacc

SEQ ID NO: 557 - DNA, 430 bp, Homo sapiens
actttattcagaaatggtccgttacaatcctcttccgtagagtttgactctctttaaagtctatgctggacagggcatcttcctgggtccctagctttgggggagggtaattcctgccaggaagctggttccaccagtcctgctgtagctgctgtctgccctccaggaccaagaaaggacaggtattctcagtacattatccagctcttcttaagaggacaaccagtaaaggcttcccaaggtgttcctacagttctccctcaactcctaggaaaacaaaggttcaggcccagctctgtcacttcgtattcccttcttgataatataggtactccataagccccagcccacagtcatctggcagaggatggagtggaggacataatacccaagatacccaaggggctgcaaggtaaagggtgggtagcag

SEQ ID NO: 558 - DNA, 498 bp, Homo sapiens
  misc_feature (371)..(371): n is a, c, g, or t
  misc_feature (393)..(393): n is a, c, g, or t
  misc_feature (403)..(403): n is a, c, g, or t
  misc_feature (418)..(418): n is a, c, g, or t
  misc_feature (430)..(430): n is a, c, g, or t
  misc_feature (449)..(449): n is a, c, g, or t
gtgaatttctctctgaattccacataattgtcttaaaattatgcaccatttattgttaagagtgaaagattatgtgtcatttattgtagtggtagaagaaaataaaaccaaaacagaatccaatccaaaagcttaggtttttgttgctactacagtaattacatcttcatatacgaaggacagcacattattactgtccaaggaatgggtgcctcggacaactggttgcttacactgttttcagaggatgaaatagggaacataaggcagggaaggtttttgtctaaatatggaaggcaaggaaagggcttaaatgtcctttatttcaggggggttaggggcctccataaggtttttttttttttttgggnggaatttgtttttccaggatanttccccatcntcccttttggtcacnttggcttttgtncggggaaatttttaccacntaattaggggttacccggggggtttaaaaggccggccgggccatcctgg

SEQ ID NO: 559 - DNA, 5055 bp, Homo sapiens
cgatactacgtgggcatttttggtcgaagagagctgaagtaatgagaagacatcatggaggcccagtcccacagctccacgaccactgaaaagaaaaaagttgagaattccatagtgaagtgctccactcgaacagatgtgagcgagaaagccgttgcctccagcaccacttctaatgaggatgaaagtcctggacagacttatcacagagagagaagaaacgcaatcactatgcagccacagaatgtccaggggctcagcaaagtcagtgaggaaccttcaacatcgagtgacgagagggcctcattgatcaagaaagagatccatgggtccctgccacacgtggcggagccctctgtgccgtaccgcgggacggtgtttgccatggaccccaggaatggttacatggagccccactaccaccctcctcatcttttccctgccttccatcctcctgtaccaattgatgccagacatcatgagggccgttaccattacgatccatctccgattcctccattgcatatgacttccgccttatctagtagccctacgtatccggacctgcccttcattaggatctccccacaccggaaccccgctgctgcttccgagtctcccttcagccctccacatccctacattaatccctacatggactatatccgctccttgcacagcagcccatcgctctccatgatctcagcaacccgtgggctgagccctacagatgcgccccatgcaggagtcagcccagcagaatactatcatcagatggccctgctaactggccagcgcagcccctatgcagacattattccctcagctgccaccgccggcacgggggccatccacatggaatatcttcatgctatggatagcaccagattctccagccccaggctgtcagccaggccgagccgaaaacgtacactgtccatatcaccactctccgatcatagctttgaccttcagaccatgataaggacgtctcccaactccttggtcacgattctcaataattcccgtagcagctcttcagcaagtggctcctatggtcacttatctgcaagtgcaatcagccctgccttgagcttcacctactcttccgcgcccgtctctctccacatgcatcagcagatcctaagccgacaacagagcttaggttcagcctttggacacagccctccactcatccaccctgccccaacttttccaacacagaggcctattccagggatccctacggttctgaaccccgtccaggtcagctccggcccttctgagtcctcacagaacaagcccacgagtgagtctgcagtgagcagcactggtgacccgatgcacaacaagaggtccaagatcaaacccgatgaagacctccccagcccaggggctcgggggcagcaggaacagcccgaaggaacaacccttgtcaaggaggaaggggacaaagatgaaagcaaacaggagcctgaagtcatctatgagacaaactgccactgggaaggctgcgcgagggagttcgacacccaagagcagcttgtgcaccatataaataacgaccatattcatggagagaagaaggagttcgtgtgcaggtggctggactgctcaagagagcagaaacccttcaaagcccagtatatgttggtagtgcatatgagaagacacacgggcgagaagcctcacaaatgcacttttgaaggttgcacaaaggcctactcgagactagaaaacttgaaaacacacttgagatctcacactggagagaaaccatacgtctgtgagcacgaaggttgcaacaaggctttctcaaatgcctctgatcgcgccaaacaccaaaacagaacgcattccaatgagaaaccatatgtgtgcaaaatcccaggctgcactaagcgttacacagacccaagctccctccggaaacatgtgaagacagtgcatggcccagaggctcatgtcaccaagaagcagcgaggggacatccatcctcggccgccacccccgagagattccggcagccattcacagtccaggtcgcctggccgaccgactcagggagcccttggtgagcagcaggacctcagcaacactacctcaaagcgggaagaatgcctccaggtgaaaaccgtcaaggcagagaagccaatgacatctcagccaagccctggtggtcagtcttcatgcagcagccaacagtcccccatcagcaactattccaacagtgggctcgagcttcctctgaccgatggaggtagtataggagacctcagtgccatcgatgaaaccccaatcatggactcaaccatttccactgcaaccacagcccttgctttgcaagccaggagaaacccggcagggaccaaatggatggagcacgtaaaactagaaaggctaaaacaagtgaatggaatgtttccgcgactgaaccccattctaccccctaaagcccctgcggtctctcctctcataggaaatggcacacagtccaacaacacctgcagcttgggtgggcccatgacgcttctcccgggcagaagcgacctctctggggtggacgtcactatgctgaacatgctcaacagaagggacagcagcgccagcaccatcagctcggcctacctgagcagccgccgctcctcagggatctcgccctgcttctccagccgccgctccagcgaggcgtcacaggccgagggccggccgcagaacgtgagcgtggccgactcctacgaccccatctccaccgacgcctcgcgccgctccagcgaagccagccagagcgacggcctgcccagcctgctcagcctcacgcccgcccagcagtaccgcctcaaggccaagtacgcggctgccacaggagggccgccgccgacgcccctgcccaacatggagaggatgagcctgaagacgcgcctggcgctgctcggggatgccctcgagcctggcgtggccctgcctccagttcatgccccgaggaggtgcagcgacgggggagcccacggctacgggcggcgccacctgcagccgcacgatgcgctgggccacggcgtgaggagggccagcgacccggtgcggacaggctccgagggcctggccctgcctcgtgtgccgcgcttcagcagcctcagcagctgcaaccccccggcgatggccacgtccgcggagaagcgcagtctcgtgcttcagaattacacgcggcccgagggcggccagtcccgaaacttccactcgtccccctgtcctcccagcatcaccgagaacgtcaccctggagtccctgaccatggacgctgatgccaacctgaacgatgaggatttcctgccggacgacgtggtgcagtatttaaattcccagaaccaagcagggtacgagcagcacttccccagcgccctcccggacgacagcaaagtgccccacgggcccggtgactttgacgcgcccgggctgccagacagccacgctggccagcagttccatgccctcgagcagccctgccccgagggcagcaaaaccgacctgcccattcagtggaacgaagtcagctccggaagcgccgacctgtcctcctccaagctcaagtgtgggccgcggcccgctgtgccgcagactcgcgcctttgggttctgcaacggcatggtcgtccacccgcagaaccccttgaggagcgggcctgctgggggctatcagaccctcggggagaacagcaacccctacggtggcccagagcacttgatgctccacaacagccccggaagtggcaccagtggaaacgccttccatgaacagccctgtaaggccccgcagtatgggaactgtctcaacaggcagccagtggcccctggtgcactcgacggtgcctgtggtgccgggattcaagcctcaaagctgaagagcacccccatgcaagggagcgggggccagctgaatttcggcctgccggtagcgccaaatgagtcagctggcagcatggtgaatggcatgcagaaccaggacccagtgggacaggggtacctggctcaccagctcctcggcgacagcatgcagcacccgggggcaggccgccccggtcagcagatgcttgggcagattagtgctacctcacacatcaacatctaccaagggccagagagctgcctgccaggggctcacggcatgggcagccagccgtcaagcttggcagttgtcaggggctaccagccatgtgccagctttgggggcagcaggcgccaggctatgccgagggacagccttgctctgcagtcaggacagctcagtgacacaagtcagacctgcagggtgaatggtatcaagatggagatgaaagggcagccccatccgctgtgctctaatctgcagaattactctggtcagttctatgaccaaaccgtgggcttcagtcagcaagacacgaaagctggttcattctctatttcagacgccagctgcctgctacaggggaccagcgccaaaaactctgagttactttccccaggtgctaatcaggtgacaagcacagtggacagcctcgacagccatgacctggaaggggtacagattgacttcgatgccatcatagacgatggggaccactccagcctgatgtcgggggccctgagcccaagtatcattcagaacctttcccatagctcctcccgcctcaccacgcctcgggcgtccctcccattcccagtcgctgtccatgagcaccaccaacatggctatcggggacatgagttctttgctgacctccctagcggaagaaagcaaattccttgcagttatgcaataggctttaggaaaaaaagactgcaaccaacggaaatcaataggagttgaagagattaaactgactttgttttggctgtttttttagttctgtatgtattttagcaatctcatctcacctaactgagatgtgtttcaattatattccttttatggaaaaggactctgaaaaaccctaaagtattctagggagaaactgtcttccatttcagttttgaatcagtattgttacactcaaaccaccctctttttaaaaaaaaa

SEQ ID NO: 560 - protein, 1596 aa, Homo sapiens [sequence omitted]

SEQ ID NO: 561 - DNA, 472 bp, Homo sapiens
  misc_feature (18)..(18): n is a, c, g, or t
  misc_feature (472)..(472): n is a, c, g, or t
gttaaagtttgatgtttncagactctaaagcctatgtttttgtaacttaattggactttcagagtgttaaattatggcttcagagtttggctctacctaaaatttagttagatgccaaccagggagaaattaaacctaatccttcaccccaaatatcagaggttagacaaacccatgttaattggagccttatggttattcatattggaggcaatagctttatttagaggaagcccaggacagggccgtctgggatgctagttctggaaatgcagaagcagccactgtatccctgcccaccccctccatccagcccttttggtactactcagtattgttgacaacatttgggaatcataaagtaacataggaccagtaagtattaagagaatgattctccgttagaattggacctcagccgattttgagccaaaatttaggaactattcagaagacagtttctttcttttgn

SEQ ID NO: 562 - DNA, 603 bp, Homo sapiens
ttttttttttaacatattaccacatccaacttctttattcttgagaaaacaaaaaagtccaaaatcaaaggaaagcacccgttttaaaccctcatatctttctcagggctcactgcagtctggccatatctcaagcaggtctgtccaatggcttggaacatagacttttgcagtgaaactttaaaaacattacttgaattaggattacacaaaaaaaactaaattctaagtgagcacaactatcgctgagaccctgaaatttcaggaaataaacatggttcaaaactcaaactgttcatcaaaataattacgcaggtcagccaccactgcagaaccatcactgctcagaggaattgagtcagcaatgactgatctcatcatctcttcattagcacataagcggttcaacttgggatacgcaaggagtctctgcagaggtacgaaaaatttatctccaacacagaagggtgtgggagagttctctatcttggccttctcaacctctgtgaagactggtccaaagcatgggacaggggcctttgagccaccaatgtctttgggcttatcaccccgttccccagcctgttctttccgccttggcag

SEQ ID NO: 563 - DNA, 441 bp, Homo sapiens
  misc_feature (317)..(317): n is a, c, g, or t
  misc_feature (358)..(358): n is a, c, g, or t
  misc_feature (396)..(396): n is a, c, g, or t
  misc_feature (409)..(409): n is a, c, g, or t
  misc_feature (419)..(419): n is a, c, g, or t
  misc_feature (430)..(430): n is a, c, g, or t
cggcacgaggattgaaaattatcaaagtaaaatgatagggtattttgtttcatgacatcagctgctgctttttgatgtggtgctgctccccgccagtgccgtgaattctccgcctttgccgggtggtgcacgcgacttagactctgctggtgcatgccgaggagtcaggagcccagctgggtaacttttctaatggtcaaaatgttgttccctcctccaccttcctgaagcaaccatgatttgactaaagctctttattactccacctgaatatcagacagtcatgctgcttgcaatttatttattgttttccagangtaaactactgagattttccccacctgtttttaatgtgctnctcgttcataagtattctgatctgttagtaatatctgnaaatatcactttnaacacgcttngggtgcactanttggctgaagc

SEQ ID NO: 564 - DNA, 213 bp, Homo sapiens
ttttttttttttttttttggaaaaagtcaaaagtgttttgtctcgttttaatatctcatcagctttacagggttacaatcgtcttaaatatttctgaagtttaaatacaatctgcataataatgttactataaaatgtaaactttcagggttcttttaaatttcaaaatcacacttttttttttggcctttttgcctttttttttttccttta

SEQ ID NO: 565 - DNA, 597 bp, Homo sapiens
tttttttttttttttttgacagagttctgaatgtttcagagtagtccaagtacacccaaaagcacaataattaaatgaggggcaggagagtggcttagaagaagattgtttttctggattcagctccaacaaagtttgttccgcaggtcttggtgctgtgcgatcatccttctcgccactgatattcagcctggataccccactgttgctctaacagggaggaaaatattttcctgccactgccctgagcctcctgactgaccccagctaccttggacatcccagcttttgggactaccccagacctccctataaccagcaatcagaggccggcacagcaagagtgctttgaaatgctgcctggtgctccagggtgacaggcagcacctgctgtcattggttggtgtctgtgcagtatttgctagagttttgtggatctcagccttgaaacctgtgtctttgtacagtcaaagggtctgagttgggagaaggcacctagatatgctccaccatagcgttctggtgtttcctgtcacccctgaagcctccgagttcttataacaggggcttaaagactgtagcattgagatatgaagg

SEQ ID NO: 566 - DNA, 317 bp, Homo sapiens
ttttttttttttttttttttttttttttttttttttttttttggaatcttcaaaactgttttgggaattgccaaaatcttcctagagacaaggccctgagcccccagagcccgtctcccccatgaaaatattacataagctgtccagaacaaaattagcaaggagggatctttggccctaaaacaggggattccttagctgttcatgcaatatccaaactgccccccacatgacattagatggcgggttacccatttaattttccatttaaattatcttaaagggctggaagccctagctaagttttcaatatcaat

SEQ ID NO: 567 - DNA, 1296 bp, Homo sapiens
ccggcgcctgggttggcgctgcggggcggaggcggtgtctgagcgccgctccggctctgctctctctcgagcttcggcacccgcccgagccgctcgcgcgcccgccacctgtctgcccactcggctgtctgtctgccctcccgccgccagctcctgcctcgggcctgccctctccggtctcggtgctccgaggggcgacgagaagcgcgacggggccgtggcgcaccgggcagggcgcgcggggcgcacggcctgggggcgcacggtgcggcgccggcccatgaggctttccagcgcggggagcggcagcgccggccggccatggggggtagcctgcgggtggccgttctaggcgccccgggcgtgggcaagacggccatcatccgccagttcctgttcggtgactaccccgagcgccaccggcccacggacgggccgcgcctctaccgacccgcggtgctgctcgacggcgccgtctacgacttgagcatccgcgacggcgacgtcgctggccccggctcgagccccgggggtccggaggagtggccagacgctaaggactggagcttgcaggacacggacgccttcgtgctcgtctacgacatctgcagcccggacagtttcgactacgtgaaggccctgcggcagcgcatcgcggagaccaggccggcgggcgcgcccgaagcgcccatcctcgtggtaggcaacaagcgggacaggcagcggctgcgcttcggaccgcggcgcgcgctggccgccctagtgcgcaggggctggcgctgcggctacctcgagtgctccgccaagtacaactggcacgtgctgcgtctcttccgcgagctgctgcgctgcgctctggtgcgcgcgcgccctgcacacccggccctgcgcctgcagggggcgctgcatcccgcgcgctgcagcctcatgtgacccgatcggacagtgccatccatgggccccaccttgtgactgggacaatcagggacctggattggacgggatcgcccaacttcactgggactggacagggaagtctccgccctgattggatgaggaaagctccaacccagtctcctaagcgactggcccccttttgaacctcattggacccaaccaggtcccaagctccattggagatgaccagtcctttctgggacctcaatgggtcacaatcccattggatggaaaggacttggctatgaacttgactggaaacacgcagcctgctcctggagcttcactggacatattctttatgccacacctaccacgggataataaaagggaaaataa

SEQ ID NO: 568 - protein, 203 aa, Homo sapiens
MGGSLRVAVLGAPGVGKTAIIRQFLFGDYPERHRPTDGPRLYRPAVLLDGAVYDLSIRDGDVAGPGSSPGGPEEWPDAKDWSLQDTDAFVLVYDICSPDSFDYVKALRQRIAETRPAGAPEAPILVVGNKRDRQRLRFGPRRALAALVRRGWRCGYLECSAKYNWHVLRLFRELLRCALVRARPAHPALRLQGALHPARCSLM

SEQ ID NO: 569 - DNA, 309 bp, Homo sapiens
tttttttttttttttttggaaccaaagcaggttttatgggttacacagacgagccttagagccaggaaacatagtggcttcagatgtgttcaccgccatgtggcatcgagggcagaagagcagagggcgcctgggccttgtccacgtgtccaaggtgcaccacctccatcatgccagcacctgcagtcagttgctgtttgctgtcggaggtggggggtgggggctgggctcaccacgggcacacagccggcagctgctctgctccctgccctgatgtcacgggccgtggtgtgctgggagcgaggtgtg

SEQ ID NO: 570 - DNA, 231 bp, Homo sapiens
gagtcgaaggctgagcggacccggtcgagagccggcgagctccgcgcagggagggtgcgcccaccggtcccgccgggcgcccgtggtacgcgccgtcagggccctctccgccgggggctcggctttcttttacctcttccaaatttaaccattacctaaatccgaagggaaatgagcaaacctctcggattgggtgtcaaggtctcctccgggctggggctgagcaagccc

SEQ ID NO: 571 - DNA, 1000 bp, Homo sapiens
cccaccttcaccatgtctgacgaggaagttgaacaggtggaggagcagtacgaagaagaagaggaagcccaggaggaagaggaagttcaagaagacaccgcagaggaggacgcggaagaggagaaaccgagacccaaactcactgctcctaagatcccagaaggggagaaagtggacttcgatgacatccagaagaagcgtcagaacaaagacctaatggagctccaggccctcatcgacagccactttgaagcccggaagaaggaggaggaggagctggtcgctctcaaagagagaatcgagaagcgccgtgcagagagagcggagcagcagaggattcgtgcagagaaggagagggagcgccagaacagactggcggaggaaaaggccagaagggaggaggaggatgccaagaggagggcagaggacgacctgaagaagaagaaagcgctgtcctccatgggcgccaactacagcagctacctggccaaggctgaccagaagagaggcaagaagcagacagcccgagagatgaagaagaagattctggctgagagacgcaagccgctcaacatcgatcaccttggtgaagacaaactgagggacaaggccaaggagctctgggagaccctgcaccagctggagattgacaagttcgagtttggggagaagctgaaacgccagaaatatgacatcaccacgctcaggagccgcattgaccaggcccagaagcacagcaagaaggctgggaccccagccaagggcaaagtcggcgggcgctggaagtagagaggccagaaaggccctcgaggcagagaccctccgccctcttgcacaccagggccgctcgtgggactccacatcctccagcccccacaatcctgtcaggggtctccctgacgtcctgggggtggagaggccatcccggggcgtcccccgcgtctgtgtccttgctgccttcatcccctggggcctgtgaataaagctgcagaaccccctt

SEQ ID NO: 572 - protein, 258 aa, Homo sapiens
MSDEEVEQVEEQYEEEEEAQEEEEVQEDTAEEDAEEEKPRPKLTAPKIPEGEKVDFDDIQKKRQNKDLMELQALIDSHFEARKKEEEELVALKERIEKRRAERAEQQRIRAEKERERQNRLAEEKARREEEDAKRRAEDDLKKKKALSSMGANYSSYLAKADQKRGKKQTAREMKKKILAERRKPLNIDHLGEDKLRDKAKELWETLHQLEIDKFEFGEKLKRQKYDITTLRSRIDQAQKHSKKAGTPAKGKVGGRWK

SEQ ID NO: 573 - DNA, 444 bp, Homo sapiens
  misc_feature (402)..(402): n is a, c, g, or t
  misc_feature (435)..(435): n is a, c, g, or t
agtggcacgtcttcggacctaggctgcccctgccgtcatgtcgcaagggatcctttctccgccagcggcattgctgtccgatgacgatgtcgtagtttctcccatgtttgagtccacagctgcagatttggggtctgtggtacgcaagaacctgctatcagactgctctgtctgtctctacctccctagaggacaagcagcaggttccatctgaggacagtatggagaaggtgaaagtatacttgagggttaggccttgttaccttcagagttggaacgacaggaagatcagggttgtgtccgtattgagaatgtggagacccttgttctacaagcacccaaggactcgtttgccctgaagagcaatgaacggggaattggccaagccacacacaggttcanctttttcccagatttttgggccagaagtggganagcatcctt

SEQ ID NO: 574 - DNA, 476 bp, Homo sapiens
  misc_feature (411)..(411): n is a, c, g, or t
  misc_feature (420)..(420): n is a, c, g, or t
  misc_feature (430)..(430): n is a, c, g, or t
  misc_feature (454)..(454): n is a, c, g, or t
aaaactggcctcaagaccacaaggagtgattataaactgccttaaatcacactgagcaaagtgtctagtagaaatgcccagagagtattagattggttataatccagtatttccattagtgcttgagaaagtaaagagtaagttagttagtgtttagtagactttaactagaagggatttctgaaaaccggtatggcctaaactgtagaagacttagaaaaatggaaaagatatacttttttcaaaaggcaaaccctttccctttactatgaataattaatttaaagagtaattttcacctaatgatcatgaaatctccatatgcatatgggaactacataaaatagtgaaaaattaaaggtttttaaatctaggctaaggaacggcagcaaccttggggacctaattccntttagtctnttaggggttntaaactcccatagggagaagggtnttgggccctaaataatcctttt

SEQ ID NO: 575 - DNA, 664 bp, Homo sapiens
tcttttccacagatatcagttgtaagcacagatgatgatctagcttgacttctgtgacaaatgttgacctttgaggtctaaacaaataatacccccgtcggaatggaaccgagccagcagctgaagtctctttttcttcctctcggctggaagaacatcaagatacctttgcgtggatcaagcttgtgtacttgaccgtttttatattacttttgtaaatattcttgtccacattctacttcagctttggatgtggttaccgagtatctgtaacccttgaatttctagacagtattgccacctctggccaaatatgcactttccctagaaagccatattccagcagtgaaacttgtgctatagtgtataccacctgtacatacattgtataggccatctgtaaatatcccagagaacaatcactattcttaagcactttgaaaatatttctatgtaaattattgtaaactttttcaatggttgggacaatggcaataggacaaaacgggttactaagatgaaattgccaaaaaaatttataaactaattttgtacgtatgaatgatatctttgacctcaatggaggtttgcaaagactgagtgttcaaactactgtacattttttttcaagtgctaaaaaattaaaccaagcagcttaaccatg

SEQ ID NO: 576 - protein, 873 aa, Homo sapiens
MGTSALWALWLLLALCWAPRESGATGTGRKAKCEPSQFQCTNGRCITLLWKCDGDEDCVDGSDEKNCVKKTCAESDFVCNNGQCVPSRWKCDGDPDCEDGSDESPEQCHMRTCRIHEISCGAHSTQCIPVSWRCDGENDCDSGEDEENCGNITCSPDEFTCSSGRCISRNFVCNGQDDCSDGSDELDCAPPTCGAHEFQCSTSSCIPISWVCDDDADCSDQSDESLEQCGRQPVIHTKCPASEIQCGSGECIHKKWRCDGDPDCKDGSDEVNCPSRTCRPDQFECEDGSCIHGSRQCNGIRDCVDGSDEVNCKNVNQCLGPGKFKCRSGECIDISKVCNQEQDCRDWSDEPLKECHINECLVNNGGCSHICKDLVIGYECDCAAGFELIDRKTCGDIDECQNPGICSQICINLKGGYKCECSRGYQMDLATGVCKAVGKEPSLIFTNRRDIRKIGLERKEYIQLVEQLRNTVALDADIAAQKLFWADLSQKAIFSASIDDKVGRHVKMIDNVYNPAAIAVDWVYKTIYWTDAASKTISVATLDGTKRKFLFNSDLREPASIAVDPLSGFVYWSDWGEPAKIEKAGMNGFDRRPLVTADIQWPNGITLDLIKSRLYWLDSKLHMLSSVDLNGQDRRIVLKSLEFLAHPLALTIFEDRVYWIDGENEAVYGANKFTGSELATLVNNLNDAQDIIVYHELVQPSGKNWCEEDMENGGCEYLCLPAPQINDHSPKYTCSCPSGYNVEENGRDCQSTATTVTYSETKDTNTTEISATSGLVPGGINVTTAVSEVSVPPKGTSAAWAILPLLLLVMAAVGGYLMWRNWQHKNMKSMNFDNPVYLKTTEEDLSIDIGRHSASVGHTYPAISVVSTDDDLA

SEQ ID NO: 577 - DNA, 288 bp, Homo sapiens
  misc_feature (38)..(38): n is a, c, g, or t
  misc_feature (140)..(140): n is a, c, g, or t
  misc_feature (194)..(194): n is a, c, g, or t
  misc_feature (198)..(198): n is a, c, g, or t
  misc_feature (256)..(256): n is a, c, g, or t
  misc_feature (272)..(272): n is a, c, g, or t
gaggggccgcgggagacgtggtgccgctgcgggcatcnctcatgccgtgcgctaggcttggtgggaaggcctgttctcgagtccgcgcttttcgtcaccgccatgtcaggaggtggtgtgattcgtggccccgcagaacnaacgattgccgcatctacgtgggtaacttacctccagacatccgaaccaagganattnaggacgtgttctacaaatacggcgctatccgcgacatcgacctcaagaatcgccgcangggggaccgcctgtcngccttcggtttgagtt

SEQ ID NO: 578 - DNA, 278 bp, Homo sapiens
atggtcgttcttgaggatccccgtaagcttatagtgcatcataaatactctgcatatttataatctatttgctttttctaccttcgtatgttatagtttctagggaatgcctgatgcacagaaccctaatctttgcaaaatacgtaccacaaataagatatcagaataattgttatctcttttgctcagtgtagtagtgggaagagtttatatagagtgctctagctttagaacgggaagagaacgatgtgctgtctgttaactaaatttctctacgc

SEQ ID NO: 579 - DNA, 284 bp, Homo sapiens
caacaattaagggctgtttcggagaatttcacttgccttatccactatgatggctcctatcttattggccaaggaatcaatgttgagttctgccaactcccaagtctgtccaattccaagtatacattcaggtactggcaaaatgaccactgggggcattcatggactctagggaacacaccatagccaaacctgagccaggacttcatttattatgtagctcccactgttcctattctaagaggtcatgatgacgaatatcaacaaatattaattttaattca

SEQ ID NO: 580 - DNA, 569 bp, Homo sapiens
cgcaaagataatgatagacgaatactagtgtatgcagtagaggctgtgcttacttcgatttactgcttcgtgccatcatgccgatttcatcgtaaacaccaacgtgcccgcgcctccgtgccggacgggttcctctccgagctcacccagcagctggcgcaggccaccggaagcccccccagtacatcgcggtgcacgtggtcccggacagctcatggccttcggcggctccagcgagccgtgcgcgctctgcacctgcacagatcggcaagatcggggcgcgcaaaccgtcctacagcaagctgctgtgcggcctgctggccgagcgcctgcgcatcagcccggacagggtctacatcaactattacgacatgaacgcggccaatgtgggctgaacaactccaccttcgcctaagagccgcagggacccacgctgtctgcgctggctccacccgggaacccgccgcacgctgtgtttctaggcccgccaccccaaccttctggtgggggagaaataaaccggtttagagacaaaaaaacccaaaaaaaaccccccccgggtttttttc

SEQ ID NO: 581 - DNA, 299 bp, Homo sapiens
ttttttttttttttttttttttttttccagaatgaaaatactggtatatttgtataatgcaaagagaaatacagatataaatcctcaaaacggaaggtacattaataaaaatgtagcattataagccaaaaatattatatagtacttgcagaatttagtctttcagtttaacattaaaatgtctaacaaagaaatattatttaaattatagttctcattattaatttaaaacaaccatcagtagaacagcacagcttaacctagcaaacattttaaggaaatgctttgtttcctagaag

SEQ ID NO: 582 - DNA, 383 bp, Homo sapiens
  misc_feature (240)..(240): n is a, c, g, or t
  misc_feature (323)..(323): n is a, c, g, or t
  misc_feature (327)..(327): n is a, c, g, or t
  misc_feature (329)..(329): n is a, c, g, or t
agagagctggtttcagacttcagaaggacacgggcagcagacagtggtcagtcctttcttggctctgctgacactcgagcccacattccgtcacctgctcagaatcatgcaggtctccactgctgcccttgctgtcctcctctgcaccatggctctctgcaaccagttctctgcatcacttgctgctgacacgccgaccgcctgctgcttcagctacacctcccggtcagattccacagnaatttcatagtctgactactttgaggacggaggcaggccagtgcttccaaggcccgggtgttcatcttcctaaccaagtcgangcgngncaggttctgtggctggaccccagtgagggagtggggtccaggaaatatgttcag

SEQ ID NO: 583 - DNA, 476 bp, Homo sapiens
tgcaaaatcttaccaccatagcgtctggtgtttcctgtcatctctgaagcctctgagctcttataacgggggcttaaagatggtagcattgagatatgaaggcttgtagttgttgtccagttcaggggactttaactccaggtatctaggaacttataataaatcctcatgccctcaccatggccacagggctcacctcctctgtctcatacctctccctcccttggccactattgctacagatatcctgacccttttacctctttatcaaataagcccactctgccccaggccctttgcatgggcttactttcctccaagaataatttactcctgatatttgcctgactaaatccttctcacctttctgattgcaaagaggcttccttgacaactcattctgaagcagcttttccctccagtctagctactttctctttcgttcttctgtttgattttatttacagcacttagcg

SEQ ID NO: 584 - DNA, 514 bp, Homo sapiens
  misc_feature (476)..(476): n is a, c, g, or t
agactgtggaggacctggagctggcgggggtcagggcccgcagccgtgccgggtgctcttcagcatgtccttcatcccggtggccgaggattccgacttccccatccacaacctgccctacggcgtcttctcgaccagaggcgacccaagaccgaggataggtgtggccattggcgaccagatcctggacctcagcatcatcaagcacctctttactggtcctgtcctctccaaacaccaggatgtcttcaatcagcctacactcaacagcttcatgggcctgggtcaggctgcctggaaggaggcgagagtgttcttgcagaacttgctgtctgtgagccaagccaggctcagagatgacaccgaacttcggaagtgtgcattcatctcccaggcttctgccacgatgcaccttccagccaccataggagactacacagacttctattcctctcggcagcatgctaccaacgtcnggatcatgttcagggacaaggaggatgcgttgatgcca

SEQ ID NO: 585 - DNA, 399 bp, Homo sapiens
tttttttttttttttttttccattttcatatcctattttatttttgaagtcagtgtccagaaagaaaccgacgattcactcaatcaacatgtaagcgactgaggcatccctacacaccaggtttgcaggctagggaccagagacacgatggttaaacaagccagagccctgtgatcctagggcttacaatgctggcataagaaaatccttctggactcactgtccccatgcttgtgactgtcatgtgccaagtgcgctttacacaatctcatttttccctcaacttggggataggttttgtatcattcccattacagatacggatgctgaggttactgagtggaagaggaaacctgaattctgctgctggaccccaaaactcatgtttaattacccaaa

SEQ ID NO: 586 - DNA, 290 bp, Homo sapiens
gcaaccgcattcttttttttttttttttttttttgatgtaacatttgttattttattggaaaaagctggtattaacatatttatagttttattcaacaattgggtaatttgtgagacaccaaagaaaaaaagaatgcacctatgagttacagagtccaaactgatcagggctgacaacttgaccaccatgtatcccacaccaccacccccaccaccaccaccaccaacagctttgttcctaagagaagagcttaatttaaaaccaaacccaaaaaacccccaacaacttc

SEQ ID NO: 587 - DNA, 1419 bp, Homo sapiens
ccacgcgtccgagaccaaggagtggaaagttctccggcagccctgagatctcaagagtgacatttgtgagaccagctaatttgattaaaattctcttggaatcagctttgctagtatcatacctgtcgcagatttcatcatgggaaacagctgttacaacatagtagccactctgttgctggtcctcaactttgagaggacaagatcattgcaggatccttgtagtaactgcccagctggtacattctgtgataataacaggaatcagatttgcagtccctgtcctccaaatagtttctccagcgcaggtggacaaaggacctgtgacatatgcaggcagtgtaaaggtgttttcaggaccaggaaggagtgttcctccaccagcaatgcagagtgtgactgcactccagggtttcactgcctgggggcaggatgcagcatgtgtgaacaggattgtaaacaaggtcaagaactgacaaaaaaaggttgtaaagactgttgctttgggacatttaacgatcagaaacgtggcatctgtcgaccctggacaaactgttctttggatggaaagtctgtgcttgtgaatgggacgaaggagagggacgtggtctgtggaccatctccagccgacctctctccgggagcatcctctgtgaccccgcctgcccctgcgagagagccaggacactctccgcagatcatctccttctttcttgcgctgacgtcgactgcgttgctcttcctgctgttcttcctcacgctccgtttctctgttgttaaacggggcagaaagaaactcctgtatatattcaaacaaccatttatgagaccagtacaaactactcaagaggaagatggctgtagctgccgatttccagaagaagaagaaggaggatgtgaactgtgaaatggaagtcaatagggctgttgggactttcttgaaaagaagcaaggaaatatgagtcatccgctatcacagctttcaaaagcaagaacaccatcctacataatacccaggattcccccaacacacgttcttttctaaatgccaatgagttggcctttaaaaatgcaccactttttttttttttttggacagggtctcactctgtcacccaggctggagtgcagtggcaccaccatggctctctgcagccttgacctctgggagctcaagtgatcctcctgcctcagtctcctgagtagctggaactacaaggaagggccaccacacctgactaacttttttgttttttgttggtaaagatggcatttcgccatgttgtacaggctggtctcaaactcctaggttcactttggcctcccaaagtgctgggattacagacatgaactgccaggcccggccaaaataatgcaccacttttaacagaacagacagatgaggacagagctggtgat

SEQ ID NO: 588 - protein, 255 aa, Homo sapiens
MGNSCYNIVATLLLVLNFERTRSLQDPCSNCPAGTFCDNNRNQICSPCPPNSFSSAGGQRTCDICRQCKGVFRTRKECSSTSNAECDCTPGFHCLGAGCSMCEQDCKQGQELTKKGCKDCCFGTFNDQKRGICRPWTNCSLDGKSVLVNGTKERDVVCGPSPADLSPGASSVTPPAPAREPGHSPQIISFFLALTSTALLFLLFFLTLRFSVVKRGRKKLLYIFKQPFMRPVQTTQEEDGCSCRFPEEEEGGCEL

SEQ ID NO: 589 - DNA, 345 bp, Homo sapiens
  misc_feature (308)..(308): n is a, c, g, or t
agaaaaaaatattttgactggctaatttaggggaaattgacaactttgtcgcgttcatactgcactggtaactttttagagatcaagatgtgtgttttaaactggattcgtagactgttttttgaaggatgggctataaacagatgatcttcatatcttttcatagcatgtaataataattaaaaaacaattattaattactaggggaaaggagtgttcgttctacccagggtaccacagttccccacagtcaaaacccaaaaggcaagggagatgagttggaaaggacagtttttcttttaagtccntcagtatggggttgtcagccggaaccaaaaatttaaa

SEQ ID NO: 590 - DNA, 344 bp, Homo sapiens
  misc_feature (174)..(174): n is a, c, g, or t
  misc_feature (224)..(224): n is a, c, g, or t
  misc_feature (245)..(245): n is a, c, g, or t
  misc_feature (257)..(257): n is a, c, g, or t
  misc_feature (315)..(315): n is a, c, g, or t
  misc_feature (329)..(329): n is a, c, g, or t
tttttttttttttttttttttttttaaataaccataacgttttattaccattaagactaaacttgtattgaaaagattttatataacaagacaagaaaagcaatagcaaatttaactatcaactagattatgcatagcgagtaactgtttctattacccggggaagagcatgancccttgtatttttttgttttgttttcgttttaaatatataaccgtacaangcacaaacatactaaaatgancagtgcactggnacgtgggagagtgctccctcagttttttatttttctactgtggcggtagggaaaaatntttcacaacaaacngggacatttttccaa

SEQ ID NO: 591 - DNA, 1587 bp, Homo sapiens
gggcgaggggcggacaccggagagacacgggaaaggggtcgggacaggagcacgtggctcagacaccgacgccgggaggccgcagaccccggacgtgtcaggcatccccgcaggcccggagcgatggcagccttgatgaccccgggaaccggggccccacccgcgcctggtgacttctccggggaagggagccagggacttcccgacccttcgccagagcccaagcagctcccggagctgatccgcatgaagcgagacggaggccgcctgagcgaagcggacatcaggggcttcgtggccgctgtggtgaatgggagcgcgcagggcgcacagatcggggccatgctgatggccatccgacttcggggcatggatctggaggagacctcggtgctgacccaggccctggctcagtcgggacagcagctggagtggccagaggcctggcgccagcagcttgtggacaagcattccacagggggtgtgggtgacaaggtcagcctggtcctcgcacctgccctggcggcatgtggctgcaaggtgccaatgatcagcggacgtggtctggggcacacaggaggcaccttggataagctggagtctattcctggattcaatgtcatccagagcccagagcagatgcaagtgctgctggaccaggcgggctgctgtatcgtgggtcagagtgagcagctggttcctgcggacggaatcctatatgcagccagagatgtgacagccaccgtggacagcctgccactcatcacagcctccattctcagtaagaaactcgtggaggggctgtccgctctggtggtggacgttaagttcggaggggccgccgtcttccccaaccaggagcaggcccgggagctggcaaagacgctggttggcgtgggagccagcctagggcttcgggtcgcggcagcgctgaccgccatggacaagcccctgggtcgctgcgtgggccacgccctggaggtggaggaggcgctgctctgcatggacggcgcaggcccgccagacttaagggacctggtcaccacgctcgggggcgccctgctctggctcagcggacacgcggggactcaggctcagggcgctgcccgggtggccgcggcgctggacgacggctcggcccttggccgcttcgagcggatgctggcggcgcagggcgtggatcccggtctggcccgagccctgtgctcgggaagtcccgcagaacgccggcagctgctgcctcgcgcccgggagcaggaggagctgctggcgcccgcagatggcaccgtggagctggtccgggcgctgccgctggcgctggtgctgcacgagctcggggccgggcgcagccgcgctggggagccgctccgcctgggggtgggcgcagagctgctggtcgacgtgggtcagaggctgcgccgtgggaccccctggctccgcgtgcaccgggacggccccgcgctcagcggcccgcagagccgcgccctgcaggaggcgctcgtactctccgaccgcgcgccattcgccgccccctcgcccttcgcagagctcgttctgccgccgcagcaataaagctcctttgccgcg

SEQ ID NO: 592 - protein, 482 aa, Homo sapiens
MAALMTPGTGAPPAPGDFSGEGSQGLPDPSPEPKQLPELIRMKRDGGRLSEADIRGFVAAVVNGSAQGAQIGAMLMAIRLRGMDLEETSVLTQALAQSGQQLEWPEAWRQQLVDKHSTGGVGDKVSLVLAPALAACGCKVPMISGRGLGHTGGTLDKLESIPGFNVIQSPEQMQVLLDQAGCCIVGQSEQLVPADGILYAARDVTATVDSLPLITASILSKKLVEGLSALVVDVKFGGAAVFPNQEQARELAKTLVGVGASLGLRVAAALTAMDKPLGRCVGHALEVEEALLCMDGAGPPDLRDLVTTLGGALLWLSGHAGTQAQGAARVAAALDDGSALGRFERMLAAQGVDPGLARALCSGSPAERRQLLPRAREQEELLAPADGTVELVRALPLALVLHELGAGRSRAGEPLRLGVGAELLVDVGQRLRRGTPWLRVHRDGPALSGPQSRALQEALVLSDRAPFAAPSPFAELVLPPQQ

SEQ ID NO: 593 - DNA, 463 bp, Homo sapiens
ttgaatttaggtgacactatagaagagctatgacgtcgcatgcacgcgtacgtaagcttggatcctctagagcggccgcctactactactaaattcgcggccgcgtcgactttttttttattagagcagatacagttgtgaaaactgtacattatacattttggtttcaagaattataaataaaggaactcacaggtagggagttctttttcacagcaagaaactttaaataaacaaagtcatgttttattaagtacattggcagacttcatgtgctgtccaaaatgttgagtacagtataacaacccattagaaagagccttcatgtaaaatacagctgtgcacattttagaaaaataccaacaatttgagctttgttttaaaaagcttataaatcatacatatagtcgacgcggccgcgaatttatatttagtgtcgacccgggaattacggaccggtacc

SEQ ID NO: 594 - DNA, 250 bp, Homo sapiens
ctggataacaaaagagagaggtaagcgtggctgacctagccacccaccaacaggaataatggctgaaaaagcggggtctacattttcacaccttctggttcctattcttctcctgattggctggattgtgggctgcatcataatgatttatgttgtcttctcttagaaaggcaagaagatatcagattgacatcatttagaagaattaagaaaactatgaacatgactgattattaaatgtctcatgtta

SEQ ID NO: 595 - DNA, 475 bp, Homo sapiens
  misc_feature (337)..(337): n is a, c, g, or t
  misc_feature (352)..(352): n is a, c, g, or t
  misc_feature (435)..(436): n is a, c, g, or t
aatcagtttacacaagagtttattttaaacgtgaaaattatagatcttgagattgaatccatcagtgattcaagagatacacctatttgcctaaaacaacctaagatgtattggttatggaatcatgtgttggataggttcttaagacctgtttcctcaaatcttgacacagttttcaagggtggcttattgacttgcacggttgggcagataatccagatttacctaagattgggtaaaaaagtcatctgtgactttgctggcagggcatttgctaagtggagtacaggatctaaaagggttttcttagacagggcaatattgtccaatgaagtangcagaaggactctgngttagaagcatctgcacaaaaactgatgagacctactcttcactgctctgcagctggatggctgatggcaggctgagcagtgnngaagcaggttttaacaacagggagtcccttcaggtcact

SEQ ID NO: 596 - DNA, 3107 bp, Homo sapiens
aagcggcaggagcagcgttggcaccggcgaaccatggctgggattttctatttcgccctattttcgtgtctcttcgggatttgcgacgctgtcacaggttccagggtataccccgcgaatgaagttaccttattggattccagatctgttcagggagaacttgggtggatagcaagccctctggaaggagggtgggaggaagtgagtatcatggatgaaaaaaatacaccaatccgaacctaccaagtgtgcaatgtgatggaacccagccagaataactggctacgaactgattggatcacccgagaaggggctcagagggtgtatattgagattaaattcaccttgagggactgcaatagtcttccgggcgtcatggggacttgcaaggagacgtttaacctgtactactatgaatcagacaacgacaaagagcgtttcatcagagagaaccagtttgtcaaaattgacaccattgctgctgatgagagcttcacccaagtggacattggtgacagaatcatgaagctgaacaccgagatccgggatgtagggccattaagcaaaaaggggttttacctggcttttcaggatgtgggggcctgcatcgccctggtatcagtccgtgtgttctataaaaagtgtccactcacagtccgcaatctggcccagtttcctgacaccatcacaggggctgatacgtcttccctggtggaagttcgaggctcctgtgtcaacaactcagaagagaaagatgtgccaaaaatgtactgtggggcagatggtgaatggctggtacccattggcaactgcctatgcaacgctgggcatgaggagcggagcggagaatgccaagcttgcaaaattggatattacaaggctctctccacggatgccacctgtgccaagtgcccaccccacagctactctgtctgggaaggagccacctcgtgcacctgtgaccgaggctttttcagagctgacaacgatgctgcctctatgccctgcacccgtccaccatctgctcccctgaacttgatttcaaatgtcaacgagacatctgtgaacttggaatggagtagccctcagaatacaggtggccgccaggacatttcctataatgtggtatgcaagaaatgtggagctggtgaccccagcaagtgccgaccctgtggaagtggggtccactacaccccacagcagaatggcttgaagaccaccaaagtctccatcactgacctcctagctcataccaattacacctttgaaatctgggctgtgaatggagtgtccaaatataaccctaacccagaccaatcagtttctgtcactgtgaccaccaaccaagcagcaccatcatccattgctttggtccaggctaaagaagtcacaagatacagtgtggcactggcttggctggaaccagatcggcccaatggggtaatcctggaatatgaagtcaagtattatgagaaggatcagaatgagcgaagctatcgtatagttcggacagctgccaggaacacagatatcaaaggcctgaaccctctcacttcctatgttttccacgtgcgagccaggacagcagctggctatggagacttcagtgagcccttggaggttacaaccaacacagtgccttcccggatcattggagatggggctaactccacagtccttctggtctctgtctcgggcagtgtggtgctggtggtaattctcattgcagcttttgtcatcagccggagacggagtaaatacagtaaagccaaacaagaagcggatgaagagaaacatttgaatcaaggtgtaagaacatatgtggacccctttacgtacgaagatcccaaccaagcagtgcgagagtttgccaaagaaattgacgcatcctgcattaagattgaaaaagttataggagttggtgaatttggtgaggtatgcagtgggcgtctcaaagtgcctggcaagagagagatctgtgtggctatcaagactctgaaagctggttatacagacaaacagaggagagacttcctgagtgaggccagcatcatgggacagtttgaccatccgaacatcattcacttggaaggcgtggtcactaaatgtaaaccagtaatgatcataacagagtacatggagaatggctccttggatgcattcctcaggaaaaatgatggcagatttacagtcattcagctggtgggcatgcttcgtggcattgggtctgggatgaagtatttatctgatatgagctatgtgcatcgtgatctggccgcacggaacatcctggtgaacagcaacttggtctgcaaagtgtctgattttggcatgtcccgagtgcttgaggatgatccggaagcagcttacaccaccaggggtggcaagattcctatccggtggactgcgccagaagcaattgcctatcgtaaattcacatcagcaagtgatgtatggagctatggaatcgttatgtgggaagtgatgtcgtacggggagaggccctattgggatatgtccaatcaagatgtgattaaagccattgaggaaggctatcggttaccccctccaatggactgccccattgcgctccaccagctgatgctagactgctggcagaaggagaggagcgacaggcctaaatttgggcagattgtcaacatgttggacaaactcatccgcaaccccaacagcttgaagaggacagggacggagagctccagacctaacactgccttgttggatccaagctcccctgaattctctgctgtggtatcagtgggcgattggctccaggccattaaaatggaccggtataaggataacttcacagctgctggttataccacactagaggctgtggtgcacgtgaaccaggaggacctggcaagaattggtatcacagccatcacgcaccagaataagattttgagcagtgtccaggcaatgcgaacccaaatgcagcagatgcacggcagaatggttcccgtctgagccagtactgaataaactcaaaactcttgaaattagtttacctcatccatgcactttaattgaagaactgcactttttttacttcgtcttcgccctctgaaattaaagaaatg

SEQ ID NO: 597 - protein, 986 aa, Homo sapiens
MAGIFYFALFSCLFGICDAVTGSRVYPANEVTLLDSRSVQGELGWIASPLEGGWEEVSIMDEKNTPIRTYQVCNVMEPSQNNWLRTDWITREGAQRVYIEIKFTLRDCNSLPGVMGTCKETFNLYYYESDNDKERFIRENQFVKIDTIAADESFTQVDIGDRIMKLNTEIRDVGPLSKKGFYLAFQDVGACIALVSVRVFYKKCPLTVRNLAQFPDTITGADTSSLVEVRGSCVNNSEEKDVPKMYCGADGEWLVPIGNCLCNAGHEERSGECQACKIGYYKALSTDATCAKCPPHSYSVWEGATSCTCDRGFFRADNDAASMPCTRPPSAPLNLISNVNETSVNLEWSSPQNTGGRQDISYNVVCKKCGAGDPSKCRPCGSGVHYTPQQNGLKTTKVSITDLLAHTNYTFEIWAVNGVSKYNPNPDQSVSVTVTTNQAAPSSIALVQAKEVTRYSVALAWLEPDRPNGVILEYEVKYYEKDQNERSYRIVRTAARNTDIKGLNPLTSYVFHVRARTAAGYGDFSEPLEVTTNTVPSRIIGDGANSTVLLVSVSGSVVLVVILIAAFVISRRRSKYSKAKQEADEEKHLNQGVRTYVDPFTYEDPNQAVREFAKEIDASCIKIEKVIGVGEFGEVCSGRLKVPGKREICVAIKTLKAGYTDKQRRDFLSEASIMGQFDHPNIIHLEGVVTKCKPVMIITEYMENGSLDAFLRKNDGRFTVIQLVGMLRGIGSGMKYLSDMSYVHRDLAARNILVNSNLVCKVSDFGMSRVLEDDPEAAYTTRGGKIPIRWTAPEAIAYRKFTSASDVWSYGIVMWEVMSYGERPYWDMSNQDVIKAIEEGYRLPPPMDCPIALHQLMLDCWQKERSDRPKFGQIVNMLDKLIRNPNSLKRTGTESSRPNTALLDPSSPEFSAVVSVGDWLQAIKMDRYKDNFTAAGYTTLEAVVHVNQEDLARIGITAITHQNKILSSVQAMRTQMQQMHGRMVPV

SEQ ID NO: 598 - DNA, 261 bp, Homo sapiens
  misc_feature (3)..(3): n is a, c, g, or t
  misc_feature (84)..(84): n is a, c, g, or t
  misc_feature (116)..(116): n is a, c, g, or t
  misc_feature (158)..(158): n is a, c, g, or t
  misc_feature (207)..(207): n is a, c, g, or t
  misc_feature (221)..(221): n is a, c, g, or t
  misc_feature (223)..(223): n is a, c, g, or t
  misc_feature (227)..(227): n is a, c, g, or t
  misc_feature (238)..(238): n is a, c, g, or t
  misc_feature (242)..(242): n is a, c, g, or t
  misc_feature (246)..(247): n is a, c, g, or t
  misc_feature (251)..(251): n is a, c, g, or t
aanaggaacgcccaaaccaagccgccccgtggtgcctcctttgatcccgccaaagatcccagaaggggagccccgttgacttcnatgacatccaccgcaagcgcatggagaaaganctgctggagctgcagacactcatcgatgtacatttcgagcancggaagaaggaggaagaggaactggtttccttgaaggagcgcattgaancggcgcccgttcananaaancccagcaaaancgcnttcnnaacntagaaaggaa

SEQ ID NO: 599 - DNA, 479 bp, Homo sapiens
gcagcggcgttttcggcgactttcccgatcgccaggcaggagtttctctcggtgactactatcgctgtcatgtctggtcgtggcaagcaaggaggcaaggcccgcgccaaggccaagtcgcgctcgtcccgcgctggccttcagttcccggtaggcgagtgcatcgcttgctgcgcaaaggcaactacgcggagcagtgggggccggcgcgccgtctacatggctgcggtcctcgagtatctgaccgccgagatcctggagctggcgggcaacgcggctcgggacaacaagaagacgcgcatcatccctcgtcacctccagctggccatccgcaacgacgaggaactgaacaagctgctgggcaaagtcaccatcgcccaggggtgcgtcttgcctaacatccaggccgtactgctccctaagaagacggagagtcaccacaaggcaaagggcaagtaatgctgacgtcctgcccaagt

SEQ ID NO: 600 - DNA, 218 bp, Homo sapiens
tttttttttttttttttttttttttttttttttttttttttttttttttgaagacaagggaaagcttttaattatgtgcaattttataatacagattataaacaaatagaacaatgaatagtagtacttactcctttcttgtcatgaatccaggatttaggtcaactcaatatgaaaaactgaagcacactacagacaacaggacatagagaatgagt

SEQ ID NO: 601 - DNA, 154394 bp, Homo sapiens
gatcaaagggtcctccctggccacttccacctacaggaggtcaaaaatggagagagggaaaacaggttgatatcctgaaccttatggggctgggcttcatccattcctttcatgaatatgcacagacacatgtgcaaacacacacatacactgagctgtaccatgagcaaggcactgtgccgagtgtcaacaattttaaaagatttcacccagctcctgcctttgaggagtgcatggtccagaggaggaagcacgtgatagcagtgtagtgtgaatggtgctggaataggctgatggaacctcatgaatgcacggagaacagaggcctggtgccacccagtgtggacgagaggatggcatagcaggactaagaggtagccaggagccagctcatgaaaggccttatatgctgagccaatgctattgagattggactttgtcttaagagcaatggggagcaactgagcagttttgagcaggacagtggaattatagaatttattctttgaaaatattcctctggcttccgtgtggaggaaggattagaggtgggtggccagtgagggctttgcagttatccagcttagcaggatggagcactgccaacccaaccagagcaaatggggaggccaccagcctcaccctgaccctggacatgcccaccatgatgggaagacacagactgttccacaacaaccccttggaccccagcccagccctggaagaaccatgtaccttgactggcagggaagcctccactccgggcctgggcacacatgggagggtagggccccatgcttggtatgggctcaggctagcgctgctgccctggagtcagagctgtgtagagaggggcaagccccactcccagagagaaggagccacatgccgtgatggcaggtggtcggtgcagaccctcagctgttgggggagtggtcgggatgcctgaaatgtctgggaccgaggttctgggtgcagcctggagagttggggctgtgcgttcttgttgccattgttacattggctcatattgctgagtccttattcattaggctgttgggtacttttagacacacacacacaccagtctggagcacagagaaaactgtcataggcactcaaaattagagcaagttagataaaggggccagtaagtacagacctcacatgcccccagtggtggattcaggggtcactgattctatccattcctacagatgaacaggataaatatacctccgaccccgtccagtttttctatcccatttaatcactcctcagctgagaaagccagaaactcattcctgacgtggctgacaaatgctggggaaatctttggttttcttagagtgagcctctctttgtaaccagagagcaagagaaggaacagggccttaaaatcacttcaagtggcctgtgcctgatcctgaggtccagagaaggagaatgacttattcaagatcacagtttaatcatacatgcctttatccattcactcagcaaacacagttcaaacacctaccacttgccaaaccttctagatagttattaccaacataaccaagcaaagtatatggaatgccagatggcaatgggtacaggagagaaaaataaattggacaaggggatagacagtgctttggaggtagaggcagctttaagtagggtcacactagagtgaagatcgcaaggaggtgaagcttattctgggggaagaatattctaggaaaaggggacagtgagtgcagagtccctaagacaaggcatgctggggcgccggaagaaaagcagaggatggtgtagctggagaggaggtagccaggaggtgagttgtaggagattaagtcagagatgtgcgaggtatgagggagaagttcttttgtagagacttcaccttgactctagtcggatgggagcccatgtgggctctgagcagaaaaggaacagctctgacttaggatttagttggctgctgtgctgtggatagacagacagttggcaagcctgaagtcaaagagtccatgtaggagatccaggcaagaaataatggttgcttgaaccaaggaggcagtagtggaggtgggaagaggaaatcacacagagtctggccagattatggaggtaaaggcaacagtattgactaaaggaccaaatgcaagatgtgagaagaacagagtcagaatgaccccaaggtttttgtcccatgctgctagaaggaagacgtttcccattagccatgttggaggataccacaggagaatgggtctctgtttgagcatcttattcaagatgccattcaacatctagtgaaggtggacaggagacagtggacacaagtcaggacctcagggaccaggtcacaggcagagctagaccttgaacttcaagattcacagatcacactgcttctgactgaggagtgacagaagtgccagagcaatctcaccagctctggaatgttcatcacttgacggctgggctggcaatgaagaagctccatgcagtctttgggacaacactgcaccaagagaccacagcaacaggggagctcgcagagtagaacactggcattcaacccaaagcctcactgtttccagatacaagtgaaggtaaattccctgcccctccccctgccccaccacattcatccatccttgaagaactcctgggagctcactgggaaactcactgagcagtgagtaatatggttttgcttaagccttgctcaagtagcagaataagcaagtttgactaaaattctctagattcacaaatcccaaagccctaaactacagaaaacagactagtcaagagagaggaagctgtctgctggctatttgtggagcatcacccaatcaatgaacaagtatgcatagactgctgggtgcagagggaggggtgtttaagggatgtcttaatcgggttttccagaagcagatcctgagacaaggatttggttgcaagtagttatttagaaagtgaacccaggaagcaccagtaggagaatgaggaagcaagacaggtaatgaatgtattagtgaactgatcaccactgtgagcaattaggctcaattctactctaggaggctgtacagaatgtatctcagggttgtcccaccaaggggcaaggaaactgaggtacttatccactaactctcttttgttgttgagtgttcttcccacaaaccttaacttccaggcacttccagtttgtccctttattaagctgaccaatctcctgaggccagagaaagccttccagcagagaccagcaggtgtttccagtaggacactgtctgtgtgtactgaaaccagagtgtcatagggaattagaaggacgcagcaccaaccataatgggtttcacaggaactgcctggtctccacaaatagggactctaattttggtctggattctaagaaccaccttcaccccagtaaataggactgagatgacttttatcattcctgtaagcagagatagaaatgccagagcaaagtctcattggtccacacagaaagaaggaagcctcggtgctctttaattggagaccagagctgtggcaattcccaaccagtgtcagaattttgcaatgtgttggagacaggcagccctccctaggaatctactgagagacccagatctttgggcccttagtgagtgtttgagtaaataggtaagcagtggctgcggctcaggcaggagggtcctggaagttaatgtcccagcacagagcttcagcccagaccacagtgccaacatcctagcccttctggttaataattatccctaattccttagcgtgggaggcctggagatgaaaatcacaactctccatgtcctcatcagtctgttgtatgtgcatgtgtaccagatacctacatgcaacctcatgaaattccagacattctcatcaacaaatccctttgtcatcttcataaaatccaaagttaaagggcccaccctaagaattgtgactcatagattcctggatggatcaactctatgtgactattagagctagttttctcatgcccatattgggcaaaacctggtaaacagcacccctgtctctccctccccaaaattctgtctggatgagcagtcccttatgtaacaagctaaaacctttacaactgaccatatgtcaggaaacagtaaggtgtttacaagatacatgagaggggagtccctgtctttcaagagctcctgagtcctgccaatgaacaccttaagtacctgccctttaggggatacttgctgaaatcattccttgaatagaatgttagaatggcagaatgacagtggctgccaccgataggtcagagcattaaggactgggtcttttgaccgaccctaggatctctcttcagtggaactctgcccccaccaaccctattcagcctcctcctctatgctcaggcagctactgcttctcagccatcagtacaggctacctcattcaagttgaatttgcaatggctgttgtggttttttgtttttctgaccatgtggggaactctcatataggctttggaattatatagtcctggtttgtccaaagcactctccacaaacaggctgtgtgaccttcaaatagctgcttaacccctctaagcctgtcatctgaaagtagaaatgataatgataacattagagtaaaccacatgaaagtgtctttgtaggttaaaaattgttgaatattggcagtctcataggttccacctaaaacctttgtggggttctggggaagattcggtaagagaatatatgtattactgctagggcctcagatctaactagtttaggaccacagaagaaggtcacgttccccttagtgtctgaaccacatctcctgtcaaatatctacaggataggagttcgaagtctattcttacaggattcccagtgatttcaggaatccttgtggcctcttattccctcccttgtgttcccctcataaagatgttgatgtttattgtgcgtttactctctgccaagtattgtgccaggctctttgtacataaacatcgatgtacctctctacccatgtgaggtgggtgcttctactatcatccccctttcacagataatgaaactttagatatgagctaagaggaatgaaaaaattaaaaataaaaaaaaagcagataaggaaactaaagtgcaaagaagcaaaatgttttgccaaggtcacaaggacctcagggtccgtatggttgtaagaagcagactaggccctaaggtttcttccatgtctggcatcctagggggttaggactgccactgagatgctgaacaaatgataaggcaggcacttccccgacaaagaatttgtgttggtggcaggaggagagaagaaagctgcgaccaggagagctgagccaggagcttttgcccacctcatcatctaaatgagcatcagactctcaggtgttgcagataaaatcccctggcatgtgatcataggtgacatctacccagcgctcatgatggtaatgccaggcactactccaagctccttacatgatcaatcatttaaccctcacaaccttggggtctaaacagtactgttagtcccattttacagatgggtaaattgaggtatggagctgttaagtcactggcccaggatcacacaaccaataagtgacccagctggagatggaacacaagcaggctggctcccaagtccatgacgtgaaccataccagatactgcctgtcagaagtgtaaacagccctgtctcataatcacctcctttgatttggaagcctagaccaggggtcagcaaactatggcctgagagattcagagctaaatctagctgaccaactgtttttataaataacattgcattgaaatacacccacattcatttatttattgactgatttgcaaaaaacaagggcagcagtgagtagatgcaagagatcataggcctgcaaagcataaaacatcaactttctgaccctttatagataaaacttgttgacccctgacctacagtatgcacctaaggtgtgtcctatgtgtcctaagatggctccgacacttgctatgtgaccccagacaagttgctttcctgaatctccatttcctcatctgtaaaatgtgcttgtgggaatttggtgaggaagtgtgtgtatgtgtaagtgcctgacccaaggcaggtgtttgataagggtttgcagctatcattgccaatagtatgatgaaaattatgactgattcctatgatatcactgaagacagggcagagacctttatggccactttatgggcaatgaaaccctggtgcagagagaggatatggtgagaggcagagcccaggtcttcccagtccaagtcctgcactctgctgcctcctttcccccgccttccaatccatagctgccctagtcctcatttatgtttgccagcgtgcggagcagcccttctgtgtttgtgagttttcggcatctgtaagtacccacagccgcacagagctcgccagcacagacatttgtcaaagatgacatgccagtcatccatgccaccggagacagtgacagatgcgctctccagccccaccatccaggcagtggaggatagatggggccttggcaccggcgcccgctcttggcctggcatgtgcagggagctgcagaccaggcaagagacaaattgcagcctggtcagtgggcaggaggctcagtgtgcatgcaggcagatgtggctgcagcctgcccctgaaccagacacctgcctgccctccccagtgtcctagacctgcccaaatctggtgtttgcttaagatttgtatgtggtcactgatgaggaggtgagtgctcacgggctttgggttgtttccaataataatagtgacaatggctgatgctaacatatgctgctctgctgttctaagtccttagcatacatcgagctctttaatccttagccatccggtggtggaggtacaggaaactgagcctagagaggttggaggcctcttccaagttcacacattaagtggcagaggcaggaatcaaatccagacactctggctccagagttcaatgcccctcaggactactgtctaatatttgagagcctggagtggaggaaaaatcgtgactaggcaaaggattcaggtaggcagggctcaccactaacctgagtggacaggaacaggttgccctgcctcaatttttccaccagaaaaaatgagcagtggctgctattgcaaggccctgcaaggtcccagaccagctccagggcaggcctctctgttcttctgggacccttgggcactaggtcctctgccgacacacattcactccctccgcctaataatcccaacccagatcccctggagtatcatctcgtagttcattaaaccatcacctctgtgtccctgaggcaagcttgcagtctgttgagattttgtagggatgtttatggctagtggcagcaaagggaacagaccacataaaacaaaaagagacagtatgagctcttaaaaagtttccaaagtctggcataaaagctcccacaggtgtttcattcatacaaatgaccagcttccctccgctctggatgaagggtttggaaagaccaaagtctggttcagtccagccagtctcctattgtgggaccttccttgcgaaagtacccttctttctctgagccttggtttccttgtctgtaaaatgggtataatgatagtacctatctcataaaattattgtgaggattaaaacacaaaaaacacttagaacagggcccgacacaaagcgaatgctcaacaaatgccaactgttctcattctctggtttttagtttcctcagtgggaaaatgaggaggtgagttttgtgccaggtatgggcttctggctcgaacattctgtgacttcatgatgttcctagggtgcttccttgtctcctcccacttgcctgagtctttcttctttgtttctgtgagccccagccaattagtttactcacaagtgtagggtagagagaactacacaaacaggaagtgttaccactcatactcacagtggtgaatcattccaaccttccatcaagtggatccacctccattggtcgacacagctggggaatctgagctactgtggccagaactctgttgaccacatcctgcaatgacagacctcagaatccttcctgaaccttccatgggaaggagtctgtgacagcccacctgtgtagactgggcctcatcagcctgaatttgctgaaataagtaattccagtttccctgaattcatgcagagggcacccacgctgggaaggagtttctctggcttttcaagctccataaacacttgaaaagtcattttatttttcaatctgtgggcaggatgccaccaaacgaggaagcctcattaaacagaccttgaaggctatttctttgttgttttttttgtgggagtgggatgaggtttggtgttggcttttttttcccccactgatgctttttggataaacacataaatcagcatcatctatattcattagatatcgtgccttgttcagtacaaaattacccctgttttgcatgactttccccccttgtgattaatataaatgacttaagttaattatgtttctcttcatggaaaaatgtatttgtcaaagtgctgaaacatcaataaaaaataaacactgtcatttgaagaagggctcatttgcaaatgagtagctggggtgtggggaaaggaatggactcacccgtctggaggtgtcattctgattgagtaggcacacttcatatttactaacaatgacaaaagcatttttcttagttaagcactcacaggtcctgatgaggtagactgatgtcatcattattaacaataatgacacctcaggcgtagagaaaacaattttccttactagagaaaactaacgctgggtattttaccatccagacctccaaaactaggcccagcatggggactttgcaggaatagaccaagaggcaaatacagatgattggagtgggagggaagagaagtgaagaaaagcaaaccatggagctggtgtggcatctcagagcaacatggaagcttagggatgagacagcacaaacacctccctgggccaatgacaagactaagaaccagagaggggacttgccccttgggtaaacagcatattagtggcagagcccagagagaacccaggactcttgactcctagacccccaccctttccctgcactctgctgcctcccttgccaccagggatcaaaggctccccctcacttgagtaagtggtcaatggcaccagcaaggtgcaggggctcagactgctggacagtcagggccccagggaaatctacaggttactgacttttttcatggtatctggaatagcctttccccacactgactgtcttagtttgggtttcctgaaggcagaccctgagacaagatcgtaggtgctggtggtttatgtaagaggtgagcctaagacaccaagtgaggtggagaagtgagacagggaagggagaaaagccaatacagggcacatgtatgagggggttactgctttggacacttggactcactccccccaggagtgactgcagagaatatgcctctgagttgtcccggtgctggacagggaagcagaaatatttatttactgacctctggggactttaatttccaacccctctgggtcaccctgtacctaagctgagcaaactcccatagtaccagaaaaacccagagatccaaaaccctgagcaggtgagtgggaagcgctagtgggcacagtcactgtctatggcagatgcacgtgaacctggaggtggtatggggggatgtgggtggggcaggcatgttatctactacatcacccttatctaagtgctcccagccttccaagaaatcccccctccaagtaaacatgatcatcttgtcttctgatggtcagaaaccattcatctggccaccttattttacttatcttcttaaatattatttctgtcaccctaaatatactgtaaagcattcaagggcaaaattaaggccattatcattctgtcattcaacaaatacttactgagcacttactctgtgctggactatctttaaggtgctaggaatatagcatcaaagataaagaaaatccttgtcttcaaggaacttgcatcttaaaagtagagctagacaataaacacataaataaatgctataatttcaagtggtgataagtggctcaaagaaaaagaaagcagggtaaaggggatagcataatggaagtgcagtactcctggggacatttgagcaaaagcctgaatgaaataccggagtaagccatgtaagaatctggtggaatggaattcaatcaaagagaatgtcaatgcaaagaccctagggaataacaggaaggctggtgtgacactcagcggagtgaaaaagaaggtggtaggaactgaagaaggggacaaccagatcgtctaggaccttacctttaaacagtgcctggcacaaaagaaaggtactccaagctgactggatggatagatgggtggatataacagatggaaggatggaaataatgacagactagtggatgaagaaagaagaaaacaaagcaggttctataggtagagtgtggtgccaatggtgcattcaaagccagactttgcagaaatagcaaatattgaacccaaagtacccaatgagtagttattagaccaaggaagcagttgaaggagaaatgttcctctctgggcttcagccaatgagaatcctagaaacctgagtgtccttatctttctttacattccctgcagaggcccagcttctcccctgtggtgagtatccaataacattaaatggtattacagtggattaattaaactttggtggctggaagctagtgaatcattccctccaccacatattaccatgtttactcatcagggctccatttttaatagcggtcttttaattaaagcatgtcaccacggtccattagggaagaatttggaggatgagatgtgcatgtgggtgcaagcatcatttaattcagcagttctttactgagtgcctactatgtgcctggcaagtcttgaggtactatgagaaaataaggtgcaagtgaagggcttcaaggaacttacgcgatcaaacaaagtgaattcacactcacgatcaactgaggaacattggcatattaatcattgcttgccaactaaccagaattctttattagtaacttctcccacctagtttaatttggaagaaccaggccaatcataagaaaaattctggggcttttcgttttcagcaaaatatccagggtatactgtggcctagaccctgatgcagtcatatatctttgggaaagcctcctaaaacttctgagcctcaatcagtctcttcaagaataaaagcagaggttgttcttatccagaaattctctagattccagctgtaacattttctcatctgcgaccctccaaatctccaggcccagaccatgaggatgggttttccagaatggtggaaatttcatctaaagtcactctaagatttttacccaccagagaaagatccttttcattacattcatgacattttgttttctgaattttcaaagaggaccaagaagacctgtttggaagtaggagtagttacaatgcatgcactatgtgtgcacttagatgaggaggaacaaaccacatactgccagaaaagcaggctctattcatggggtgactgggtaaaaggcattggaactggaccctaaagactaggtaatagtttgagagtaggagaaatggggggaaagagccaattttcagcctgattctagccatgttccaagtatgggtccccactttgcaactgcatgacaagctcccccaggaggagggaccaggtctctttttcttttgtctgagattcttccttccagctcttcactccttaggcgagctcagccagtctcataggttagggcccacctgtgtgatgatgactcccacatttccatctccagctcagcacctctctgcggagctctctattcagtcagctacctgcttggcacagcacttagaggcttcaagacatcacaaacaacgtggacaaaatgaggctcctatttctgtgtccagtctgttgatcctcattcttcaggtctcaatgtaggagtcacttccccagaatgtaaatatatatcttaccccagaatgtgtgtgtgtgtgtgtgtgtgtgtgtgtgtgtatatatatatatatatacacacacatatatgaatatatttgtttatatatatttatatatacatatatatgaatatttatttatttatatatgaatatttatttatttatttatttatgaatatatatttatttatttatatatatattatatatatgaaggaggggtcaggacctctccgatccctcttctataaacaccctaggttttccttcacaaatgttgtcacattgtcaggaaatctttgtgttgtgatatcttttctgtgaggtatttgatgaatggttgcctgtcttactggatttttaagtcccattgggcatagatcagcccccatttactcaccactgtctcctgagtacctgggactgtgcctagaacataataggcccccagtaaatatttgttaagggaaggcatgggttccccaaccccagccagtgtgcaagatccatttccgcataccactggcacacaacattcaggcactgggagccgcacagtgacggaagcttgaacattttcttcgtgtcaagttctcagtaaagctattttctcacattgtctcatgtaattcttaaaccaccctggaaggaataggttttattgctgtttccattatataggtggggaaacatggctcagaggaaagtggcatgtccaagatcacacatcctgcaggggacagacagaccaaacccatgttttcaccagcctctcatctcacaaacaacactaggtttgttaatacctgggaactctgtgtaagcgaggtccctggcttggtgtcagaagacctgggtttgagtcttgacaatgtcctttgtaagtagcttaaggtagctcctcagttccctgtgagacactgcacacaacatcctttaaactgccttaagaaaaacagccctacaaatgaagactccattgccactccctttgaagcagctgctctcagagtcctctgcactgcctcatctgaattgaactatctccccaccttctcgcagaatcaaaaactagaggctgcaggctgaagagggcaccattattttgtttaactcacagagtatttaaaacttttttttaagttgttgggtaaattctaacaggttttcttcagggtccagatttttaccttctcttgaaaaattagaagctcctgcaacatcagtcccacagctctgcacatcattgactggcatcaattggttgagccaagaggtagccatgctctctccccagtgtgccactatccctacctgaggctgggaatcaggtgtcacttaccttgacatctgttcccttatttttccaacaatgggaatacatttttctgcattcatgtcgctaacagaactaggaaaagcaagcctggaccacaaggatagtgcagtgagagataatgtgagtataattcttgatgcaagtgaagaataatcatgagttcaatatggttaagtgcatgtgtttcaaaacaacacaacccaaacaagattcagcaaaaatactatcccccagctctattttgttatgttgcctctatgacccctgtaagattttgaatttcagatgcttgcttcagttaaataaagagttttctagatgaaggcatgcagtaggtctctaacactgagccactgccttgtccctctcaattaacctttgtctttaagtccctgtctaatgcctactagtagctaggtccctgagattgtaaagaccccaaggccccaggaccctgaagagcccaggaagtatcagaccaatgaaccagacctgaggtctcctgtactcttcagcttctgaactataggagaatcccaaggaaaacagggcaacaacaacttataataaatagtaatactgccagaatcctatttgtatttaccagtttgcaaagcactctcattcattcaacagtcatatggcaaatataagttgaggctctattacagatctaggccctgtgggcgtgatgttatacttggtagtcaagatccctgaccttaggaagcttccagtctggccaggaaacatcagagaactaacatttctatagcactttaccatgaaccagtcactcttctaggtgctttacactgagtaactcatttacccttcatagcaattctaggagataagtactgctgttttccccatttcacagatgaagaaactgaggctacagaagttaagtaacttcctcaagctcagtggtggagccagccatctgacccacagaagcaagttgctggaggcaggcttttgggaccacagactgggaagatgatatcttcaccagtgaagatttccaaggccaacatcacatggccaaattgcatcaccccatggccctgggctcttctccctgttcacactaaaactcagaaacatttattcatggggggagtagtcagcacactggttgctcaggtctgagaatgccagggctgagctagcagggtttgcaggtcccaaggcaatttgcatctcctgttggaagtcttcctcatcaaagcaacggaaatcaatgcagtaaatagttataatgaactgacctgctcacactccctgtctcttcctgaggaagaggaatcatgagagacacattgtttccaaatccttcacctctttccccctcgcctgatcctcccacagggaatcctctttgctcctgtcaacagtgtttgagatgtttcagagtttttattggatcttcattgtagctctgtctgtgaggattcagtgaagctaagatttaagggccagagagagttgaaacttctaccaagcatcagccatggctgccctgctttccagagtactgtccacggacctctgggcctcagggactagagaatgtcaggggaccatctcatttcatacatgtaaaaactgaggcacggagagggcaggaccacccagcacaggatcagcacacctctccaacatcagtacaccccaccttttcaggcagatacaggaatctcctccgcagcaaagtgttgataggtgggaagcagtgctgtgatgcccttagctttggcatccaaatgcttgagttttaatgcctgacccaccatttccttgctgtacaagaccttgagaaagctaattaacctctcagtaactgttttctcatatataaaacagggatgaaaataaaagtatgtgctccattgagttgttggaagctttaataaacacaggaaaaaaattagaattgtgtctaccatgtagtaagtattcaataaatgtcagtgactatgcccatgatgaatatggtgaatatgattatgatgatcatgggcattatccctggtgctaagagtcacttctacaggagtttagcttgccctgacctagaacattgaggcagggcatgaactcaatgttgcactgagaaccagtctaacacaggaatgttttctctgtttcacaggtgtcagtcatgttctctggataaatgataagattgaaagtccttgaaggcaggagacagccccagatatcgttttgttgtctgacacaataccaagcacaaatgatgtgcctaaatcctgggtctttaacccaaggccatctacatatgccctgggcctgccagctcatgaaaaccagcctctgtggcagttggggtgctaaggaattgctccagttgagcttcactggtttttactcttggctgtcatgcttggatctcttgattatgttccatcagttcaccccctgcctctgggctgaaagatttggtgttctttctaagttttcttgcatgatttgtggcttagaacgtctttcccgtacatctctagccctttccatctcaaatgttgactcagattattggctcagggcaaagccactggctccagctcttaaccctgtagaatctcacctatccctggcacccaacatagacatccaccccttcaactccaccaagctagggagtagagagtagttgtcttttccatccattctctcccttcccctccttgtctaatttctaagagttaagagtgggcacttttccaacatttccgtggttacgggtaactatgtcactcaatcctggccacatgaggtgggacactagcccactggaagagttttcttcttaatagaagagagaaatctgtaagaataatcccccactgttcctaccttgggtgctattatgtgaggccttgatgcttgaacctgtggcaatgatcttgcaacatgaggaaagggtcacaagaattgcagagatactgactggagccctgagctgttaaataaaccaactccaaaccaatgggaatggggtatggaaccaccagtctctagattttctgtgacaaggaacaattaagcttccatatttcttaagcctattttagtcaagagctcagttagttgcaggcagaagcattccaaagttttatcaagtaagcatcaatttgcctatcacaaactttatcaaggtgttggtagattctaccttgtagacataatgtgatctactaggaatctatgtagaaaattcaagaatccaagaatttgggagaaaacttaaaagtcgtccatatctgacatatagatcaatggaataaaatggagggtccagaaacaaactctcatatttatggtcaactgattctcaacaagggtgctaagaaaattcaatgggggaaataataggctttttgccaaatagtgctagataacagaatatatccacatgcaaaatatgaattcagaaccctatcacacaccatataaaaaaatagctcaaatggatcaaatatctaaatgtaagcactaagactactaaactttaaaagagaatgcatgtataaatccatgaccttggattaggcaatggtttcttagatatgacaccaaaagcaatcaaagaaaaagacatataaattggacattaacaaaatttaaaaatgttgtgcttcaaagaacatcatcaagaaaatttaaaaaaccttgaatactgtatatattttctccaaaaaagttacacaaatagccaataagctcacaatgtgcttctctgctgagcccagagagagcaagatactactactcaactagccctttagacagccaccacaaacacatacgaacgggcacatgggatgaaatgtgtttaccattcccaatctaggacaacggtacccaaaggaaatgttggtgactatgcccatgatgaatgcttataaaccaacatttcctttgttttgtaaaacatttgaagccatgtccatggacacagaggaaaccatgacggcaccagaatgtctatttctgtccttgagatgatgctaagactaggatatccctgtgtctaggaactcactactattgtactggtgtagctcagtccatctttgaggaacaaaaagaagttctatttttttatttcaacttttatttcagattcagagggtacatgtgcaggtttgttgcaagggtatattgcatgatgctgaggtttggggtacaattgaactcatcatccaggtagtgagtatagtacccaataggtagtttttcaacccttgcccctctccttccatccctctcttgtagtccccagcatctagtgttcccatctttatgccatgtatactcaatgtttagctcccgcttataagtgagaacacgcagtatttggttttctgattctgtattaattctcttaggattatggcatccagctgcatccatgttgctgcaaaggacataatctcattattttttatggctgtatagtattccatggtacatatgtaccacatattatttatccaatccactgctgatgagcacctaagttgattccatgcctttcctattgtgaatagtgctgtgatgaacatacgagtacaagtgtccttttggtagaatatttattttcctttgggtatatccccagtaatgatattgctaagttgaatgatagctctatttttagttatttgagaaatctcctaacagctttccacagtgcctgaactaatttacactcccaccaacagtgcaaaagcattgcctattctccgcaacctcgccaacatctgttgtttttttactttttagtaatagccattctgactgatgtgagatggtatttcatagtggttcttatttatatttctctgacgattagtgatgtggaccattttttatatgtttcttggccactcgtatgtcttcttttgaaaagtgtctgttcatgtcctttacccactgtataatgaagttgtttttcacttgttgatttgtttaagttccttatagacctttgtcaggtgcataccttgcgaatattttttccctttctgcaggttgtctgtttactctgttgatagtttcttttgttgtgcagaagctctttagtttaattaagtcctacttgtcaatatttgtttttgttgcaattgtttttgaggacttagtcataaattctttgccaaggccaatgtccaaaagggtatttcctagatttttttctagggtttttataggtcgaggtctcagatttaagtctttcatccatcttgagttaagtgataagtgcacacaaattaaggtttttttaagtatttttaacttttttaaagtattttttaggtatttttaacccttattttagattcaagggtacatgggcaggtttgttacataggtaaattcatatcacaggagtttgttgtatggattattttgtcacgcaggtattatgcctcgtacaaaacagtttttttttctgctcttctccctcttctcttcttccactctcaggtatgccctgatgtctgttgttgccctctttgtgtccatgtgctctcatcatttagctcccacttatacgtgagaacacgtggtatttggttttctgttcctgagttagtttgctaaggatactggcctccagttccaaccatgttcctgcaaagggcatagtctcattattttttatggctttgtagtattccatggagtattgtaccacattttctttatccaatctactgtttaggttaattccatgtccttgctactgtgaataatgctgtgacaaacatacacatgcaggtgtctttatggtagaataatttacattcttttgcgtatatacccagtagtgggattgctgggttgaatggcagttctgtttttagctctttgagaaattgccacactgctttccacaatggttgaactaatttacactcctaccaacagtgtgtaagcgtccccttttctctgcaaccttgccagcatcagttattttttgacgttgtagtaatagctattgtgactggtgtgaaatggtatctcactgtggttttgatttgcaatcctgtaatgatcagtgatgttgagctttttttatatgcttgttgggcacacgtatgtcttcttttggaaagtatctgttcatgtcctttgcccactttttaatggggttgtttgttttgttcttgtaaatttgtttaagttccttacaaatgctggatatttttaggtctttgtcagatgcatagtttgcaaatattgtcttctattctgtaagttttctgtttactctgttagtttattttgctgtgcagaagctatttaattagatcccatttgtcaatttctgcttttgttgcaattgcttttggtatcttcatcatgaaatcattgcctgtgcctatgtccagcatggtatttcctaggttgtcttctaggggttttatagttcgggattttacatttaagtctttgatccatcttgagttgatttttgtatatggtgtaaggaaggggtccagtctcaatcttccacatatggctagccagttatcccagcaccatttattgagtaggttttccctcttgcttgtttttgtcagctttgtcaaaggtgtgcagccttacttctgggctctctactctgttctattggtctatgtgtctgttttttaccagtaccatactgttctggttactgtaatccagtagtatagtttgaagtcaggtaatgtgatgcctccagttttattctttttgctcaggattgctttggctattcaggctcattttggttccatatgaatttttaaacagttttttctagttctgtgaagagtgtaattggtagtttgatagaaatagcattgaatctataaaaatttcttcaggcagtatggccatttttacaatattgattctttccacccgcaagcatggaatgtttttccacttgtttgtgtcatctctgatttctttgagcagtgttttgtaattctcattgtaaagatcttttactttcctagttagctgtatccattctttaggtcttttattctttttgtggaaattgtgaataggatagcattcttgatttggctcagggcctggttgttgttggtgtataggaatactaattatttttatatgaatacattgattttgcatcctaaaactttgctggagttgtttatcagcttaaggagctttggactgagactatgggattttgtagatacagcatcatgtcatctgcaaacagagatagttttacttcctctcttcctatctgggtgctttttattgctttatctttcctgattgctctggccaggacttccaatagtacgttgaataggagtagtgaaagagggcatacttttctttttctgcttctcatgggaaatgcttccagcttttgcccattcagtaaatgttggccgtgggtttgtcatagattgttcttattattttgaggtacattccttcaatacctagtttgttgagagtttttaacatgaagggattttgagttttattgaaagccttttctgcatctactgaggtgatcatgcggtttttgtctttagttctgtctatttgatgaatcatgtttattgatttgtgtatgttgcaccaaccttgcatcccagggatgaagcctacttgatcatggtggattagctttttgatgtgctgctggatttggtttgatagtattttgttaaggatttttgcatcaatgttcatcagggatattagcctcaacttttctattttgttattgttgtgtctctgccaggttttggtatcaggatgatgctgaccttatagaatgaattggggaggagtccctcctcttcaattgttttggaagagtttcagtaagaatggtaccaattctggtagaatttggctgtgaatccctctggtcctggactttttttattggtatgctatttataactgattccatttgagagcttgttattggtctgttcagggattcaatttattcctggttcagtcttgggagggtgtatgtgtccaggaatgtatccatctcttctagattttccagtttgtttgcatagaggtgttcatagtagtctctgatggttctttctatttctgtggggtcagtgataatatcccctttgtcatttctaattgtgtttatttggatcttctctcttttctttatcagtctagctagcagtctatctattttattatttttttcaaaaaaaactaactcctggattaattgatcttttggatggatttttgtgtctcaatcactttcagtgcaatatgattttggttatttcttgtcttctgctaattttggggttgctttgctcttgcttctctagttcttttcattgtgatgttaggttgttaatttgagaactttctaactttttgatgtgggcatttaacgctataaatttctctcttaactctaccttagctgtgtcaaagagattctggtgtgttgtatctttgttcttgttagcttcaaagaactttttatttctgccttaatttcattatttaaccaaaagtcactcaggatcaggttgcttaatttccatgtaattgtatggttttgagtgattttcttagtcaaattctatttttattgctctgtgatctgagagagtggttggtatgattttggttcttttgcatttgctgaggattgttctatgtccaactgtgtggtcaattttagagtacatgatatgtggttatgcgaagaatgtatattatgttatttgagggtagagagttctgtagatgtgtgtcaggtccatttggtccactgttgaattcaggtcctaaatatctgtgttaattttctgcctcaatgatctgtcttatactgtcagtagggtattgaaatttcccactattattgtatgtgagtctaagtttcttcgtacttgctttatgaatctgtgtgctcttgtgttaggtgctgcatatatatttagaatagttaggtcttcttgttgaattgaacccttcaccattatataatgcccttctttgtctttttctttatttttgttgttttaatgtctgttttgtctgaaattaggatcacaactcctgcttttttcagttttacattttcttggtagatttttctctatccctttattttgagcctatgggtgtcattgcatatgaaatggatctcttgaagacaagatattattgggtcttgcttctttatccagcttgccactctgtgtcttttaattggaacatttagcccatttgccttcaaggttagtattgatatgtgtggatttgatcccgtcatcatgttgttaggtggtaattatgtcaacttgtttgtgtggtagctttatgatgtcactggtctgtgtacttgtgtttttgtagcggctggtaatagtctttcctttccatatttagtgcttctttcgggactccttgtaaggcaggtctggtggcaatgaattgcctcaactttgcttgtctaaaaaggattttacttctctttcgcttgtgaagcttagtttggccagatctaaaatccttggttggaatttcttttatttaagaatgttgaatataggcccccaatctcttctggcttgtagggtttctgcttagaggtccacgttagtctgatgggcttccctttgtaagtgacctgtcctttctccatagttgcctttaacatttttttctttcatttcaaccctggagaatctgacggttgtgtcttggggaattatctttttgtgaagtttttgcaggggctctctgcatttcctaaagtttaatgttggcctctctagctatgttggggaagttctcacggatgatatcctgaaatatgttttccaagttgcttccattctccccatccttttcagggatgctaatgagtcacagattcagtctctctacatagtatcatatttctcagaggttttattcattccttttcattctctcttctttattcttgtctgactgtctcatttcagaaagccagtcttcaagctctgagatttttttcttagcctggtctattctactgttaatacttggaatagcattatgaaattcttgtaatacatttacaattaccagccctgtcaagtcagttatgttattttctatactggctattttttctgtcagttcctgtatcattttattgtaattcttagcttccttaggttgtgtttcaacattctcctgactgttgatgatcttcatttctacccatattctgaattctagttctgtcatttcagccatctcagcccagttaagaacacttgctggagaactaatgtggttgtttggaggaaagaagacactctgcgtttttgagttgtcagagttcttgtgctagttctttctcatctgtgtgggctgatgttccttcagtctttgaagttgctgacctttggattttttttttcttttatcctatttgatgaccttaggggtttgattgtggcataaggtggattcagtcaactggcttcatttctaaaagattttagggagccaagtctcagctcaggactcctgggccacattctctaactctgggagactggtattgagccccagctttgttccctgactcctcgaggttaggaacctgatgcactgggggggccaagatgctgctggaccactggtcacagtgctctggtggatggtgccagccaaagcacttcacagggcagtggtagtgagctctgtcctcatttgcacatgccagtagcagtgcagtggcagtgcagcagggtgcatgctcagctgcagcagggtgttagtgggtactggggtgctggcctctgtgcaagtgttcacagcagcagcagtggcagcacagcttggggtgggccccactggacactgggcaactgtgcatgcattaacaccaatggtggtgttagcatggagacagggtgctagtgggggcaggactgtgtgtacccttgtgcacgtacatgagggcagcagtggctacccagggtggggacgggtccactgtttcagctggggtcaggcattggcaggcaaggctagcaggcttcatgcctactaatactctgacaacaatggcagttgggggggcagtgcactcaagtcagcagcagtggcatgtcagggtgcctgcacacacatatccttgtggagaaggaaaggcaaagtccacctgcacaaggtccacatgtgctggcaaagtgatgtggggagaccctgggtgagtatatacaggcaaagtggcacaggggaggctacagtaggggaagagcaggggtggagttagtgtgtgtccacgggtggctctgctggagcactctgccggtcaggtacagcctgccagccctgaagctatgatgcaggccaaggcagtacctgagggctgcactgcaagcagttgtggccaggctggggcctcaggagaggccatcagactaaggggtgctcagatcagactagtcctgtctcatgggcaagaccaccctgcagttccagtctaacagttcccctagggctatagtctcttatggcagcaagttgagcctaagaggatgggcatccctggccatgcttcactacagatgcccctacaccaaaccctctgggctccacactacctggagttcttccccatctcttctctaagcagcaattcctgccaattcaagtgtccatggtagtcgagtggtcacctcctggtggaattccagaggcccaaggttagagcaggttgctccttgcctgttgaactcaccccttcatgcaggcatcattgaggggcaggaacgagtcccagtgtgcagaagccccttgcagggttcccagcttcctcctgcttcagcccagcctctgtgtcttccttatattcaccctgaatgccttccctctgaagacatgctaggagtgcaccagtcttcctgatatcccagtctctcggtgagagatgttcctcctggctgtgtctagtcagcagccatcttggagctagtcctctgagctcagtttcattcttctgcatatggatagtcagttactccagcaccatttattgaatacggactttctccattgcttatttttgtcaactttgtcaaagatcagttggttgtagctatgcagctttatttctgggttttctattctgttccattggtctatgtgtctgtttttgtaccagtaccatgctgttttggtcactgtagccttgtagtatagtttgaagtcaggtaatgtgatgcctctggctttgttctttttgcttaggattgctttggatatttgggctctttttttttttggttccataaggattttagaagttttttctaattccgtgaaaaatgacattggtagtttgatcagaatagcattgaatctgaagattgttttggcagtatggactttttaaagaattgattcttccaattcatgagtatggaatgtttttccatttgtttgtgtcatctatgatttctttcagaagtgttttgtagtttttcttgtagagatgtttcacttccttggttagatgtattcctaggtatttgtgtgtgtgtgtgtggcgattgtaaatgagattaggttcttgatttaacgctcagcttgaacattattggtgtatagaaatgctggtgatttttgtacattgattttgtatcctgaaactttactgaagtcatttatcagttccaggagccttttggcagagtctttagggttttctaggtatagaaacatatcatcagtgaagagaaataattcgtcttcctcttttcctatttggatgccttttatcttttctcttgccagattgctctggctaggacttccagtactatgttgaataggagtggtgagagtgggcatccttgtcttattctagttcttgaggggaatgcttccaggaaaaagttctatttcacaagcaatcaaagaaatgtaaaacaaagcaatgaacatttgtttttcatccataatattaacaattagttaaaatataatattcagtggtggcaagggtatggtaagatagactcaagttctcactggaataaaatgtagtccatctgtagaataaagttgaacaatgtgctcttaaacccaggcattccatccttattcttatcataaaactcagagattaagatgggtgttaattatataaagtcattaatcaagattcttattgtacaagccagtaattgaaacaacttgtatatgcagcaagaagggaattgttgaccttatggaagagtagaatgatagatgccagcagctggaaatgggtggggggaatgaaaagaggttggttaatgggtataaacctacatttagacagaaggaataagtcctacatttaggtaggaataaacctacatttagatagaaggaataagtcctagtggacacagtaaggtgactatagtaaacaatttattgtatatttcaaaatagctaaaagggaagacttgaaatgttttgaacacaaagaattaataaatgtttgaggtgatggatatcctaaataccttcatttgatcagtacacatcacatgcatgtatcaaaatatcacatgtaccccataaatatgtataattatctatgaataaaaaaagaaaagaaagaggggaatggttacataagttataatatacctatatgctagaatggattttgaaatagttggatggcatcaccatataacgttacatttaaaaaccagggttccagccaggcatggtggctcacacctgtaatcctaacactttgggaggccaaggcaggcagatcacctgaggtcagaagttcaagaccagcctggccaacatggtgaaaccccgtctctactaaaactataaaaattagccaggtgtggtggtgggcacctgcaatcccagctactcaggacgctgaggcaaaagaatcacttgaaaccaggaggcagaggttgcagtgagctgagattgtgccactgcactttagcctgggcgacagagcaagaccctgtctcaaaaagaaaaaaccagggtccaacattaaaatgtacatgatttctaattacataaaaatctttgctaattcatagaaatgtgactggaaagaaatacaacaaagcactgataatcacagttactggacagtgggatgaacagtaatgcatatttctgtctgtattctttcctatactctccacattttctcaaataatcatgttttcttttttagaggaaaaacagcattattacaaaaaagaaaggagccaaagatcttaagtcaccatggctccttctattgcccgctgagctgtgtctcccaagctcactgaccttcagaggctttgttcataaaataaggacaatggtatctaagagtcttcacagaattgctgtgaagataaaataagaaaacgacatgctttgtaaattgtaaagcattgtacaaatgttagctgttactaacattataacacagaattaattccaataatctgagagaagagaaaagaaattcataataagatacctcaggctttgacataggaactaggaaaatacaagaataagctaagaatagaaagaagtaaaacatccacaggaatcctggagaatgttcactagcatatctcaggaagctcagagaaaacatttaacaagaagccaaaaaaaaaaaaattcacaaggcaaccaaatattaacagcactgcttggctaacaagccacacatgatattttgtctttaggttttttagctttctgttttgtttcattttgttttttcaagtcttctgaaaattgagaaatgatcaagttgggagaatggaggagttcactcattgtgacaggcagataaaaattagagataacttaggtcaaaatctattgaagaagcatcttgctccaaaagtcaaaatcagcacccagagggagaaaactggaggacagagagggcacttaatgatcacagggccaggactggactcagaaatgacaaggacccagcaaaaggattcaaattctttaccttgcaaaggaaaatgcctgtggccactcgttgctgcccactccttcctatacaagactctcctattcttgcttcttgagtgctcacctgtcccactcccctgcagctccctctctgacttcccttccctccccactccacactgtgcctgctctaagggtcctttttcactccctgctcttgcctatcctccctgttatttctccctgttctagctaacaccttcaaatctacatcttcatgcaggatcatttctcaacccccttaccatctctctaaatgcctctcagacacacacccccagaagccttgctgcccctggaaactaagcctgcagccaaatgcgtcttccttttttttttttttttttttttttattatactttaagttctagggtacatgtgcacaacgtgcaggtttgttacgtatgtatacttgtgccatgttggtgtgctgcacccattaactcgtcatttacattaggtatgtctcctaatgctatcgttcccctctcccccaaccccacaacaggccccggtgtgtgatgttccccttcctgtgcgtcttctaaaaaaaatgcgtcttctaaaaaaaacgcaaacaaaccagtgaaagtgggttcaatgtatccttacttgctagtcctaataacaattctgctagaaacaatttcctcttgtgcttcttcttctcatcccaaactaaactgatcatgtcccaaatactattaatacaatctttcatatttttttctaccaggcccttccacctgcccccatcccagtccagagattgataggtcactgtggcagctttctgattaccttctcatcactgcatctcctctccccaatcacttgtaaatgccactgtcaaagggagttttgcaagacaacactttctcctcacttggattctcccaacaaaggctttcaatgactaccttaaaggcctattagataaagaacaaatgcttttcctaacattcaagctcctgagtcctagctaagggctggatggatggaaatgtcttggccaagttcaagggttgggccaagatggtggccaacattagatttcaagcatgaaggctagggataccagttgtcatgagttaattgtgcatgggcagggctgttaatggtcaaaaaaagagtcaagtcttgggaaagaatataattgtcaacatttgagcataaagaacaacctcccaaagcagaatcattccagaaatggaaaggaacacagagatgagaggcaggagggtgggcttcagaaacaaggacagaagccaaagttggggccaaagaggcccttcccatgggcagatcagaagtgtgcttgctcagagcccaggaggctgaggttgggcaacatagtgaatgtgaagccaactctgtggagcacttgctccccacacagtgctcactcttctccatagaataaggcaagctgtagctctgaaaaagtcaagagtgtagcttctggaaaattaacctaaaagtatagaagccacccaaagcatagaaagcatccattcatcaactgatgaatggatagacaaaatgttgtatatccaatacaatggaatattattcagccataaaaaggaatgaagtatgttgcatattgcaacatgataataccttgaaagcattttatgccaagtgaaagaagccagaaacaaaaggccacatattgtaagatttcatttatataaaatgtccagcatatgcagatctctagagacagaaagtatcacagattggtgattgcttagggctgggaagattgggaggctaatgggtaataattaagaggtatggggtttccttttggggtaataaaaatgttgtaaaattgatggtggatgaatgtacaactctatactaaaacacattgaattatacactgtaaatggtaaattgtatgttatatgaattatatctcaataaagctgctttttaacaaaggtggcagttggttcaaagtagacttcaattctacacgaccaaagaaagaatcaaaaaataagtcagcaaggaaaaagtgaattttataacacctctatcctggcagcttgtggaaagcccaaagacgtgctatgtaatcttttctgtctccattgcgagattattttcttttctctgccccttggtgctacctctgcagcttatacatatttctgtttctccttcaatagcaatagattataactgttggccaccctggctgcttccctactgcacactgtggctctcagaggactgagactgttccctattggctcctatatctctagtccctggcacaagattgatgctgactaaataactgttgaattgatattaatgttataaatcctggtcccttttatctaaaaaatcttactatctgatgagaaactagtaacactagttgctgatgaggagaactcagtagttagggagagggatgggagagaagcattttgcacaccctttagtacctctggaatttcatgtatgtcaatatgtcaccttctccccagataaattaatttaatgttttaaattgtttaaaaatatatcatttattagcaaagacacagaattcatgcatttgacaaaacagagaactgtagaatgtgacaaagctctcaggagagcagactcagacagcaaactcttcagtgggaggcccaggggagtggaaatcaaagtccccaggagaccagagtggagagaattatagctctcttctcataattctaaggaagcaattgtagttctccattcattcttggtaatgacatcagggtttctctgccagcctcaacaatctcaccactgccagtctcaaggctgatacagattcatccacatcatgtggcattcacatccttgctgccatgcccacctgtccactcaggaggacagctgctgcagccagaaactgggagagaagacctcattgctgggcagaattactcactaactagtacagcatacgaagaccaccctcgccacacaaggagaggcacacctggaagcactggaagagaggctaacctcgtcccccatgccctttcctcctttctttgaaggtttttcccctctcttgggaccacttatgcaccttaagacccctggaccctcatgctgcacctcattgtccctaagcactgacgcacatcacagtgagaaaatagaaaataatgggacccaaatgtccccaaaagacaccagccctcacagggagccagcacctggttggggtacactttgaaatggcctgtagatgtctcagcctctgcctcctccaagtaagcaccctgaaagcagctctgcaactcctcaccattcatcaccagcccccagcatagtcccggtacatgacaggcagtatttgttgtttagctaacaatgaatgagcatgtagtagtgccatgcactgttgcagttcatttaatcctgacatcagccttaagaggcaaatgctattagtcccattttacaagtaagtcacagagaacttgaaatcacttgcccaagagcccacagctactaagtgacagaaccaggacacaaactcaatcggctacagaattctttagcttaactgaaatgctcatgactcatacaagagatattgaaagtgtgtgtgtgtcagggtgaaggtgggcaggggcaggggtagaaggaagaaagagaaagacaagaaaagaagggtggtaggcagggagggacagaggaggagaaaaagtgaggtggatggaagggaggccactaggtcccgggcacaggctttccaccttgagaggcagcaactctatacggtcagtaccctacagtccagagactgacccaggttgaacaaactctcaagtgactgatgaataagccagaatatcaatcagtttattagtttcagagagaactattacttccaagaaaaccagagtctcacgtccattggtgggaggtcaatgtacatgggaaaaggatcagcctcatctgaagcttgcgtggaaagcaaggactcggtgccagagagccacaggatgatgttaatggcttgtgtcagtgagttatgattgtctggtgctccctgctcctcctagacccatctgtcaagcagagcggatgtttctgtcagccagtcgggaccccttgctttggacaatgccggaaaaacactgacaaattactgctccgtggcatccccttcctctagaccatgcacagaccaccccactttggttaatacatttgtttcccagacgaggcacattgtgattgattagatttcacaattgattaggtttcacaatcccagatgtttaacttcattatgcatggattcttcttactaacataatctcagaggacaaccatgttctgaaaaataaaaaggggaaaaaaacaggacttattctcaggcctgttgctgctctcatcctctaagttggctctttgtctcagaaaagggtccagtttgtgtcttcacagtgtgaacaaattgggaactggttgggagggggacatgatgggatgggatgaaaaccaagcctggattaaggaggctgactccactgcagaggaatgagcttacagctcaaaaaactgtgatgctactctagttagtctaatttaatcctagctgcttgtgaaggccatgcataggctgcctagcttatcaaatttctctggtacagtacaagaccttataaccagtagcagaattttttggtgtcactactaaaagtcatatttaaatttaccaagcaccttctacattgtagatgttgtgtcaaactcttacacgcatgtgttagttaaccattgctgtgtaacaaattatcttccacgattcagcgtcttaaaacaacatgcatcgactgtcttgcagtttctgtgggtccaggcacagcctagctgggtcctctggctctcacaatgctgcagtctcatcttgaggctggactgggaaagactcacttccaagctcatgtccatgattattgtaaagatttcttccctcttgaattgttggactgagagttctcctcctcagggagcccccatgagcttttggctggagacctccacacttccttactatgtgcccttctccatagaccatctcataccatggcagcttgcctcattagactgagcaagtgagagggcaaggaacagtaccagtgacagaaagagagagagagagaaggagaacgctagcaagaaagaagtcacagactacagacttaaccatggaagtaacaaccccttacttcgctctattccatttgttagaatcaagtcactaggtcccatgcacactcaacgggatgggatacagaggggataaatactaggaggtggggattgttgggagccagtcagaagcacatgacctcctcaaggcaaccctgtgagatagatgctattcctgttctatgaattttccagatgtggaagctcagagaggttaagtcagttgtccaaagtcacatagcttgctgatggtggaatcagatctcacatacgaatctgattttataatcattcactgagttcagcttggtcaagtgattttcccatagtggtcccaatatcctatcaaaagaaggtcactcattctgtcaatgagtaaggttggttgcctctaatttagcatgagactaatttgaagggagaccaatttttggtggccactagcatcaggaccaagatctgggcctttccaattctggactttgaatctcagacttgctgcagagatgtcctgtgctcctcctccaacctggctctgtcaacacaaggcagtacctcactcttggtcactgcctggtttcccttccctattattgtagctgatgtttgtatatacagtattccccttagcaacctgcccaatgacataaccctgtagcaccaggcatagttcaataatgtctcataaacacttattaaacactactttgtaccatgaattgagtgatgcagagaaaaatcagacattgcacctatcctcaagacagtcacaaagtgtcttgattctagcattgtgccatccaatacagtagctactggttacatctggctaccaagtacttgcaatgtggctggtctgaaatgagataagttgtcactctaaaataacagtggatttcaaagacatatgaaaaaagtaaaaatatctcatcaatatttttatattgattgtaaaacaataatatttggggtatgttgaattaaataaaatatactattgaaattcatttcacttctttttagtttttttaatgtgtaatgtggcattccacatcggactcacatttgtggctcttgtcacatttcccttggaccaccctggtctagaggcagggagtcacgtgatacccacaattcccatttattgagggttcaccctgtgcctgtgttccacatactctctctctacatggaacacaagttatttcatctagtcctcataataaactcatgcagtagacatcattatttcctcttaccactaaagcggaggctcggtggactgaagcaccttgcctacagccacacagtaagtgggtgagcaagactgagaagctatggggctccagagtccatcagaaagaggaatacacacctgtgctgttcagagtgatggacgctggaatggagccacatggggaacccaggagaaagcatccaactccaccttggaaggccaaggaagacctccagatagacatgacgcttaagctgagtaagcccagaataaagatatccacgaagccaacaggcaggagagagctttcccagcagaggaagcagctggcgtgaaaccccagaagcatgaaactgcgtggtgcattcagggaacagtgtgggtttgacataagaaagtggagggagataagacgagcaacataagcagaaactttgcagtaaaagaactacacaccgtgcagaggggtttggactttgtcctgttgggtcagtagtctcaactctggccgcgcattggaatcaccaggagaactttttaaaataccaatgcccaggacccatgtcaaagcaattaaatcggaagatcataggagatggtgatgaggtggcccaggctccagaatttgttaaatactctctccagcgattctaatgtgtggctgggttgagaagctcttcatagtattaggaatttgcggaatagctttaagaaatgaagtcaaatgatcagagttttgtcttaggaagatcattctgagggttgcatcgaaaatgaattattttccattctccagtaactctggaagccgggaaaccaagcgggtttctactgaaatagtccaggtcagggatgctgaggcctgaggccacgtagatgaatggaatggctgtgggggttgaggtgcggagccccctgagagaggcccctgctatggttctgaccacctccagcctcaagcacttccaactgcctcctgcatctctcccactaggtgtcccacagacatctccagctcatcacatcctcattggaattattacattcccccagagcctgttcctgcaggttttcctaaggtttccttcattcccctcatggctccctagaaaccctccacccctccaggtccatcatcaactcctctccctctctcccctcttttcccacatccaatcaatcagcaggtcttgttgcttttatcctcaaagactgtcagaacagctcttccctgtcactccccagcccctctcttattcaggctctttcatttatggcttgaatccttgtgacattccctgtggcaatcgctactggatttggatgtccaaagccatttgaaactctgattcaataggtcgggtgtagggctcaggcatcacacacatgcacacacacacacacacacacacacacgcacacacacaaagagatataatctcccaaagttattctaacttcgttttagatatgtggttctaaaagtatgtccttgtaccagcagcatcaacatacctgggaacttgttagaaatgaaaattcttggacctccaccccaagtctactgaatcagaaccctgggggtaagacccagagagctgtgctttaacaatcccttcaggtcattttgatgcacattcaggttcaagaatcacctatccaaactactcatggaaatctcattcccacttgctaatgattgattttcagtgtgcacataacccagttctggccaatgaaacatgaaagaaaatcttccaggagggcttctggaaaaaaaatgttttctccctgatagaaaaagggagccatattttaaaaaaagctctttctccaatatgtatactttatgtgagtaataggacctgttctcatgtgaggctgtgatgcttggagctatggctgctatcctgggaccatgaggagaaagtggagaggatcacaggaaagctaatccaaaacctgatgttaaactttcaaattaatcaattctggaacttcccaatcttcatatctgatgcaagatcactgtcattcttatttaagccactcttagttatatactttcttacttgcagccaaaagcatcctgacttctatagcctcctgactgttatccatagttccaggctcttcccttcaaatctatcctactgtgagaaactgtgaagggtcttagattttaccctatctacaggctaacaactgagcatgaaccctggtgaaaggcataaaacttcttggtcagaggcaaaatattgtattactcatggtacagcaagcaccatgtttgcatcagttccccttcttctcaagtcacacagggacaacactgtgggcccatgtggtacctacacacccagtgggttgcattacaggagaagaaccccaagccaagggcccaaaaaagcagtaagcagcaaacaacaaataggttctcctcctgtcctcccaggtagggatggttaccttgccctacttagtcacctttatgaccagatacagaactgctcagtatcgagaaagagacaaaccctgcaatctgagacattcagcaaaaaagtgcagggaagttcagagctcatagtgaactgcctttccaacaccgtgtttatcttccagctagagctcccaaatgtccatggctgtagtcacctaagtccttgcctcagataccagcagagtctgagctagcttgagcccttaatcatcccttctcatttctggctgaaacctatcacaccctccaaaaaagactgactatgccccagcggctcaaggatactcaccaggcactttctcttacctccgcacagagtccacttcttgtctggcatcacagttttccagactttcatcttccaccaggcccctcctctcatctgcatctctttgaatttatgcttcagtgacagtctcagtcttgattccccttttggtcctacgtgcccagggttctgcattttccagggcagtccgagtctactttgttctctcaccgccagcaccctggacttccaccagtccagatgagagttcagacaagcggctccctgttgcctcctaagcacataacactcctcactctggaatcaaagccctacatgccctcctccaatttccttctctgaaattatctccaactatccctctacagtctacacactccccagggttcctggactatgtggttttctccatcccatctgttgtttttcccctctagacctttcctcatgatctttgctggatttagaatgtgctcttcctccccactctgctcctggggaaatcctatccctccctcaggcccatctgaaatgaagactttggtaaacctctgtacggttctctccctgctggccaggccctctgcttcttttcaacccaggggctgtgagcttctcttacagttctcatctttccagtcttctgtgacgtcctcccaggctggtctcattcctgctgcaaaataaaagctcacaaaagcagggactacttgatactcccttttgtctccctttctgacctgagtactgttgctagctctgttactaatagtgttctcccctaaatgcgtttgaacaccatgactgctttttcctaactaaagcaaatgagaaagccctgctgtgaactgcatccccgccatgctagtccatttttctgctgccttagataccagaggagggatgaagccttcgtgtcactgaaactgatgtcacttgttgagtccgccaaagggcaaataggcaaaatacaactctataggggaaatatgttgtgattgggggtgtgcaaactacacaatctcccaaacagtgtgctgagaattgattccaggtatatctggatacttcagcccttgcagtagctaggtggggcctggattgggctgagcctagtgggctgtaaaaacatcacttttgtgtatttatgaaaataaaaaggattgaaagcctagctttagggatgtggaattcctagcaccaaagggcctagcatcttgagggtctaatcctgcaaaggtttagactgtttcactcataagcaccaaataaagggaattgtcaatgaaatgaagataagaatgaggagttgagagggggacaggctatgctgaaaaatgtgatgaaagcttgtgtatggattgggactaggatggaatggctcagaagaaacgagatgggcataggtctagcatgaattgtggtaagaacaggaggcaatgggttagagagggagttaatggaatttgcgtgagctggaaatagggtggatggataggggagtaaggctccacccagaaaaacccacctggcttcctcaatgtttcctttcctccatccttcccagtaccctgatggatagctttgcacagataaattttgttcccagcccatgtccaaacaatatcacaaaatcagccctagccagttgtttctgtttacagccctgtctgtgattgatccagctctggaaaagcccatttatcatgaggaaccaaagcttcatggcctactgtctattttgttgctttattccctagcactaaatgggacttcaggacctcccacttgttccagtacccaatgacatgcctatatttccacactcagtttgcccttcccttcagcccctctagctctcagccttcctgggaccttaaataagtcacgcagctcctttcaccaactcttttcttgttctcgttacttctgggctcttctgcctttctatctcgtctccttctctcagcagctcactgtcctttccaatttcagctgaaatcagattccttctcccttgcctttgctttcccacctcccatggcctctcttatcatttattatttaactcagtcaccatattatgtatgcacaagagccatttctgaacatggtcggcatgaaaaaaataggacccaaagcagaagcaaacacctcttccctatcagtctcacagctccattgtcatcctgctccagtcctgagcaaggtccagcgaaacagccagatctggccaacacaccctcaagcccaattaacttcttaggttggacacagggaaaatttccagatggctttttacagatatccttcaatttatgtaagagatgccttcctggaagtggatgtttgaatgaaattccaaatggaatatcaggagggtcaggcacacaggatgtgtggttcagagacccaggttctattcttcttgagatggagtctcgctctgttgcccaggctggagtgcagtggtgcaatctcggctcactgcaacctccacctccagggttcaagcaattccctgcctcagcctcccaagtagctgggattacaggtgcccaccaccacaaccagctaaattttgtgggtttttttttttcttaagtagagacggagtttcaccatcttggccaggctggtcttgaactcctgacctcatgatccacccacctcggcctcccaaagtggtgggattacagacctgagccaccgcgccctggcctccagcttctattctttaatagccctcattaacttacttccagaacttgggcaagacctgtagcttctctagatctcaatttccccatttataaaacaagggagccagactatatttcctcaagtttctttcagtgtgaaaattcaaaaactcctattttacttaatgatccacatgattccattggagatccttcctacagttaaaattcagctctctcctcatcaataggtcattacggagcatgtgctatgctgctgcgcctcattagaagggaatgtagattaacctggtgaagccctccttttatagatgaagagaccagagcccagagaggagaagcacctaatcctggggtcacacagccagtgagaggcagagtcagtctaaaatgtacaagtcctggcctgagactactctttttttcctgtgtggtgttttaagcatgactgcaaatatttttatcctccttccatcaagaggtagatctatgtcccctactttctttttctttttttttttttttttttttgagacggagtctcgctcttgttgcccaggctggagtgcaatggcacaacctcagctcaccgcaacctccacttcccaggttcaagcgattctcctgcctcagcctcccaagtagctgggattacaggcatgtgccatcacacccagttaactttgtatttttagtagagatgaggtttctccatgttggtcaggctggtctcaaactggcaacctcaggtgatccgcccacctcagcctaccaaagtgcttagattacagctgtgagccaccacagcagaccttgtcccctactttttatttgaatgggtccttggcacctcccaccaatagtacatttggaatgaatgctatgtaacttccaaggcagggtgcatagaaggccatacagcttcagcctagctctcaaaggacatttattttctctcagagccttcatgtaagaagtccaatgggttgggtgctgtggctcacgcctgtaatcccagcactttgggaggccgaggtgggtggatcacctcggaggtccggagttcaagaccagcctggccagcatggtgaaaccctgtctctactaaagatacaaaaaaattagcaggatatggtggtgcacacctgtaatcctacttactccggagctgaggtggaaggatctcttgaatcccggaggcggaggttgcagtgaaccaagattaaaacactgcactccagccttgctctgtctcaaaaaaaaaaaaaaaagtctaacaatcctgagaactccatgctctctcagctgagcccacccgtaagccagcccagcccagctgccagacatatgagtgaaaaaactattggaagtggatcctccagcccccagtggttgaaagcacccccattccagtcctcccctgaaagatccacctctgtgcttttttctaacttctgacccacagaatttgggatcacaataaaatagtggttgtttcatgccacaaagctttggagcagttttttacatcgtcatagacaacctgaagaactagtaaactctcatgttggctaatattcttgggctcccttcccccaggtgaccaatgccaggagtgtgtgacttgcagcacatgtgctgaaggtggagagaggtagcctctgcctcctcacactgcacatcccctcacctgcctccagtgtggtcagttcacataggctttcactcctctgcccaggcaaagttctcctctctcctgccacggtcctttgtttatatcgtgagtgcaggcttgtcacacggatagcaaccagattatttatgtttgtcttcactagactacaggctctaaagggacacagctgtattctatgcatttccctgtgctgaggcctagcacctagtgggcgtgaaataaatacgtgtggaatgaaactgtcaaagaccatgtgaccagctggccctgaccccctgctaacaagcagcagacccagaacccctttctggttctcctccaggcagggcacagttgtttcctatctgagcaggctccatttgcttcacatcagcccaagaacagggaatgggaaatgccttgtgctgcaggagggaagacaaagtaagccagagagcacttggccatctggggctgggagcggaagagaatggaaccattctggagagccagacatttgttttgtagttgttgcctttgtgaatgtacatgtcctgaaaccctggttaattttcttgttcaaacattggtttaaaattgctggctctaggagagatactgtccttcagcaggttctgttataaactttgcaactccaaggtctgattcagcagcaagctggaaaagttcctggttgctaagagaccagagagcaaattagcagctcacaaaagacccagctaagaccagtaaaaaataagacaaacgaaaacaaggtaggaaatgggcctcctcaaaatcaaaataaggtaaacaaactggctaggaaaatgtctgattggaaaagacaattataagtattcttcatgctgaagtaaaatgcactataggtagctaaactctatctttgtctttttgtcacttgaagaaaacagcaggggagcccctttctagtcctgaaattccggatctatgagtcagagggaaaaacaaactgtcccagttgataaggaggaaagaaaaaagtgaaataggctgcctcttttatgagctctccctgccaggacggtgaatgggctacctggggtggtggcccagaaacattcctgcaagcaaacaaaagcctccccccaggaaaggtttctgatcactgctggtccaaggctcagccgcaacagagggctctgacccccacaggacttggccagacacttcaagatcccatctggcaatcaagcatgagaattcaggtacttgtaataagaaggggcaaagagaaaagtaccaaataggtcccaggtattaaatatttattttgttaaagtgcctctatagctatgatttttagtaatttcttttctggtcagacaatctagtaaaatattatattaaaattatttttaatcaaaaacagaaaaaagcatgccaatcacttacctctgatggaaattcattctccaagacacacagttttcctaagaacctactgcttagctggacaaaatagtaggaaaatgctccaagtggaaattaccagcctcttgagggaggagcttgaaaatcttaagtgatcacagaaaagtcacagtcatctgggttttggagaccagagaagaaatgaagaagggcaaaaaaaaaaaaaaaaagaaaaaaagaaaaagatggggtgtggggaggaagatggggaaacatggagctacaaattgggagaaaattaaggcagccagtaggcatatgtcagggagctatggcgtgatatgcctaagaactatgtgactgaatagcctccacttatcaatatttgttggacagcaaaaggatttcagaatatgatggatccaacaagcatgaaataatctttaggggaaaaaattacaattccccacatggcagcttccttcagatcttttctgacaatcctgtttgtcagatttctaaatcgcatgcaactgctatattttaggcagagctggtatcttcctggaaaaagaccgtcccaaatattcagtgcccctccctgcaggagaaatagacacctcctttctgatatatgcagctctggccaaatgacttgctttggcccatgaaatgtgagcagaagtcacatgtgtcactttggagtataagttttaagagctagcacgtggttctctggcttttctcttgctgtcacaatgaccagaacatgttccagatagtgccttatccaacaggcttggtccccaagagaagaaagcatggaacagagctgtggctggattgcagtggacacgtagcccagatgaaaaataagttctgttgtggagttacctgcaattgcagcaaaacctagcctatgtgactaatatacatggcccacgggactaaaaggtggccagagttgcccctcgccctcattcacattttctcactagctggccacagtctcaccttgagaggaaagtcattatgctccaggtggctttcttagaattcagatatgttgcctgactgacccaggaaatcagggctggcagccctgctgctgagcgtggttcagtacccaagaaacaggcaaagatggcgcacggagctgagaggagacagaaccatgaacttcgagttggaaatgccaggttggagctggctcaccagttctaatttaacccaaaaagaacaaacaaaaaacaaaacaagcaaacagaaaaaaaaaaaaaaaacactagaccttcttattcctacctttagaactttagagagtgttgatatttaaaaaaaaaaaaaaaaaaaaaaaaaggcaaacaaacaaaaaactgacccccaaagccaaaagaaataacatgtctttattgaagaaatgtccattcttccttcaaagcctctttcccttaacaaacgtggtatgcacagcaaaatggaaaagatgtcagcctccacagtacagaggaggtgagaagatctgcttcccagcacactgtggaaaggcagggcctggagcaaggctgtgacctcagctgcacatctgggtcctaagaccactggagggagctgtgctgagtcaaggttagagagcccttggcaagcagatccccggcaaggcagccaagtcaaagaggaagtttgaacacttaatgggacatcaaatgggattttccctgcaatctcagaacttctgctaaaagccctaaagtggatagcaataagtaaaagtgcccccgcagtctaaaaagaaagtgatcagaggatacctgcaggattttctcaaagatgagtgatccaatcctcccatcccacctccaccaccccaagagaatactagaagatttgcgagtccattgaaataggcgcatttctaagagtagggagttgtcagcctagtaggaaaggctagggtgtttctccatccctccctttccccatgaaggcaggaggaagatgtttctcccatcctcaagtgaggcacaaagatccaagagaacagcagggaggtcaggaggccttcgagagggagagagtgagtccaatacccagctgggtgctggctgagccacagaaaccagtaggctgacatggtgctccccagacaggagcttggggcttgcccttgcccccaggttctggaacagggaggctggcacctgctttttgtccagagaattgtaaaggaatgtaggaagctggctgggctggcttgcagtggcaagtacagagagggcatgaggtgggcatccctctcatctgggccacgtgaccactacggaatgtgtccctactctaggtctgataagacttcctcctaaaagggaagcccaggaactagaggcaaggtgtgggggaaggtggtaaaaagcagactaggccacctctccaaggcagacctagctcaggcttgagctgagggatggggaggggagaagcatagtgctgggtatgagattgaagttttgatttagcccggccacgacctttcaatgcttgaaagtgaggtgaggcagccaaaataaaactagttattataactgaaggtgaccaaaaagctgtgggctgtgcctgaaacaacgtcaagggatggtccagaaataaggaagagaaatgcaacagagagctagaaaacaatagttggagaaaaataaagccacctcctgattgtactccatggagtcacatcggtcaaaaaaccaattacaattggagggaaattcaccagagagagaagtgctgtctagagagtaactatgattggggagaactgcccaaagacattccattctccatctcattagagtatgcattctccagggtgtgaatgctcccaagtgctcccaagggggtggaaattggctggggtgggggtgtgaaaaatcttagatgtttcaaagttttatgaccctccaaagtttaatcctgcccaacaaaatagtatgtaattatttcttaatttatgtttactatacatttatttatcaatacatatcttatctctctataaatttatattattttatgttattatttaaaatagtgtttaggatagggaaaaaatgaaaggaagggaattttttttccttaggggaacaatgctgaagaaaagtctagaaacattgagttagagagaaacacaacattcaacctcaaaccagaactggtgtttggataaaatttttctggctccaagtagaattgctttcactgaatttgttttgatatcctaccttttgagggctttatcctctgcttcacaaggtgtccttttcatagggacccagaagagaacgttctttcaggtttcactgtaaagaaaagcagtgcttcttctggataaatggtttgtttatcttttatgttttatcttttatgagatttgttatgcacatctcaaattagatcaagtttccctctttgcttcagccacaggggagctcagggcaccttttgtaaccactgcaggactgggccatatgcatatctgggactttgccttatctgtgcttttagtatttttctacttttaactttgccccaattccctcaactgtgttttaactctttcctatttcatgtatttttataagccccctacaatcctttgtggaatatgtgggatataaatatgtaaagaggaacactacctctccttccaaagttttctttccgcccactcttattaagtctgtccttatacagttgcttttctttttaactcaatgcacaactaaaaggtattctattgggttttatctttttcttagttttccaggatattaagatcatcttgaaaactgattctgtaacccaacatgtttgccaactttgtgttatccatagtgttgaggaccatacctcccatgtcttcatccaagtcattgataacaatgttgaatggaacagggctaagacagacccctaaggtatgccactagagaccttcttccagccaatatcaatgcactaatcccctttctcttctgatatggttgaaccaacgattagcccaccacatttctgccatctgtcttctggctaagctacttggtcaaacatctctctgaccaaggagcctctgcctacagcattccttagacctgttactcttaatatcgctccccaaaaggaagtaggctgacactggatgccgggaactcaactctactgcaattgtgtggctgccacctctgcactggaaatttgatactggatcccaaaaataagaagcctgagttgccagctgcatgagtaaaatgaatacaccacccagagctatgtgtttccaaatcaaagtctaatgtaggttctcctcaccggtggagcctgggtcacatgactggcaccagctgcaaaaaatactaaaaatctcagttctctggattctgccttggagcagcagttcccatatgtcaggaactctaacaaggattagaatgatgctcaaaaagtgctaagcagtcagacatgacgaatgtccctagagcccaaatggtggggggacatggctgcccaatgagcccaggctccatcctgcagttctcagacccttctccaagctcctaggagaggaaagccagtgggctaaccttggacggggtgctttccagagacagtctcagctagtttgcaaggggtcaggcagtgctgtgaaggctgtcggtgccctcctgatgtcccctcagggcatttgatcccctcctggtgtgcttccacctgagtcagcaggcacctgagtctctgtgtcagaggactgttctcgggcagcctcagccctgggaattcacatcccctaagacaaccctcaatcaatatgattgacaacataaggattaaacattctccagccttctccatgatgaaacaactctgaagtgtgacttacaccattaacagacatcccctgtgggactcttccaaagttaccctcggggacactttgcttcatactcacttctttcccttctttcttccagttccctacgacctctggattttccctgggaacacacttcctaacactttcacacaaacctttgcctcagggtctgcttctggaaaccaacctaaaacaggaaaccatggctgccggaagtccatggtggtaaatcgggaattactagagaaggaatgaagagaagaccccaaacgtgtccgttgtccccctggttggaccccctccagaccaccttggttctgaatgtagaaacttaacctctaaatatctgcccaggccctgccctggtccagaagcagagctggaactcaaaaccagttttgctgaaggtgtgcaccttcccaacatccactggtgagaacatcccagcacactgctctgtaacttccagaattcattcctttcccctttttgaatgtcaagagctcatatgcccatctcatgtcattgagcgcaaatccctcccctataatttatcaaagattgatgacagtgactctgaaatctcatgtcaagtccctcccaggctgcacgacataattcatcagggtcagagccctgagtttatcacagctgctgctaccggctttactgcctcaatgcctgtccttgacttcaatcccctctttgcaatgtttgttctacccttttcaattggaagaccactttccttactggaaaagaaggaggtaaaatcatagttaggcagcacagccctcactttaccttcggcgaatgttaaatcattttctccacgcaaatctttcccttaatttttgcatgtagaacagagaacaatggggttcctcagagagttcagaacccctagctcatttgagacagtagattttcctaccccacttcttacaggtggggccacactgctggattcagcccttgccctctgtcacttaggggacgctgaaggctgttttacaaaatgtgaaccttcatggccacttctgaatcctaagccaactgttttcggacccaggctgcttcttctcctgctgacagctgtcactcctttattcccaaccacctctctacttaagagcctgactaaaagtttttttttttttttttttgagacggagtctcgctctgttgcccaggctggagtgcagtggcatgatctcggctcactgcaacctccgccccccaagttcaagcgattctcctgcctcagcctcccaagtagctgggactacaggagcatgccaccatgcccggctaatttttgtatttttagtagagaccaggtttcactatgttggccaggctggtctcgaactcctgacctcctgatccacccacctcagcctcccaaagtgctgggattacaggcgtgagcgaccgcgcccggcaagagactaaaagttcttaattatagtccctggcccatactttgaattctcttggcttttattcctgagggcaggcctcatgaaatcacccctttccatcactttaagggaaggaccatcctgcctcatcctcaggaagtaacatttttctgcaaggttagccaccaacaattgcctttagggtcatcaaatttttgagactctcaagcccagaagatgccctggttccctggcttctaagcctcttgcgtccctaatttcttactacaacttacccttccattcttgcactatttttttctaatctagctataagagagattcacttagtttctttagctaaatttccatttttcctcttcagctggatcaatgctattttaaaacaacaacaataccaggaagagtaaatgagaatctaacgaaaatagttatctgcagggtgtgaatagaaatgtagaaatgtagcaaaagggctagggatcggagggagacatcttctagtataccgtcttatatatgtttgatttttcaatcatttaaatgtttttacatgtttagaaacaaaattaaattaccaagagcgaaaaaaaactaaacctaaagatgagttttaacaaaagcaaatgaaacctaattctgtatcaaatcatatagaaaaattctaattcaaagaatttgggacacagtaccctgactatacacccttaatggaatatattctaaagagaataaacaccacaaagatgccttaaacctgactgagtaggtttgttcttagtagtataactggtgcagtaactctgaaatgatttgtgtgtgttgtagaatagagaaagttaatgaatatgttggcattttgagaaccaagttctcactgtgagagaaagaacacatgaatagggattgtgggaagggaaggaagaccctggggtgttggatttgaattggaagtatcaaagtaaatacaagatttctttttttgaaaaagtatttgctagctctatccactgaaagagcctagaaataacaatgctccaatggaatgagtgcaccaagcacccagaatttggttttttaatagtgttctccattgaaaggagccaggagccttgggagaaatgactgatccgattctggagcagagacagtacagggtaagcctaggatgtcaggttgcgctaaaaatcaagaaagtgctcaaattctaatggtgacatgtcaaaggagcacgggagccaaactgaaagggctcccaccaggcaaattttggacaatttgagttttaatatttgtaattaattatgacacatggattttttttaagttccccagttcatggtgatattcaaaagggtggggaaactcttcttcatgaaagaatgcctgttaatgaagtagaatgatagaattagacaattaccattttacaacgtagtgagttactcggctaagaatcatcggtgtattctgttaccattgaataaaaggttggtgagatattcatgcagttcaaatataaccccttcagattacttagtaagtaaaaaggggcaagggtgcaatggagaacagtggtggacaccacttaaccaaatgatcaaactcagcatctaataacgggaccaactgacatgaaatggcagccaatttctctacaatagaaatggcacggattcttcaaaaatctcaggaaggaccgagcacagtggctcacgcctgtaatttcagcactttgggaggccaaggcgggtggatcacttgaggtcaaggaattcaagaccagcctgacatagtgaagtgaaactccgtctctactaaaaatacaaaaattagccaggaggtggcgcacgtctgtggtccctgctacacggaaggctgaggcaggagaatcgcttgaacagggaggaggaggctgcaatgagccgagatcatgccactgcactccagcctgggcaacagagtgagaccctgtctcaaaaaaaaaaaaaaaaagaaagaaagaaaaaagaaaagaaaaaagaaagtcaagaagaattttaaaaaatgatctattctagactcaaggataataaagacacatgcaatgcatgatccttgaatcaaggagggaactacaaaggacattgtggggacaatggaggatatttggatgtggatagtatatgaaatagtgctatatcaatattacatttcttgaatgtgatatggtattgtgaaggagagtatctttagaagagatgtgctgtagtgtttaagagaaagtattatgatgtctataacttaaatgattcagattttttagaaatatatatatgctaggtgtggtggctcatgcctgtaatcccagcattttgggaggccgaggcgggcagatcacctaaggtcaggagtttgagaccagcctggccaacatggcaaaaccctgtctggcaaaaccctgtctgtactaaaaatacaaaaattagcccagcatggtagcacatgcctgtaaccccagctactcaggaagctgaggcctgtaaccccagctactcaggaagctgaggcaggagaatcatttgaacctaggaggcagaggatgcagtgagccgagatcacgccattgcactccagcctgagcaacaagagcaaaattccatctcaagaaaaaaaaaaaaaaagaaaaaagaaagaaacatagataaatagatagatagatagatagatagatagatagatagatagatagatagatgatagatagataggcataggcatagatagagagagagagacatggctaatgtaagtgaaacgttccaggtgttcatcgtactcttctttcaactcattcatagatttgaaactttttgaaattaaaaattgaagtaggagaatgctctggcttcacctcaaaccatttaagtcaaaatctctaggggtcagcccaagtttcttttatagcatttctccagaagtgtttactgtgcatccagggttgagaactactggcctacctgattcatgatgatgtccaggccctcagaccctgcctcagcccccaaggaccctgaaaataagtctcttaaaggtcacaggggcatctgagtctccagcaggcccttgcagccctgagtcagtagcccaggctaaggaggagagagtaaagagtcttcatagaagtgtctgcttagcataggaaccctgactgcttttaggtccttctggcttcctcctgccaggcctctcccttctcagaggcccctctgagataaccctcattctgccccttcaggctgcctctgaaaacctcaggcctctcttcctcctcccttgttcataaggcctccagcaagggaccttgcatggcacgccctcaataaatgagtgccaggtgagccgaggtgggctcactcacactgtgcctctctcactgtcaccctcaggggggaggaggaaaagcccatatcaaacatgggcaaagggttttactttgtccaaaaaaaaaaaaaaaagcagaagctgaaggtcaaagaagcaaagagagtgggaaggactctgttctttacaaagaacagagtcatgacacctcacactggacccttgctaggtgtaggtgctgtggccgcactgaatctgtgttatctcataaaatcaacagcctagccttatggggtgggtcatactgtcattgtcacttcacaccatgtgtccccagcatcacacagctggaacctcagcagtctcggaccaaagcccacacctctagccatggtgctagactgcctacataggacttaaggaggagaaggaaagcaagagccaatattgatgaggcgcctactaagatgatcttgttgaattctctctgcagccctgtgaagtcaatcttatcttcttttgatgaagctgagcaaatggactctgagataaagtaatttcattccatcatgttgaacaagcctaaaatgtatcatgatctgcattgtcttctgtatgaatggcaatctctggagttgtgcaacccaggatcaagagtgacttgcccagggctatgctgccagtaagggatggtctctggatttggaagcaaggtctctcagactttggcctccctggaaaagccctgctgtcccctcacccccaccacctcaagtgttctgttaccagacatctctccgcagggatcagaacctcccttctgcagggagaagtgagtcttccactgcgctgccatcaaggaggtgtcagaaccctgagctcttctagacagacctcagctgttgaacatgtgaagaacatgcctttctgcagatgatgaagtgggatgttggggatgagaaagcagaggcagaaaagtctgaggcatgccccccacaattcagcagactgtggggtagtggcactcatagctaggatgaccagctcatcccagttttctcaggactttccttgttttagcattgaaagtcccacatccagggacaaccttcaatcccagtcaagggagatggttaatgtcttggtcagcttgagctgccataacaaaatcccatgatggaataaaacaacagacaaatttctttctcacagttttccaacatcgaggtgctggccaatttggtttctgttgaatgctctctccctggcttgtagaaagcatcttcctagcgtgtgctcatgtgggctttccctggtgtgtgcacatggagaaaaagtaagaaaaagagggagaacaagagacaggaagaaagagagtgcgctcaggagaatgctccaacgtctcttcttaaaggacattaatcctgtcatgggggccctaccctcatgacctcatctaaccctaaatacctccaaaagtctatctccagatacagctacattggggtttcaacatttggattttgggtagacacagttcagtccacagcagttgaataacctacttgcagccaaatccctcttctcaacccctggtccccgagatgcccaaggggagaaggctatctattcttccagaaacccactcagccacaacagctagtagatgaataccttgcactggagtttctggttttttccagattccaggcctaaggaaccctaagtggtgcctggctttcgtttccaaggcagagtctcctaagagtgggctgggtagggagggtgatcctcaaaactcctagttgctatggataaggttctgagagaccacacatctgtacacaaagtcacacccaaatgcttcttttgtgggcctttccagatgccccagtcaagagggagaaaaggcaaggaggctgtgcatagaccagggctagaatcctggctaacactcacagcctgcataacttccccgtgcctcagctttctttcctgtaaaatggggatgcattataagggttagaataaaatgggtttcaagtgtttggcacctagtaattgttcagtaaatggtaatcatctttatttctctcctgcctaccttgcattccctccattccccctcccctacctttcccattttttcattcattcaacaagtacttattgaataactactatgctgtagtcactggggatgcaggagtaaataaaacagtttctccctccaagaaacttacatcacggcctgaaaaaactaaaagaaaaataaatatgaaaataaatatgaaagtgacattatgtgatggttcactttaggtgtcaacttgactgggctaagggatgcccagatctttggtaaaacaggatttgtgggtatgtctgtgagggtgtttctggaagagattagcatttgaattggtagcctaagtaaagaagatccgacctcaccaatctgggcaggtatcacccaatcccttgagagcctggatagagcaaaaaggtggaggaagagcaatgtccctcctctccctgagctgggacaaccatcttctccttcctttgaacattagagctcttgatccttgagccttcagactccaaaacttacaccactatccttccttctccctggtttgtaggcccttggcctcagaactataccactgggtttaccagtgaattattatttaccagtgaattataccactggctttcctgggtctccagcttacagacagcagattgtggaacttctcagcctccaaattgcgtgagccaattcccatgataaatttcctcttatatatacagatggtccccaaccttcaatggatcaacttataatttttcagctttacaatgagtttataggggtgtaaccccatcataagtcaaggagcatctggacttataatggttcgacttttgatttttcaactttacaagaggtttatcaggatattaaatacattttgacttacaatatttttgacttacaatgggtttaccagaatgtaggcctattgtaagccaaggaacagctgcatctaaatatatcctattggttctgcttctctggaggaccctgactaatacagactacgatagaggtgggaatggaggccagaggaggcaggagagtggatgaatctgcagcccagattcatctagaatggataaatggaaagggatgaaagggatggaaaaagatggaagccaagagagaaagagatcagaaacataaattttggaaccatcagagtcaagatagcctttaaagccagaagtagatgagatcaatgagggagcaatggtagacagagagaacctctgaggtctgcagggctccaaccttcagaggttgaggagacaaggaaggacccctaaaaaggggtcacagctagagacaggacattgagggagagggcatcctagaagtccacactgcagaagatctgaggggaaatgggaagagaggtctggagagagcagtgtagacagctcccctacagtggagtgtgtgcctgggagtcggcatcccagctgcaaggagaagccccaaacggtatggccatgtttcttttatctctgggtctccccaacacacagtaggttctcaatcaaaatctactgagttggcatcagttagatgtcctgtttatggctgaggcaaagtctggagatttcccctacctctcaggccctcgctgcaggcctctgacactccagggatagctggcaagcccacaaggcctccctgagggtccttctctctcagaaaatatcagcacatgtgtccagcagggcctttgatggcttcacacaagaggagagtcatgtgtgcattcctggctctctggacaagaaataaatgttcaggcggagagggagaacttggctgaagtggaggagggaattgaaatcactgaacaaaataacagcaacaccaataacaaccatttattgatctcctgttctgtagcagacgctaggacaaatgcagggcatttgttgacattgtctttcatctcagtccagttcagtccatctccagttacctggtgagggaggggctgcaaaccccaccctacaatgagttaccctgctgcctgaggccacatacacagtagctccaaggctgatgttcctcaaccactgtgtgaagatttatcattgaagaaaggagagatggaggtaggaatagcaaaggctaaagacaaagctaccccaagcagcagcatctccttccatgacttcaactccactgacaccaggctgacctgggctttccctttgcctttcccaccatcacctttgctagctggtgggactttcaggccaatgggttacatgtttagaaacaaaattgggcagtgggctggggccagcaaccacagaaccttcctcctcagccattgtcattaagtaggcagagatttcctgaccttgtcagtagccctctattagtccattttcatgctgccaataaaggcatacccaagactgggtaatttattaagaaaatgaggtttaatggactcacagttccacatggctggggaggcctcacagtcatggcagaaggcgagaggcacatcttacgtgacagcaggtaagagaggaagagagccaagtgaaaagggtttccccttataaaatcatcagatctcatgagacttattcactaccatggaacagtatcagggaaacagcccccatgattcaattatttcccactgattccctcccacaacacatgggaattatgggagctacaattcaagatgagatttgggtggggacacagccaaaccatatcaagcccctcagccaacattttcatggtggcagctgctcatgaagtgtaatctaaaaggacataaaaaacattcatacacacatacacacacacatacatacatatacacacacaaacattcatcacacactcaaaaaatctctcccattggctcacctcagcacctgaaattctgccaatttaaggtcctgtggagaccagagtagttgttatgtttatcaatatgtgtatactcactgcacttcagggaagctggagtttaaaggctggaggactaggaccaaagaaagaacagttgtgctggtggagagaaaaggaagtgagacaagctgagccttgccagagaaaaggcagccaggatagtgcagaagagggaaaggtggaggctcccgaagggatggaagccaagcatggaagaggaaaagagtcgggtctttttctgctctcctaagagttctggtttggtatcgtggttgcgagtgtgagatcaaacaaccaggccgggagcagtggctcatgcctgtagtcccaccaggctggtcacctgaggtcaggagttcaagtccagcctggccaacatggcgaaaccccgtctctactacaaatacaaaaattagccaggtatggtggtgggcacctgtaatcccagctactcgggaagctgaggcaggagaattgcttgaacccaggaagtggaggttgcagtgagccaagatcacaccactgcactccagcctgggtgacaagggcaaaactccatctcaaaaaaaagaaagaaaagaaatcaaacaaccaaggcccaaatcccagtggtgtcacttgctaattacgtggcttaggaaattactcaatcctcctatctgcatccttaaaatgggaagaatgacagtacacatcttgaagggtgatcttgaggcttcagtgaggtaatccatgcaaggaccttagcacagttcccagaattgaataaacacacagtaaatgtttaatattattattaatatttaactgaagtctgcggcctgtttccaccatcagctcctccagccatgagttggagtctgccaaggattttagagttcattgattctctggatgtgaatcattgtaaacagatagattggtgtcttctgtttggagacaatatctccccttcttccaatggcagaacatctggtgacttcccaggagataaaagggtggagtacaataaaggccagaaacctggttctccctgagggagcagaatgagaggaataggtcccggtggcatatgctgctttccttgaccttggcacctgttccaagctggcagagtgcagaggagggagcactggggacacagaaattggtgtaactcctacagacagcaatgtgctcatagctcaaaattttaaacgcgtgtccccttgaccctaaattttggtttctaggatttttttttttacagatatgcccccacatacaaaatgatgtaaatgcaaagttattcactgcaggatttgttatgacacagagactgggaaaaaaatctaaatgttcacactttactgaatatattatggtccatccatacaatggaatattatgcaacagtggaaaactgtgaagaaatgtctataaactgattatgaaaagatctccaagatccattgttaagtaaaacagcagggtccagaagaatgtagaaaaagtgagaaaaagtaatatgtattcaatatgcatagactatatattcaatatgtatagaataacaccaaaagaaaactcaagagatgataatattggtctctgaagaagggatccaagaagccaaaagacaagatagtcactgacttttctttcatatattttgaattttaaaatgctgaagacaactaaattttgtttacaagcacgggacttggagtcagacagacccaggttcaaaacccagatccactggctatgtgatgttgggcaggtcacttcagatcactttaatctctttgagctttgtttcccatttgtaaaacaaggatgagaataatacctatatcacagggtggttgtgagcattcactgagatggtatttttaaaaatatcctatgtggagacaggcatggtggctcacacctataatctcagtgactcaagaggctgaggcaggaggatcgcttaagcccaggagctcgaggttgcagtgagccaagatcacaccactgcactccaacatgggcaacagagtgaggctgcctaaaatagaaaacaaaacaaaatggggaggtagctacagcaaagatgacttttaataaatttttgatgaatctgcatttattcccttctatatgcccaggagagcattataaggtaaggttcaggattgccagtagatggaataaagagaaatgaaagtaaatatctatcttacaaggagtggagggtggcaggtccctcagtgcatgtgtgctgaggaattcgcatcactcacatgtgctgaagagtccatccagctcaccgtttataatgccagggtttgcggggggcagtccccatcaccaggtcattggatcctcactgaggaccctatgacatgaacaagctggagactcctggtgccattttacagataagctctcccagggagctgcatgatgggcctaatgttattaatcgaacagacatgagtggagaggcagtaggtcagtgtgaagtgagcataggttctgggaagaaaacaagttctggttggccatttaactgtgctgagcctcagctcctgcagccacaaaagggagatcataacaccagctgcaaaatgttgtgtgaatcagagcttcaggcactgtgaccaagacacgggaaagctcagtcaatggaagctatgattatttgtgtgggattatgattggaggaaggcagtggggctgtgtgcccccaaaagtgccttaaccactcaaaaacagaatctctgccatgaaggagttcacagtctaataagagaaagagacagatcatctctattcaataaagttccccctaaataaaaatatggtttacatcagttagaatgacgatcattaaaaagtcaggaaataacaggtgctagagaggatgtggagaaataggaacacttttacactgttggtgggactgtaaactagttcaaccattgtagaagacaatgtggcgattcctcaagaatctagaactagaaataccatttgacccagccatcccattactgggtatatacccaaaggattataaatcatgctgctataaagacacatgcacacgtatgtttattgcggcactattcacaatagcagactttgaaccaacccaaatgtccatcaatgatagactggattaagaaaatgtggcatatatacaccatggaatactatgcagccataaaaaaggatgagttcatgtcctttgcagggacatggatgaagctggaaaccatcattctcagcaaactatcgcaaggacagaaaaccaaacaccgcatattctcactcataggtgagaattgaacaatgagaacacttggatacaggaaggggaacatcacacaccggggcctgtcatggggtggggagcggggagggacagcattaggagatatacctaatgtaaatgatgagttaatgggtgcagcacaccaacatggcgcatgtatacatatgtaacaaacctgcacgttgtgcaggtgtaccctagaacttaaagtataataaaaaaaaaagaaaagaatgttcaaaaaaaaatacggtttacacaagtgtattcctgtatatcatggtctcattataggtgtagtgccaggtgttcccatcggccatgattaaaaatatcaagaggtgggtgtcaaggagtggaagggtgggaaggccggaagcaaagcagagaagtttgcaaagatccctgcaacgataaatgaagatggggaggagtcaaatggggcctccaaggagcttcctttgcgaggcattggtgaggagggagtgcagtgagctgtgtacgagaggctgaagcagggacctgggcctagggcaccacagcaagcatcttagggagggggctgacaactgcagccccaggtgtgctgataacatcacatgctagtcctactttcctactttatttttcttgcgaaccttaattattccagagactgagtcaacaaacaaccctgaatcataaagtcaaaaggccttcacaaaaggatgctgatattagcacattgtgaacttactctgttgggaatgcgatctttcagaacaacccaggagcagggtactattttcatcccacccttctacagacgaggaagcagactcagaaagattcattcatgtctgaggtcacacagccagccaggggcgaagccaggattcaagccaggtgtgtctgatgaaaacactcctgctcttcctcacttcactgtaggttttgaacatactttttttgctgctgtgaaggaaaataaatgcagatgtggcagcagtagtatatgaatctatgcatgtgataaaacgtcatagaattatgtacaaggcatactaaaaaaaaatgagtacttgcaaaaactggggaaatccgaggaagatctatgatctagttaattgcattgtgccagtgtttgttttctggttttgataatgcactgtaattagtcagatgtcacctttagggcaagctgggagatgagtctacagaagctctctttttgcaatttcttgtgagtctatgcttttttcgaagtagaaatctggaaaaaatacatgtagaaatctcctgttgaaaatacaaacagggccagagtaggaccaaggagactcaacagctcctagtaagtaaagaacagcaccagggcattaccagggcagtaggagccttcattccaaacgttaagaattacaaaatgatacagctgcccccttacttacaggactcttgtatagctttattttagggtaacccaagttttccagattcacctggctacagggggggctcacctttacagatatcactcatgtttcaccaatctttcccctccttgctatgacagagcttccagcccaccccaaacctcacccacccagtcactgctggggccctctggaggtgtctcacacaagcctactggccagatgctgtagtctgctgctcacctgctaccctgtctgcaggtgccctctgtgcccagaaattccagggtgttgcgtcagcagggcccctgtgccaggcacagaggtgactagggtctgtgcccaagaatggcctctggatcttagcaaaccccaacccaattccactggactcccctggcctgaagcttctctgcattccacacagaaagtgggtggatgcccactgaaggtcaatcttgattgcctggcaccaaagcagggcagcatatgtccaacagagccctcatgaaaactgctcccaaatcctccactctgaggtttagagatgtgtgcaaggttttgaaacacaaatgcagttacagtaagagctaacatttactgagcatttactatgtgccagaccaagcaattcacatgggtaaacttgtctaattctgatagataggtaagctgctgccacaaagagacccatcaataataacccagtggcttaaagaagatagaaatgtagttctctctcacataatctgagggagtccccctggtcagcagcagctttgcttcaggcagagtccacggcccaggttctttccatcttgtttctctgccatcccccaaaacgtcctcagcctcatggtggcagctgggtcattgccatgcctgtttgcagaccaggaggagagaggcagcaggcacgaggcatgctgatcgccccacatcactgggcctgggactctcatgcaccactccactcacattctgctaatgagaacattctgcaggtgagaacttagttacacaggctcacctaactgtagggagtctggggagatggggatatgtgtgcccgagcaattcttttacagtgaaagaagagaaaatgtgttctggtggaccattgtccctccaccacacttcctcacaggtatgaccaaagatgttcagaatggttaaatgcttgccctaggtaaaaactatctaatctgataagttaattttaaccagtgaagtagacctggacccctttcagataaaatatgcgttttgtgtgttttaatagggatccaatggagatgcaaaacttaacccagaagcatagctctagcgggagatacagggtcgggggtttggcagggctttttgagtggcatcatagtccgggctttagaacggggagtcttgaatgagtccaggtccttcatatgggaaaaccactaaaaatctcagccctcagctctgagacagaatccagggtgataatggatgtggcacagctagtgagctgcaagtggctgtcacatgtagggggttattttttatctaaggggatctgcacatcccaccaccaaagctgccttttgggaaggtaacaggtgaccctgtccaaggtctgggctgaggatgaacaagtttccaaaggtgagctgcaaggagcttgacaggagtgtgtgtgtgtatctgtgtgcatgtttgtgttcgtgtgcacacatttgtgtgcatgtgtgtgtatatgtgcaaatgcacacgagcagcttcagccagctgagcagccagtcatttattcatatggatgacttgatttttgattgagttaacaagtacttattaaacacagttttgcaaaggcctgcagtaaattggaagctatacaggaaccctataagtttttacaaccctgcattcttcaaatattggaataatataaaagataagtagggagtaagaggaaggaagagcaaacactagagaaggaggagccatgggaaagtgggttagaagagaaggaggagggttggttgtccttctggtttcgaagcaccagtgggtccattcaccaatgaatacaaaccaacctattgtgcaaattattaaactacatcatctgtcctagtctgagctaatattcactacaatggctcatgttgctgagtgcttactaagctccaggcactatactaagtgttttatatattctatctcatttaaccctgactaccctgaggactggcactattattgtggctctgttattagcctattttatgggtgcagaaatgaaggcagacagatgttaagcaactgactcaaggtcacacagctagtaaactgcagactcaggcctgtctgattcctaacctaaccaccatgtctaacacttgttgcccataggcctcagtctcctcgtttgtgaaatggaaccactacatccagctttgcttgccctatgggctgttgcaaggatccactgagaagtgattgccaaggtgcactgtgaacttacaaaacctaatgtaaaagaatcaaaccacattgctccaagttttgctaagatgaatctaccttaggatcatctagagaataaaacagttactagcaaccaagattaaattaagcctcctctgtttggaaacaactttagaggaaggatgttgttgatttgcctggcagagaatggttccaagcctaagagctcacagttgtttttatcccaaccgccttatcagaatatttaggaatcaataatgtagtggcatgctctgaggattctcaagaagtcctatggcgagccccacatgcagaaaaactaaaaacccctggtcaataatcaacaccaacttgccagccattgactgggtcactgtggaagtggatcctccagccccagtcaaaccttcagatgactgctgcctcatggagtccctgaaccaggaactgctcctgactccttgagccacagacacagtgagagattataaatgactactgtgtgaggccactaagttggaggggttggtaatttgtaatacagcaatagataattcatacagcacctatgataccttgtgacttaagtacaaggttattgggtattaaccaaaattctagttttcaagcaagagaaactattctggtacatgtaagccaaaggggaattttcagggagggcgtcagggctcatcaaatccaagaaaagactggagactcaagtgtaggatcctctggcaacagaactccagctccagttcagggagaggaacagccaggtttccacacctccatggctccagagagccactaatcattccacacatcttgatttagtccgttcagactgccataaagaataccaaagactgggtggctcaaacagcaaacatttggttctcacagttctggaggatgggaagtccaagatcaaggttctgacagatatggtggctggtgagggcccttttcctggttctcagaccaccatcttctcattgtatgctcatgtggtaagaagcagagagaaaagaagcaagttctcctgtgtctcttcttataagggcactaatgccattcatgaaggctccaccttcatgacctaattacctcccaaaggccccacttctgaatagcatcttattgagggttaggattttaacaaatgaattttgggggcacacaaacattcaatccatagcacaacctccgtgtactcactgaggattcagtgtctagagtgacagagacattgatcatgttccagccccctgactgcaccaagggtgagagaaagcatctgccccttggtattatttccctctgagacaaatcccactagggaaagatgattcttgaaagcaagtcatggtgcttttagagaaggggatgggatgctctgcagccaacatcaataaatgcccagccagtggtcattagatggtgttacaaagaagaaggccttgaataatactgaaccaggctacgtgtaggctgtgggctttatagtcattaatcctcacaataatcttaaaaggaggatgatattatccccgtcatccagacaaggaggcagaacctcagatacattaagtaacttgccagaatccacgtggaaagtgatgaagctggcttctaagttaaagtctatggggttccagagtccttacttgtcccacataaccaggcttccaagaagggcctcaagggaatggaaccacattcttgctttgatgaagtcaaataaattaaaaagagtttattaagggaaagagacagagactgaagtaaagggttcacctgatcttctcccaaggaagaatgtgcctgagtcatatctgactggcttgacccagaaagaagagggtagtcacaggcagaaaggaaggacaacacaggcacacagagacgggcggtctccagaactcaaaacttcccaagggtttacaccctgtgtactgaacatggtccgcttctgccacctagccacagatggtctcctcagccacagcacaagaagcccaactgtggtgaaagcctgtgggtgggtatgcagcaagcacaagccacatgtaaaggctttcctggtaaatttccaagatgaccaatgccactgagtcctcttctctgtcatgtgccttcttcatatttatccgagattcccagggacaggatggccagctcctcctttagattagggagggtgggtccttccccacccccatctatactctctgccccactaaagaacttttctataatcccatcttcaccatactcagcatttgccaaatattattcttcattttctaattgtgtcttttctagtttgtttggaaatgaaatctggtttcacctgaaggttgagagctaatatgaagcatattcctgcccttgggctaatatctttatgacatcatgacactaaccagctagaactgacttagtttttgttggccagaagccataacatctctgccaacaagaaactagcataggctggattaaagtcagcatgagaaagattacctgaagataagaaaataaatgaaggcccaccatgcttctaagcacatagtaaatagtcaaatatgtgcagaggagatgcataaacatatctgtgcaaggctttcaaaaggatcaggaagacaggtctcacaaaaaaagcatttccaggctttgtattttacagaccaatatttttgtgttttgttttttattttggggaggaaaatccacacaggattattatctttttactttaccaagtagagacattttaataaagctttaccatcctttcataagataatagacctgttaacacaagccaagtatgaagtataatcacagaataaaggacagtctttccagggaaaaatcatcggcacactggatacgggtctttgttttacactatatagtccctctctggctagtttaagcacaaacaatatattatggagcccagatagatagttcacaaatcactggaaaggctgtagggatatactccaagttgaattccatattaacaccccaaactatgccacgtaacttaccactgagggagctgctgccacagccgctgaccactctagctcctcaaaatgagcaccagctctgtgccctgttcagctccctccattattccaaattacccctccatattccaaatcaaagtcctgcatgagtcccagctgattggctgaacctaagcatatctagatccccatctgccaaggagtctgggaaacgtagttttagttttcagcctctgcagtacagggaggcacaggggctggagaaggcatggagtgaaccagttagccactgttggtgagctttttgtcagaccacagcacttctaaaacatgtcaaggtctaagcctgggttacagaatcacatttgggtgtactggcatgagagccatcctaaggaatgtgtgcagtcacgctttattgagaagattctgaaggtcagtggtcttacacaggcaccttatcaaggttctgacagatatggtgtctagtgagggccctcttcctggttctcagaccaccatcttctcattgtgtgcgcccatgtgataaaaagcagacagaaaggaagcaagctctcctgtgtctcttcttataagggtgctaatgccattcatgagggctccaccttcatgacctaattacctcctaaaggccccacttcctaataccatcttattgagggttaggattttaacatatgaattttaggggcatagaaacattcaatccatagtacatcctcagtctactctgctgccagaaccttgatatggcacctactgagtgaatggctgttcttaagaagggaatttgctgcctgaggctacagcatgaccacactctgactgtagtagacatctgtcatatttgtggcttctcatcaacttttgagtagctttcccgtatctggggatattctcatgtaataagtctcatctccctaatattgaagtcagagatcgagtcagagttcagagcgttcaggtgtctttgcagctaagattcagggatgtggtctgagctctcacaacccaaggcctccactagagatttgattcagaagtgagtagcataaagagcaggcagtgcacggagcttctgtttttgctggcatggaaggcagcagaggccttagctttcagaagtggtggtgaggggccgggcacagtggctcacgcctgtattcccagcactttgggaggccgacgggggccaatcacgaggtcaagagagcaagaccatcctggccaacatggtgaaaccccgtctctactaaaaatacaaaaagaaattagccaggcgtggtggcgggcacctgtagtcccagctactcagaaggctgaggtagcagaatggcgtgaacccgggaggtggagcttgcagtgagccgagatcgcaccactgcactccagcctgggtgacagagcaagactccatctcaaaaaaaaaaaaaaaaaatgtggtggtgaggtctggttcctgcctcagaagtagcatcagtggtggtggcaagagtggctgcaataaagtcaagttcctggtgtccagtgctcagtagcagcagccatagtaataccagtttccctccatgatctagccctacagcacagtttagggcattgttcttggaaactttaccccaaatctatttctccaccctccaaatgattgtttgtccttcagtttcctttattaaatcccatctgcctcaactagccagagtgaatcctgttgtcagcaaccaacaacccacttgatgtgctagataagccaggaacactgaccctgaatctactgcctctacaccaggctgcagtgtgaaccatttctgcaacagagagtatcggcctgaacctcatctcccattgccttcttgagtcaggtacaaagaaggatgggaggaaagcgtacttccttctgactcccagctttccaggagctcctacagaacaagaatgtttcttcttcactggattgttatcaccaacaatttgtgcagggcttagcacagagtaggtattcagcaaatgtttgacgaattaataaataagtgaatggtaaaaacactataaagttatacccagctggattcctaacccagatctgtgctgtccattaacagtacccactagccacacatggccactaaacaactgaaatgtggctagtgcaattgaggaactgaatttttattttatttcagtgaactaaaatttaaaaactgatacctaatcccatttttggaaaacttttggctcatttgtgtatgtaaatgtacattttagctataaattgtataaaagctgaatacagatgaaatctttccaatgaaaaattagcatacaaattgagatgtggtgtaattgcaaagtatacaccagattccaaataatataaaaaagaatgtaaaatatactattaatgttatattgattacatgtggaaataatattctgaatatattaggttaaatgaaacattaaagttgacttcacctatttctatttacaatttttgatgtgactactagaaagtgtaaaattatatatgtggctttcattgaatttctgttagcacagatctgaacattagcataaatattgctcagtggtcaaaggggatgccaaggacacacatttcctctgagcactagaggctccaaccccacagacctaggcccaaccttaccctttcatttccccatcgcctttccccagactccaaatccagcaggaggaagtgtagacgtgggcctctgcaacatgtgaaaaagcagaaatcacaaacgcagtgtttttcagcaggtgatttaggcaactcttcatcagggaaagggctggaagtaaggccacaagcagtgatcaattgtttgctatttgaaggcaattcaaaaagaaaaaaaaatccccaagtgaacgttccttgggtgaccagtgtgccacctctgcataagtctatgaaatcaaaggccctgggacagcctctaatatggtagcttcattccaaggaagagtttaaagcacaaagaagagctgttctagttagtatgagtcagggctaaatgttaagtctcctgatgctcactggggcacaccatctctcagcattaggtgccaatacataacatgccaaatgggtttgatgtgagaaaggaagtgtctgccttataggaatcacttggcctgcatctaccccaggatttccaagcctccctttgccagcactggaaacgcattttgagaaattggagttggggccagaaagcattctattcccatcactggaatctgtgtggcttctatttgcaactccagtagatgtgaaactcttaaaatgattttttccagggtaggaaggaacacaatgatgtctttggctaaacagtgccgggctactgcacagttcaatcctgagctaagtgaagggggaaaagtccggggcactaatctggcgtgactggcagcacccgatggggtaaggaggacagatgagaagggtaggagaggactggtggggataggggaacagggaagggatggaaaggcctgcttctgaaggcttgcatctaacagaaaaggaagggaacctccctgacttaccatgcgggacccaggtaattttcatactggaagcacaatctacaaaatgcttccctccaacccatccccataggtacaattttaccaaataaaatcattcatactcacatccaaatttgccaatctgagcaaaatatagttagtaacaaaggaaggcaattttcatattttatcattcatcatagaaaaaaagctttaatattttttaattaaatacagaagaaaattgtgttgccagagagattgtttgcctgcctttgaacaaattaacaacacctgtttgcaaacaaaagaatttccagaatggagtcaaaccctttattctctgttcaggacccagcccattcatgtcttttgtatacagtatcaaacacatagtaggtgctgaataagtatctgctgactgaatggggtgcctcttttatccctatcctttatttcccaaccctaaactggatcttgatccatggggaaaatatccccacccatccattcctagagtagccctgtctctttcaacagtctttgatacataacattggtttagagacatatgcctgaagggaaaagagggagggtttcaggcagagaaagaaacacacaaagacagggcacagagactaggcagaaacaaaaagatctaagacagagagagagagtaactgaaacacaggtgcagagcgggaacaactgtgggagacagggacagaaaaaccaagtcagagaaacttaaaacgcacaccattggagataaagagataaaagggctgggccagaatgatcatcttgaagtttctactcagctttaatgttttctgatagagaaaatggcagagagagaggaagacacggcctaagcaggaggataaagagacaaaggaagttagtagaggcagaggcagccagccaggcgtgcctagccgggaagcctggtcctaccccggcctcacacccacggggatgggctcccatgcccactttcggctcctaccttaagtccagccaccctcttcccctacccgcccctaaagatctccaaaccactcggcaaatcaaatcctctctccccaacatcctccgtgaagcattctcgctgctccagcccgcactcagctcttcccctctcaactcctaaagccacacccacctcccctaaccacagggcagggctgttttcgagtttgcccttggctcctatgagcacatcttgactcctgcaaaagaactgtgtgcttgtcagggctccagaccctacctcctatattccagtattcttcatgacaccagcccaatgcccggtcttcctaagtgctcagtgaatactttagggcctgaccggccctaaagtgcacgcggggaccgtggccgtcccctggtcagtttggcaggctggccacgctgaggccatctcctgggctcctgcgccctctgccggccaggaggggacccgcacgcgggacagctcgcggccggaagggcgcgcctgctgctgggaggctggcgaggacgcgggcggccctggcaccgtccgagggttctgggaagggtggtgggcacagccaggaacagctgctgtgttcctcttaggcgtaggagaacaacccctctcgcccctacacctcctccggccctgcccgctgggcgctcagagcttctcgtccagctccaggccctggttatcccgggcgcccccgcgctcggggcctgggctgccgccgtgtgtcccactcaggtagttctggatggcggaggcgcagtctagccgctccatgacggtcatgaggtagtgcagctcctgcaggctgccgttctgctcctcaaacaactccaggatggccgctgcggggctgcgctggcaggacaggaacctggcccgaggtaggggaggaagagaagggtgtaggagcagggaggggctccccccctgctgcaggctccctgggctgcgcagcgcaaggtccgtcccttccccatcctgtagcttttgtccttgtcctgctcttgcctgccttccagggcacaggaggtgggaagccccagggctttgaaacttgagattgtcctggcttggaggccaactctgacccctactcctctctaggcttcagtttcctcttattaagatgagggcttagacaagaggacctctaagtttgctacagttctgatgttctgtaattgccttctctacctcccccactccaaatacacccctagcctccccctagcctcctaactccctccttcctccctctctcctaggccacaacatcctgctcactactaaggaaacagttgctgtaaaccatggctttttatcacgactctcccgtccactaaaaccttccagagtctctcacctcctaaccagcccacgctccatgagcctttctggctcatccagcacctggccttgccctgtctttatgctttctctcctttctcccatcctgaacccccttagctcaggcctctctctttctcgccttgcacacactacacccacagccacctctgctactccccaaaacaaaatggctgatctcttccccatcacttcctccctgaagccctttctagttcacccctcccaggtggaagagaacattctgcatccctcagttcagacttctggtcataacgcccgcagttcattattattcttgcttcagctgttttctgtctctcttcaatgtgttatacaatactggattcttacaggaaggcacaaggaacacttgcctttatttttcaagctctctgaaccctttactagtgtgtgcgctcctaggcgccgggaccatgcctcattcatcttgtatcatagtgcttagcacagtttccagggcataataggtacttgataaatgtttaaatgaatgatttaaaaatccaccctgtagtttgcagaccagcctggccaacctggtgaaaccccgtctgtactaaaaataaaaaattagctggacatggtggcgtgtgcctgtaatcccagctactcgggaggctgaggcaggagaattacttgaacccgggagatggaggttgcagtgagccaagattgcgccattgcactccagcctgggcgacagagcaagactccgtctcaaataatgataataataataaataaaaatccaccctgttttcagggtccagctctagccccatcaccaggataaagtcttccctgaccgctgcactcatagtgtagtttctggagcttagctcagtattctcctgctttctgagttccttgacagggatcatgactgcactgtcaccattattgataacatttattgaattaacaagtgtcaggcacccagctacatgctttacacacattatcctataatctgtcttgctcctcctcagggcatagcatggcaagcactcaacatgtaccaaataacttccatgttaatggattcactgttaaatgttaattgagcacctactatgcaccaggcatcattctaggtactgatgatacagtgattaatagagctgcccttttatgggaaatagggtggacagtagccattctctgacttttaagtcactcccttgcctgtgatccagtctccagagtgtcctgaggaaccccattccagcccaccctcctctaccatccacagacctcacccctcttcctaccggatcttcatgccgcaaagccccaggtgggaggccagtctgcgccagtcattgccggtgatgctgtttggctccaataacatccgcagctgctcaaagagctctgggggcagccttaggcagggaaaagggtgttcttggaagaaagggacaaacagacccactctggttctcccatatgcaccctaaatgctgtagtcaccctgtgggtgccagggtaggaacccaacatcccccaggcagcagcccaagcaacccccgtctcacctattgcatgggggcggctgggaaacaggtggtggcgctgcccaggattcctcctctgatgcctggaatctgaggatttccatatacttggtctccaagccctgagtcaacacagggcagggaacacacttaggggtcacaagccatccccctgagtaagaagctggagtcctacctccattcctcatgtctctccttcagtctgtcactcagagccaccttaccaggagatacaaccctgctccacccagcaccctctacccactgtctccctgtgacttcagaaccgcaccttcagccttatgtttgcccctgagctctttgggaactgggacatgaagaccagagtgcagcctgagccaccaggggaagtcctgggtggggccgtggagcagtgggaggtcatccaaccatagagacactgatctcagccatatgtgtaccttcctccattccaaccttcccttcctcttctccaagtgacaacagggtatctgcctgccctccactaaggtgccactatggttccccaaagactctcaactccgatttcttcgcatcttcccttggtgcagcaggagaggagagatacctaactcccagcctgcctactcaagaccctcttcctggtcacttcccacactgaaaatacaaaacatcatctctcaaatcccacactgaagataccaaacatcatctctcaaatgtagacaatcagcctagaaagaaaccatatcaacttgatgccccagttctctgagttgggagaaggggttaaactagggtttggttcttttagcttcctgctggattcatccaccgatagacaaggagagtcagggatgagggtaacttggagcccagatgatctcagcccctcaaagagctggtatgggggctctatggaaagtgccatctttacctatgtgattaagaccatagttactgggcaccagaccctgtgcccactttgcctaggatttcccccaggccctgcccttcctctgcccctcagctccaactcacatcctggaaggtgtgcatggtgacaatgatctcattggttagtgctgaacagtcctcattctcatcggctataaagagaaggtgacagcgtggccagtgagtgaggaaacggcctggggtaagagcaggagaaggtaagggactctatagtaagacttgggaaatctgaggaagctggggtccaacactccatttttctctctgcaaagatctgtgtggctcctggcctttcagggaaggtctgtgtgcatggctgcatgggggtctgcagagctccagggttactgggagggaaggagaggagacaggatgggaaaagagaggggaggaggtacacacagggctcccggactacctgcttttctccggaagcagaaggagcggaaggggcactttccatgccagatgtggagatggggaaccagctggcaactgctgtcatccacattctcccaacctggtgagtaggcagacagcagagggcctcagagagtggggccttaaacaagtattgaagggggctgtggggaggcatgaggacagaacaaaggcaggagggtctcaagggaatgggaatccccagagcctgggctgggaccccaagagggcccttgcactataaaagccttccatcctttcctgcttctgtggggtataacccctctccttcccacctgccacctggcatcaccctgtccaaggagtgagtggcaagggctcagtagacagcagagtggtcaaagccctgggggctccatgaggctactgctggcccagaggtcacaaacagacttggggcctggtgtggtggctcacacctataatcccaacactttcagaggccgagacgggtagattacttgaggtcaggggttcgagaccagcctggacaacatgatgaaaccccgtctctaccaaaaatacaaaaaaattagccaggcatggtggtgggcacctgtaattgcagctactcaggagactgaggcaggagaataacttgaacccaggaggcggaggttgctgtgagccaagatcaagccactgcactccggcctgggcaacagagcgaaactccatctcgggaaaaaaaaagagagagagacttgggatccccagatctccagatgtccaggggaggcccagaacccttcattcctgtggggctcccgatcatcctatcccacaggccactgcctccctcaccctctgagatgtacgtgagcttcaggcactggtcgcccctagccccattgaagtcgaagagctggcagggcccacgcaggcgcccaccatggggctgctcgttggtcagtgcccactgcagggcgcagggcgtgttgttgaggaagtagatacgcagttgcagatgggactgtcctggcaccagcggtgagcagaatacggccagctgcagccatttgcgggcttcgcgccccacaggtgcctccagcacacaggtgtagaggctgcagagggagccagtggcaggcactaatgtgcagggaaggctaagacaccaacacactgccaccagcctcctgccacctgaggggcctctgtggggccttcaaggaggttcagagaacactcgaggggagcacttagggaggaactggtaggttggggatgaaaagtgagcatgtcacagtgactggtgactgaatggggaggagagctggcaggggagagagggaaagtgggctcagggtgaccatgcttgggagggcacccgcacatggccctattcctgtcaatgggtggcaaggaggctgggaggcagaggacctaggactctagaaagacaaagagaagaaggacagagatggaatggagtcttagagaactggtgctaagcctggggacagtcctgaaaggggcacagtgtagagagagataatttgaaagacagagagagatgggaaagacaggtccctcttagatggagagatggtgctgagtcagacacttccagacagacagagagacagcaatgggatttgcagtcatggacatgattgatgtgagaaaaactgctacaaacattaggacagaggggccagaaagagacaccaggggataaaggatttgcagaccatcttctatacagagagatgaagataaggcagacagagaaagtgggcaggaaagacagtcctcagagagatgggtgtgggaagacaggccaatggcatgtgcctacctgaagtgggagaggtggatgcgacactcatcccgggaggcgtgggcccccggccgccccaggggcctccataccttggcatccagcagggtagtgttgctgctgtaggtgcgagcatggctgggctgctcggcacagtgtttgaacgtgagagtgcaaggcttcaggaaggaggccccatgggggccacatgccaccacagggcttaccagcccctgggcttgggacagcgatggggcgtccgacaggtcccacaccaggatcaaagacacccgctcctggcggcccacagccacagcacctggcagggagagggagagctgagatgggcctggtaggcaggcacacccctgcccctgaaagaggccaggccagagagaaaggaggtggggcaggagcccaggagagacccccagcagggcacacagggaagtggtatgaacaagagtaagacgactgtggagctgacttgtagtgtaaccctaagcaagacacttccctttccacccaggctgctgctagcccatagtgtgccttgtgtgaatttgcaaatggtgctcttccctccctttactagagaattgtcacagcatactgattcattagaacaaggcactttacttccacctgccaggaagttgtcccaaaagatatgtaatatgtccatccctgaagtcaataaagctatactcaaaatataaacaattatcagaagtaaaaggtgtctatgaacattgctccctcagatgtggtgacctaatgtacagtctgaccaactgtatgcggagatgagagccaggagctgttacctggtgggatgagcaaggagatgcctgtatcctggagcatcaggcaaccgccgcggtgatccacctctcgagccgaaaacaccaacagtttgtgcatcaactggcggaccatggtctggccttgagtgggtgtgtgtagctcctggtagaaggcaaccatctctggcagtgtggctggcaggtgctgccttgagacctcattttctagttggggggtaggctgggacactggttcctcttgaccattcagtgtccagcaggcccccagcagccttctagggcagtgccatcgaaggcattgggccagaaggaggacacttgccactgggacccccaccagcagtaggaactgggagggttggaatgaactctcctgggggcacattcgcctggttactcaatgccgctggctctccttcacccctgtgccagccaaagccaaaggcctggtggggaagaaggggtcagtgtcagggtaagcccttttaagttgtggaggtcaaggcttggcttacacatagctgcaagttgtcttcattccagcgcacactgcacactttagtcacaccaattcttttaacctgtctctcttactcgagaacctaccctggctccccgtgacctaatacatcaaggtaaactgttctgaagcagagtgagcttgggtttacagttagagaacatgagttcaaatgtcaccttggtcactgtggctgggtaaacttatcatattgatgtaaggcaggagagccccaaaattggggcttagtttgggagggtttgtggcttcacctaggcaagaattcaagggtgagccagtggtgtcagacagcaactttcactaaagtggcagagtatagcagcagcagaggtatgctccttacagagcagagctaaccctaggcagtgtgcccagggtagcagctctggggcatttctgccatcatatttatgtccacttttaattacatgcagtaaggggtgggttattcagaaatttctagaaaaaggagtggtagcttcgggtcactgccatggaaaggggcagtaacttccaggcatcgccatggcagtggtaaactgtcatggcactggtgggcatgtcttatggagaggtgcttttggtgccttttccctgtttcagccagttttctatctggcctggaatcaaatcccacctcctgcctcaatactgcttaatgtacctcagtttcctcatctgtccaaatatctaccttgatctacaagtgctgatacaaaaaaatctataagtggaaaaagcaagtcgcagagagataaaatattctgagctcattaatgtgaaaaacaaaactgcatataaatagatacatatttatgggtgcatatatggaaatgtaaaggtatagagaaaggtctggagcagtggtgtacaataaaaatgtaatgtgaactacacatgtaattttaaatttcctgatggccacattaaaaagaacaggagaaattaatacattttatttaacccaatatattcaaaatgttatttcaacaggtaatcgatataaaattatgagatatttttactttcttccttcatacccagtctttgaaatccatgtgtaatttatatgaacagaacagctcacttgggactggctgtatttcaagtgcccagtagccacgtgtactaatgaatccggtcttagactgtgcaggtctggaaggacacacccccaaactattcccatgagtcacaacaaattgagaaggtggaaggtgtgaataaaaactttgtatttttttaaatccttttctctgtactttgaatttttcacatcaagcatgtagtttgtattaactttgtaattcttttctgaagctattaaaagtggggaaaaagtgcctctttgtgtaatggtgaggatggcataaggtcatgtgaaaagtatttgtagatgagaaagcactgtccaaatgtatgtgtttctttatgcccctccttctgccagaaaggcctgaaggtagctcacagggataggcaacatacaacaagaacaacaaaagctaaaagtggaagcaaaaaaaaaaaaaaatgaagaagacaaaacacaaagatgcagccctacagtgaagctggaatgaggcagggcaaaagcatacactcacctcctgctcacctggctacccagccaggccacaggctgagacttcccagtagctcttcctgaggccctccagaacccacctccgcctcctcctacttcccctcttccagcccctacaatttccaacacgcctgccctgtagcctgcccaggctccccacacctgcttaattctagcctctggcttttgctcatgctgttttctgtttctccactcacttgctctccccacttgtttcctctccctacgtggatcctcccattcaatagtgcctcccgctggtgcaccggcctttgacagcctccagctcgcgaaatctctctccacagccatcccaccatactgagtcactcttgattatgtgctgtcatgtgtgattttcccactcaaatgaacattttctaagcaccggctgtgtatcggacactgtgggaagttcaatcctgccaaagatgacgtcttattccgctctcaaggagcttctgcaggaatggaattcattggcttggtagctgagttctgtgaggcacaacgtcctccttcagagccctgggaggcccctctggttgactcactagaggctgcactggaagagcttccagtatccagtcctccccacgcccttcacttgcactacccacctggaactgaggcttggcccaccttcttccttccaacctcaggacccatgaaaactgaagccccttcctagtgcctcttagaccagggcagaacctccactgtatcctcaggattgaagactggggcagtacctgtttctcccatgtcctcactgaaagtgtgaataagaagcgggggttggcattgttctctttgcctaaagagccaacccagcagacaatgcaccagcctttttcaaccaggcatcctggagggcacacaggtgaatcagtgaattggcagtgtcccaaagctgatgggaagggggttggagcagcaagctaccgttgatgtcccatcatttcttttggttctttcacattagtaataattataattccaactgtaataacaatagctaacattcgcagagctttactcaatgccactgtgttaaagcactctccatggcttgtctcatctcatcctcacagcagccttaggagcgaggtgttatttttatctccatttcacagataaggaatccgagctttctccccacagtgaagatggatagggaattactaaacaactgaagacaggcaggaaggaggagcaaagacgaacaaggacttccagagataccccctttctctctccaccccttcttttccccaagtatcttcctttccttctctagaagaaataaagttggaagagaaagaagcaaaaatgaagtaaagacaaatagaaggacctaaatttacatcctcagttatgtggtaatacccaccccactacaccacacccccacctaccaaggtaccagtggcaggggatggaattgctaaagggatgaaaggaggggccccagctcgcttacacagcagtaaccttcctggggccaccaaagaccagagtccagatccccagtgaggtgcacctcactgggtggtgcagtagagtcccctggctcaacctccgaccctggagaagttggcatgcaccactcccaaagccccactgggcctctcccagggtgactgctcttccaggctgccctggccctcactgcatcctccctctggctccagaatggggaaaggtccggagtcttgctgaatggcaactatagcactgcagccattcgagtgtgacttggggcatcccaaccccatgcctggactcctcattacccactcctccagtctgtcttgctccagaccccagatcaccctgggtagcgggtccccgaaacgagagtcctttagaatgctgccatcacctgtccctaggcagttgcatcctccagcacaaagatccaaactcctgctgcaaagttctgctcataccctttaagaaaactctcaacctttcctccacctcactggttctccctgtgcctccccaacacctgatagatgtccagttactgcagaacataacaagtactgggatggatggtccaaacccaagtcatgaatggcatttgttagtatagtagacatttccgcaggacacagaatcatcccagtggtcctcatacccattggccaagtcccattttcctcccctcctccagcagagggtccctacactccagcaggcaggctaagctggcctggctcctcccccgaagctccaggtaaccccatcacaatgcccatcccctctccagctgccccaagggggtgctcaacttaccgtctaggagctcttagaggctgctggctggtccagttccttctccgagaaacaagggtcagccagattcagtcggcaggccagcagacaagtggaggtgggcggggaatccaggcaggagtggcctggcatttcctggcagagccctgcctcccagctgtctaaagaggggtgagggagagtgtccctgtctattggcaaagtccagcccaggtaagggattagctgaggatcccagaagtcagtgaactttccagtctaggtctggaaggaaggagggaggcagggagacaacctgggtgtaggtgctgcaccttgaaacccctccttacagtgccctctgctggtgagtggctgtccccagccagaggctattattaaaatagcagataggaggaggagggaaccttcatctgagtttcttaaactataatgtgcacaacagtcacctgggagatcttgttaaaatgcaggctctgattctgtaggtctagtatggggcctgagattctgcagctcaaagaagctcccagctgatgccaatgcaaccggtccaaggagcttagagagcatctagttccacccgctccccacacagagaagacagtggagccactgagacggttaatgactcaccagttgctggtggacctgagatgtacccatatttttccttacacaaggtgctttctacttcccccacccaaagttggcagagacactgccggttgggagacaactgaactttggggccatttgccattctgagttcttaaaactctgcctaggagcggtggcaccacaagaatgaaaactccttgtggaacttttcccatgttttcggctgtctcctcagctcctggtacagcctgatagatagaaggtgttcaataaacatgtcttgaatgaatgagtgaagcagttgagagggaaaaggatgcattttggctccaactggccaacactgagcccaggtgagccacacgttgggtatgtaatattgggcaagctacttaactcctctgaacctcaattcccttgtctgtcaaatgcagttaagaatatctaccttgtgtgagataataattgtcattattgagctaataaatgtcaaatgcccaccacagaatgggtggtcaatagatggtaaccgttgtcaccagggtctggcctcctgcagttgaggaggcatggtgaacgcccccccaggcccctagttatcatctcccatagaaaataagtaacttcctctgcttttgtctcagttaataattctctagcctcttgtctctgactgcaatgccctcccctctgcttccttccctggtggaggtgagagggtggaataaacctcccaggggagcccagtaccccaaagtgcagagatggtagagagcgggcaacctgggaagcagacctcatgcctaaagacaagccaggaaggggtgctcagaactttgatagggaatgaaaggagtggggtaggggtgtttgtctttgttgaacaaagctctgtctgagtcacacaggaggctggactttgccaacagacagggacactctcccctacccctctttagggcggctgggaggcaggactttctgccaggaagcgccaggtcactcctccttgactccccacccacctccacttgtcagctgccttctcctctgagtcataaagtcctaggggtttgtgaaagatctgtcaagctagggttctaagccaggaaggtcatgccaaccaggaggctataaccaggggctgtgttcatggattatgaactcacttcccaagctagttcttgccactcttggggacaatcccaattataaggaggctctgaagaaatgtgaaggctcctaccactcactcccatggccacagagctggttcatgggatgcaaagaccacaggcatcaacagcattataactgggggctgagctgtcacaggagggccagtgtcaaaccctcaccacaagccctcaaacattccatcaaggggtagcctccagaggccaggcaccaaggagggtctggcagaccagaggggctcctcctgagaggaactctttggggccatgaaacagcaacttggacttcccagccagtgtcaccacccttctcatctgagaaaggcagatcagcagggagcaccactccaccctcctcccagccccaccctcctcccagccccaccctcctctgccttccacacatcatatgtcatcaggccccccgcctgggaggtgtgctgccagaggtaaggggagcacaggcctaggaaccaggaggcactgggagaggcaggtgtcaggagaaaagaggatgggggcagggaggggcagggagggggcctccaccactggacagaaatgtagaaaaacaggaaggcagaagatgagcaaacggacagtcaggagcacagaaagacaagtagaaatatgcacaggtgggcatgctgctcagctctgtcccagaacctccaggaccagtgtccctgacccttgacagaaaaggatggattagggccaggcacagtggctcatgcctgtaatcccagcactttgggaggccaaggcgggtggatcacctgaggtcaggagttcgagaccagcctgaccaacatggcaaaaccccatctctactaaaaatacaaaattagccgggcatggtggcgcacgcctgtaatcccagctactagggaggctgagacaggagaatcacttgaactagggaggcagaggttgcagtgagccgagattgcaccactgcactccagcctggacaacaagagtgaaactctgtatgaaaagaaaaaaaaaaaaaggatggattagatagtcagtccagaatactgaaaataatcagattgttttctctccttcaaatctggttaatcatggggggaggctgaaatatcatgaacaaatgagaagaatgatatttgtggggccttggtggggccttggctggaggagggtctgtacattgtcccacatgcaaatgacatgcaaagcaacatgccaccttggcagctttttaatcaaagaccaggcagttgtttccttgaaaagtcaggccacaagaaacctggatgcttgtgcttacatcctgacactctgggaatggaaagatggagcaggaagctcataccccatggctccaggggtagaagagagctaaaagttcagaaaaaggaatccacggtgtcaacaggccaagtttgaatttgggcaggagatcagcctgggtgggccccatgagtgtgccagtctgatatggtgagataagcctgggacagatgtgctgccgcattcgtgactagaaaagagtccccaggaatttctggctcctgccttcagattgtgaactttccaggttggtagatcagcttaggtagaacagttctcggtgagggccagctacatacctggctaagcgctgcccactgcagaaaagctcatcacccgggacctgatctccaggactcagaagcacttggaggaaggcctattcacttagaagcagttaccagtgctgggcagtgtcctccaagtgccagaggagtgctgtggagaaaagaagtccatggaagccaggagatgggcaaggtgtggcctggggttggagagagctcagaggtacaggactggagctgggccagggagagaggaaggacctccgtgagtagaccttctctgaggggctcaggccaggaaatgagtcaggttaggaggcagagacagacgaggagccgcaggggaaggctcatcactagcatgttctctgcctccccagattttgcctcttcaaggtgaatgcggcttcaaggggctatctttgtgctcctgccccacctggggcccatcctggtctggctgttcactcgtgatcacatgtctggttggtgtgagggcccgaggatgctgtcctggtgcccattctacaaagtcttattgcttgtacagacagccatctactctgtcgtggggtgagtacttgtttctcacacatggccctggtacccaatggggtgggaacaagtcctctatatctgaattactcccatatattggcctccaaaggtaggcgctttgtcttgcctctcaccaccatagtgggtcctccagaaagtaagaaaccctctatgcctgcctggggttccagttagcccttcttccaccctctctaagtctccccagcccctcctccacctcaccatgcccagctcctcccaccaactccctccctggcccttacatgatgcctaaacccatctgcccccatttcagcccacaagggtatccaagagtccttatgccagagagcctcctccatttgccacggaacctcctcccactgaatgtttttgccaccatgtctccacagctatgcctcctacctggtgtggaaggacctgggagggggcttggggtggcccctggccctgcctcttggcctctatgctgttcagctcaccatcagctggactgtcctggttctctttttcacagtccacaaccctggtctggtaaggcacacagtgctcagtagcagaagtaatgtgggagagggtgaaaccacctggctccagaagcacataattcagcagagcaattgagtgcaggcaggtaatgggtgggcagacttctctgcactcccatggtgtgcacagagccccagggactgagctcgttgctgggctgggtactgcagaaaggtggaggtgctggttctcgggcagccagctgacccccggcctctatgcccaggccctgctgcacctgctgctgctgtatgggctggtggtgagcacagcactgatctggcatcccatcaacaaactggctgccctgttactgctgccctacctagcctggctcaccgtgacttcagccctcacctaccacctgtggagggacagcctttgtccagtgcaccagcctcagcccacggagaagagtgactgaggccctagggcatgggagaggagggacgcccagggtggggaggaagagtctgcaagcagggctgtggagttagggttcaccccaatgggaccaccctcctgggtcccctggtgccgtttttccttagaaatcagagaaatgggaaagggggggaaactgattttacacttaaataataaaatcctattagtaactctgaaggtatgatgtgaagtgtgtatttgaatgcataatatgatgactagggcggcagagtgggatagaagcttctggacctctgtgtgagtgtgtgcgcgtgaatgaatgtgtgaaggcccatgggggaggggtgggcacaccagctcgcctccattcacatgcctccccacctggcataaagatttagcactcagatgtttaattacctgaaaaacaaaaggctttttaaaagtgacaaaaaagccaaaacagaaaaatacaccttaaaaaagggtactagggggccaggagtggtggctcacacctgtaatcccagcactttgggaggccaaggcgggtggatcatgaggtcaggagttcgagaccagcctggccaacatggtgaaaccctgcctccaaaaatacaaacattagctgggtgcagtggtgagtacctgtagtcctagctactcaggaagctgaggcaggagaatcacttgaacccggggaagaggaggttgcagtgagccgagatcatgccactgcactccagcctgggtgacagagtgagactccatctcaaaaaaaaagggggggatactaattatacatgttaaggttatatagtatatattatacattaatttatatatcagatttatgatgcaatatctagttataacatatactatggttgtatgatatatatgttatacatctctgataaataagattatagaccttcttttttgctttcatacattcctatgctttccttattttacatcaattaattactattagaataaggcaaagaagattgaaaaaaagagattaagcctcagggtgctgacaggtgaatccataggagcttcttgttcagccttctatcttgcttctctttttctaaaccttcttagtggctttttaatttttgactcctcccttctctgattttcttctgtccttgtttcaaagccctgatggtggcaaggagtgaccgcccttgagtaagcctcctcaaatctttaacaaggtcagctggaaggcccagacaccttgcagtagggggtctccacctgctgcatgatggggatcaccagaattgtttaaaaatcctcatcagcctctccaggaaggaggcctgggcatcaacatttttaaaacttcccaagacctcctcaggtgcagccaaggctgtaccacagctgtttggagctatttaaaaaaatgcatgttcctcagaccgcactcaggacccataaatgagaacgttgcgggtgggctcttggcatcttcagatttaaaacctcctgagcacttctgtcagctgctagctagtttgagtgctttgggcacagatcgtttatcagggcccgtttagccttgacactctgaggttttgtgagctgagttttagagctgaaacaaactgtatgctctcaggtgagaagccagtaaggcagcataatttgagaagaggagtggctctttccagagctcacccaagagagggagtctgcagcctcccctcctccaccaagggcatgctcagcccagtgggtcaggtcacaggcaccccaggaggacacacacagtgtcccacccacctttgtatctccagccccaggacagggcagagcacagagtaggtgcttgtacgtttttatttgttgattaattgaacgaataaatgaacacattgttgtactttaaaaacaaatgctgaccagcacctgccgccacccctacccccacccctactctggaacaactgaaaaaagaagggaaaggctttaatcattttggaaactcctggttctaatgtgcagccaaactgagatgtgctgctgcagggtattgcttcttactgcttctcaaagtgtgccccagagacctcctgagacacttgttgggactccagacccatgaaatcaggtcatcttggggagtgagagcaatagggtatggtgatttgcagttctggccatggagtcagaccaacctggggttggatattgactctgttatctattaactggtaacctggtgcaacttctagctataaatactgatggacagaggataggctcggaacccaaaatacatgggttcttacccagctctaccaccattgtgtgatcttggcaagtgggcaccccagacattatcttccattatcattattatcatctcataataatatatgcattgtaatatttgctaccaattttattcattaccagctaattctagaagttaggtggaacctccaagaagatgtatgatgcctagggtattactttgacctccccaaggcaagctggagccactaacccatgcctctagcttaggacttagccctagaagaaagcttaatttgggcagtgtcccaagccctgggctagcacgaccgcctgatacagcatgagccaagctaaagagatttttggccatgtgcagaaactcagcatgaaagggcagaatcccaactccaaactcttatcctctaactccaaagttgtccttaaaatcctcctctgccccagctccttggttcctgggtgaagggagcccctaatcccacagtctccaacctccctggggctcttatctttccccttaccccacttcccagttcagagcccagcctagtggacacctgcctttgcccctcctctcttgttacttaagagctgtgcctaaatagacttggagctgcctcttctctttgcaagtgtatcccaagcttccaccattcaaattatgtgcacatttttgttctgaggcagtatttttccatttgcctctgatttggttgagtcggagacagacaagatcataaggctctgcagatctcccgtccagcggctagagaggcactaggtaaaacagcagacccaggaggtggcatatctcattctattgtatcctagttcatcctttcctcttctaaaccttcactcttcctcactttgccaatttctgcagaatggaaacatagagaggctaggtgagatggcagagtggtaggtgtatgtctagtggtcaaagattggtcagctgggctaggaacagggcagagtgtaggatgtatttattctgcacatctctggcccctcctacctacaggcaggtagagctgctgcgcaggagatgcctagaggcccctgaatgttgtcagtcctgggccagggctccaaagtctcttttcttttgtgaatggccactatctgctctgtcgcttggggctcccctgtaccccaagcccagtttcagagtcttcccagaggtcccctttcttgtagttccagaaaacaagcacacaatccttttgttttaaggattttactgctgattctcattagcagcttacaaggtactcagtccaaagcccaactttgctgagaactccctcagatctcgaccttcctcttgtatcctcaagtagagcccaaaaaaacatttacttgcctcccagactccttctccccccacccccaaatgttgaggacactccatacatttaggctcttcttctggtatggaagccaggggaagccatccctggtcacaccagggccttgatcatgttcatcagggcctcatttgtccctttcccaggtcgcccagcccacacagagattatccgctaagacaagtaccagaaaaatccccctagcgtccacttgcacctactctaacacatttctcattttaagggctgaaattcccctctcaagttgattgtagtttgtcacctcttcccagtaggttctttggccttgcaaacaccccttcaaagaggaatactattagtcaccttaatgtacatgatccttatcagatcactttctttaaagactgaaagtgccagccacgggagctgggcagtgccaggagtagccactggaatggaaaccatggtgaccaggactaaagtcaccattttacccagggtggtgtgtcccacatggcaaagcaagcattgtgtcctgtacagaagactgtaaactctgtcctgccctgtgattctggtgccttctccaatcccagcctcagactctgggagacccttggccccctcccctcttcattggccaaggctgctcaaagccctggacacctcacgtttatatcaacagagcagttgctagaggaagcagcctcccgccctccagaggggtgtctggtgcccgagccctgttgtttgtgtaccttgtctcagtagtgaccagaggggcaggcaggcctgggctgtgtctctggggcaacgtactgttggggtcccagctgtccctgcacataaagcaccgactccatcaatgcacccctgaggtatcctctttcagggagtgagaatttaaaccttcctctggtgaggcttctattttccaccagccctgctcctggcctctctgctcccttcccaatgagggcagctccacatccagccaagatccaaggaacaaccatgcctgaccctgtcctctccttctcagccacctcctagaatctctgaatgttttctgaaatgaccgtgggaaacaggacagggagaggcatgctgcagcgtatcccaggcctaacccagctcctttcagccactgccatcccaacagaagggggcaagggcctgcagagacaggctgggaggattccaattttggtttccatccccagatactagctgtctggtgtctctttacctgtacccccaaaacacagatacacacacacacacacccctcatgtaccaattactccctagagtctgtttttcctgcaagaactccttctcagcttcttcaactcccactggtctctgtccttcccttctcccagagctgggcctcatgggtgctggcagcagttgagactgaatggtgaaggaggtaaaacatgactctggaagcacatggctctgccctctctagctgcatcaccttgggcaagtcacttaacctctctggtctcaatttcctcaccagaaaaattaggataataatagtacctaccccaaacatccttgtgaggaataaatgagttaacctacataatattttagagtaatgtcaggccagcagcaaggactgtgttaatgtcagctctccttgttactaaattccagggaatatgacacagtaggagaagcatggaacttgggagctgacagatatgggttcaaatcccagcaccccactgactccacatgtgaccttgaatgaaataccttactgcccagtatcctcctgtgcaggagggggactactgatagaaccttacccaatagggttaacactgggtgtggggtgtgccagccctgaagagtatagaggcagctgtagggagaggagtcaagctcctggaatctgatcccccagattagttgctgcactctggggtgagcagagtaaactggtctgacttggaaagaagagccagagaccagccaggaattcaggcccccaggaggtgccataaatagctagagcagatcagagggcctccagggatggcaggctgggagacggggaaggctcaaaggagcagtgaaaaaggaagctgtcagtcatcagtctgggggcagacccaggaccctctcccaaaggtcgaagggaaaactgtctataagtaagacagaagaaaggggtcaactcttaaggaccagcctgagaccacctgggcaccattcactctgagctgttgggagaggcaggaaattctcgacacgccattcacctgtggtcttcacaagcccactcggcgccctattttctgccctttgaccatttggaaatagaaatcaatagcacagcctgtgtcacagatgggaaaacggaggctcagagatgtcaagtgatttgtccaagatcacacagtgaatcgggctaagatggggatatgaacgtagaatattttttgcctcctaatccagggttatacatgacagccaaaatagaaggccctgtcctcagggaggaagtctttcttgcaggggaacagtgaactgaaaggatccatcctccttgctttcctccccaagacattttactcttcctccgttgatccaagcatatcaccctagctgggcctgggaagtgtgagagggatgcacatttataatgcttcagagatgtttcatcaaaggtagctgtgcgcagccctgggaataggctaaacttgaacttgggctctgaagacctgaactcaaagcccgtgtgatcttatacaaatcacttcacctttctcagccacaagtccctaacttgcaaaatgaggcccataattcacacccatgtgagactggtgtaaggactaaatgagataatgcatgcttgaatgcttgattaatgccccaaatatgataaaagctgggatcccctggtgagccagcaccttatttatctctgtactcttggtatttaccaccgcacctggaacataggaacctctgataaatgttgactgaacaagaaaatgaagtaaactctttacatttaaacgtggtatgtttgtgtgataacaacattctttgcagtttatcagctgccactgtctttttattgtggacacaggcactattatctctactcagtgctttattccccccgaaaaatgtttgaaaaaataagatccagataaaaatgctttcagtggctgggcgcggtggctcatgccacccagcattttgggaggccaaggcaggcggatcacgaggtcaggagatggagaccatcctggccacatggtgaaaccctgtctctactaaaattacaaaaattagctgggcctggtggcacatgccagtagtcccagctactttggaggctgaggcaggagaatcggttgaactcgggaggcggaggttgcagtgagccaagatcgtgccactgcactccagtctggtgacagagtgagactccatctcaaaaaataaataataataatccttttagtagtaaatccaaaaggtaggggaccatataatttattgtccacagcgggacacctttgggagtaaaggggtgctattagtaattatgtctggacaacaggaagaaaccatgactggcaaaccaaaatgctgggcatcacactaacagagcactctgctgctcagactctctggaggagtgagccctaaatcttccaaaccatcttgactcctcttctttagtcagaccctccaaagggtgccctaccctctcatccccaccagccaaacccatttggagctgttttcagatccgttccccagtgttcttaggttcctcattttcaacctacaagtgaccctgaccccttccttctgcttccctgagaatggcctagagtgtttgcactgctccaaacacgaagacttttgcctctgctaagtacccatcatgagagctgcaaaaatcatctagccatcctctgctgctgttccggctcagggtcttttctatgggcccccatcatctctctctggcctcagtaggcttctcactggtcccctgcctctgctcttcccaagtgctcagaccacctgtctcacctgttcagagacaatggcttcccacctcagtctgagaaaaagcaaggtacttatgacagcccataaggccccagtcccttttacccttgttatctctctggcttaatctcttagaactcttcagtcacccagatgtatgtcctcgctagttcctcaaacaccccaggaatgctcccttctcagagcctttgctcacgttgttcccttccttggaacgctttcctcttagacaaccaaatgattagttcccttgccttcttcacgtcttcttcaattgtctccttttcaaagtccttcaccctggccatcctataagtacgtaaccccacctcttagcacttcctgtttccatttcctgtcttttctccttggcacttgtcatcacaaaatagaccatgtattttacttaccttatttgttgttcagttcctcaagctccacaaatcatcacagcagggattttcatttgctttgttcttttgccatattcccagtacctgaaacagcacctggcatagagtagatactcaataaatatttgttaagaagaataaaagactgactgtgagggcacatagcatggaggttgaatatttggcctgaagtacaaaagcctgcattttaatcccggctctgcacacttctgtgactcagtttacctgtaacttgggataatacacatcgcctcccatggctgtggcaagcatgcatctgatttcatttaaacccctaaacccactgcctggcctgtttcaaaatctctgagctaagtaaatggcagctattgttactcagggaggctcctgatcgatttgacattacattatggctttgtaacaggcaaatcagcacccaccgcttttgagtcataactcacacacttactccccaaattgtcagttttgatcccacctctgccaggacccctcctttcctgaacccacgttcccccaaagcaaatggcctgggtctttttgcagtcagcccctttcaacacacatctcctcctgtttaaatctcagaaggccaccctcctaaatctcaggatgcctgccctggggccccttccacactctcccccagtggagctagggaatttgggtgggaaacaaaggggagaacataaggtgagctgagagggagagggagaagagagcaggccaagccatacccacctgccaggttcctgtctttgcctactgataaataggggatactaatggccagattttccattcccccaccccagcacccgctgtcactcaattaaaaaaagatagagggagagagcctgggggaggggcaggaggccttggctataaagcctgtggctaagtggggaaagcacgaagcctggcctgctgggtccttttcccgtcatccccagccagatttagctgctgacagctgcttgggactctgccgccagggcctggcccagacctgcctgcctctctcctctccctcagtgactcctgagccacagcccctccatggcccagaaggaagaggctgctgtggccactgaggctgcctcccagaatggggaggatctggagaacctggacgaccctgagaagctgaaagagctgattgagctgccgccctttgagattgtcacagggtaagcctcagatgtgggtcagggttctgctccctagaagagtgcagccttgggttaggctgtggaaattcaggatggttatattaggcgtcagggacagctacaaccctgcagcagtgagagtgcaccagtgggcccggcaggggtggtaggggacccagcagcaaattctcttggcttctcagggtgacaccttgggctctctaatcagggagaggtaggaggagctccttggaggcaaaagcccagagaataaaaccacccttcaggcctcctggtattgggatggccacctgcctctctgggtagaagcttagtcccagggagtttggcgaggacagaggatgagactggcacatctatatgtggctccgttcaaagcaacccttcccctcaacttctctgttcctgagtgggtctctccgctagccataggcctctagccctttctttagagcttcttcctggagtagatgctcccaagacaggaaagatagatccatcctttcccaagactcagaagcagcttttttcttattaaatcttttgagtctcctcaggggctgtcccacagagaaacagagaaattacatgcagataacgcagcccaggagcttatggacacaggagctgttccaacatgctcaggcattgcctggaggaactgggacccaaagaaaagggtctacagactgcaaggagggggctgtgtgcagggtacctctgtcttatccagattatgccatctccaggaataaaactaagtagtcttcttcctcttccctttctattcctgtagtggaagacccttctaaatcctgagcaaagaataaaaagagaatctatgaggccatatttcctccttgaaccaaacgttcccttcatggggtctccaggaatgaccacaggcagagtgggtgcgagactaagagaagtttcaggaagaaaggaggcatgatgctttcaagggggaaaggaagccctgagtggcaatttggacttgatatttcaagcttgacaagtgattttccagtcagccacagttttagcacttataacatgaagatctatagtagtaaggtcccttccagctcagatgttttctgattttcaagagaacctaagggaaaatgcatcctatttcctgaggcaagagtagcccctgaatttccatttgcccatgcccacccaactaatctcaccctcatcctaggattaagggagcagctgggcacagattaatatagacacagggaaagcctaaggcagcctggccaggagagtcctcaattccagtggctttcttatggaaggagagcctttttctaacacctaagcatgctggtatacgctatccttagtcatacacacacgcgtgtgcacactacactcttgtgtggctttccaacacagagggagggtaggtcaagaacagaattagactatgtttgttcagctgaacatgctttgggggtcccagagcaatggatcctgaagggttaagtccactgatataacttacatttgtccagggctttataatcacaacatagtttcatgaacatgagaccattcaacactcagcacaaaggtaggagagggagatatattattgccactttacagagggggaaactgagactcagagagattgaatggtatgtccaaaaccacagaactggtaggtggcacatcttcttactcccagcaaagtatcctttctactggtttcttattcattctggatcccaggtttcccagagctccacgttatctctatctgggaggtagtgaggacccaaggctcagaaaaaggggcacagaaggggcaacgttctgagcattctgtgaacagttcaggtgggagcagagcgctgagtgtttcctggccacaagtaacagctgtagagagctgtctcctgggcccctctgggtaaacagatggcttaaaatagcccagaggtgcagctgggtctgtgcagggagagggtgagggaatagctttcctctccttccctcttgagatgcattccccccaggactccctcctggagtcaagggggtcagcaaagcagcttttctagcctggtctcctatagggaagatctttagtgctccttatatttgggccaaaaactagcagaagagcaggtagcttttccggaaacagtccgacatgaggagggtagctggtaggaaggagagatgcccagctcatagcgattctggttgaatagggcattcaggatagaaagcggaactgagcacattaacaaaataacatggtagaatgttctggaaaagggcctaagcctgccgtagcgtgctgaagccagttcctgttggttcacaagtctcttccctactctgcatccagtgatatcacctcgggagcttgaaatctctgtaatgggagtacttaccttatggaaatcagcaaactttagaaattggggattcttccttctatcagagagatgagtgttacacttatcagcacaccattgaaaaccagaaacctctgaaagtgagaggaagagcagtgggaaagggatcaggtttggtaatgcttaagacggagctctgaaggatacaatttgaggcctggagaaggcatcatatgtatcatacatcaatttcctttttcttttttggagatggggtcttgcttcttgctctgttgcccaggatggagtgcagtggtgcaatcacagctcactgtcgtcgcaacctcccgggctcaggtgatcttcctgcctcagcctcccaagtagctaagactacaggtgcatgccaccacgcccagctaatctttgtatttttatagagatgggttctgactgtgttgcccaggctgctctcaaactcctggcttcaagcaatcctcatgcctcagcctcccaaagtgctgggactattggcgtgggccactgtgcccagactagctttgagtgtctactgttgtccaaaaccttagaagttagattactcactctttcaggtgaggaaactaagcctcagagggattaagtcatatggccaaagcttgttgatggagtaggatgtgaaccccaggactgtctgactccaaatcatcacactgcatccaaaaaaccagagaggattctttttatatttactgaataagagtttttcatttactgcctgtttcccctgttagtatttaacctctatgaggacagcactttgtctttttcactgctttatctttagcacctagctcctgataggtactcaatacgtatttgttgaataaatgaatgacctaatgaataagaaccttttgggtggttcttaggctctctgtcagacaagacagggaatgaactgggggagggtttcttgaggacagcagctcagggtgtatgacgatccagcaacactagatttaggtaagaattcccctggctcatgcctgcttctggacacagcacgttttagtagagctctggggcacgagagctggttgtctccccagctttccaacccagtgagaagtgactgtggctctgcctggcagcacccttgatgtgagcttggctttgtctctagttatgttgtatatgtttttacagaaagcagaacctcctatcccagggattattatggaacaaagataaatggcacacagagtgattcttcttctaaccacttctttagctaccagtagtttactctagccatgtaaggaacacagagaggcagtgtccagaggagaagggtgagataaggagtgaggggacttcgacaccagttaacaccagccacagccctttaccctcaccctggcctctggagcacgctgggtggtgtgtcaccaagaagagaaggcagcgcactgactctggccaacctgccttccacagagggttgggggcaggtcaaagctcaggtgtgaagaccatgcctaccagggaaaacaggcaagttcagggtttcccttgggcaaaatcccatccagtcccacagtctggagttcccttctcagctctagggagtcaggctgctagaaccctctgctcctgctcttactactctttctgattatgcccactccttggtatccgctttgaaaagtggtctgagaaagcagaaggccaatgaaaccagcaatcctccctctttcacgccagtcaccaacaggtctagtgagggaaagctgaaacaagtcaacacataattacctatgagtagatttttccactcatggattattctggagcaaatgtttaatctcagtccagcttcaactgccctctgggttgcttcctttcacagtatagatttacgcttagaaaattcaaacgttttgaatgtgaacctgagaaaaatgtattacatttactcacatcccttctccctccatcaagcagattatcttcccaattttttttctagatatttggactctctgtttcctcccaagtgaactgaaatgtccagtagcctgggtctaagcagatgaagtgtgactggtcttgtttggagaaagtatgaggaaatggtgcttaacaaggtgctatcagaggctggggagagggaatagaaatcaggctgtaggtttctacgcatgaggaagtgactggatcagggaaagaaatctactaccagcatctctctcctgaccaccacccaccaccaccaccccaccccacacacacacacacacacacacacacacacacacacgtttctacgcatgaggaagtgactggatcagggaaagaaatctactaccagcatctctctactgaccaccacccaccaccaccaccccaccacacacccacacacacacacacacacacaggtttctacgcatgaggaagtgactggatcagggaaagaaatctactaccagcatctctctactgaccaccacccaccaacaccaccccaccacacacacacacacacacacacacactcacacacacacacacccccacccctttaccagtaaaatattttctgggttaaatgtaaagggctatagttaaatatgatacttaggcctatcatgctacttaaaaaaaactgctggtgatgatttaacaagttaggtgtcattatttccttccttccactagtgggcataatagtgttaatttattctgtgagtctacaaaattgcccaagatggccatgttgtctagttccctggagaaattccagacttctactacctctgttctcctggtttccccccaggacgtagctatttcggtctgtgagaggcctaaagaatctcatctgacctttttgctccttctagaagaccaagaaacccattcagaaatcaagcaagtttagtctctgagcaagcccaagggaacgactaggaaccaaaccttccctgcctttcctttgctccttgaaagcacttcttttcctgaggcatctagtccagaaggccctgctgagggacagagtagattctagggctgctggccagaggggttggaaacccgtatttatagagagatgacctttcttcctctcccttgggtttcaggtttctttgggtcttctcctcttgcctagggaagaggaggaggggaaaatgtcagagcttaagaagggcagaaagaaacagtcacctcacaaccatcaaagccaatttgcaattgcatgctgggccaaattcacactggcctaaattcatactttcagctgagctatagggagctccagaaggaaaagagggaccacacagcagctactgtttaagcttccaagctatttgagtagccatgaatacttgccagggttccacctgataatccatcatataggtggccctggattagacttggggagtggggcaaaaggtcttgaagagcaagtttgggcaggaacggtaagctctgagcttctcaaaagcaaaaagccactccaggaagtgaagggaccatttggcaactggtaaagttgaggagtggtctggtggggtgagtacctttggggagcactcactataagtgaacgcctgacagggattgagaagaggagcagggaaacatcaggcgatccattctcctaaaatgttaagtaaacaataaacacctccaactagggacacaggggcttagagagctaagtatagtacctgatggaatcctggggctgggtcctcaaacacatccatctccacagtggaaaatgaacctgacagcacgggacatggaaacttgggtggatacattttggtgatgggtgggggtgagggaatcctgcagggaaataagtcaagtttactcatatctttggcatctgctgctcatccctaggcagccaaggccctgggataccagggattcccctgcagcccagggagtctgttgacttctttggggaaagagaagaggtggagacaggcaatagtagaattaatggtgccataggtatctcttggggcaggcagagagattacatttttaaaaaggaaaacattgaatctttctagctggtactcatctcctcctctcttgacatttttcatctctcctattaaaaattcattttctttggacttcaaacttgaacaaatcttgcctattttagaaaaacacacacatacacataaaagtaaaaacaatcttcaactctgatgtcttctctggcccttctcttttttcttctccttgttattaccaaaattttcaaaattcctggacttttcctgctgttttcatttcctaaccatccatctcctcctcaaaggcacccacacaattcatcaccaagtttagtgtcctaagatacctactggacttgttcaatttgaggcttttcctcagcttcacactatctgcctattgccaagactgtaatcttgcatggacatcatttttattgttttccttctcaagaacctgtaacaattctctactgcctcccgaatcaaggccaaactttcgagaaccttcataatacttcctttactgtacctatccaattttagcagtcttataatgttctcagctgttttatttacatcttctctgtccagctgcaatctagctgctaaattataagcatctggagggcagagaccaagtcctttaagatttggaggtgactcaatactaaatacaggcttaactatcccaagatacccttgagtagtctgtcctcacagataaaaattcttggacacttagcatgtgacaatccctttacctgaaagtaaacagacttgagaagtagtcacttgagaaggagagcatgttattgcaagttttaggccatttcatgccaagatgcaatttacatgagttacaaggaagagaaaaaagcataaaatgctctgcaaaatctttgttttgctctgtcatgagaaattttatatgcttgctacttacctggccacttattggaatcatccagagagctttttaaaaatactgatgcttggaccacctctccacatgttctgatttaattggtttggcatgaggcccaggcactgacattctcagtcttctaggtgattctaaggtataggcaggttaaagattcagtgatttagaaatgtaggggtatgttgtgctggaagagtgatggtggagacaatgtcctagtagggtgaccaaaatgcacacctcagtccaaattctcctctccttcagataaacccttctggattttttaatgcttttttttttttttttttttttgtcactgatgttaccacagacaagacctatttatagtaagagtgaatgcatttctgaagtactgacctggaagagctacctactctaggctggttctagaaacaagaacttatcattctttcctgtccttttgtctccttgacctacagagaacggctgcctgccaacttctttaaattccagttccggaatgtggagtacagttccgggaggaacaagaccttcctctgctatgtggttgaagcacagggcaaggggggccaagtgcaggcatctcggggatacctagaggatgagcatgcggctgcccatgcagaggaagctttcttcaacaccatcctgccagccttcgacccagccctgcggtacaatgtcacctggtatgtgtcctccagcccctgtgcagcgtgtgctgaccgcattatcaaaacccttagcaagaccaagaacctgcgtctgctcattctggtgggtcgactcttcatgtgggaggagccggagatccaggctgctctgaagaagctgaaggaggctggctgtaaactgcgcatcatgaagccccaggacttcgaatatgtctggcagaattttgtggagcaagaagagggtgaatccaaggcctttcagccctgggaggacattcaggagaacttcctatactacgaggagaagttggcagacatcctgaagtagggcaactgggctttgcctcacgtgagttttcctggtgccatggcaccaacactttattatgttaactccagtagaaggtgtgaggtcaggtagaatctgtgatatgtctgattttcctttggaagggtttcatttctctgcttttgactggttgcaaaaatagtttagaacatgtctctttcctctgaatccctctctaaacttttccctcccacacttttgtatcaaagtaactttcccctaacttagaatactcaaggttgacaggaatcctaaaactttcatgaggcaagatgacgttctttggtaagatttagatggtgcaagcacctgctactgaaccacagcagagaagatactgaaatcctctgagtatgcccctgtgtacatgtcagggattactaattccagacatcttctagatgcctcactcccatatccactggcaatcttaccattccatttttctctaatgaatgttttttagtccttcagggacaattttttcacttatggtaattttgaaattccccaaatggactggtatttaacttgttttaagccagacctgctttcatgttttcaaacaaatggctacactttgaaggagaccaacaattgctgtgtgaaaatacaatacgggaacattttccttatgttgagaagacctcagtagaattcatggaggatgtcgaatgcaggaatggggataatatagcaacaagctagtccatgcaggaacatttaaagagttaaaaagacatttgtaaagtaggcagcagctcagaagtaacctcttacagatatcaagaggtgataggagaaagattagctatttaagcaaataattaggacacaattaaggccaatttggcctcttgctgagggtaaattaaactctaacagaaacaggctaattaccctcaggaaagagggctaaaggatcctttactatcttttttacatttagtctgattgagtttgcgcctacagaaatgctatgacgaagccccctttgcaaggccccagttactgatcaaaatcttccagtaatagaggaggggtactcacgacactcttacccaactttaatcctgcaacaactcacatattactaaaacatgaaaacaacaagcttccatgaagataatttacttttggtctctctcactcctaacacccttaagagaagatgtcgcttcatagacacgtttaggaaatatcaatgttccagagcttgatgttggcaggtgttttctattagacatgcacatgggcacctgatcattctcaagctgagcatttgccaacccatgaagatacaactttcagccatttcttttaaaaagcaggacccagtcactgaagtcagtgagcctatgatagggtatactgtgtggtactctgctcacataaaataagacactttatagtggtgaacagtagtcaaaacagatttctgagggtgccctctgagaatataaaatttaacttttagaattccttgaagattttgttagtgtatgtactatcactgtaattataaacccaacatagattctacagactaaccggcagcttaaaatttaaccccagtatattttcctttcagacatctttcagagtcaagggcccaggtgcctaactagcaagtccttagagcttttttttttttttttttttttcagtgatttcaaatataactgtattatctggacccattaacatgcttccctgtcttctatttgaattgctcatgtttgtgaagggaaaggttaagatatatcaagttaaaaaaaaaaaaactggcatgagataagagtgtaatctaaaagcccaaaagaacaaccctgcttaattaaaataatcttgagaaatgagcatttgttaaataaagtgtcttattttacatacttatttcatctttcttttttttttttttaatgacaaaatagtatttaatcctatatttagtcaaaagaccagagttaaaccagatctcttctggggctttttctgtgtaaaccacatcaaaacatgaacgaaagactggcttctggtttagtcaatcctggtaaatttacccaatcctgcaaaggaaactatggaggagaaatccagggacttgttgggaagggcacacagaaaccttagttcaaaaagaaactagtcattgttcggggccagcagagctctcagtaacacattttctttgtttgttttaccaaggtattcctgctgccaccaagagacagcaatgacatgtacagccatctgggacatgcctgtcttcctaataccatttggagctggacaacatttgacaccaaccaatcatactggacaaggcccttagaggacttgaaatatacttctcatgctgtagtttatttaggctgtgactctctctctaatgctgctctcgggaaggacgaaagtgacctgcaaggagagaaatgcaaccatacatgggctccagtcaactatgggactgaaggtcctaattgctcacccaagggggctgcttaacacaaacagcctcagacccgaggtttagatttctgaaatatgcattttatgttaagttgggtatttttttaaaaaaagaaaaacagcaacattaataaaagaagtggtgtgtttttcccgtggccagatttttaagaaacttgaacatctggaagttgccacagacaagcgagctagtccagacacagggacactccaggctatgaaccaagccatggttaaaccaagacttgcctagacaatgcagaataactctcccatacagacttcttacgacaatcaagtgagggcctttcccttctctgaaggcaagtaatagggcagaaggtggaacaaaaagcatgagaaatctaaggtagccacatcccaaatgccagttaataagcaactagcttctttattagagaggagcgggtgaaaagtagtagtttaatgttcagatatacaatcatttaaaagtattcaatacatggtgtttgatggtaatggcaggatgatgtcaagtctctctttttttttttttaaaggtttgtttgagtcctatgtggaagcaaaaattcacaggtgaatttccgggtgtttgccaaactctaactaggtttccaggaataatgtgttcactctgattaccagggcatgcctcctttcctcaggcttcaagtgtgataagtcgtcggaatttgacccaagactactatcggcaaatgacaaagtgctttatcacattcctgctaagtcccagaattccacttacagccaatcctgaatgagactaggttttgtctaaagaatcaaggctcaaacgccaagaaaaaaataataataataaccataatctctttaaaagtaaaggaagcctagaaaatccatgttttgacttgtgttaaggtttacagatggtactcaatttacaatggtttgtcttgcaatttttggactttacaacggtgcaaaagccatacacattcagtacacccttcaactgaactcaacttaagatggggttacccagacatagacctaagttgaggagcatctgtaattgcagagttaagcaaaatattttaagtttctttaagtttcttatcccccactctcactttcaattttgtgtatttagataatctctccttcctttttcccttcaactttatgtggacaaaagcaatgcttcaagaaaagcctcaatctaaaagtttgataatgaacttgaccctccactgcccctaccccaacaacatgaagaacttgtctgttccacctagaaatacaaaagtgaaatacttttttgaaactgttgcctcttatcaggctgatatgtgataagaacacagtctaaagtacaaagattatatttaaccagtactttcctggtgttttaaccagccccttctaaaatacagttgttcttttatacttgggaaagcagcaagtcctgtgacagacccaaagtcactctagggagaaaatcaatagcaagtctggctgttttaactctcaacaccactgtaagggaaaacaagaaaatgtctagtttcccgaatagctctgatactgaaccattggctaaatccatgaactttattttcctaccatgaccacaatagacgactggtctttgcagcttcggaagaaaagaggactaatatttagaccccagctggctgcacatccaaatcttctatggaggttaaaaacacaaaagtggccatcccactccaccaccaaatttttttttttaattgagatagggtcttgctctgttgcccacactggagtgcagtggcacaatcacagctcaatgcaacttcaacctcccaggctcaagccatcctcccgcctcaacctctagagtagctggaactacaggcctgcaccaccaggcccagctaatttttaatttcttttttttttgtagagacagggtctcgctatgttaaccaggtttgtctcaaactcctgggctcaagtcatcctccagtctcagcctctcaaagtgctgagatgacaggtatgagaattttttgagaggaagtggcctttatttttttaaagaagactcataaggatttttgacaatcactgatttattgggtcactagtctgtgctaagtactctgccaggcatttaacatacattatttcacttgttttcatgattaaattcaggcaggttcaatcacagaaaccatgcagtggacaaaagagagaaaaagttcaccatgaggagattctaaaaacctgccttttgacttgtctatttttatctcttatttctcactttgcttctcctcccgcttggaccctttgtctgactgtttgaaattaagttgcaggtgaaccctccattacccatgtccagaacaaatagacataagcacagaacctcactaactccccaaatttttatttttccatttttatcaccacaaatttcttggtaacaatgtagaatttaattttgtaattaaaacaaaaactctcccctaggaggaatctgatgacataaggataacaccaagttatgtgcacaaacgacaaaaaatgccaaactaactggaatgatcatccttcctgaaatttctcttaaaaagcagagaagtagaaccaatgctgccacctagtggccagccaaacaaatcaggtagcatactggagaaaaaggtcatagtcccgacaatctggtttccctgcctattatcaagccacctaactccttacttttccacaaaaaaacacaaccacatatcttaagcaagccctcctccacagtcataatccaaatacttgaatacagcaaccaaagtctgtcttgttaaacacactacttctcatgaaactttcctctgcctattttaaggtaggtttgcccggtcctatggcccagtagagatgacacaggagaacacggaaacatccaaaatgttcactggttcagagtgtgtacacagtaattttgatgtctgttgcctcaaatacctcctcgatcatcgcagatacattttcccattgcagacgatcaagaccacatccaatcctgaaaaagacaaaatatctccattgatggtaacgaaagtatctaggaaactgctcctctcttttaagctatatccactcaaagcataaaaacaaataatctagtctgacacccttatgggcaaccatggtaggagtttggaagtcaattcttgttgtgagtcaccgaagaccattcctagacagctctaacatccaaaaactatcacttctgtttgcctaataagatactactttccaactatttcatgctacatttagaaatgtgtaactgtcatgacattagagactcattatccctctatgactactgactaaaattggctgtggatggatggtgaaaggttggtattttaaaaatgcacttatggtaacagaatgttaacgaaagtaaggagaagaggaatgaggtacaggatctgcaaaaaagaaagtcaagagggaatgctgggaaatggtaagatagttgcaatccaggagtaaggtctttgcaacaccctggtaagaataaactcagtccataaaactctactacttggcaccttccaagatgttactctagtgatcctcaacacgcctagggaaaaaagagacctaaaattggtaatttcatgtcataatgtgataattaagtccataaggaattgtgattaaaaaaaaagtttctgatatgtatgtacaccataaatatatcaaagaccagtgtaaaataagggacatttgaggccatatgcaaagtaatgtggggcgcaagataaaactgcatgtatgctcagcattgactcaaaactaccagggtgacaggaagaaaagaggtgaggcccatttcctgaaaagaaagcaaagggactactgaaccctcaatgtcattccctaaattcccaatagctaaagtctaagaagttacatcagggacagatcctctggctattacccatactgaccaaaacaagtgtgcagtataaaagggaatgataatttacaactttcttgacgcaaagtaataggtttgggagatgggaagtggtccaagaggaaaaccaccattgctcagtcttgattctttagcttacattgctttaggaataaaggccaagcttcaagcagagggtgctgagaattcaacaaatgtagctgaatgacaatggtcgctctctgctaagcaggctgaggcagatgtatatttcaaggtaattgtcctgattcattcaactcaagctagaaaatggctgtgccttagtctaaagccagacaactggttcactggtggttttacaaaattttgacttttgtccacctttaaatctatattttgggttaagcttttaagttgtttgtctttgggtaagatagtaaaccccaccaatcaattaaatctccatttaggaccatggatttccttgcctgggcatggagaggtcagtgactccattcttcagacaatgagacttcattgcctctaaactcttctgtaagttttcataagttggcttgtgcgaagcccttttctttgtaatctgaacacaaaggattcaaactttcatcatcccaaaatgatagccaaagaaaagtcatcacattcccccaacatcccaataattaaaagagtaagcacatttttatagaattagtctagagcaaggatgacaaatgtcatattgccctttccacactgttatgggagaccttcaagaaaatccactaaatagaggctgagaaacccagactctgccacgtagcaatctttccttttcctaggaaacccatgagattagcagatgatgcctattgtcaatatttttaagcaaggtaggtgaagtctctgtgccacttccaagagataagctgcatatctctaacagggaagaaagcataccacctgaaaattccctgctaaaagcctctacttatttagaaactgtgcttgcttgctttttgtctctctacataaaacaacagaaaaaactggtagggtcccaaagtaaaaccactggaagccacataagctttaaggacagaattcaaaggggctaggacatctccccactcagtttgtcatccagatcaggcttgtagtgggttagctgtaagctacccaccaccaccactaaggaagccacaccctttcagggaccaaatgccatcctggactgttgaagaaccccacattcaggcagtagttaggagaggagctaagtattatttgggactgcacttattattttttgtttttattcacccccttgctatcagtgtgctatttgacatggaataagagaaaagctcctttgggaaatctgtctcttgagacattattgtttttatctcactctgcctaggaaatatagtatggcaggcattcctaacttttgcaagtcttagaacaggcctatggtacatgatacacgactttcccacagagctgggatgcagcctcacatttctttctaacccagtgctccaagtagccgccatcactggactggagttgtcataagataggaagctttttgacattcttagttgtctagaatagaacatcatgatcaacacaaatgcagtgcagcccatctgttcacaaatccttaaaatgtattaagaactggccctgaaaaaaaaaggaattggccccatcttaccaagtaatatatatatcgcccatctctcttcagaacagccacttctccagatttcttttctaagaaaaagttatttaatagtagaaatgaaaaagaaaaccaaacactgatctctaaagattttaaaatgtttacagatctgagtttacctcagaactagaattttcaacactgaagaagggaatagggaagacctattgtctcccacaaacactttgctttttatcagcattcccaaatactatattccttaacttaacagctttcttacagtcatgtttcctcacaacccatcttttgtaccactactacttttaaatatatcctcatttgtccacaaactttctctattgccttgaaattgttttatagtgtgtagttttttacttgccaaatgtgtatttactcaataattatctttttacatacaaagagctgtataaggcattatgaggaatacagatatataaaaaaggaattaattattacagagttttcaatccagagaagatatcatcattccaaataactataatacaaagcagtaagaattgcttttgtctaaggctaagaatcactgtggacactgatgctgttaagcctggaatgtggtcggagaaactgttgcagaagctttacataggattctagtgcacatttctggtttaaagtggcccgtagaaagtgatgggaggggtctgtaaggaagaagaggtttctaaattcctctttgaagagaaagcagaatattggtaagtaaaggatcttgaatgccaacctatagactaagcatctcagagttatttcaagtttcagagaagtacagtaatatcgtcaagaaagtttcatgatacaagaggaagagattaaaaaccttcacaggagttgggttttgatatggtaaacgtctaaactagaggccattcttggggaggaaaatcttaaaaacatttggttcttaggaatcccctctttacacgcatattttattaaagtgtaacagattaaaaggtgctctagccagggcaaaccaggtaagtggtttccaaaactcacgttgatttaaaagttcttgcacccctccaaatttcttcttaaagaggacagctatcccagcgcccatgcgacaatcctcactgatacagtgggctaaagagtctgttttcgggcatgcaaaaaggtctcctttcacataagtgatctaaaaaatgtgcaaaggaaaagacaatgttttattagatacagtaaaatactaagctatttttctgtattttgtgtcccccacgactacctctcccggcaccccttcctccaatctgatttaaagccaaaccaattacagcatgtgtaaaaggaaagtaatggatgatccctgcctagaattttgagcctttttaaagtaaatcagctagagagaaaaaaagataatgcaatcattaatttaattaaaaagtgtttatgcttttgacctccattattacgaatttcagttcaccaataagtcaatagttgttacgcactctgcttccttctggatcttcattaaggctgctggccatgatactgagtcgctatttccagaatttaagtgtttcttcagctatgagaagggaaaaggaagtaaaaatgcttaggcagccttagtatataatattctgattgccctgtacaaccacttaataggcttttttccccaacgtttatcgatgaatgtgagtttgttcggcccctgggacgtaatacaaaacccttctggggcaaagaggaagaacgcttaggttcggaggctgtctcgacccgctctcatttcgtgctttcctggagcgccccgctccgtcagcggaagcaaagcccatccctaagacacgcctcctcctttctccagggccactccggagcaaggccgatttaggacggtctccttttctctgcacgacgcaaaagtatttccccagtgggtctggcttagaagaaaacagaagggacttggccacagtcccgttaagccgcaaccacagagtgtacagggtactggcgtgctgagccccaggcgtggggaaaggaaggcggcctctcaaggaacgttcaccccccacttttttggggggtgcgtgggagaaggaaagagtctattgaagcctcccattctctgtctcctaccctagggcgggtcagcgaggacgcagtctgtcctggggtcctatgggagggtgcggggaggctcgctcaaagccccaacgtacccaagtcacccttcacctggaaaggagtcggttgtttggaggtccccgccccgcggggaagggctccggatccgaccctggtaggtggggagcagcggaccagcccaaacgcggagccaatcccgccaaagcccttaattgcacgcatctaagatggccgcccccgcccggtagcggggcggaaacgagcccctctagcttgctagccgagcccacactctttggcgaaggccgccgaacttccggcagtaaattccgtggtttcccgccgccgcccgcgcatgcgtaacgaaactgccccacgagtcgggaaaagtggcgcttgcgcattagccgcaggggtgtgtcctagtggccacttggaaaggggtgggcagctggcaaaggggctagttagcgcctgcgtagtactaagctcaaggcagcgttttgagttgaagggtctggcgcgtctggaaagcgcctgcgtattcctttcactgggggtggtgtcaaagcgggaaggtgggcgtggcttcagggaacgcctgcgcgttgctcctccgaaggggtggggcgatccctgaactggagttagtgggcgtggcctcagaggcgcctgcgcggaggcggttggagggaggcccgattcccctttgttcgggttcgccattttgctaggcagcggcagtggcggcggcagcggcggctggagcctctgattgggtttcggagtccggtactggagccaatcagcgcgggcagcgaaccgggggagcgaggcacggtgagtgtgaggagccaatatccagcggcccagagccggccccagcgccccgattggcgggtctcgctgaccactcaggagaggcccaggcgcccgtcgagcccggggagtcgagctgagcctagccgagccgggcggccagcggccccggcccggggcctgcgagcgcctcggggcactcccggccgaggcctgcaggggccgccccgcgcggggatggcgcctcggggagcaggcacctcggggctccgaccctcgcagggtgccagggccagttgggaatgcgtccctgttccccgactcaggcccaggttctcaggccccaggcctggggccacgaatggccctacactaggggacacatgcgcgccctgggcctcggcgatttcctcctggtcgttctggccgcaaacttaaacctgcccttgcactctccactctccggcccttgggacaggaagcctccccggggcccgcgccccccgctccccgctcccagcgagccgggtctgtcttatctgcagcccctctaggtcgggagggaggcctggggagggtgcgcgccgcggccgcggggtcccgtgtgcggctggcaacggggctggcccgcccacgcctcggagccctatgggcccgcccccgctgtctccctggtggggagagggggccgttagttcgcccactccccctgctccgccgcgcccctcctcccagcccgctccgcccgggtctccggcccggcgccgttaccaccccttttggctcgtcatttcctctcttccccgccccgttcgcagtggcaggaccgcacacctccgtcttggagcccaaccaagcggtctccgtttcttgtccgggctgtaagaccagtccattcggtgcctggaacctcactcttagaagattgatacccttgcgcattctttccggaggctgcacaacttgctgttcatattactaatcttatccactgctcattttgtgaaatctccctcccttgggaatatagtacagttttgggggttttttttccctttgtttttgccttcgcctttctatgttactttgtgtcaggcttgacccagtccactcatctcttggtttatgtttttctgatacactttcaagtcctgtgttaacgttttctcagcagatgtttagaaactaacagtgttgtggggttttccttagggtgagaggttgctgttggcaaccaattatccagcagttagtatatgccaggtataatccgtgtgttagggagggagtacgtagaggtcaataagaactgtgcctacctgatggaaattgacaggtgaacaggtagttaatacctaacggttagtgctataaaggggccaagttcagttgctgtgaagtatccatgcgtgagctagcctccgtgaaaggcttatcaccaccgcacttttgactggccttgaagaatgatggtaattcttccacaggaaagatggaagagcttgctcgaagagaagaaaagcatgtgcagaggaatcaaattacactgttggaggcaggaagatgggatagggaagtgggcagtagttgtgatagtttaggggggaaagcccagttggtaaaatacttgtatatcttgctaaggaatattttggaaacagttattattttgtatggaggttcaagtagaagggatctagagctatattttttcctaagattgaaaaaacgagtttctgacttgtttatgggttctgccccgtgatagtggctgagttctttggggatgaagaggagacttgtcctaggactctgaaaattatttttactcatgtgaatcatctagtgcattccctggcacataaaggtcttaagtatctggtgcccatttctaaattcacatttaatgttatacaactaataggtttcagaaaactcgtattccagtgctctttcattactaaaacttcggggacaggttttattttcactttttagggtgagtttttcattgttgcttaagtgattttcttaattcatttgattgtcacgttatccgcattagcagatgagatgatagagcttaagtagtctaaaaaacatgtatatttgcctttggaacgtttttttgtttgtttttggatacagggctttcctctgtcatccaggctggagtacagtggcgcaatcgtagctcactaacctggaactcctgggctcaagccatcctcccttcttgttctcccaaaacgttgggattacaggcatgagccactgcgtcctgacctgaaatagatgttttaaccttagtatttaaaaataggtatgttctggtcacttcaaaatcactaaatacttttgcttggcatctttctaaaaggcattataatctggtaacttttttgctaaataccttacaagcttccaccagtctgcagaagaatttctttgtctgacattttgagagaaagtagtgtggccccaagctttttttcctgtttagtccactgttcacatgctgaaatatttctgttcttgtttttatgctctcttgatttgtagtacttcaccttcctccacatcatcacatagctaaatctttctcacacttaagaccagttcatcctgcaggcctctgatagcaaagaaaaaaaaagttcaagtagtacctttttttttttaagccttgttgatttatccccagctggaacaaatctctgtcctccaaattcccatatcactttatctcttaggattccagtataggtttttagtccattactaaacttaaagactctttgaagtttgaatcttcgtcagagatttctttttatttttaaaaccttcagaacagtgtctggcacatggtacataattagtggagagaagtgcattagaaagctccaatccagaaatctgtaggatgatggggaagctggacagccctttgttgtagtctagtctttcatcaagcgtctatcaggacccacttgttgagttgtgaaagaaattgagtgagccaatgctgggaatttttaaataatagaatagaaaatatctgccaggcatgatgatggctcacgactgtaatcccagcactttgggaagccgaagtgggagaatcctttgagctcaggagtttgagaccagcctgggtagcatagggagaccccctctcttaaaagaaaaaaaagaatagaaaataccaaagtgcatcttgtgttgtataaaggtaaatgctgtttcatgaaactttcatttcagttacatgctttatacatgtgtgcactgagttgtgataatgaaatgtgtttcttactaagggttgtggtcaaaaaagttaaaaagctactgttctaggctttgcctggtagtgattatcaactgtgataatcctatggcttttcatatgcttacactagttgagtttctgaagaggttttagctttggagtttgtgtaggtccacatagaatgggttcctagtaagtggttggctaagtctcagcttttgcaccttggaatagtggggcaaagagaattgcactgagaagagaatgcactaggaagagaattttcatgctagccagaataaacacttattatttgtttctctctctttgaggaaaaaccattcaaaactttgtgttaagagcaagagctagacagactaaatctggcttagtttgtcataatcttgggcaaagaggcactttgggaaagactatcgaattgtattgcagtcttgctaactgaagctcacagtagtaggaacatatgactttactgaagccagttgcttatagcattaaccattaacagtatcaatatcatgatacaggctaaatcactctgtcattaatgtgagagagaattgctgctagatttgaagctgctcttcaaatcttgatactcttcaaagtataaatttaaatattgctaaattggttcatttgtattaccagaataaactagttaagaagaaaatctgtacgttacatatattagtcattatgtgcttcaagttatatttagtcttgtaaagatgtaaacttctggatattagtcaaggaaaaaatctcatataagaaggaaatttggagttggggaggcgttgaaacctaaaagacattcctttcatgatccttattttttaaaatcaatttattgagagatactttagaaacaaagtataataattttaaatgtgtattttgatgagttttgacaaatttgtacacctgtgcaactgctaccacaatgaagatataaaacattttcatcaccctacaatgttcctaaggctccatgccagtcaacctccctctttcctgtctccctgtattctccactcccaaggaaccactgatccattttctgtctctagattactgatgtcttttggagattttatataaatggaatcatatatattcgtttacatcataaccttaattttattagtttatagccataaatgtattgtgtattagagacaagatagaatttagggaagcctgttagtgcccctaacagactcacagtctggctgaaaacctgattttctattctatacccagaatctctgaggagcagacttagtcaaccaattccaaagagactggtgtaaaaatcagaaaaccggtttgtcatgttgctgattatatttgctccctgttggccaatctatatgtaaatccaaattatagctagaaatttacctagcgagcattccattagatcaagggcagtgctttggagaaccatatggccacaagtcctcttgctgtgatgacatagcctgttatttatggctcatagattcttatgttgtatccattttggttatgagtaatggggttgattaatttttattttgattaaattttgttatatttttcctaacattccaacattcatttgggaaataagaatttctcaaaattcttattctagaaataagaattttcaagtgtgcagtgaaatcaaaggaatttgaaaataaacacctgtatacctgccagttagggtctattaacatcttactataattgccttaccagatatttctccacccattcatccattttttgatgcatttcaaagtaaattttagatatcaatacacttctttctaagtacttggacatatagttgcacatattttggtttcttctttcacactgtattgagacaccttgcaaatgattaattccaccagcatgtgtggatttatggagagtggtactgtactttgccacgataatgagcagctcagttaggtcacgtcattttattattcagatgttggaatttatgagggcctagtgaaaaatcagagagaaagacctatctacatttttgtttatatatctgtcctccctcccatatttccaagatgaattgccgattgctaacttatatcattttaattttttaatgaagtctttattaaaggttctcagatatcattcagtttatctaattgtatccttatttttaaaagtggatcttcaactcttaaagtctatgagaagggtaaattttgcctaccatatgtagtggacctgagtaacatgtttggtgggaagcaattacgtgttacaacttaaagaagctttattctctaaagtatatgtgcaaacctgaaaatcagtgttaggtatgccttgtatcaaagtgatgtagcttaacgagtatctcttaggtgcaagtattgctctgacagtattgaaaggtaaggttgccagtatactgaaagcattttagaaacgtgaaaatagcattatgttgttatgattgtgccatgtaatcccagttaaaaatgatactgaatataagcatttcctattctcctatcctgttttcttgcaaataaagtacagtgataaattatccaggttaattgtctggtaaggcctttattgacaatctcactttagtttctttccccacctttctaacaggagtgtacctcacagccttctaggatctccagagtggacaggaatctcacttggagggaccatggagcagtatacagcaaacagcaatagttcgacagagcagattgttgtccaggcaggacagattcagcagcaggtatggaagcaaaactgctttaaacattacagcaatgaaactgataacagcaccactcaattggttggtctattgccctggggaattatttgaaagataccagatcttgtgagatattgggtctgatggcttgtgctgaaatgccatgtctagcccatgaccacttagaatctactcttcatgggtgcctggttatagtaaattgcctcttttatctcattttaagtaaaaacatctagtctggttttcagatggaaatttggactttaaaatttttctggattctatttggtctttttctcttcttgtttgagctaacttgtgatttagtaagtctttggccacaacagacaaaccaacatagcttccaataaatcttctgttttttgatttggtctgccacattttttattcagaaaagctctggtttaacattaggataatatttagacagccattcttatggataagacatactagaaaggaattccctgctgctggtttattcctaattaatagattgctttcttgaatttatacacaggttacattttctgatgctttatgcttgggtttattatagtaaaatttcacttttttccccaccccagaagaaaaaaatgtattatgtttctatttgaccttaggccaagattgatattttggaaatactttgttttcaaaatggaatttagctaatatagaaaagtagtagggaagggaaaggtagtattgatgatgagtttttcccgtctaatgatcaaagacgaactcccctgatagctttcccttccatacagctgctgtggctctggcagtttccttcaactgcctttttagaggaagggattccacaaagggccctccattcacaccagtgccctggagggtgggtttttattctttcagaatttgccattagtggatgtaaaaataaggttgaatcattgaaaacatggctcttaaagcagtccagttgggtagaaataatcttagttttgaagctgggcatggtgctgcatgcctgtaatcccagctactctggaggctgagacaggaaggttggcttaagcccaggaattcaagaccagcctgggcaaaacagcaagaccccatctcaaaataagtacataaataaagtttaaaaaaaaaagaatcttagttttgggacatgagagcattgacgtcatgaagatgatttcggttcatagtgattaattactcctcctttcttggtgattgcatttaagcccagaattttttatggtagtttcagggctattaaaacctaatcatttttttcttgtgaactcatctgaggagataaaaagggcattaaacaattgtgtaagtagaagtgtcagattcctgtttctggagggaaagattgcattacaaatctttgtgttaatgatgacaactgttttgagtttttgagtcaaatttttgaggtccactctggagacaaagggctaatatctttaatcctactaccttcaacaaaacagcttcaatatagggagtctgtacattttgaaagtccttcaggcttccgtctctctcctccaagaggtaaggtgatctgtgtcttgaactacacatttccttcctgacatatttcaagctcttcctgttcctgttctcagcagcagggtggtgtcactgctgtgcagttgcagactgaggcccaggtggcatccgcctcaggccagcaagtccagaccctccaggtagtggtaccctctctgattctctgtgagcactgcatgaacttctcctctcctcatgtctggtgctgtttgtgttaggatctccagtaggaatggcaaagtcagttgcatgtctttgatgctgctaacttgtctttgaggcttataagatgccagtttcctaatatttcatgccaagtcatatagagaccccgtatcaactttctgagaattggatttgactagcatgtttctttgagaatgcctggaaaagaaatggtataagtgacaggaagaaattcttataagtgacattagaatttattcagggctcggccgggcgcggtggctcacgcctgtaatcccagcactttgggaggccgaggcaggcggatcacgaggtcaggagatcgagaccatcctggcaaacatggtgaaaccctgtctctactaaaaatacaaaaaaattagccgggcatggtggcgggcacctgtagtcccagctacttgggaggctggagcaggagaatggcgtgaacccaggaggcagagcttgcagtgagcagagattgcgccactgcactccagcctgggtgacagagcgagactccgtctcaaaaaaaaaaaaaagaatttattcagggctcacactctgatccaattaattgcatggtaaaaattttgtgtatttgtgttacaatggagaaggaaatatatacatatacagacacacataaactaggctaggctgtgctttatttttattcaaggggcaactcaactgaaaaataatcattgcacttggcaaggtttatctaagcactgaatcttgttaatctcttgttaactgctattgtttccactacctttcctgggggaatagtgacctgtcttattactagatctgcaaagattaccccagatacctcttggttaggcagaagcaggatgtgctttctgtaagtcttaggtgttaaagccactgtgataattcttggttaatcaatacagttctttagcatcgtgtatggctaagtatcctaaattgggttctaatttggccagttcctataaaacacaggagtagcagcactagtctactctgtgtatgtaggttacttttattaaaataactctatttttgagaaattggcaagatttgggtaccctactttttccctccattgaattagaaatgattcaaagtagaatctagaatgtagaactggcatctcactttattgctagtgctgctaagcatccagcagataactacctcttattgtcatcactttatcctttcaatcccacccctacccctgccaccaatagtgtttggtaatgatgtacagccaactttgaacataaattaagccgaaagaaactgagcttgtaggcattccaaaattgtgttcaaatctcacagtccaacagcttgttaatgtttttcatgcttgcttcatcttactcatatataaaacagtattttggattgtcattaaccccttgtggaataggaatgtaacatgctcttaactgtatggcttcttgtttgatgcatgtgtctttgtaacatttttctgttgtaaatacagtgagctctttggagtctcaaatcatttatcatgtgcacgaatagcacatcaattggggaggaaattaagatgatgaatagatagaaaattattaatagctgtatcttaaaacttgtgtttcctacttacatagattttatttaaaagaagtggaaacactttatggaaataatagaaacctttcctctagggatctgattattttgggagaattttaaatagttattttggttattcttgctatatgtattctgagaaatctttcttgatacagaatatgcaagcatttggtgtagcaaaggggatttgatttggaatggggaaataagggaaagagatagcatgagagagtcaggctgtaaagtccttaaaaaagtaaagtaaaggttctcaatggacagtttaacaaaacttaggatttcaatgttcctggtgattctaatacattagtggtggtggcagtggcggcggtggtggtggtgattgtaggaggaccttactatctaacctactcatctaggacagaatgatctgttaactaattgctgttacttgcacatactttcattaagtgtgaatatttcagtcatgaatattctgttctaagtaatttctgtcaaagatagagtctgaaaatgaaaattttggactattccatggatcattacagtttacttctaaagcacttttaaagtgcttccagaaagcattctattaggtatttttgtattgggacttaagatgtgacagagcacttgtagtgacctggctcctacagtagtctgtttactcataggagcttgaaatttgtacacttgactgctctgtgtaatttcaatatttgttgttgcttctgataaagctaaaataaccatgtggatattatagaggccagtgaggaattccaccatggagactgcaaactgaccagaaagtgcttttaagaaatctttagtagtgagtttaaacaacaaacatatctagaattcacagagtaaaatgagcaggataaaggtatacatttgacatttcattttagcttgagagactgtagggaaaaaagggtcatcctctacataagcttccagagctgcttgctacccagcctcctagagtcattgctgggtacagtttgatttaccttcttcactttatttagaatttgtactcaaccaccatcaccaccatcacctttccctctcattgccttctctccagccttcactacagaccattcctggattggtttaaacaggcaactaaccttgccattatgattaaatgtttgtcatggatttagcccgtgtttggtgacaaatgccttatatctattgagacttctcaaagactctggatattctccattatgtctgaccttaaagtattgagcttggcatttagtaacaggattcatagatatttaaagataacttgaggacttgagacatatattttcttagtcttttctaccttttccttttctagcaaggcagcagaatagttccagtgattgtcttttggtaaaaaccattttgtgtcttatgttatttcattgttcttattttatttcattctaggtccaagggcagccattaatggtgcaggtcagtggaggccagctaatcacatcaactggccaacccatcatggtccaggctgtccctggtggacaaggtcaaaccatcatgcaagtacctgtttctggaacacagggtttgcagcaagtgagtaatatttaaaaatattgagcagtatatcagaggagaggtttcaaagaatagattattacaacctatttgataattgatattgcatttaactgcttcctaacccacattttgcattcagttgattttctgcctttatagtaccagtgatataaactagaactatgcagaaattggacagctccagtaatgactaagatattaggcatgatcttgaattgctgtaaagtatatgaagaggttagaatctagtttatagtatattttattttaaaagaaacaaaaatgagtatttagaaagttagaaaaataacaaaacgagcaaaaagtgggtccaaattaattaagtagaaaactgacgtatagaaaggataaataaaatctagattgtttaagcagaccaataaaacaggtaaatccagttgaaacactgattgagaaacagaaaacaaaagtaagcaaagatgtagaagagattaaaggaaggccaggcgcagtggctcatgcctgtgatcccagcacttggggaggccaaggcaggtggatcacttgaggccaggagttcaagaccagcctggccaacatgacaaaaccccatctctactaaaaataaaaaattagccgggcgtggtggcacgcacctgtaatcccagctacttggggggttgaggcataagatatcttgaacccaggaggcggaggttgcagtaagccaagattgtgccactgcactccaggctgggcaccagagcaagattctgtctcaaaaaaaaagaagagattaacagaaatatgtagaaatgttacatacaactctgtggcatcatattttaaaattagatatttctcatcgagatggcaaaaaaaaacaaaaagtcattatatccactgttaggatggatgtggagaaaaagaattaatcattatttttggtaatttaaaactgtagagttattttggaaaggcacctcactatctgttaaatacaatgaatatttgagctagcagtcccacttctgagaatctgtcctataggaagaaaagcatcaatagtagggggaaattacaaagacacttttcatagcattgtactagcaaaaaataaaattgcaatctgagtgtccattaataagaataaggaaatggttggaataaatcataatatattcatagggaatattgcatcatcattaaaagaaatgaactgttgacttggggtgggttaatattgaaatatttttagtggaaataatttgcagagaaatagtgtgtgatctcatctttgtaattcataaccaaccccccatgagtatatgtttatagtcatggaaaagagagtatgagataactattagttactctatctaaatgtttatattgtttcaacagttacagcagtcatattaatgtcttagttttctggaggaatttaagttgaaaaaagcagccatgatcccactgctcataaatcaaacttgtactttttgtgtattcttttgtgtttttatgcataatttttgggcataattgtaccatgcatgtggggttgtgttttcattttttttttttaattctttcataatgttcagtcaacttgatgaatcagaatttctaatttataaaatatagttaaggattttggttttcatttgcctttgtaggtaaacatttgggcacgatagttttatttttcaactgaattctcaggataatttctttggattggggattgcttgggtaaagggtaagagtatatttgagcccactggcatatttttgccaagatagaattgtacttgggattaaaaatagttttcacatttctctttgcataaatatatgaggctttaaatatcttttcagcatgtgctttccttgattccctattgctatatcctttctgttcttctctctttgcttcctctccagtcccccttgctgcgccttctccactgttgagtagagacaatgtggtatagttaggaacagtatactgtgagtgtagtggtccaagctttcattaccaggtctgccattaaataagcattctgatcttggccaagttatttaattgtcggtttgctcatccaaaaataaaatttatatgagatgatatctagggttcattctagctctaaattctgtgatttttatggggttttattttgctataaggaaccttcaaatagttatttccctgcttccaagtagggctataactaaccaagctgaaaaaaatatattctgttacgtaaataaagctctctaggtgagattccatagcctcccttacaatacttaaggctttaatcccctttgtataggagttttttttctcattagtgttgagtagccattttttaaagaagactacttcttaaccttttttgaattgtattctctattttagaatcctagtaaagcttgcaccctctaagaaaaagtagagatgtccagtctcatgaaaaattctgcatataattttagattaaaatccttggcctgagaaagatactggaaccagagagacagccaagaaatagatagaagaatattggaagttggcatataataaaagtggtataaacatatcaatgaagaaatggctgaagaatgatacagaaaagaaactgatttctaattcatactgtattttaaaaaatatttgctaggtggattaaagatctaaatgtagaaaagtaaacttggaaaattcaaaagaaaatataagaatttttatgctatagagaaggatatttttaaaaacaaattgactaaaacataatatgcattgaaatacatcaaataaaagtaaacaaggtgaaaacttggaaaagatatttttaatacatacaaccgagtttgtattcagaatatgtataaataacgtttatgtatttatacaaaaataggaaaatgggcgaagaatatgaatagatggaagaggaaatcctaacagccaatataaacttagaaatgaagttggttcacataaccagataaatttgtttacttatttatttgccaatactttctgaatgccaattatgagctgagtatttggaaaaaataattcagaagacctaggcaatctatcccctaacaaagtaggatccatgaatgtctctaagacatggaacccattgacctgtttttttcaccttccttccatcagtagtcctttttcctatcagctggtagactttgtgataacttaaggttctaggcatgttcttctttccagaccaaggtggtcccaagttgaaattatggatggaaagtgacctggctataaaaatctatctttctgaaagtatcctccttccagactgccatctatgttgaagcaatgctcaaataaaaaaagtttgttgatggaattaatggtcaaagaagcaaagagaaggttacttagtactagccatgtattctggcttttaagtttgggaggtattcttgaatataaaatacaagacattttgagctatggggctctcctcactgctttctcttttgcacttaaaaaaaaaagtgttcactagttatatgaaaataggattttgtacacccaacatttaaagggttgtattgcagttttttagttccaaaatttagagaaatatttttcaagcttcttgtcaggtttctgataacactcctaataaagtggctatagccattaaaaaaaagaaagaagatagatttggatagcacacgatcccttgctttccataattgctttataaggtttagctatccaatcctaggaccaaataggagatacaaattaaatcaacaaaaatttgacaaacattaatgacagtagtgagtattggtaattggaaactaataggaggaatataatctgtcacattgccttaattatctattaccatataacaaattatcctagaagttagcagcttaaaacaacaaacatttggccggtgcggtggcccacacctgtaatcccagcactttgggtggccgaggcgggtggatcacaaggtcaggagatcgagaccatcctggttaacacagtgaaaccccgtctctactaaaaagacaaaaaaaaaattaagccaggcgtgatggcggacgcctgtagtcccagctactcgggaggctgaggcaggagaatggcatgaacccaggaggcggagcttgcagtgagccaagatcacaccactgcactccagcctgagccacagagcgacactccgtctccaaaaaaaaaaaaaaaaaaaaaatttattttatagtttctgtgagttaggaatcctgacacagctgtgttggattctttcaaggtcctctcaaggcccttatcaaggtgttgtcctgggctgcagtcacatttgactagagtagaatacattttgggttttttctttgtttgtttttttgagacagttactcgctctgttgcctaggctggaatgcagtggtgcggatcttggctcactgcaacctctgcctcccaggctcaaatgatcctcccacctcagttccccaagtagctgggaccacaggcatgtcctaccatgcctggataatttttgtatttttcagtagatacagggttttgccatgttgcccaggctggtctcgaactcctgacctaatctgctcgcctcagcctcctgaagtgctgggattatgggcataagccattgtacccggctttcagcatttttaatatatatagtatttcctctgtaaaaaagtacttcatcattcaccaaaatggcaagattaaaaaataataataaagcactttagagtgtattttatttttttatttttttgagacggaatctcgctctgtcgcccaggctggagtgcagtggcgtgatctcggctcactgcaacctccgcctccggttcaagtgattttccggcctcagtctcccaagtagctgggattacaggcatgcaccaccatgcccggctaatctttgtatttttagtagagacagggtttcatcatgttggccaggctggtctcgaactcctgacctcaagtgatccacccacctcggccttccaaagtgcaaggattacaggcgtgagccaccacacccagcccagagtgtattttaaatatgcatgcttttcaatatatataatcataccactgctatctttcataaaaaccgacattgatttgttaatatcaggtatccagacagtgtcgaaattccctatttgtttcataaatggaaaataagttgtgtctacttcataatggagggcagagcaggacttcttttttcctcttcagaacattttctgctttctagagaaatgtggataactctcggggaccaaaggagaccagtgtcagtagagtacaatcctttttttatgttcttttctgcagatacagttggtcccacctggacagatccagatccagggtggacaggctgtgcaggtgcagggccagcagggccagacccagcagatcatcatccagcagccccagacggctgtcactgctggccagactcaggtaattccactagctctgtcacacaggagcaaaactgatttggaagagtcagataactgagtcagatatttcatgtatagcatgtatagtagaaaaggggatgaaaaccataaaaaaatatatttttggccgggcgcggtggctcatgcctgtaatcccagcactttgagaggccgaggcaagctgatcacaaggtcaagagatcaagaacatcctggccaacatggtgaagccccgtcaaaatacaaaaattaggtgggcatggtggcgcatgcctgtaatcccagctactcgggaggctgaggcagagaatcgcttgaacccaggaggcggaggttgcagtgagctgagattgcgccactgcactgcactccagcctggcgacagagtgagactctgtctcaaaaaaataatttttttttttaaggactacatcgttctttgttagtatctttgggatctgttgaattgtgtcattacttatttcctccagacacagcagcagattgctgtccagggacagcaagtggcacagactgctgaagggcagaccatcgtctatcaaccagttaatgcagatggcaccattctccagcaaggtaagtgtacccataagcttccctaggactttttggggcaacttttttgtcccttagacaactgacatctttagaatttgagtggtgaacttgacactacatattttttggacaaaaaaaaaaaagatttcctctagctctccattgattgttggtttcttgtcaccatctgtgaccaacagtgattccatgtgtagcagtttctatagtggttgctaatctagggattgtgtaagcttttagggaagaagtgtttctaaacagaagaatagaaatagggagttcattggtaaagagagaaatagatcaaaaatcaagttggctttagagtgctattgctgcttatgtttttttctgggtcattccattactttaaatgactattatgtatacagcacttttactaagaagggtcctcaaagagcctctagtctagtaagaaagacgtgaacaaataaatacaatgcagggccctcatggaagtatgttctaggaatagataacataaataatagatgtttggtctgggaggaggagtgcagaaactgaacttgaaggcttttggaagcacctgttagtcaaatagttaaatcaaaaaaggacatctttgttagattccatgactttgtgattgcaaatttgcaatatacaggatccagagagtgcactaactgtgtgctcttgtattactccagggaggccctgaactggattgagcccaggcaagagctcaaacagaatggtgaacaaatcctcaagtgctgctattgatagtctggggacttggaatgcttggtttaattttaagttttaatactacaactgactcattgtcagtttgagataaacaaagtataagttttaaaatctctgtcctgaagcagattgctcattatgtacaagagcagtaggtatagctgtagtcagactgacctgtagaagaggaggcctccaaaccttttcaccttttgaaaactgctaaggatagagttactcaaaactgggacctagacagttaatagaatttcaaagattgtgattacttagattatatatagcacaccacagtgggagagtactttttctccccttgtgtttttcagtgtgttttgccaggatcggtgagtgtataccagatagaagagggactaactatgttcccttctttctgttctgtgtgcctgttttttgtttgttttatgttttgttttcttaaagttacagtccctgtttcaggcatgatcactatcccagcagccagtttggcaggagcacagattgttcaaacaggagccaataccaacacaaccagcagtgggcaagggactgtcactgtgacactaccagtggcaggcaatgtggtcaattcaggagggatggtcatggtaagaaaatgtatttttcagctttgtctttgaaattttcttgaacatgcaacttgatgcctcctaaaatttattatgttgacctcttgggattgagatcgatccttaaggcactgtcggtaatctactttgacaataacattatgacaaaccataattcattctgagcacctactatgtgccagggactattcaccagggactattctagatgctggagataaagcaatggataaatagtgattttatggaattcttttcagaattcaaataacgaagggaattatatactaatctttgagaagtggaaagtagtattgcccatgatggacaaaataagaaataagctaaaaattagaaagattgtaattgatagagaaaccaaaaaaaaagtgtcatgtaaatgtattgggaagataggaagatttgggtggtgtaactgaaagctaaatcctcatatgtcaaaataggatgttaaaatgcataaattaagaatgagtaacagaagtctgcacagaggtggaggaagctatgaaaagaaacagaaccaaccctggctcagtggcatgcacctgtagtcctagctacttgggaggctaatccaggaggatggcttaagtccaggagtttgagctcagcctgggcaatgtagagagacctcgtttctacgaattgaatgaaaaataaataatttttataaaagattcaatacagttattcaaagcggttgtatttgggaaagagctgtggggtacaggactctgttacttgtttttacctacatttagtacagtgttttggtgttttttaagaaaaattaggattgaattataagttaactattatttttataaatataggcatttagtagcacttggtctatctatttttgtgctgtttttttgtcttatgactactgttcctgaccattagatggcagcagaaatatctagagccatgggtggacatgaattagggcatggttatatagtttctcagagtggcacctgaatctcctatgacacagtcatctggggtgtttgtttaaagtgcagatctttagtataaatttctccagggatccgcatttacccaagtaccctataaaaattactttttgtggcatttacaaaaaaaatggatgaagaggaaccaagaaactgtttctatgtccatacttcatgccaccaataagctctggtttcctgttcacacagatggttcctggggctggctctgtgcctgctatccaaagaatccctctacctggagcagagatgcttgaagaagagcctctctacgtgaatgccaaacaataccaccgtattcttaagaggaggcaagcccgagctaaactagaggcagaagggaaaattccaaaggagagaagggtatgtataacattgggaaggatataggaaaggagaatagcagggttctacttttgaaattatcttttatatggcttgttttctcacgtaccttccaaacaattgacgttagatacttgttgtctcttttgtaagagttagcatttgttattactaatatgcagctgcagttataataacgaaaacaaacagtggcttaaataagatgttattccttttcatacataaaagtagtccagagataaattatcctggactggtagcacattttcacagttctcaagacctgtttcactgctttaatattgctagtgtgctgttcatggtccaagattcctgcttaggctccagcctaggaagaaagggaacaagaaaggtaccctttcttttttttttttttcctgagactcagtcttgctctgtcatccaggccggagtgcagtggcacaatctcagctcactgcaacctgcaccttccatgttcaagtgattctcctgcctcagcctcctgagtagctgggattacaggtgtgcgccaccacgcccagcttatttttgtgtttttagtagagacggggtttcaccatgttggccaggctggtctcgaactcctgacctcaggtgatccacctgcctgggcctcccaaagtgccgggattataggcgtgagccaccatacccggccaggtaccctttctttcaaggaaactttgaagaagttgtgtaccttccactagccggaatttagttacctgatcacacctaacatgcagataaggctaggaaagtccagcctggtgtggtggcaaatgcctgtagtcctacttggaaggcagaggcaggaggatcacatgagccgaggaattcaaggctgcagtgattcatgatcatgccactgcagtccaacagcaagggtgtcagagtgaaaccctgtttctagaaaataataataataaactttaatgctaggaaagtctttttactgaacactcatttgctcaaacgaaatttggcctgttattaaagcagaggaaagtgtatatattgtgaagtgtaggtggtagtctgttattttttttaaaaaaaattcatactataagcattcacagtcttacagtagttatatatggttagctatattacttactaggtgttttctccaaagcttccatcgtcattctaagtcataattgtcccttgtgactttgatcccagctgtcttaaactttggagaatggaatttgtgcactagataactgtgctggttctggatagtattaatagttaaatggttttatttctcgttttagaaatacctgcatgagtctcggcaccgtcatgccatggcacggaagcgtggtgaaggtggacgatttttctctccaaaggaaaaggatagtccccatatgcaggtaggaagacatatacattttattcttctctttattaccttgtattgacttgagttgaagccttcagcagtgtcctcttgctattttcctactctgggactactcacattctctaaactggatgcaatcttatgtctctttagattatcttttatcttaaaaccactaggccagacttggtggctcatgcctgtaatcccaacactttgggaggctgaggtgggaagcccaggatttcaagaccagcctgggcaacatggcaaaactccatctctacaaaaaaatacaaaaactagccaggcctggtgatgcatgcctgtagtcccagctacttggagggttgagatgctcttcgtctttgtcacttattactattcattctttcttgaaaatcacacttttcttaattttcaaggaacaagttttatttttattgaacaggttttattaccccatcacaaatataatttgaatgtttacttttttcccttctaactgatgtgagcctggtctaatcctctcttctttggcttagatttataaaatagctgcttaatttggtttcccttcttccacttttgttcccctctagcctactctccacatcctagtgtgatctttttaaaatgtttatcctatcaagtccctgttctgctcaagctccttcaacccctaccctttcccatttgcacttagactgacatccaaagtgcttactactatgcccagcaaagccttacatgctccagctcctgtctacctctaactgcatttctacttcttggtctctatgctgctgtttactgttcattggtctacttcctgccacgggtctttgtccttagaattttcagtctgtatgccctttatctttttcatgcatgtctatctccctatctgttaggtctgggtttaattaaataccctatctagaatagatctcttctctctcagtatgttcttacaacatcttttctttttttggaggcagtggtgtgattatggctcactttagtcttgacctcccagctcaagtgatcctcccactttaggctcccgagtagctgggactatagccacgcaccaccatgcccagctaatttttaaattttttgtagaaatggagtctcactttgttgcccaggcaggtctcaaactcctaggctcaagcgatcctctcgccttggcctcccaaagtgctaggattacaggcgcacaccattgcacttggcccttttctttacagtgtaataatatttaagttgttgaatttttcaagattgtttccttcactagactgtaagttgtatagagggtagaggattgtttcgttctctgttatatttattggacttaattctatttaagtaagttgtatttaagtactgacttagatgtatttgttgggtttagtatccagttctgaaccaagcaatcagtgtttcttgaattaatagattcctcccatttgctgatactccattctatattaacatcacattccacttgcactattgcaatatccatcaaattaatctccagtctcctctaattggccttatatagtacttatacagtacatggttaaagtgttttttttaacctgccagtccccaggtcaaggatgcatgctattaatagttctcatttcttaactgcatcaaatctcaaactatttctgtataacatctaagcaactttgccttatcaccccctcaacaatcaaactaggtttcctcagtgtccccacacatgaacactaacaactctttcagtgctattaatcctcacctgtagtgtgagagcccctcctttctcattgctattcattcataacggtgtatgaatgtgggcctgacagctattgtggcaggagggcattgtgccaggaactctcctcattctgtgtgctaacaatatgatcttggtcaattcagcctcttttatttttatctgtaaagtggaatactgttgatacttcacagcaatgttgtagggatttcattcagtaatccacattaggcatctgtgtagcaccatacctagtgcatggtgagttcagtaaatgctagttgtttttgctcattgttcaagacccagttccagtcttccatctccagaaggctttcagctttttctcagatcctgcctaccaaggcttcagagccttggtatgggggaactaaaggtggttcttgcggagtgttgcaaaaagcttccaaggatttatccttgtgttaacacggtaggtcttaagtgagaaacagcatatagagtttagtggaaagaagatgaaatgggagtcaggagatttgggagttagcccttgctggactcctaactttctgaccctgaccctagtccacgcaaatcactttacccatctggccttcagatttatctgtaaaacgagtacattaaagtgtatagattctaatgattctttctagccctgctaagtactcagtatttaaatgatgatcaaaaaacagtgacaaaaatacagcatgacatggtttctctgggtcttttccttagacacctgaatctgaatactcttaacccttaagtatagagaacaacacaaggttcttaggaaagagatacactaacagccctgcagtgtttcaccatggagtgcaggccagactttaaattattttaagaataaggtttattgtctcttctttcctaatggggctacactttaagccatgtatgcagacttaagatgtattacaagcctttgatttacttggtaaagttatgtgtattctcttggggggataagtagtgagagccatgagttcctgttgcttttgcaaaggactttaatcatcatgtcatctttgtctctaggatccaaaccaagccgatgaagaagcaatgacacagatcatccgagtgtcctaaccccacgccatgtgatggagctgatcaaggtcatgtttctcactgttccaggaaattgatcaactcttccaatgggacattgatgatcacattctgccctttactacaggacagaaaccacttagtttttaataagtggctcagtattacaattgcagcgatgcctggcaaattgaagttgcaagcctttgtcttactctttcagtcaggacctatttcagactgttgatgacattgacatttcatggattcggatgatgcaaggagacacatgccaccccagcagtacacaaagcacttaccttgactggtgaagtcagccagccatctcagcagggaagaacaaccttctcaaccaaaactgcaatcaggaaagcagcagcccactccttcccatggaatctagacagcatttatccctctggtgggggaatctcacactgactaactgaatggacgctttgtattcagagatggcttccaggcaaggaagttctatcttgtgatacggaaacaataaattcctgagatacattcttccaatctgtggtaataataagaattcctctctgcccagatggtaggttgatatttctggactctagccaagaaaaagctaattctggggatagaatgataaaagactcaagcactaaaaatatacattgccgaatctctttttctagctttgaaaagttgtggcctgcttgtccctctgttgactggtcatctggaccatcgtacttgctgtggctacttctaagacaatgtagagggttattaaaccttgaaactgcctttcctaagtagagaacaagactattcaacaacttctttgctgaagcactgaggagatttgtaatactcctaaaggaagggccaaactagagattttcaatcatagactttgtgacagcatttggggaactaaaagattcatgtgtttcagcctagtgggagagagtgggggagaggaagagagagagagagcatgtatacccgtatgttatcatagagcacgattctccagtggatggatacctggaatggatcattaagatgaagagagtaattcacatttactctagaacctttaacaagcactgaaaggaagaagcctgagatttgatccttgacaatttctggaaagcactggtcagtcacactgtcctggacagagtccaagttacccactaaagcttgaggtggatgttggcttcactcctgcagcacaatgctggccctagaaagcgagcattttcattcttcccatggcagctgattctttggtgccagttttcatgttttctccataggccttgtgcagaaaggttttctcattgcatccatactgtgagaataaactgcagactgaaagaaacatgcctgcagggtcaggaactgggccactgttcccagaacgggttgtgcctcagaaatctatttctcttttagatgttgaaccctgagagaactaagatgatatttcagaagagttggctgccttctctggaaacaaggaaaacccaataattccgaggaacattgggggttaaataccaagaataaaaattggttcttctttgacttcagcttaactgtattaagacagaaattaagccctctaaaaacaccacaaagagagatgattgtaatgatagaaatagaggtacagagctatgcaaaggaaacaggaagtgaaatattcctagtcccagggatctggtaatcgctcctggcttccagatgtcaaaggactgatcctttggtaagctcactagaaacttctagctctacaagagtttgggatattaatgttattcagtaagtcccaagtttttcagagaatagattactaacaatgaggaatttatattccttggttaatttaggagtctaagatgcagagttcagaaagaaattactcagacctaactttgagtgcttaagctgccaacagttagaagatgctatttatttgtgtctgtaagtttgtacatagtaatgccagccttgttgctgaattttttatttggggggagatgactttgaattttgtttgaaatgcttcagttgtcattttgtcattgcatttcaaatagctcatgacccttttcttgtggtcactttggcacaccatagtagcccacaaagtgggggcagggtattgacatttggattttttctttgatactagttcttttattcatttttatttgtgactgtagtgataactttacagatggagaaagagtgaatggatgaatgaataattggtttaatgcctagttatgcaacttgagtgcttttttttttttttgcaggataattttaagtgtatatattttaactgcactggtacattgaacatgtcagtgtcgatgccactggaccaacagagcattttgtggctatagggtgcctgataataatgtcttgatttttctttgggattcaactatatcgaaggtttttcccccagcagtatgggggcgtacaggtgatcgatcattaatgtcattgcaattgttattttttaaaataaatttataaaaataaccgaaaagtaatgtgacttttgaggaatctgcaactcctgggttctagtttgtgtttccagtgttgaaattttgatctcccccgacaagacttgtctgcatggacggtgtctctgtaaacagtatcaaacttgtaatgtctgagcctcttagctttatctccccttaatttcttcccttttggcccttccaccctgttgaggagattttttctgtcacctgcaggctgatcatacatttgatgctactactgaaagtgtttatcaaaatgtgatgaagtaattccatgaggaaaattagccgttatcacaaaaacagccttaagtattgtagaatttcaggtagtgaagatgtactatttacgttttgttagattttgttttggcagaagaccaaaacaaaagtacttttctgattgttaaaaatccacagcatgctcaccttgttactgttttaccttacggtcgctgggaatctaagcaacaaagactagaagcctccgatatgccattatcaacacacaagagacaaacagcccgaggaagcactcaatgatgagagcagtagacctgccctggcagatgagagaggagaaactctccacaatgaaggaaaagcactgacagtatttgatagctttagtcaaactgtgcttgagtttggcttagatttatgccagtggaacctgtccttaccaaattcagagatgacccaagattctactctgtggtatgagggaaagacctctcgatatttatctcacaccaacggctttatcgtaggagcgtcttcgcctcccccgtttccagtagaaaagacagctttgctcctttgaaagcgcagaccgccgcacctccagccccttctccccggggaagtaggccccgctaagaatgtgggaaggtggtggggcggcgactgaagtcgcttccgattggcgttgtcccaaggaagcctgcgcggattgatcggcggcaggcctccaatagagcctgctaggcggattggctgctacgcggctgggccctgtttccggtacctaggcgggcagccatggtgaccggcgagcggcatgcgacgccgcctctgtggcctgtggaggcccgcttggcggcgctgcttcccgacctactggtctttcggaagcctcggggatgggaacccgagctcgccacggcccagggcgtcctcctaggcgtccatgtgacgggtgagggcgacggccggcacttgcacttaagtctcctggcctgcgggagaggcggccgttgggtctaagcccctggaggcctcgacggttacaggcctagcctcccgcgagctaaggcacagtttaacttcgtgctgcggcttccttaggaaactttgagtatcttcgttttagcgtgggaggacatcttttgggatgaaccggctcagtccttgagctcaccccaaagatgatgaaattgaaactcagaggaaaggatttttacaggaccacgccccgggctttgaacccgtttttcccaaccccgagcattttctattaagcgttctgtttcaattattttattcgttcagttaattcgttcttggcgtcataagtatatgcccgccgttgttctggccgtagctatctagcagccactccgcgagtcgttcatttaacaaatacttactctgtgtcagggatatgaagatgggtaataccaggtgcctgtcctcactgtgtgagtggttctctagccagacatgaggagggatcctattgtttcccatagctaggcagcctaagagagtaggggaaagagctggctccagatgaaaagggcaccatctccagctcttggaagcagagagggtggtcctttggattcccagtggcagcagcaaccaacctggcccttagtagtttctaagttacaccatgttaatggataaaggaattactcagcttgaagggatctgtttcctttacactggcctgatgtgtggggagaaaggggccaaaaagtttaggatttggagttaacatcgtaatttctgctttgttggtcagggtttacagcattaatggacaggttcaccctgacctacaagtcggaacgtgacatggacaaactggcccatatcttcagttattacattagtgacatcgtggagcgtgagtgatcattgtagggtaacaaggtgtggtgctgggctcctgggggtttataaaagaagggggccagaagtactttaaaacaggtaccaaagggtcattcctttagcatcattcatctttggtttcttcaagttgccactgaaaagctagacctttgcctattatctgctaatctacccagtctcacattctattgactcattgttcaaagggggggcaggaggagctaatttcctttgcacatttgtattttatttcaaaataaagtattctcttctaacaataacgtatctcaagtgtgtattcagacaaaatttataaaacatctttttattattatattttgatcctgtgaggaaggaataggtgttttcttattttctgccatgtattaagcttttagatatttgccagatatccagtatctggaaaaaactcatttatgtagtacccatgttttgagtacctaccctgtgacatggactgtaataggtgcaggcagggcaagaacccactcttgaactttttagttaggcctacccaacagaaattactctgaccttataccttttagtacttacgtaacattctcatcctttactgacagtgccctgtatgcttccgtccatcattctgagattcaccagaataattactttgaggcatctccgttaagaatttgattatttgacttacctcttatccttaaggaacacatggaaggtcgtttgctttttcttataggtttggatgaaggggaagataaacattctatatcgtgtatgtactctaataccagcaacttctgggtactagaactacaggggaaagtaagacagagtaccctcgtggagtttccattttagtgggacagacaataaacacaataattgtagcttatatattctatcaaggaaataaacatagtatagtggtaaaaaaaaaacacaaaaaataattttagggtaggggagtatatgagacagggtggtcataggctcctctgaggaggtattatttaagctgacacttgaaggatgaggggaacagcttgtgaagaactaggggtaaagcatttcagacagaataccaagtgcaaaggtcctgagacaggagaaagctcggcatgctctaggagctaaaagaaggccagtgcaggccaaaacgtagctcgcagggtgaagagtggtttgaggcaaggttgggggatggtagctatgagaccaccacgctctgtagtccatagtgaagagttggaattatatatttctgtataaaggaaaactgtggaaaggtctagcaggggagtaatatgatctgattaacactttaaagctgattttggctaccttgtggagattgaatgctggtggaaagtgaatttaagaatagaagctggaagaggcaattgtcctggaaagatgttggagatttggtctagagcagtggttctcaacctcagctgtggttgcctgaggagctttttaattgttttttcttttttctttttttttttttgtaagagactggggtctcagtatgttgccaagtttgtcttgaactctagagcttaaaagattcttctgcctcaacctctcaaatagctaggactgcaggtaccataccaccttgtctaacaaaaaatcttaatgcctaagcttcaccccaggccatttaaatcggactttcttaaggttggcccaggaataagaccttttaaagtttcataggcaattccaatgtgcggtcaagactgaagattgttggtgtagaggtatggcaggggagctgtgtggggtagattaacctgaaatatattttgcaggttcaacagacaggagttgctaatacgttgaatttcagtgggaagtggtgagaaaaaggactcagttttttggctttcataaatgaattgatcgtgtcatttaccaagacaggaaagactgaacattgagaaagaaaatcaagagttctgttttgagtatgttgagtttgagatgccaataagtcattcaagtggagaatgactccattcaagtggagaatccagctatgattgagcctggagctcagagaagagatccctgttagagatgaaaatgtgagttgatggcataaagtgggacttaaagttaagaaccgattgagttcatgttgggagagcataaataaagagaaagagcctttggctgaggcttgaggaactccaggggaggattatgataagggagaaagaacctgaaaaagagactacaaacagccagtgaggtaggatattgtggtgttcctgaagccaaaggagaggtagtgtctctagaagaaagctgcagctagctgggttgaaaatgacagctgtcaagtacagtgaggtcagagaggtattgaatttagcaagattaatgctgttgatgaccttgataatttgaagtggtggaggtagaagtcagagtggagtaagctgagaaaaagaatgacagagaaaacatttaagaggaagagtaaatgggagatgaggaaaatatatatagccaacttttttgagatttgggggttttgtttgttgtgaatgtagcaggaaaaaaaatggagctaataggcagaagataaggtagaaccaagaatatgtgggttatttttgtgtgttttggttttgttttttaagctattgatgagaatatttcagtagagagattaggaacggtgtgaagttcttgagaaggtaaaaggggataagattcctatcacaaatggggtggctttgaagagagcaggaattcttccattttagaaacgatgtatgtaggtgcagatagatttggggagaaaatgaaaagaaggaagaaggagcctgagtcttggagtgagcaaatggacaagaatgatgtcaggataaactcagtaggccattcttttgaccatatatgattctgccctgatctggtttatatctgattttgactcattttcctctctcttccttacttgatttcagatgttctctgttttggaggggatatcctaaatatcacaggtatttttttagtttttctgaatacttaaaagactgagtgaggaggactatatttaggtggaattcagcatattggtttattcagcattgtttgattaataggtactggaccctggggatacaaagatgaggaagacatagtctgtgcctcaaaggatcccccagtctaatggaaaagctttgcccaaattaaactctcacatgctttgcatttttgtttagattgaaggacagcaaaataagtgccaataaagcgttcttgagaaaactaatgagaaatttggtcattaatagcagaagctaagcatgagatggggaggagttaagcatgtcctatctggagaactcaggatcactaacagctgtatgccccggagttggcctgtcttcttatttaaacataataaaaccagccatcaaattagatatgaacttgaacccacattttatgaatcttttgctagtacctctcctcctctgttagtatactggtggaaggaagattaccaaaaatatccttaggatcatttaaacttctacctagttacgtttttactgaatgattttgaggatctgaagcagtattttaacctagcataatgtatacagccaagaaaccttgcctgataacttacttgatatccacactgggtcaagttgatcttctgcattactgggactttgccctggaccaagtaagtctagatatttggtccccatcagcctatcctgtgtgtctgcagggaacatgctcctggcactctggagagtagaacaaaatcaactgagtgacatcattaccttggtggcaaaatgcagtctggagatacaggagaaatttgggatctatcataccagggaaggccaggacctgcagttaaagataggtagtacctcctaaaagagtgatccagttgggcaagggggaacccactataaaaacctcaaaagataaatgataaactgggaaaaaatgtttgcaattcatatagacaaagggtgaattgctctactagggaaagagcacttagaaatcaagaaaacaatagtactcttaagagaaaaattggacaaaggacatgagtaaattgtatatagacaaggaaatgcatgtcttttaacacgtaaaaagatgatcaacattcataataagaaaaatgccaattggaagtacactgactacctgtcttacctatagataggcaaaacttcagatgctggacaatgtactctttggtgagtctgaggaatgagctttttcttactgtgagtgaacaacggtataaggtgatttggcaatctttatttatttttattgtctattgtattttttatgtcaacaaaaactaaaccatataaaaatatatattaaaaagtcttgttttcacttatataccatctatactatttactcttacaagtgcatttattccttaacctagcaatccttctggacatctataggtatacgttcacacatctgaaatgttgcatgtgcaaggttattgattgtaatatggtttgtaattttaaaacattgaaaactatttataggagactggttaagtaaataatatgtatactcaataagattacctgcaacttaaaaaaaataagatgtcttgatatggcagtatctccaagatacagttaagtgaaaaaaagtaagatacaaaacagcatgtttagtatgctaccatttgtgtaaggaggaaaataagaatttttcttatttgtttatatctttttttttttttgagatggagtcttgctctgtcacccaggctggagtgcagtggcgccatctcagctcactgcaagctccacctcccgggatcacaccattctcctgcctcagcctcctactgagtagctgggactacaggagcctgccaccacgcctggctaatttttttgtatttttagtagagacagggtttcaccgtgttagccaggatgttctcgatctcctgacctcgtgttccgcccgcctcggcctcccaaagtgctggaattacagacttgagccaccgcacctggcctatttgtttatatcttgtataaagaaacactggaaaaaatatataagaaactaataaaattactaatatcaggaaaatagtaaagatggtcatgtaggtagaagcaagattttaaaatacatattctttcatatagtttagtttttgaactatgttattgcttgacagaatcaaaaatataatacaatataataaaaattaaaaagctacatacaggggccaaagtttcaccaatggcagagtcaggattggaggcgaagctcaatatacaaagctccttcacaagggttcagaaaactcctcaagggcaaaagttggctccagctattcttttatgttttgaggagcagtggtaaaggattatattctgtcttatatggcatctcttttgtcctgccgtcttttttgtttcttttggtttttgttgtattaaggataattgatactatacattggcatatttatacacttttgaaaccatcaccacaataaagatagtgaacatacttatcactcaaaaagtctcctcgtgcccctttgtacattcttccactactctccttcaccatctccagacagacaaaatgtccatctccaggtgtattatataagagaaggaaatctgggggaagaattttttttttttttttttgagatggagtctcactctgttgcccaggctggcatgcagtggcacggtcttggctcactgcaacctccgcctccagggttcaagcaattcttctgcctaagcctcctgagtagctgggattataggtgtgcaccaccacgcctggctaatttttttttttttttttgtatttttagtagagacagggtttcaccatgttggtcaggctagtctcgagttcccaacctcaggtcatctgcccgtctcagcctcccaaagtgctgggattacaggcgtgagccaccgtgcctggccgtaaggtattatttttaaaggttagctcacctaagacttccgcagctgagggcagtaacaagataggcatgatgcacagagccatgtggggattccagacccctcctgttgcatagtttcccagttgaatttgactcttctccatttatctcatttttttctggataggtctacctgcaagtcggatttcccaggttattgttggagatgagcggcagcaatacctcttggtgattgggcaggttgtagtgatgtccagttagctcagcgtttggctcaggcgaatgaaattgtcctatcctggaactgctggatgctttgcaagcagtatatgtttgaagtggcaatcatgagggaggatgaagctgtgaaggtaggaggctagcttcctgtactgccattctgaaaaggccttcctagtacacagcgcaatgctctggtagtgttcacatattgcctggccaaaccaatgaccattggaactcaatttaggagggaggctgggaatattctcctatgaagatagatgaggtagaacagtgaggctgaggagataaaaggcaaacaagggcaatagaatcctcagcctttcttgtgtgggggcacagaattaaacagtttcctttctgtagttaagagatatgtggatc

SEQ ID NO: 602 - DNA, 415 bp, Homo sapiens
  misc_feature (337)..(337): n is a, c, g, or t
  misc_feature (363)..(363): n is a, c, g, or t
  misc_feature (376)..(376): n is a, c, g, or t
  misc_feature (384)..(384): n is a, c, g, or t
  misc_feature (393)..(393): n is a, c, g, or t
  misc_feature (399)..(399): n is a, c, g, or t
  misc_feature (405)..(405): n is a, c, g, or t
  misc_feature (411)..(411): n is a, c, g, or t
gtggtgaaagcctataccacacgtgtgggcatcggggccttccccaccgagcagatcaacgagattggaggcctgctgcagacccgcggccacgagtggggagtgaccacaggcaggaagaggcgctgcggctggctcgacctgatgattctaagatatgctcacatggtcaacggattcactgcgctggccctgacgaagctggacatcctgggacgtactgggtgaggttaaagtcggtgtctcatacaagctgaacggggaaaaggattccctatttcccagctaaccagggagatgctttcagaaggttcgaagtttgagtattgaaacgttncctggggttggaaaagcagacaaccncagggcgccaggnagttgggnaggactttncccccnaaaggnccccanattt

SEQ ID NO: 603 - DNA, 1991 bp, Homo sapiens
acaggggtgaaggcccagagaccagcagaacggcatcccagccacgacggccactttgctctgtctgctgtccgccacggccctgctctgttccctgggacacccccgcccccacctcctcaggctgcctgatctgcccagctttccagctttcctctggattccggcctctggtcatccctccccaccctctctccaaggccctctcctggtctcccttcttctagaaccccttcctccacctccctctctgcagaacttctcctttaccccccaccccccaccactgccccctttccttttctgacctccttttggagggctcagcgctgcccagaccataggagagatgtgggaggctcagttcctgggcttgctgtttctgcagccgctttgggtggctccagtgaagcctctccagccaggggctgaggtcccggtggtgtgggcccaggagggggctcctgcccagctcccctgcagccccacaatccccctccaggatctcagccttctgcgaagagcaggggtcacttggcagcatcagccagacagtggcccgcccgctgccgcccccggccatcccctggcccccggccctcacccggcggcgccctcctcctgggggcccaggccccgccgctacacggtgctgagcgtgggtcccggaggcctgcgcagcgggaggctgcccctgcagccccgcgtccagctggatgagcgcggccggcagcgcggggacttctcgctatggctgcgcccagcccggcgcgcggacgccggcgagtaccgcgccgcggtgcacctcagggaccgcgccctctcctgccgcctccgtctgcgcctgggccaggcctcgatgactgccagccccccaggatctctcagagcctccgactgggtcattttgaactgctccttcagccgccctgaccgcccagcctctgtgcattggttccggaaccggggccagggccgagtccctgtccgggagtccccccatcaccacttagcggaaagcttcctcttcctgccccaagtcagccccatggactctgggccctggggctgcatcctcacctacagagatggcttcaacgtctccatcatgtataacctcactgttctgggtctggagcccccaactcccttgacagtgtacgctggagcaggttccagggtggggctgccctgccgcctgcctgctggtgtggggacccggtctttcctcactgccaagtggactcctcctgggggaggccctgacctcctggtgactggagacaatggcgactttacccttcgactagaggatgtgagccaggcccaggctgggacctacacctgccatatccatctgcaggaacagcagctcaatgccactgtcacattggcaatcatcacagtgactcccaaatcctttgggtcacctggatccctggggaagctgctttgtgaggtgactccagtatctggacaagaacgctttgtgtggagctctctggacaccccatcccagaggagtttctcaggaccttggctggaggcacaggaggcccagctcctttcccagccttggcaatgccagctgtaccagggggagaggcttcttggagcagcagtgtacttcacagagctgtctagcccaggtgcccaacgctctgggagagccccaggtgccctcccagcaggccacctcctgctgtttctcacccttggtgtcctttctctgctccttttggtgactggagcctttggctttcacctttggagaagacagtggcgaccaagacgattttctgccttagagcaagggattcaccctccgcaggctcagagcaagatagaggagctggagcaagaaccggagccggagccggagccggaaccggagcccgagcccgagcccgagccggagcagctctgacctggagctgaggcagccagcagatctcagcagcccagtccaaataaacgtcctgtctagcagc

SEQ ID NO: 604 - protein, 525 aa, Homo sapiens
MWEAQFLGLLFLQPLWVAPVKPLQPGAEVPVVWAQEGAPAQLPCSPTIPLQDLSLLRRAGVTWQHQPDSGPPAAAPGHPLAPGPHPAAPSSWGPRPRRYTVLSVGPGGLRSGRLPLQPRVQLDERGRQRGDFSLWLRPARRADAGEYRAAVHLRDRALSCRLRLRLGQASMTASPPGSLRASDWVILNCSFSRPDRPASVHWFRNRGQGRVPVRESPHHHLAESFLFLPQVSPMDSGPWGCILTYRDGFNVSIMYNLTVLGLEPPTPLTVYAGAGSRVGLPCRLPAGVGTRSFLTAKWTPPGGGPDLLVTGDNGDFTLRLEDVSQAQAGTYTCHIHLQEQQLNATVTLAIITVTPKSFGSPGSLGKLLCEVTPVSGQERFVWSSLDTPSQRSFSGPWLEAQEAQLLSQPWQCQLYQGERLLGAAVYFTELSSPGAQRSGRAPGALPAGHLLLFLTLGVLSLLLLVTGAFGFHLWRRQWRPRRFSALEQGIHPPQAQSKIEELEQEPEPEPEPEPEPEPEPEPEQL

SEQ ID NO: 605 - DNA, 268 bp, Homo sapiens
  misc_feature (59)..(59): n is a, c, g, or t
  misc_feature (107)..(107): n is a, c, g, or t
  misc_feature (169)..(169): n is a, c, g, or t
  misc_feature (179)..(179): n is a, c, g, or t
  misc_feature (227)..(227): n is a, c, g, or t
  misc_feature (237)..(237): n is a, c, g, or t
  misc_feature (264)..(264): n is a, c, g, or t
catgcgagcaaaggtacaagggtgtgcacaaggatgtttcatcgagtagagtataaagnatttgtgggaataatccttcctgtaagcaagtttcctttaaaatatgnttgagagtgataaaatcaaattagacttacagagtaaacacatatgagcgtgtgtgtgtgtntgtgtatttngccaaaaccaaaagcttgtcaataactataattatggtaaaacttctnttctataaanaaccagcatgctgtcttccccattgtncccc

SEQ ID NO: 606 - DNA, 1901 bp, Homo sapiens
aaaaaacagcagggttagcttgtccctcccctccctcttcagcttcccagacactgattctggaatgaaaattcacctgcctctgagttggctcctaatgggggtgggagtgttacttcggttcccaggttggaagattatctcacccggccccagctatataagctgaccggtgtggaggggcccagcagggccaactccagggattccttccacgacagaaaaacatacaagactccttcagccaacatgatggtactgaaagtagaggaactggtcactggaaagaagaatggcaatggggaggcaggggaattccttcctgaggatttcagagatggagagtatgaagctgctgttactttagagaagcaggaggatctgaagacacttctagcccaccctgtgaccctgggggagcaacagtggaaaagcgagaaacaacgagaggcagagctcccaaagaaaaaactagaacaaagatccaagcttgaaaatttagaagaccttgaaataatcattcaactgaagaaaaggaaaaaatacaggaaaactaaagttccagttgtaaaggaaccagaacctgaaatcattacggaacctgtggatgtgcctacgtttctgaaggctgctctggagaataaactgccagtagtagaaaaattcttgtcagacaagaacaatccagatgtttgtgatgagtataaacggacagctcttcatagagcatgcttggaaggacatttggcaattgtggagaagttaatggaagctggagcccagatcgaattccgtgatatgcttgaatccacagccatccactgggcaagccgtggaggaaacctggatgttttaaaattgttgctgaataaaggagcaaaaattagcgcccgagataagttgctcagcacagcgctgcatgtggcggtgaggactggccactatgagtgcgcggagcatcttatcgcctgtgaggcagacctcaacgccaaagacagagaaggagataccccgttgcatgatgcggtgagactgaaccgctataagatgatccgactcctgattatgtatggcgcggatctcaacatcaagaactgtgctgggaagacgccgatggatctggtgctacactggcagaatggaaccaaagcaatattcgacagcctcagagagaactcctacaagacctctcgcatagctacattctgaggcaaacgacagactcttaatcagtaaatgttcactggcattttgaaggcatggcccaggagaagagacactagccataaaatctagtttctatttatcaacgtgttgtgaagatgtacctaatgaagttttgagaaagcacagggttataggtgtttaaatttcctttagtgaaactcttatttatttttatgtattcctgtttatttatttactgccacgctactgatattcagaccttcatgatcatccatctggtgagcagagcttcatttgtatataacactttcagagccttcccacccataggtagttcttaaaccaggtgaaagagcaaagttcaagtgcctacttatgtgtcattcgctcatgtaagagtttttaagagagggctgattatcacagccctcttttctcctgaatttttaatgcagaagtttgaatgaagcaagggaaggcatgtagggacaggaaaggaaacaatggaaggaaagtgattctgtgaaaaggacagtgaagccagctattttacccccaggctggattttttttttttttttttttttttttttttttaccgagtacacagagtacccaagtgaagagaacgtcatgagtgtaagtgcaaatcagtggaaggagcggcaaactgggacatgcagaattgaatttgctcaaaaaaaaaaaaaaaa

SEQ ID NO: 607 - protein, 319 aa, Homo sapiens
MMVLKVEELVTGKKNGNGEAGEFLPEDFRDGEYEAAVTLEKQEDLKTLLAHPVTLGEQQWKSEKQREAELPKKKLEQRSKLENLEDLEIIIQLKKRKKYRKTKVPVVKEPEPEIITEPVDVPTFLKAALENKLPVVEKFLSDKNNPDVCDEYKRTALHRACLEGHLAIVEKLMEAGAQIEFRDMLESTAIHWASRGGNLDVLKLLLNKGAKISARDKLLSTALHVAVRTGHYECAEHLIACEADLNAKDREGDTPLHDAVRLNRYKMIRLLIMYGADLNIKNCAGKTPMDLVLHWQNGTKAIFDSLRENSYKTSRIATF

SEQ ID NO: 608 - DNA, 3703 bp, Homo sapiens
gaattcttagttgttttctttagaagaacatttctagggaataatacaagaagatttaggaatcattgaagttataaatctttggaatgagcaaactcagaatggtgctacttgaagactctggatctgctgacttcagaagacattttgtcaacctgagtcccttcaccattactgtggtcttacttctcagtgcctgttttgtcaccagttctcttggaggaacagacaaggagctgaggctagtggatggtgaaaacaagtgtagcgggagagtggaagtgaaagtccaggaggagtggggaacggtgtgtaataatggctggagcatggaagcggtctctgtgatttgtaaccagctgggatgtccaactgctatcaaagcccctggatgggctaattccagtgcaggttctggacgcatttggatggatcatgtttcttgtcgtgggaatgagtcagctctttgggattgcaaacatgatggatggggaaagcatagtaactgtactcaccaacaagatgctggagtgacctgctcagatggatccaatttggaaatgaggctgacgcgtggagggaatatgtgttctggaagaatagagatcaaattccaaggacggtggggaacagtgtgtgatgataacttcaacatagatcatgcatctgtcatttgtagacaacttgaatgtggaagtgctgtcagtttctctggttcatctaattttggagaaggctctggaccaatctggtttgatgatcttatatgcaacggaaatgagtcagctctctggaactgcaaacatcaaggatggggaaagcataactgtgatcatgctgaggatgctggagtgatttgctcaaagggagcagatctgagcctgagactggtagatggagtcactgaatgttcaggaagattagaagtgagattccaaggagaatgggggacaatatgtgatgacggctgggacagttacgatgctgctgtggcatgcaagcaactgggatgtccaactgccgtcacagccattggtcgagttaacgccagtaagggatttggacacatctggcttgacagcgtttcttgccagggacatgaacctgctgtctggcaatgtaaacaccatgaatggggaaagcattattgcaatcacaatgaagatgctggcgtgacatgttctgatggatcagatctggagctaagacttagaggtggaggcagccgctgtgctgggacagttgaggtggagattcagagactgttagggaaggtgtgtgacagaggctggggactgaaagaagctgatgtggtttgcaggcagctgggatgtggatctgcactcaaaacatcttatcaagtgtactccaaaatccaggcaacaaacacatggctgtttctaagtagctgtaacggaaatgaaacttctctttgggactgcaagaactggcaatggggtggacttacctgtgatcactatgaagaagccaaaattacctgctcagcccacagggaacccagactggttggaggggacattccctgttctggacgtgttgaagtgaagcatggtgacacgtggggctccatctgtgattcggacttctctctggaagctgccagcgttctatgcagggaattacagtgtggcacagttgtctctatcctggggggagctcactttggagagggaaatggacagatctgggctgaagaattccagtgtgagggacatgagtcccatctttcactctgcccagtagcaccccgcccagaaggaacttgtagccacagcagggatgttggagtagtctgctcaagatacacagaaattcgcttggtgaatggcaagaccccgtgtgagggcagagtggagctcaaaacgcttggtgcctggggatccctctgtaactctcactgggacatagaagatgcccatgttctttgccagcagcttaaatgtggagttgccctttctaccccaggaggagcacgttttggaaaaggaaatggtcagatctggaggcatatgtttcactgcactgggactgagcagcacatgggagattgtcctgtaactgctctaggtgcttcattatgtccttcagagcaagtggcctctgtaatctgctcaggaaaccagtcccaaacactgtcctcgtgcaattcatcgtctttgggcccaacaaggcctaccattccagaagaaagtgctgtggcctgcatagagagtggtcaacttcgcctggtaaatggaggaggtcgctgtgctgggagagtagagatctatcatgagggctcctggggcaccatctgtgatgacagctgggacctgagtgatgcccacgtggtttgcagacagctgggctgtggagaggccattaatgccactggttctgctcattttggggaaggaacagggcccatctggctggatgagatgaaatgcaatggaaaagaatcccgcatttggcagtgccattcacacggctgggggcagcaaaattgcaggcacaaggaggatgcgggagttatctgctcagaattcatgtctctgagactgaccagtgaagccagcagagaggcctgtgcagggcgtctggaagttttttacaatggagcttggggcactgttggcaagagtagcatgtctgaaaccactgtgggtgtggtgtgcaggcagctgggctgtgcagacaaagggaaaatcaaccctgcatctttagacaaggccatgtccattcccatgtgggtggacaatgttcagtgtccaaaaggacctgacacgctgtggcagtgcccatcatctccatgggagaagagactggccagcccctcggaggagacctggatcacatgtgacaacaagataagacttcaggaaggacccacttcctgttctggacgtgtggagatctggcatggaggttcctgggggacagtgtgtgatgactcttgggacttggacgatgctcaggtggtgtgtcaacaacttggctgtggtccagctttgaaagcattcaaagaagcagagtttggtcaggggactggaccgatatggctcaatgaagtgaagtgcaaagggaatgagtcttccttgtgggattgtcctgccagacgctggggccatagtgagtgtgggcacaaggaagacgctgcagtgaattgcacagatatttcagtgcagaaaaccccacaaaaagccacaacaggtcgctcatcccgtcagtcatcctttattgcagtcgggatccttggggttgttctgttggccattttcgtcgcattattcttcttgactaaaaagcgaagacagagacagcggcttgcagtttcctcaagaggagagaacttagtccaccaaattcaataccgggagatgaattcttgcctgaatgcagatgatctggacctaatgaattcctcaggaggccattctgagccacactgaaaaggaaaatgggaatttataacccagtgagttcagcctttaagataccttgatgaagacctggactattgaatggagcagaaattcacctctctcactgactattacagttgcatttttatggagttcttcttctcctaggattcctaagactgctgctgaatttataaaaattaagtttgtgaatgtgactacttagtggtgtatatgagactttcaagggaattaaataaataaataagaatgttaaa

SEQ ID NO: 609 - protein, 1116 aa, Homo sapiens
MVLLEDSGSADFRRHFVNLSPFTITVVLLLSACFVTSSLGGTDKELRLVDGENKCSGRVEVKVQEEWGTVCNNGWSMEAVSVICNQLGCPTAIKAPGWANSSAGSGRIWMDHVSCRGNESALWDCKHDGWGKHSNCTHQQDAGVTCSDGSNLEMRLTRGGNMCSGRIEIKFQGRWGTVCDDNFNIDHASVICRQLECGSAVSFSGSSNFGEGSGPIWFDDLICNGNESALWNCKHQGWGKHNCDHAEDAGVICSKGADLSLRLVDGVTECSGRLEVRFQGEWGTICDDGWDSYDAAVACKQLGCPTAVTAIGRVNASKGFGHIWLDSVSCQGHEPAVWQCKHHEWGKHYCNHNEDAGVTCSDGSDLELRLRGGGSRCAGTVEVEIQRLLGKVCDRGWGLKEADVVCRQLGCGSALKTSYQVYSKIQATNTWLFLSSCNGNETSLWDCKNWQWGGLTCDHYEEAKITCSAHREPRLVGGDIPCSGRVEVKHGDTWGSICDSDFSLEAASVLCRELQCGTVVSILGGAHFGEGNGQIWAEEFQCEGHESHLSLCPVAPRPEGTCSHSRDVGVVCSRYTEIRLVNGKTPCEGRVELKTLGAWGSLCNSHWDIEDAHVLCQQLKCGVALSTPGGARFGKGNGQIWRHMFHCTGTEQHMGDCPVTALGASLCPSEQVASVICSGNQSQTLSSCNSSSLGPTRPTIPEESAVACIESGQLRLVNGGGRCAGRVEIYHEGSWGTICDDSWDLSDAHVVCRQLGCGEAINATGSAHFGEGTGPIWLDEMKCNGKESRIWQCHSHGWGQQNCRHKEDAGVICSEFMSLRLTSEASREACAGRLEVFYNGAWGTVGKSSMSETTVGVVCRQLGCADKGKINPASLDKAMSIPMWVDNVQCPKGPDTLWQCPSSPWEKRLASPSEETWITCDNKIRLQEGPTSCSGRVEIWHGGSWGTVCDDSWDLDDAQVVCQQLGCGPALKAFKEAEFGQGTGPIWLNEVKCKGNESSLWDCPARRWGHSECGHKEDAAVNCTDISVQKTPQKATTGRSSRQSSFIAVGILGVVLLAIFVALFFLTKKRRQRQRLAVSSRGENLVHQIQYREMNSCLNADDLDLMNSSGGHSEPH

SEQ ID NO: 610 - DNA, 350 bp, Homo sapiens
  misc_feature (48)..(48): n is a, c, g, or t
  misc_feature (260)..(260): n is a, c, g, or t
  misc_feature (265)..(265): n is a, c, g, or t
  misc_feature (306)..(306): n is a, c, g, or t
ctttttacatggccacaggtctcttcagtcaggggaacttcagctggngcctctctcttgcagctatgaggcgacagtgtggtgacatgcctcatacagactgtcccagtaagccaggacaagtcaccattaaaatcttgcatgaacagccctgggcacgtgggaatgttaagaaagagccaccgcctccttagtcagcttaaccacagctccaaacgcagtttgtcccagctggcaaacgcctcaaacaccaatcatgngtcgngctcctattctgggtttttataaaacacttttatatagcgntataggtagcacagtaaatgtgcttctgatgcactctaacaata

SEQ ID NO: 611 - DNA, 616 bp, Homo sapiens
taggcaggaggaggcctggggtaatcggacgagggcgggagctacggggccaggagtgtgttaaagtagtgcttctaccaacatgtcccgtggttccagcgccggtttagaccgccacattaccattttttcacccgagggtcggctctaccaagtagaatatgcttttaaggctattaaccagggtggccttacatcagtagctgtcagagggaaagactgtgcagtaattgtcacacagaagaaagtacctgacaaattattggattccagcacagtgactcacttattcaagataactgaaaacattggttgtgtgatgaccggaatgacagctgacagcagatcccaggtacagagggcacgctatgaggcagctaactggaaatacaagtatggctatgagattcctgtggacatgctgtgtaaaagaattgccgatatttctcaggtctacacacagaatgctgaaatgaggcctcttggtgatgtatgattttaatcggtatagatgaagagcaaggccctcaggtatataagtgtgatcctgcaggttactactgtgggtataaagacactgcagcgggagttaaacaaactgagtcaccagcttaca

SEQ ID NO: 612 - DNA, 1770 bp, Homo sapiens
gaggagtggattacatattccaacagttgttattacattggtaaggaaagaagaacttgggaagaaagagtttgctggcctgtgcttcgaagaactctgatctgctttctatagataatgaggaagaaatggtatgtgtggggacttcccagttggctgtaagttgccatttgaactaaacgaaatagatcaggaactgaggacatatctaaattttctagttttatagaaggcttttatccacaagaatcaagatcttccctctctgagcaggaatcctttgtgcattgaagactttagattcctctctgcggtagacgtgcacttataagtatttgatggggtggattcgtggtcggaggtctcgacacagctgggagatgagtgaatttcataattataacttggatctgaagaagagtgatttttcaacacgatggcaaaagcaaagatgtccagtagtcaaaagcaaatgtagagaaaatgcatctccattttttttctgctgcttcatcgctgtagccatgggaatccgtttcattattatggtagcaatatggagtgctgtattcctaaactcattattcaaccaagaagttcaaattcccttgaccgaaagttactgtggcccatgtcctaaaaactggatatgttacaaaaataactgctaccaattttttgatgagagtaaaaactggtatgagagccaggcttcttgtatgtctcaaaatgccagccttctgaaagtatacagcaaagaggaccaggatttacttaaactggtgaagtcatatcattggatgggactagtacacattccaacaaatggatcttggcagtgggaagatggctccattctctcacccaacctactaacaataattgaaatgcagaagggagactgtgcactctatgcctcgagctttaaaggctatatagaaaactgttcaactccaaatacatacatctgcatgcaaaggactgtgtaaagatgatcaaccatctcaataaaagccaggaacagagaagagattacaccagcggtaacactgccaaccgagactaaaggaaacaaacaaaaacaggacaaaatgaccaaagactgtcagatttcttagactccacaggaccaaaccatagaacaatttcactgcaaacatgcatgattctccaagacaaaagaagagagatcctaaaggcaattcagatatccccaaggctgcctctcccaccacaagcccagagtggatgggctgggggaggggtgctgttttaatttctaaaggtaggaccaacacccaggggatcagtgaaggaagagaaggccagcagatcagtgagagtgcaaccccaccctccacaggaaattgcctcatgggcagggccacagcagagagacacagcatgggcagtgccttccctgcctgtgggggtcatgctgccacttttaatgggtcctccacccaacggggtcagggaggtggtgctgccccagtgggccatgattatcttaaaggcattattctccagccttaagatcttaggacgtttcctttgctatgatttgtacttgcttgagtcccatgactgtttctcttcctctctttcttccttttggaatagtaatatccatcctatgtttgtcccactattgtattttggaagcacataacttgtttggtttcacaggttcacagttaagaaggaattttgcctctgaataaatagaatcttgagtctcatgcaaaaaaaaaaaaaaaaaaaaaaaaa

SEQ ID NO: 613 - protein, 216 aa, Homo sapiens
MGWIRGRRSRHSWEMSEFHNYNLDLKKSDFSTRWQKQRCPVVKSKCRENASPFFFCCFIAVAMGIRFIIMVAIWSAVFLNSLFNQEVQIPLTESYCGPCPKNWICYKNNCYQFFDESKNWYESQASCMSQNASLLKVYSKEDQDLLKLVKSYHWMGLVHIPTNGSWQWEDGSILSPNLLTIIEMQKGDCALYASSFKGYIENCSTPNTYICMQRTV

SEQ ID NO: 614 - DNA, 442 bp, Homo sapiens
acacagctgggattctgtagtgtttatattgtcttgttagctgaaaatgtgaaacaagttcatgaaggattcctggagagtaaagtgtttatttcaaatagtaccaattcatcaaacccttgtgagagaagaagtgttgacctaaggatatatatgctttgctttcttccatttataattcttttggtcttcattcgtgaactaaagaatctatttgtactttcattccttgccaacgtttccatggctgtcagtcttgtgataatttaccagtatgttgtcaggaacatgccagatccccacaaccttccaatagtggctggttggaagaaatacccactcttttttggtactgctgtatttgcttttgaaggcataggagtggtccttccactggaaaaccaaatgaaagaatcaaagcgtttccctcaagcgttgaata

SEQ ID NO: 615 - DNA, 1607 bp, Homo sapiens
atgacccaggcaggccggcggggtcctggcacacccgagccgcgtccgcgaacacagcccatggcctccccgcgcctagggaccttctgctgccccacgcgggacgcagccacgcagctcgtgctgagcttccagccgcgggccttccacgcgctctgcctgggcagcggcgggctccgcttggcgctgggccttctgcagctgctgcccggccgccggcccgcgggccccgggtcccccgcgacgtccccgccggcctcggtccgcatcctgcgcgctgccgctgcctgcgaccttctcggctgcctgggtatggtgatccggtccaccgtgtggttaggattcccaaattttgttgacagcgtctcggatatgaaccacacggaaatttggcctgctgctttctgcgtggggagtgcgatgtggatccagctgttgtacagtgcctgcttctggtggctgttttgctatgcagtggatgcttatctggtgatccggagatcggcaggactgagcaccatcctgctgtatcacatcatggcgtggggcctggccaccctgctctgtgtggagggagccgccatgctctactacccttccgtgtccaggtgtgagcggggcctggaccacgccatcccccactatgtcaccatgtacctgcccctgctgctggttctcgtggcgaaccccatcctgttccaaaagacagtgactgcagtggcctctttacttaaaggaagacaaggcatttacacggagaacgagaggaggatgggagccgtgatcaagatccgatttttcaaaatcatgctggttttaattatttgttggttgtcgaatatcatcaatgaaagccttttattctatcttgagatgcaaacagatatcaatggaggttctttgaaacctgtcagaactgcagccaagaccacatggtttattatgggaatcctgaatccagcccagggatttctcttgtctttggccttctacggctggacaggatgcagcctgggttttcagtctcccaggaaggagatccagtgggaatcactgaccacctcggctgctgagggggctcacccatccccactgatgccccatgaaaaccctgcttccgggaaggtgtctcaagtgggtgggcagacttctgacgaagccctgagcatgctgtctgaaggttctgatgccagcacaattgaaattcacactgcaagtgaatcctgcaacaaaaatgagggtgaccctgctctcccaacccatggagacctatgaaggggatgtgctgggggtccagaccccatattcctcagactcaacaattcttgttctttagaactgtgttctcaccttcccaacactgcactgccgaagtgtagcggcccccaaaccttgctctcatcaccagctagagcttcttcccgaagggcctttaggataggagaaagggttcatgcacacacgtgtgagaatggaagagccccctccagaccactctacagctgctctagccttagttgccactaggaagttttctgaggctggctgtaaagtaagtgtaaggtccacatccttggggaagtagttaaataaaatagttatgactg

SEQ ID NO: 616 - protein, 424 aa, Homo sapiens
MTQAGRRGPGTPEPRPRTQPMASPRLGTFCCPTRDAATQLVLSFQPRAFHALCLGSGGLRLALGLLQLLPGRRPAGPGSPATSPPASVRILRAAAACDLLGCLGMVIRSTVWLGFPNFVDSVSDMNHTEIWPAAFCVGSAMWIQLLYSACFWWLFCYAVDAYLVIRRSAGLSTILLYHIMAWGLATLLCVEGAAMLYYPSVSRCERGLDHAIPHYVTMYLPLLLVLVANPILFQKTVTAVASLLKGRQGIYTENERRMGAVIKIRFFKIMLVLIICWLSNIINESLLFYLEMQTDINGGSLKPVRTAAKTTWFIMGILNPAQGFLLSLAFYGWTGCSLGFQSPRKEIQWESLTTSAAEGAHPSPLMPHENPASGKVSQVGGQTSDEALSMLSEGSDASTIEIHTASESCNKNEGDPALPTHGDL

SEQ ID NO: 617 - DNA, 490 bp, Homo sapiens
  misc_feature (430)..(430): n is a, c, g, or t
  misc_feature (455)..(455): n is a, c, g, or t
  misc_feature (475)..(475): n is a, c, g, or t
  misc_feature (483)..(483): n is a, c, g, or t
  misc_feature (489)..(489): n is a, c, g, or t
taaagtttttgctaaactcaaaacaagtcccaggcacaccagaaggagctgaccaccttaggtgttcttgtgatttatccttacttccctatgttgtcatagttgcttctaaactcagctgcactatggctgtcaacatttctgatacttattgggatatgtgccatccagtcatttagtactttgaatggaacatgagatttataacacaggtaatagctgaaggtaccagtatggtggtgagactcacacttagtgatccagctaaggtaactgatgttataatggaacagagaagaggccaactagatagctaagttcttctgaacctatgtgtatatgtaagtacaaatccatgcgtccttatgggggttaaactttaatcttgaaatttacatttttcatagtaaaagggaaccattgttgcagnttctttcttgtgaggaatacatggnctttgatgctctggcgtctnctgcattnccagtnt

SEQ ID NO: 618 - DNA, 9588 bp, Homo sapiens
ccgaccaacaccaacacccagctccgacgcagctcctctgcgcccttgccgccctccgagccacagctttcctcccgctcctgcccccggcccgtcgccgtctccgcgctcgcagcggcctcgggagggcccaggtagcgagcagcgacctcgcgagccttccgcactcccgcccggttccccggccgtccgcctatccttggccccctccgctttctccgcgccggcccgcctcgcttatgcctcggcgctgagccgctctcccgattgcccgccgacatgagctgcaacggaggctcccacccgcggatcaacactctgggccgcatgatccgcgccgagtctggcccggacctgcgctacgaggtgaccagcggcggcgggggcaccagcaggatgtactattctcggcgcggcgtgatcaccgaccagaactcggacggctactgtcaaaccggcacgatgtccaggcaccagaaccagaacaccatccaggagctgctgcagaactgctccgactgcttgatgcgagcagagctcatcgtgcagcctgaattgaagtatggagatggaatacaactgactcggagtcgagaattggatgagtgttttgcccaggccaatgaccaaatggaaatcctcgacagcttgatcagagagatgcggcagatgggccagccctgtgatgcttaccagaaaaggcttcttcagctccaagagcaaatgcgagccctttataaagccatcagtgtccctcgagtccgcagggccagctccaagggtggtggaggctacacttgtcagagtggctctggctgggatgagttcaccaaacatgtcaccagtgaatgtttggggtggatgaggcagcaaagggcggagatggacatggtggcctggggtgtggacctggcctcagtggagcagcacattaacagccaccggggcatccacaactccatcggcgactatcgctggcagctggacaaaatcaaagccgacctgcgcgagaaatctgcgatctaccagttggaggaggagtatgaaaacctgctgaaagcgtcctttgagaggatggatcacctgcgacagctgcagaacatcattcaggccacgtccagggagatcatgtggatcaatgactgcgaggaggaggagctgctgtacgactggagcgacaagaacaccaacatcgctcagaaacaggaggccttctccatacgcatgagtcaactggaagttaaagaaaaagagctcaataagctgaaacaagaaagtgaccaacttgtcctcaatcagcatccagcttcagacaaaattgaggcctatatggacactctgcagacgcagtggagttggattcttcagatcaccaagtgcattgatgttcatctgaaagaaaatgctgcctactttcagttttttgaagaggcgcagtctactgaagcatacctgaaggggctccaggactccatcaggaagaagtacccctgcgacaagaacatgcccctgcagcacctgctggaacagatcaaggagctggagaaagaacgagagaaaatccttgaatacaagcgtcaggtgcagaacttggtaaacaagtctaagaagattgtacagctgaagcctcgtaacccagactacagaagcaataaacccattattctcagagctctctgtgactacaaacaagatcagaaaatcgtgcataagggggatgagtgtatcctgaaggacaacaacgagcgcagcaagtggtacgtgacgggcccgggaggcgttgacatgcttgttccctctgtggggctgatcatccctcctccgaacccactggccgtggacctctcttgcaagattgagcagtactacgaagccatcttggctctgtggaaccagctctacatcaacatgaagagcctggtgtcctggcactactgcatgattgacatagagaagatcagggccatgacaatcgccaagctgaaaacaatgcggcaggaagattacatgaagacgatagccgaccttgagttacattaccaagagttcatcagaaatagccaaggctcagagatgtttggagatgatgacaagcggaaaatacagtctcagttcaccgatgcccagaagcattaccagaccctggtcattcagctccctggctatccccagcaccagacagtgaccacaactgaaatcactcatcatggaacctgccaagatgtcaaccataataaagtaattgaaaccaacagagaaaatgacaagcaagaaacatggatgctgatggagctgcagaagattcgcaggcagatagagcactgcgagggcaggatgactctcaaaaacctccctctagcagaccaggggtcttctcaccacatcacagtgaaaattaacgagcttaagagtgtgcagaatgattcacaagcaattgctgaggttctcaaccagcttaaagatatgcttgccaacttcagaggttctgaaaagtactgctatttacagaatgaagtatttggactatttcagaaactggaaaatatcaatggtgttacagatggctacttaaatagcttatgcacagtaagggcactgctccaggctattctccaaacagaagacatgttaaaggtttatgaagccaggctcactgaggaggaaactgtctgcctggacctggataaagtggaagcttaccgctgtggactgaagaaaataaaaaatgacttgaacttgaagaagtcgttgttggccactatgaagacagaactacagaaagcccagcagatccactctcagacttcacagcagtatccactttatgatctggacttgggcaagttcggtgaaaaagtcacacagctgacagaccgctggcaaaggatagataaacagatcgactttagattatgggacctggagaaacaaatcaagcaattgaggaattatcgtgataactatcaggctttctgcaagtggctctatgatcgtaaacgccgccaggattccttagaatccatgaaatttggagattccaacacagtcatgcggtttttgaatgagcagaagaacttgcacagtgaaatatctggcaaacgagacaaatcagaggaagtacaaaaaattgctgaactttgcgccaattcaattaaggattatgagctccagctggcctcatacacctcaggactggaaactctgctgaacatacctatcaagaggaccatgattcagtccccttctggggtgattctgcaagaggctgcagatgttcatgctcggtacattgaactacttacaagatctggagactattacaggttcttaagtgagatgctgaagagtttggaagatctgaagctgaaaaataccaagatcgaagttttggaagaggagctcagactggcccgagatgccaactcggaaaactgtaataagaacaaattcctggatcagaacctgcagaaataccaggcagagtgttcccagttcaaagcgaagcttgcgagcctggaggagctgaagagacaggctgagctggatgggaagtcggctaagcaaaatctagacaagtgctacggccaaataaaagaactcaatgagaagatcacccgactgacttatgagattgaagatgaaaagagaagaagaaaatctgtggaagacagatttgaccaacagaagaatgactatgaccaactgcagaaagcaaggcaatgtgaaaaggagaaccttggttggcagaaattagagtctgagaaagccatcaaggagaaggagtacgagattgaaaggttgagggttctactgcaggaagaaggcacccggaagagagaatatgaaaatgagctggcaaaggtaagaaaccactataatgaggagatgagtaatttaaggaacaagtatgaaacagagattaacattacgaagaccaccatcaaggagatatccatgcaaaaagaggatgattccaaaaatcttagaaaccagcttgatagactttcaagggaaaatcgagatctgaaggatgaaattgtcaggctcaatgacagcatcttgcaggccactgagcagcgaaggcgagctgaagaaaacgcccttcagcaaaaggcctgtggctctgagataatgcagaagaagcagcatctggagatagaactgaagcaggtcatgcagcagcgctctgaggacaatgcccggcacaagcagtccctggaggaggctgccaagaccattcaggacaaaaataaggagatcgagagactcaaagctgagtttcaggaggaggccaagcgccgctgggaatatgaaaatgaactgagtaaggtaagaaacaattatgatgaggagatcattagcttaaaaaatcagtttgagaccgagatcaacatcaccaagaccaccatccaccagctcaccatgcagaaggaagaggataccagtggctaccgggctcagatagacaatctcacccgagaaaacaggagcttatctgaagaaataaagaggctgaagaacactctaacccagaccacagagaatctcaggagggtggaagaagacatccaacagcaaaaggccactggctctgaggtgtctcagaggaaacagcagctggaggttgagctgagacaagtcactcagatgcgaacagaggagagcgtaagatataagcaatctcttgatgatgctgccaaaaccatccaggataaaaacaaggagatagaaaggttaaaacaactgatcgacaaagaaacaaatgaccggaaatgcctggaagatgaaaacgcgagattacaaagggtccagtatgacctgcagaaagcaaacagtagtgcgacggagacaataaacaaactgaaggttcaggagcaagaactgacacgcctgaggatcgactatgaaagggtttcccaggagaggactgtgaaggaccaggatatcacgcggttccagaactctctgaaagagctgcagctgcagaagcagaaggtggaagaggagctgaatcggctgaagaggaccgcgtcagaagactcctgcaagaggaagaagctggaggaagagctggaaggcatgaggaggtcgctgaaggagcaagccatcaaaatcaccaacctgacccagcagctggagcaggcatccattgttaagaagaggagtgaggatgacctccggcagcagagggacgtgctggatggccacctgagggaaaagcagaggacccaggaagagctgaggaggctctcttctgaggtcgaggccctgaggcggcagttactccaggaacaggaaagtgtcaaacaagctcacttgaggaatgagcatttccagaaggcgatagaagataaaagcagaagcttaaatgaaagcaaaatagaaattgagaggctgcagtctctcacagagaacctgaccaaggagcacttgatgttagaagaagaactgcggaacctgaggctggagtacgatgacctgaggagaggacgaagcgaagcggacagtgataaaaatgcaaccatcttggaactaaggagccagctgcagatcagcaacaaccggaccctggaactgcaggggctgattaatgatttacagagagagagggaaaatttgagacaggaaattgagaaattccaaaagcaggctttagaggcatctaataggattcaggaatcaaagaatcagtgtactcaggtggtacaggaaagagagagccttctggtgaaaatcaaagtcctggagcaagacaaggcaaggctgcagaggctggaggatgagctgaatcgtgcaaaatcaactctagaggcagaaaccagggtgaaacagcgcctggagtgtgagaaacagcaaattcagaatgacctgaatcagtggaagactcaatattcccgcaaggaggaggctattaggaagatagaatcggaaagagaaaagagtgagagagagaagaacagtcttaggagtgagatcgaaagactccaagcagagatcaagagaattgaagagaggtgcaggcgtaagctggaggattctaccagggagacacagtcacagttagaaacagaacgctcccgatatcagagggagattgataaactcagacagcgcccatatgggtcccatcgagagacccagactgagtgtgagtggaccgttgacacctccaagctggtgtttgatgggctgaggaagaaggtgacagcaatgcagctctatgagtgtcagctgatcgacaaaacaaccttggacaaactattgaaggggaagaagtcagtggaagaagttgcttctgaaatccagccattccttcggggtgcaggatctatcgctggagcatctgcttctcctaaggaaaaatactctttggtagaggccaagagaaagaaattaatcagcccagaatccacagtcatgcttctggaggcccaggcagctacaggtggtataattgatccccatcggaatgagaagctgactgtcgacagtgccatagctcgggacctcattgacttcgatgaccgtcagcagatatatgcagcagaaaaagctatcactggttttgatgatccattttcaggcaagacagtatctgtttcagaagccatcaagaaaaatttgattgatagagaaaccggaatgcgcctgctggaagcccagattgcttcagggggtgtagtagaccctgtgaacagtgtctttttgccaaaagatgtcgccttggcccgggggctgattgatagagatttgtatcgatccctgaatgatccccgagatagtcagaaaaactttgtggatccagtcaccaaaaagaaggtcagttacgtgcagctgaaggaacggtgcagaatcgaaccacatactggtctgctcttgctttcagtacagaagagaagcatgtccttccaaggaatcagacaacctgtgaccgtcactgagctagtagattctggtatattgagaccgtccactgtcaatgaactggaatctggtcagatttcttatgacgaggttggtgagagaattaaggacttcctccagggttcaagctgcatagcaggcatatacaatgagaccacaaaacagaagcttggcatttatgaggccatgaaaattggcttagtccgacctggtactgctctggagttgctggaagcccaagcagctactggctttatagtggatcctgttagcaacttgaggttaccagtggaggaagcctacaagagaggtctggtgggcattgagttcaaagagaagctcctgtctgcagaacgagctgtcactgggtataatgatcctgaaacaggaaacatcatctctttgttccaagccatgaataaggaactcatcgaaaagggccacggtattcgcttattagaagcacagatcgcaaccggggggatcattgacccaaaggagagccatcgtttaccagttgacatagcatataagaggggctatttcaatgaggaactcagtgagattctctcagatccaagtgatgataccaaaggattttttgaccccaacactgaagaaaatcttacctatctgcaactaaaagaaagatgcattaaggatgaggaaacagggctctgtcttctgcctctgaaagaaaagaagaaacaggtgcagacatcacaaaagaataccctcaggaagcgtagagtggtcatagttgacccagaaaccaataaagaaatgtctgttcaggaggcctacaagaagggcctaattgattatgaaaccttcaaagaactgtgtgagcaggaatgtgaatgggaagaaataaccatcacgggatcagatggctccaccagggtggtcctggtagatagaaagacaggcagtcagtatgatattcaagatgctattgacaagggccttgttgacaggaagttctttgatcagtaccgatccggcagcctcagcctcactcaatttgctgacatgatctccttgaaaaatggtgtcggcaccagcagcagcatgggcagtggtgtcagcgatgatgtttttagcagctcccgacatgaatcagtaagtaagatttccaccatatccagcgtcaggaatttaaccataaggagcagctctttttcagacaccctggaagaatcgagccccattgcagccatctttgacacagaaaacctggagaaaatctccattacagaaggtatagagcggggcatcgttgacagcatcacgggtcagaggcttctggaggctcaggcctgcacaggtggcatcatccacccaaccacgggccagaagctgtcacttcaggacgcagtctcccagggtgtgattgaccaagacatggccaccagcgtgaagcctgctcagaaagccttcataggcttcgagggtgtgaagggaaagaagaagatgtcagcagcagaggcagtgaaagaaaaatggctcccgtatgaggctggccagcgcttcctggagttccagtacctcacgggaggtcttgttgacccggaagtgcatgggaggataagcaccgaagaagccatccggaaggggttcatagatggccgcgccgcacagaggctgcaagacaccagcagctatgccaaaatcctgacctgccccaaaaccaaattaaaaatatcctataaggatgccataaatcgctccatggtagaagatatcactgggctgcgccttctggaagccgcctccgtgtcgtccaagggcttacccagcccttacaacatgtcttcggctccggggtcccgctccggctcccgctcgggatctcgctccggatctcgctccgggtcccgcagtgggtcccggagaggaagctttgacgccacagggaattcttcctactcttattcctactcatttagcagtagttctattgggcactagtagtcagttgggagtggttgctataccttgacttcatttatatgaatttccactttattaaataatagaaaagaaaatcccggtgcttgcagtagagtgataggacattctatgcttacagaaaatatagccatgattgaaatcaaatagtaaaggctgttctggctttttatcttcttagctcatcttaaataagcagtacacttggatgcagtgcgtctgaagtgctaatcagttgtaacaatagcacaaatcgaacttaggatttgtttcttctcttctgtgtttcgatttttgatcaattctttaattttggaagcctataatacagttttctattcttggagataaaaattaaatggatcactgatattttagtcattctgcttctcatctaaatatttccatattctgtattaggagaaaattaccctcccagcaccagcccccctctcaaacccccaacccaaaaccaagcattttggaatgagtctcctttagtttcagagtgtggattgtataacccatatactcttcgatgtacttgtttggtttggtattaatttgactgtgcatgacagcggcaatcttttctttggtcaaagttttctgtttattttgcttgtcatattcgatgtactttaaggtgtctttatgaagtttgctattctggcaataaacttttagactttt

SEQ ID NO: 619 - protein, 2871 aa, Homo sapiens
MSCNGGSHPRINTLGRMIRAESGPDLRYEVTSGGGGTSRMYYSRRGVITDQNSDGYCQTGTMSRHQNQNTIQELLQNCSDCLMRAELIVQPELKYGDGIQLTRSRELDECFAQANDQMEILDSLIREMRQMGQPCDAYQKRLLQLQEQMRALYKAISVPRVRRASSKGGGGYTCQSGSGWDEFTKHVTSECLGWMRQQRAEMDMVAWGVDLASVEQHINSHRGIHNSIGDYRWQLDKIKADLREKSAIYQLEEEYENLLKASFERMDHLRQLQNIIQATSREIMWINDCEEEELLYDWSDKNTNIAQKQEAFSIRMSQLEVKEKELNKLKQESDQLVLNQHPASDKIEAYMDTLQTQWSWILQITKCIDVHLKENAAYFQFFEEAQSTEAYLKGLQDSIRKKYPCDKNMPLQHLLEQIKELEKEREKILEYKRQVQNLVNKSKKIVQLKPRNPDYRSNKPIILRALCDYKQDQKIVHKGDECILKDNNERSKWYVTGPGGVDMLVPSVGLIIPPPNPLAVDLSCKIEQYYEAILALWNQLYINMKSLVSWHYCMIDIEKIRAMTIAKLKTMRQEDYMKTIADLELHYQEFIRNSQGSEMFGDDDKRKIQSQFTDAQKHYQTLVIQLPGYPQHQTVTTTEITHHGTCQDVNHNKVIETNRENDKQETWMLMELQKIRRQIEHCEGRMTLKNLPLADQGSSHHITVKINELKSVQNDSQAIAEVLNQLKDMLANFRGSEKYCYLQNEVFGLFQKLENINGVTDGYLNSLCTVRALLQAILQTEDMLKVYEARLTEEETVCLDLDKVEAYRCGLKKIKNDLNLKKSLLATMKTELQKAQQIHSQTSQQYPLYDLDLGKFGEKVTQLTDRWQRIDKQIDFRLWDLEKQIKQLRNYRDNYQAFCKWLYDRKRRQDSLESMKFGDSNTVMRFLNEQKNLHSEISGKRDKSEEVQKIAELCANSIKDYELQLASYTSGLETLLNIPIKRTMIQSPSGVILQEAADVHARYIELLTRSGDYYRFLSEMLKSLEDLKLKNTKIEVLEEELRLARDANSENCNKNKFLDQNLQKYQAECSQFKAKLASLEELKRQAELDGKSAKQNLDKCYGQIKELNEKITRLTYEIEDEKRRRKSVEDRFDQQKNDYDQLQKARQCEKENLGWQKLESEKAIKEKEYEIERLRVLLQEEGTRKREYENELAKVRNHYNEEMSNLRNKYETEINITKTTIKEISMQKEDDSKNLRNQLDRLSRENRDLKDEIVRLNDSILQATEQRRRAEENALQQKACGSEIMQKKQHLEIELKQVMQQRSEDNARHKQSLEEAAKTIQDKNKEIERLKAEFQEEAKRRWEYENELSKVRNNYDEEIISLKNQFETEINITKTTIHQLTMQKEEDTSGYRAQIDNLTRENRSLSEEIKRLKNTLTQTTENLRRVEEDIQQQKATGSEVSQRKQQLEVELRQVTQMRTEESVRYKQSLDDAAKTIQDKNKEIERLKQLIDKETNDRKCLEDENARLQRVQYDLQKANSSATETINKLKVQEQELTRLRIDYERVSQERTVKDQDITRFQNSLKELQLQKQKVEEELNRLKRTASEDSCKRKKLEEELEGMRRSLKEQAIKITNLTQQLEQASIVKKRSEDDLRQQRDVLDGHLREKQRTQEELRRLSSEVEALRRQLLQEQESVKQAHLRNEHFQKAIEDKSRSLNESKIEIERLQSLTENLTKEHLMLEEELRNLRLEYDDLRRGRSEADSDKNATILELRSQLQISNNRTLELQGLINDLQRERENLRQEIEKFQKQALEASNRIQESKNQCTQVVQERESLLVKIKVLEQDKARLQRLEDELNRAKSTLEAETRVKQRLECEKQQIQNDLNQWKTQYSRKEEAIRKIESEREKSEREKNSLRSEIERLQAEIKRIEERCRRKLEDSTRETQSQLETERSRYQREIDKLRQRPYGSHRETQTECEWTVDTSKLVFDGLRKKVTAMQLYECQLIDKTTLDKLLKGKKSVEEVASEIQPFLRGAGSIAGASASPKEKYSLVEAKRKKLISPESTVMLLEAQAATGGIIDPHRNEKLTVDSAIARDLIDFDDRQQIYAAEKAITGFDDPFSGKTVSVSEAIKKNLIDRETGMRLLEAQIASGGVVDPVNSVFLPKDVALARGLIDRDLYRSLNDPRDSQKNFVDPVTKKKVSYVQLKERCRIEPHTGLLLLSVQKRSMSFQGIRQPVTVTELVDSGILRPSTVNELESGQISYDEVGERIKDFLQGSSCIAGIYNETTKQKLGIYEAMKIGLVRPGTALELLEAQAATGFIVDPVSNLRLPVEEAYKRGLVGIEFKEKLLSAERAVTGYNDPETGNIISLFQAMNKELIEKGHGIRLLEAQIATGGIIDPKESHRLPVDIAYKRGYFNEELSEILSDPSDDTKGFFDPNTEENLTYLQLKERCIKDEETGLCLLPLKEKKKQVQTSQKNTLRKRRVVIVDPETNKEMSVQEAYKKGLIDYETFKELCEQECEWEEITITGSDGSTRVVLVDRKTGSQYDIQDAIDKGLVDRKFFDQYRSGSLSLTQFADMISLKNGVGTSSSMGSGVSDDVFSSSRHESVSKISTISSVRNLTIRSSSFSDTLEESSPIAAIFDTENLEKISITEGIERGIVDSITGQRLLEAQACTGGIIHPTTGQKLSLQDAVSQGVIDQDMATSVKPAQKAFIGFEGVKGKKKMSAAEAVKEKWLPYEAGQRFLEFQYLTGGLVDPEVHGRISTEEAIRKGFIDGRAAQRLQDTSSYAKILTCPKTKLKISYKDAINRSMVEDITGLRLLEAASVSSKGLPSPYNMSSAPGSRSGSRSGSRSGSRSGSRSGSRRGSFDATGNSSYSYSYSFSSSSIGH

SEQ ID NO: 620 - DNA, 2543 bp, Homo sapiens
ctccggcgcagtgttgggactgtctgggtatcggaaagcaagcctacgttgctcactattacgtataatccttttcttttcaagatgcctgaggaagtgcaccatggagaggaggaggtggagacttttgcctttcaggcagaaattgcccaactcatgtccctcatcatcaataccttctattccaacaaggagattttccttcgggagttgatctctaatgcttctgatgccttggacaagattcgctatgagagcctgacagacccttcgaagttggacagtggtaaagagctgaaaattgacatcatccccaaccctcaggaacgtaccctgactttggtagacacaggcattggcatgaccaaagctgatctcataaataatttgggaaccattgccaagtctggtactaaagcattcatggaggctcttcaggctggtgcagacatctccatgattgggcagtttggtgttggcttttattctgcctacttggtggcagagaaagtggttgtgatcagaaagcacaacgatgatgaacagtatgcttgggagtcttctgctggaggttccttcactgtgcgtgctgaccatggtgagcccattggcatgggtaccaaagtgatcctccatcttaaagaagatcagacagagtacctagaagagaggcgggtcaaagaagtagtgaagaagcattctcagttcataggctatcccatcaccctttatttggagaaggaacgagagaaggaaattagtgatgatgaggcagaggaagagaaaggtgagaaagaagaggaagataaagatgatgaagaaaagcccaagatcgaagatgtgggttcagatgaggaggatgacagcggtaaggataagaagaagaaaactaagaagatcaaagagaaatacattgatcaggaagaactaaacaagaccaagcctatttggaccagaaaccctgatgacatcacccaagaggagtatggagaattctacaagagcctcactaatgactgggaagaccacttggcagtcaagcacttttctgtagaaggtcagttggaattcagggcattgctatttattcctcgtcgggctccctttgacctttttgagaacaagaagaaaaagaacaacatcaaactctatgtccgccgtgtgttcatcatggacagctgtgatgagttgataccagagtatctcaattttatccgtggtgtggttgactctgaggatctgcccctgaacatctcccgagaaatgctccagcagagcaaaatcttgaaagtcattcgcaaaaacattgttaagaagtgccttgagctcttctctgagctggcagaagacaaggagaattacaagaaattctatgaggcattctctaaaaatctcaagcttggaatccacgaagactccactaaccgccgccgcctgtctgagctgctgcgctatcatacctcccagtctggagatgagatgacatctctgtcagagtatgtttctcgcatgaaggagacacagaagtccatctattacatcactggtgagagcaaagagcaggtggccaactcagcttttgtggagcgagtgcggaaacggggcttcgaggtggtatatatgaccgagcccattgacgagtactgtgtgcagcagctcaaggaatttgatgggaagagcctggtctcagttaccaaggagggtctggagctgcctgaggatgaggaggagaagaagaagatggaagagagcaaggcaaagtttgagaacctctgcaagctcatgaaagaaatcttagataagaaggttgagaaggtgacaatctccaatagacttgtgtcttcaccttgctgcattgtgaccagcacctacggctggacagccaatatggagcggatcatgaaagcccaggcacttcgggacaactccaccatgggctatatgatggccaaaaagcacctggagatcaaccctgaccaccccattgtggagacgctgcggcagaaggctgaggccgacaagaatgataaggcagttaaggacctggtggtgctgctgtttgaaaccgccctgctatcttctggcttttcccttgaggatccccagacccactccaaccgcatctatcgcatgatcaagctaggtctaggtattgatgaagatgaagtggcagcagaggaacccaatgctgcagttcctgatgagatcccccctctcgagggcgatgaggatgcgtctcgcatggaagaagtcgattaggttaggagttcatagttggaaaacttgtgcccttgtatagtgtccccatgggctcccactgcagcctcgagtgcccctgtcccacctggctccccctgctggtgtctagtgtttttttccctctcctgtccttgtgttgaaggcagtaaactaagggtgtcaagccccattccctctctactcttgacagcaggattggatgttgtgtattgtggtttattttattttcttcattttgttctgaaattaaagtatgcaaaataaagaatatgccgtttttatac

SEQ ID NO: 621 - protein, 724 aa, Homo sapiens
MPEEVHHGEEEVETFAFQAEIAQLMSLIINTFYSNKEIFLRELISNASDALDKIRYESLTDPSKLDSGKELKIDIIPNPQERTLTLVDTGIGMTKADLINNLGTIAKSGTKAFMEALQAGADISMIGQFGVGFYSAYLVAEKVVVIRKHNDDEQYAWESSAGGSFTVRADHGEPIGMGTKVILHLKEDQTEYLEERRVKEVVKKHSQFIGYPITLYLEKEREKEISDDEAEEEKGEKEEEDKDDEEKPKIEDVGSDEEDDSGKDKKKKTKKIKEKYIDQEELNKTKPIWTRNPDDITQEEYGEFYKSLTNDWEDHLAVKHFSVEGQLEFRALLFIPRRAPFDLFENKKKKNNIKLYVRRVFIMDSCDELIPEYLNFIRGVVDSEDLPLNISREMLQQSKILKVIRKNIVKKCLELFSELAEDKENYKKFYEAFSKNLKLGIHEDSTNRRRLSELLRYHTSQSGDEMTSLSEYVSRMKETQKSIYYITGESKEQVANSAFVERVRKRGFEVVYMTEPIDEYCVQQLKEFDGKSLVSVTKEGLELPEDEEEKKKMEESKAKFENLCKLMKEILDKKVEKVTISNRLVSSPCCIVTSTYGWTANMERIMKAQALRDNSTMGYMMAKKHLEINPDHPIVETLRQKAEADKNDKAVKDLVVLLFETALLSSGFSLEDPQTHSNRIYRMIKLGLGIDEDEVAAEEPNAAVPDEIPPLEGDEDASRMEEVD

SEQ ID NO: 622 - DNA, 321 bp, Homo sapiens
  misc_feature (298)..(298): n is a, c, g, or t
ggagacctagatctttccagttaatcacacaacaaacttagctcatcgcaataaaaagcagctcagagccgactggctcttttaggcactgactccgaacaggattctttcacccaggcatctcctccagagggatccgccagcccgtccagcagcaccatgtgggtgaccaaactcctgccagccctgctgctgcagcatgtcctcctgcatctcctcctgctccccatcgccatcccctatgcagagggacaaaggaaaagaagaaatacaattcatgaattcaaaaaatcagcanagactaccctaatcaaaatagat

SEQ ID NO: 623 - DNA, 2913 bp, Homo sapiens
gggggagcccctgcaagtttcccgggccgcgcgccgcgctcgctcgcctcccagcccgcggcccgagccgccgccgcgcccgccatgccctcggccaaacaaaggggctccaagggcggccacggcgccgcgagcccctcggagaagggtgcccacccgtcgggcggcgcggatgacgtggcgaagaagccgccgccggcgccgcagcagccgccgccgccgcccgcgccgcacccgcagcagcacccgcagcagcacccgcagaaccaggcgcacggcaagggcggccaccgcggcggcggcggcggcggcggcaagtcctcctcctcctcctccgcctccgccgccgctgccgccgccgccgcctcgtcctcggcgtcctgctcgcgcaggctcggcagggcgctcaactttctcttctacctcgccctggtggcggcggccgctttctcgggctggtgcgtccaccacgtcctggaggaggtccagcaggtccggcgcagccaccaggacttctcccggcagagggaggagctgggccagggcttgcagggcgtcgagcagaaggtgcagtctttgcaagccacatttggaacttttgagtccatcttgagaagctcccaacataaacaagacctcacagagaaagctgtgaagcaaggggagagtgaggtcagccggatcagcgaagtgctgcagaaactccagaatgagattctcaaagacctctcggatgggatccatgtggtgaaggacgcccgggagcgggacttcacgtccctggagaacacggtggaggagcggctgacggagctcaccaaatccatcaacgacaacatcgccatcttcacagaagtccagaagaggagccagaaggagatcaatgacatgaaggcaaaggttgcctccctggaagaatctgaggggaacaagcaggatttgaaagccttaaaggaagctgtgaaggagatacagacctcagccaagtccagagagtgggacatggaggccctgagaagtacccttcagactatggagtctgacatctacaccgaggttcgcgagctggtgagcctcaagcaggagcagcaggctttcaaggaggcggccgacacggagcggctcgccctgcaggccctcacggagaagcttctcaggtctgaggagtccgtctcccgcctcccggaggagatccggagactggaggaagagctccgccagctgaagtccgattcccacgggccgaaggaggacggaggcttcagacactcggaagcctttgaggcactccagcaaaagagtcagggactggactccaggctccagcacgtggaggatggggtgctctccatgcaggtggcttctgcgcgccagaccgagagcctggagtccctcctgtccaagagccaggagcacgagcagcgcctggccgccctgcaggggcgcctggaaggcctcgggtcctcagaggcagaccaggatggcctggccagcacggtgaggagcctgggcgagacccagctggtgctctacggtgacgtggaggagctgaagaggagtgtgggcgagctccccagcaccgtggaatcactccagaaggtgcaggagcaggtgcacacgctgctcagtcaggaccaagcccaggccgcccgtctgcctcctcaggacttcctggacagactttcttctctagacaacctgaaagcctcagtcagccaagtggaggcggacttgaaaatgctcaggactgctgtggacagtttggttgcatactcggtcaaaatagaaaccaacgagaacaatctggaatcagccaagggtttactagatgacctgaggaatgatctggataggttgtttgtgaaagtggagaagattcacgaaaaggtctaaatgaattgcgtgtgcagggcgcggatttaaagtccaatttctcatgaccaaaaaatgtgtggttttttcccatgtgtcccctaccccccaatttcttgtcccctcttaaagagcagttgtcaccacctgaacaccaaggcattgtattttcatgcccagttaacttatttacaatatttaagttctctgcttctgcatttggttggtttcctgaagcgcagcccctgtgaataacaggtggcttttcatggatgtctctagtcagagaaaaatgataaaggcttaaattgaggattaacagaagcagattaacctcagaaatcctgtctggctggcagatttcaagtaaaaaaaaaaaaaaggtgggttggggggacccttttctttctagttgtctttaaggaaaattaattttacttttttttttgttctggccgaaatttttatgagatatctctcacttgtcttccactttgaaccggttaaagctcatagctgtcagctctgaatgaggaggggagaagcccctgggtctttctttgaaaggaatccgctgcttgagggctgcctccctcatggtgtgcgtgtcgttctcttcctgacgcatctgtgatatcagaggtaactatgcaaagcatccaggcggttctgaatgtgaagcactacacccagcagagtcccggtgccctctgtccccactgccggcccatgtcctctctccggaggtcaccaaggaatgcacaggtttcgactaccagaaaggggagtccttgggttctttcaaaaaattcgtgaggagagctgtctacagtggaatagggggtctccctggggaatgcaggccaagtccttttattttaacatgatgtccatgaagaggtttgccgtctgggcagccctgtcggcaaggagcgtgcatactgcgtttgtgtaattgtttgctgtatctcccttccctctgagctgtattgttctttaatggctgtcttgcccttccaaaaaaaattgaaaaaaaaaaaa

SEQ ID NO: 624 - protein, 602 aa, Homo sapiens
MPSAKQRGSKGGHGAASPSEKGAHPSGGADDVAKKPPPAPQQPPPPPAPHPQQHPQQHPQNQAHGKGGHRGGGGGGGKSSSSSSASAAAAAAAASSSASCSRRLGRALNFLFYLALVAAAAFSGWCVHHVLEEVQQVRRSHQDFSRQREELGQGLQGVEQKVQSLQATFGTFESILRSSQHKQDLTEKAVKQGESEVSRISEVLQKLQNEILKDLSDGIHVVKDARERDFTSLENTVEERLTELTKSINDNIAIFTEVQKRSQKEINDMKAKVASLEESEGNKQDLKALKEAVKEIQTSAKSREWDMEALRSTLQTMESDIYTEVRELVSLKQEQQAFKEAADTERLALQALTEKLLRSEESVSRLPEEIRRLEEELRQLKSDSHGPKEDGGFRHSEAFEALQQKSQGLDSRLQHVEDGVLSMQVASARQTESLESLLSKSQEHEQRLAALQGRLEGLGSSEADQDGLASTVRSLGETQLVLYGDVEELKRSVGELPSTVESLQKVQEQVHTLLSQDQAQAARLPPQDFLDRLSSLDNLKASVSQVEADLKMLRTAVDSLVAYSVKIETNENNLESAKGLLDDLRNDLDRLFVKVEKIHEKV

SEQ ID NO: 625 - DNA, 565 bp, Homo sapiens
  misc_feature (452)..(452): n is a, c, g, or t
tgacatcctagaacaaagaagctgttttaacttaatccccctgatcagcaggatatctgtgtgttcagtgacatcatacattctgtatctagaagtctaaaatttctgcctttctcctaaagaatgtgttcttgcattttggttgaaataacctacacagtgttaaaaatcagatacctcctttagtgaccagttcaaattttaatagcgataggtagcccctgagaaatttatcactataactccacaggaaatatgacttggaagtgctctgtgtactaaacaaaataaagcccctctttgcatttaaaaccaaagtcaaaacaaaactcttgtaatgcaattaattaactttatgtcttcccatgactcaagttttgttaaatatgcccaaaaactttgattggcagtttcttcggttaattattcctatagaatgtattttaagaaanctatacaattggatatatgctggtaattctccagtttctaggaggtaccattctaccgttccagtgatgaagtgaaataattacattcgtagtgttccgataacaaccataat

SEQ ID NO: 626 - DNA, 837 bp, Homo sapiens
  misc_feature (344)..(344): n is a, c, g, or t
  misc_feature (512)..(512): n is a, c, g, or t
  misc_feature (780)..(780): n is a, c, g, or t
  misc_feature (791)..(791): n is a, c, g, or t
gtagttgtaaaacagatttcattgtgttatacatcacttataaagaagcatagttcccattcttccacatgatgctttttgcagcattgtaccacagaataatgactccctaataactcagctgaaaaatatttagatctacttgctctaagaataaggtcaacattaaacattctcagatgaaaagcttgctggatgaaatagtgcaccatcagaataaagcatgcaatatatttacagtcagatgaaacaagtgtgtccataaatcaaccaaaagaccatctcctcctttaggaaatacatgtattgcttagccagtaccaataagttaacgtcgtgtgaantaatttgggtattctggccttcctgaatctcatacagccaaaccaaccagaaggcttccccttctggtttgtggtggcttatcatttggcatctggaaacttctcttattttgctggataattgctggctagtggtgggctactgacttgcctagaaaaaataagtcnatcattcagattaatcttggaggcgtatctaaaatccgatttatttagatagcttgattggggggctagtagctcatttctaaagaaaaactctactgtggaggaaaaccctgtggggcctccttttgtggtgtttttttcccaaaaaaaaaaaatccggcgcgcgcgtcccatggagagatacactaccccacaatttttttttttgtgttaaaaaataaacggaatagggggccgtgggttttctcccgcctttttcgggggcctnaaaaaaagggncttgcggttttaagactacctggttggaaccccgttttttggcacc

SEQ ID NO: 627 - DNA, 460 bp, Homo sapiens
gaaaggcggttgttgtgatagccgtccatgtaccacacccggttatcgcctacaggggcgagagggtatagtcatccagggtccgaaactcgagccggaggtcttgcaagtcacggggtcactgatgcccggaaacttcccgcaagctagtatatgcatgcatggccggagcctttcttcaagattggacactctgctctgaagtccatcgtagtaataggcgccaatttcctcttgcagctcgtaaagcactgacgtcagattctggacctcctctttaaactgcaataccaatatggcatacgccttgtaatctaccaacacaggtatcaaaggcctaagttcatccatattcgcttttatcgccttaaactgcctggccaggtgttgcttatgactctcctccaccagtttgaacttgggctccagtcctttcatttggttccattgcaacacggtc

SEQ ID NO: 628 - DNA, 330 bp, Homo sapiens
  misc_feature (100)..(100): n is a, c, g, or t
  misc_feature (314)..(315): n is a, c, g, or t
cgaggaggagccggagcgtgagtgacaccgagccggacccagcgcgacctgcggcggctccgggtgactcgggccagtgtagaggtccccaggccgccgnaggagcagcctgggccaattccctggccgggagcggaaggggatggcgtcgggctgggctccccgtccccctgctcggcgggcagtgaggaggaggatatggatgcacttttgaacaacagcctgcccccaccccacccagaaaatgaagaggacccagaagaggatttgtcagaaacagagactccaaagctcaagaagaataaaaatcctanngaaacctcgggaccc

SEQ ID NO: 629 - DNA, 317 bp, Homo sapiens
ttttttttttttttttttttttttacagggagaacagacctttttattaatatattgagataaactacagagactgaaagacaaaaattcatttttcattcagaacattcattaaaaatcaaatgcatttgagttctcacagaaaattttatgtaagtctgatataacattaaatattttacaaatcagacatttcattttgaaatctaatttttaatcctgaatgcattatagacaaagtaagctctcctttaccaatttcatttaacttatacaagggttccattataattccatcaaaccttaaaaattacctg

SEQ ID NO: 630 - DNA, 423 bp, Homo sapiens
  misc_feature (8)..(8): n is a, c, g, or t
  misc_feature (77)..(77): n is a, c, g, or t
  misc_feature (290)..(290): n is a, c, g, or t
  misc_feature (304)..(304): n is a, c, g, or t
  misc_feature (318)..(318): n is a, c, g, or t
  misc_feature (339)..(339): n is a, c, g, or t
  misc_feature (365)..(365): n is a, c, g, or t
  misc_feature (385)..(385): n is a, c, g, or t
  misc_feature (418)..(418): n is a, c, g, or t
tttttttnttttttgtctctttaaaatcatttttaaaaagttacaaaacaatatcattcatcatatattcttatttncctttttttaaaaaattaaagtaataaaaaagtcactttataaaataatataaaagggcttgatgggtggggccggtgggtgctgtctgagctggtgggactgaggaatccagtgcttctcttctgggctaccccctcgttgtcagggaagggacccccagggccacagatgggggatgacagcagggtcccttggtctctgggctggggctntgggggagaggggngcaggggaaagccngggggcagggagggggcagtnggggcaggaccccagtacaggggggngacgggcttgggggcccctnttccccaaaggagaccggggaaggggcccgctnggttg

SEQ ID NO: 631 - DNA, 101270 bp, Homo sapiens
gatcatagctcactgtaacttcaaactcctgggttcaaccaatccttctgccgcagcctcctgaatagctaggactacaggcacgtgccaccatgcctagctaattttttaattctaattttttgtggaaacaatatcttgctatgctgctcaaggtgttctcaaactcctggcctcaagtgatcctcccacttcagcctctcaaagtgctgggattatggcatgagccaccgcactcagcccacactaatctttattattctcttcttcctgctagaattgggttattttagttctctcttttttttagttccttaatgtggcctgtattgaaagatgtaaagagatatactttttgacatgtaagaaaatcttgattagatcactggctgactgcagaggtaatgaaataaacttcaaagactactcataagaagggataccgactttgcaaacatagtttggaaaagttgctaaacatgttgccgggcactgtggctcatacctataatcccagcactttgggaggctgaggcgggcttatcacctgtggtccagagttcgagaccagcctggccaacatgacaaaaccccatttctactaaaaatacaaaaatattagcctggcatggtggcaggagcctgtagtccccgctagttgggaggctgaggcaggagaattgcttgaacccaggaggcggaggttgcagtgagctgagattgcaccactgcactctagcctgggtgacagagtgagactctgtcttccaaaaaaaaaaaaaaaaaagataattggccaggcgcagtggctcacacctgtagtcctagcagtttgggaggctgaggcgggtggatcacttgaggtcaggagtttgaaaccagcctggccaacatggtgaaaccctgtctctattaaaaatacaaaaatattagccgggcgtggtggcgggtgcctgtaatcccagctactcgggaggctgaggcaggataattgcttgaaaccaggaggtggaaattgaagtgagctgagattgggccactgcagtccagcctggacaacacagtgagattccatctcaaaaagaaaaaaaaaaaccgacaattgtagccctcaacagcaatttttgaggaggaagaatctgattttcagagttaaccacatttatatagcttggatatttgtcctccaaatctcatgtggaaattggatccccattggaggcggagcctggtgggaggtatttgagtcattggggtgaacgcctcgtgaatggtttggtactgtcctcacggtagagtgagttctccctctagtagctcctctgagatctgcttgttagaaagaccctggcacctcactcctcgtttttgtgtctctctcaccatgtgatgtgccacctccccttcaccttctgccatgagtaaaagcagcctgaggctcttgccagaagcagatgctggtgccatgcttcccgtacagcctgcagaaccaggagcaagacagagtctctataaattacccagcctgaggtgctcctttggcaacacaagtggatgcagacacacattataatacttgaaatgtccagttccaatacaaaattacacagcatacaaagaaacaggaaagtatgacccattcacaggaaaaaaaaaaaaaaggtaattttatagaagtcacttctgaagctgtccagacattggaagtactagacaaaaatgttaaatcaactatcttaaaaatattcaataagcaggctgggtgcggtggctcacgcctgtaattccagcattttgggaggccgaggagggcagatcacctgaggtcaggagttcgagatcagcctggccaacatagagaaaccttgtctctaccaaaaatagaaaaattagccggatgtggtagcacacacctgtaatcccaggtactcaggaggctgaggcaggagaattgcttgaacctgggaggcagaggttgcagtgacctgagattgcgctactgcactccagcctgggtgaccgagcaagactccatctctctctctctttttttttcttttttttttttttagcatttattgatcattcttgggtgtttctcagagagggggatatgtcagagtcataggacaatagtggacagaaggtcagcagataaacatgtgaacaaaggtctctggttttcctaggcagaggaccctgcggccttccgcagtgtttgtgtccctgggtacttgagattagggagtggtgatgactcttaacaagcatgctgccttcgagcatctgtttaacaaagcacatcttgcaccgcccttaatccatttaaccctgagtggacacagcacatgtttcagagagcacggggttgggggtaaggttatagattaacagcatcccaaggcagaagaattttcttagtacagaaaatggagtctcctatgtctacttctttctacacagacacagtaacaatctgatctctctttcttttccccacatttcccccttttctttttgacaaaaccgccatcgtcatcatggcccgttctcgatggtcgctgtctcttcacagctgttggatacacctgcagaaaggctgtcacttcacacttggaagattgcacagcggccaggcagaggcactcctcacttcccagacgggcggtggccaggcagagacgctcctcacttcccagacggggcagccgggcagaggcgctcctcacttcctagatagggtggcggctgggcagaggcgctcctcacctcccagacgatgggcggccgggcagaggcgctcctcacctcccagacggggcagccgggcagaggcgctcctcacatcccagacaatgggcggccgggcagaggcgctcctcacttcctagacggggtggcggctggacagaggctgtaatcttagcactttgggaggccaaggcaggcggctgggaggtggaggttgtagcaagccgagatcatgccactgcactccagcctgggcaacattgagcactgagtgagcgagtctccgtctgcaatcccagcacctcgggaggccgaggcaggcagatcactcgaggtcaggagctggagaccagcctggtcaacatggtgaaaccccatctccaccaaaaatacaaaaaccagtcaggcgtggcggcacatgcctgcaaacccaggcactcggcaggccgaggcaggagaatcacgggagcccgaggcagggaggttgcagcgagctgagatcacggcagtacagtccagcctcggcaacagagggagaccagagagggagagggagaggagagggacagggagagagagggagagggagagtctctttctctttctctctctctctgtgtgtgtgtgtgtgtgtgtgtgtgtgtgtgtgtgtgtgtgtgtgtatttatattcaataagctaaagggaaatatggacatgaagctaaagaaaagcagaagaacaaggtgtgaactaagaggcaatgtcaataagatacataaattataatagggaaccaaatggacaatatggagctgaaaagcaaaatagcagaaatgaagaattcggctgggcacggtggctcacacctgtaatgccagcactttgggatgctgaccccaggaattcaagaccagcctgggcaacatagtgagaccttgtctttacaaaaaaaattttttttaatttgccaggtgtggtggtgcatgcctatagtcccagctacttgggaagctgaggtgggaagattgcttgagcccaggaagccaaggctgcagtgagtcacattcatgccactgcactgcagcctgggcaacatagtgagactgtctcaaaaaagaaaagaaagaagtgaagagttcactcgaggggttcaatgtcagatttgtgcacatagaagaaaggatcagggaacctgaagacaaggcgattggaattatccactctgaagagcagaaagaaaaaagatgcagaaaaatggaataacccgagggatctgggacaccatcgagtgtaccagcatacacctcacaggagtcccgaaaggagaggagaaatagaaaagggaagaaaaaattaaacttgaaggaatagtatccccaaattccccaaatttgatgaaataaatgaatctacatatcccagaatctcaacaaactgcaagccagataaactcagagatccacagtgacaaacactgttgtcaaactgtcaaaaaaacaatgacaaagcagcaagagagaagcaactggtctcgtacaaaggagcctcaataagatttttagcagatttctcatcagaagccttggagaccagagggcagtcgtataagtaaaggtaactacacaggaaaatagaaaatcaaggattatgatagttttggtttgtaactcctgtttttttctatgattcaaaagaccaactcataaaacagtaattataaatctatgttaatggacatacaatatataaagatgtatctgtgacccccaaatacctgagacaagtgtccgtcaattcaggaagtttatttggccaaggttgaggacacgagcccatgacacagcctcaggaggtcctgacatgtgcctgaggtggtccgggcacagcttggttttatacattataaggagaaatgagacatcagtcaatatatgtaagaagtacattggttctgtctggaaaagtgggacaattcaaattggagagggggcttctgggtcacagataagagacaaacagttgcattcttttgagtttctgattagcctttccaaaggaagaaatcagatatgcatttatctcagtgagcagacggatgactttgagttctgtctatcctttgtccacaaagaatttttccacaaatttgtggacacaaatttgtccacaaggagctgaggccaaaacgttggtcacttttattcacacttgcgtgccaggacaccccgaaggcctcaccttctgcacttctccccacctgcctgccctccacaagctgactctcgctgctcttccgtgaggcagtcagggaccctgttagagccgggcaatgcaaaggccctgcctctgcagtctctgttcacacatcaccttgtctgagcctcccagggaccaccctatttttgaaattttatatctattgaaatagggtcttgctctgttacccaggctggagtgcagtggtgcaatcatggctcactgcagcctcaatcccccaggctcaaacaatcctcctgccttggcctcccaaagtgctgggattacaggtgtgcaacaccatgcctggccccaccctattttatttcattttaatttttagtttattatttttaagatggtgtctcattcagtcacccaggatggagtgcagtggcatgatctcagctcactgcaacctctgccttctgggttcaagcgattctcctgcctcagcctcctgagtagctgggattacaggtgcccaccacaatgcctggttaatttttgtatttttagtagagctggggtttccccatgttggccaggtggtctcaaactcctgaccttaagtaatccacccgccttggtctcccaaagtgctgggattacaggcgggagccaccgtgcccagacccaccctatttcagattgcagctccccacactccccatcgtgctcccagcctcattcctcaccccacactggcaccagccacgccccctcgcttacttatgtcacttggctctggttgtctctctcatgcaaaggtcagctccatgatcccagtttgcctgggactgtcctggtgtcagcactgacactctgacccaagaccctccttagtgccaggcagccccagacttggtcccccagctgcagggcccgggatctttgccagtgttgtttgttcccggtgctgggtcggggcccagggcccaaggcctgctcagctgtgtgtcatgagtgaatgaggcaggcgggcgtccaaggctcacccgtgttatactgtggcccagatgtgagcagggctgtgcaccccagtacaggtgctcctgcccgcccctaccgcacccccctttctggggcccggggtcctcagcacttttctcctggcaggtgtgggggtgggtttccggcggtggtggtggagggagggcagcgtccctggccaaggaggcggtgggtgcactgggctgtgggcgctccgtgttgggtgctggggcggctgatccggctcagcaccagcactaagagccactgccgcctggtggcagcacgcgtgtgtcctccagcaggttcctcccttgtctgggagggacagtaggacagctgagatctgaacacagcctcttaacagtccccaaagactcagtttcccccatctgcagaagaaaagactcagtttcccccatctgtggaaggcttgagggagcccacacccgtcaggcaggagctcagctctgtgaccctggtctggccaatcctccccagccccacctccacggtggccaggattcccggagtagccctgggtcagagcaggggtctttgtgcaccacagggagcacccctggctggtccaggaggcaggagcaggaacctggggcggggactgccctgctgagccgggacacttgttttctggctgggggcggacggggtctccagaggagacatggagagagcagagtggcagcttgtgctgtgccccccacccccactgtgcccctgacctcccccaggctagggaggggcacctgggtgagtggcagcctgtatccccccattcccctgatctccaggttagggaagggcacctgggcgagtggcagcctgcatccccccatgcccctgatctccaggttagggagggacaccctgtccatgccccccactggcctccctgcccctggtgctcaaacccagcttctaaagcccctcacctggcctgacctccgcatccccagggtgtctccaccactggtcctttatggggacacttggatggggatgtctggtcacaccatgtgacgctgacctcaaatccactcccagagacccggcacctcccctgagtcccaaggtgctccctgccccccacatgcccatgggggtgcggcctcccacgcctttggggtgctcttgggtccagcctggtggggatggctccacgacacccgcactccagacttgtccctggtgccgtcaccatccagccaggcccaagctccattttaacagctacccctggaccaatgtttactgagtggcggggacttactcgctctgcagccccctctccagtctatgggacatagcagcctctgttgcaggagggaaaagaaggcccagcggcccacggccagctggaagagggcagcctgggcccagactgcggtgggagtgcatctgcagatggggtgcgaccaccgctgggacaggctgggcatgtggtcctgcacagcactcaggtgagacgatgtccaggctccagagggtggctcagcggggaagccggagagcctacgtgacccacacgagaagtcttcaagggccgaccccatggcccactgcacaggccactgctgggcacccctggctgggacctggatgtgccacttggaatgtctgagaaccgcacatcccagcaggtggcccccaggcaggtggcctctgagaccacaggaagtgactgaccgttgctgggtgagtggggctgggatctggggaagctgagaccctctggaggggtccgagtggggcgggtgccccagtgaagctcagcacccaaggatgcacagacaggagaggtggactccagccagtgtggggtgccctgggcagaaactggggtgatccttgaccacctcgggcctgatcagctacaggaagggtggggttgcaccctgcaccccagagcactggggaagctccaggcagctgccagggccttgtcttcagggccagggacagtggccatgaccatgaattgtctgagagggaggctggggtccagcacctgggccatccggggaaggggtagcccacccagctcctgctgttcccaggggactcaggacagggctgaaggtcttttatgtgacccagagcccctgagggccccatggagctgtagccccaggacagccagcaggtgcctaggccccacagtcaggtgagaacaccccacactctcggaggggggcctggctcagctgtccgaggctgtgccttggcctcctgccccccagcaatgtgtccctggcacctacttgttcgtgaggagattcctggcctcaggctgccgtcccatgtgggtgggtgcagctggagagagacgtaggggtggtactggctgggacaccacctcccagccctgcccccactgtgcgaggctgagacatgtgagggaaggggagggggctgcccagtcctggggtgccagtggctgtggacagcagccttccatctgcagggaggctcagcagacaagtgaaggaggagcccaccctggccccaagaggagtgtgtatgacccccagatccccccacctgagccaggcccggtcctcctgctgcctccaggcctgtccctggggccgtggacttgcccagcatagcatgggcactccacagtggcaggtgccagccccagggacacctgaccagcaggtggccattgcccctttagtctgtgatctgctggaggtgacctttgctagggagggggacctaggcttggccaaaaagtcttgctgggagaagggggagctgaaggtctgcgggtactgccacggccctgggcatgtcctgtgggcagcaggctgccctgaaatggctgtggctcagctgagctgaggagacattccagagacccctgcctggcccactggtgctccctggaaagggtctccagaggccctgggtgccaggctgtcctatccaccccctcccacccctcccacctctgtggctgttgcggttcaccccacccgaagctaggcaagctcttttgctcacagggaggggtgcaggtaggagtgccagctctgacccttcctggactccaaggcagagccacgctcctgaccacacccaggccacatgtgcttagttctgtccactgggcagagtcctgtcctgatgtaccctgggtcctgggagcctgggcctcagtggctggtgggcaaagggacatcccaagtcactggcggttggaaccagagctctgatcagggaaggtggacccccagggaggaggaggcaaggccagtgacagtgagaccagggtgggcgtgcgggaggcccagcggtgtgtggtggagggaaatgcaaggctggagggcagtgctgggcacagacctgggtttggcgcagaagcctgacctgactcagggccggatggtctccccgtttcccccacccagtctcctgttcagtgcacgccacgcccagcctgccgtgggaggcctaggtctagtcctcggcctcctgcggcccctgagagatgggcacccactggagcggaggttgcagagctgctgggggacggagaagtgtacatcggtcctccagccctgcaggcataaggcagctccgtcaacatggcctcctgcttcccccggggatgggggatgggaagggggggtgtgaactgaggtcctgcagtggaggagatggctaggggctgggcacagcagcgacacccacctggatgcagatgcctggggcacaggcctcctccctgggaaggtctaggaaggcaaaagcaggggcggctgccaggtcaccctgggtgggggagggcaggtcacaggcaatgggaggaagggtggatcaggctaaacactgtccttctcccacatcctctcagcacccacaaagcagggctggcctcccatccctccctgccaggtagactagaccctgggtgggctcagggcccgggtggggcagagaccaccacagggaagtgatggggtcctgccgccaccacccccacctccccaggatggagccccactctctcggctcactgaggctgaagggagcgggctggcctggagtgtgcgttggcaggcagggagctgtgacttcctcctgtgacacaggtgcacctggaagtgggcggggctggacgagaagaaggtgacccggaggtggccctttgtgggcgaaggctggatggtcattttccaggctgtggggagtgaagggtgagacccccatccggcccagcaccccaccgcctcccttccttccccagtgggcctggcgcctgcccactgtacctcccccacactggcttggcaccgttattccacctccctgaccagcacagagtgatataaaggatgttctgtgctgcgtccacattgcgtaggcctcatggagaacttacttgggaagcgacgctgttcgaaagggcaccgcacccaggacccccaactggtagagaactgcaaagtggggtgaggggtgcaggagggtggagtgtgtgtgaggcaggggcagggacaggggcagggacagggacaggctgggtcagcttcagggtgctctgggcccagttctcctccttaggcccttagctcacccactgtcagaccaggagggggctctgagggacgcctgggaggctaggctccagggctgggcaagggcccctgccccactccccgccctgatgccccctggcccctccccaaatagggcactggcaggctgtggcagcccctcaccttcaggcagagctggggctgggtgtccaccagcgggtactgcacctgaggagggctggggtcaggctgtggcatccatgcccacccccatccctgctgagcaggcactcactctgcgatgcaccagctggctggattgctgcagcttacggcagccggcccccggccccgggcgccagcacaggctcacatggccactcacagggcaggcgggctcccagctcagtgtctggctctccgggtggtagtagaccgtgtcccacagcacctccagtgcctcagtgtctgcaggaaccctccccgaaacacaggtcagttgggccctaccctggctgccaggcccatggggtctagcacccactcaagtgaccactgggccagggtccagcgcagtcctatgggtctctgagccctggctcaaggctgtgcacgtgtgtgcatgggtgcatgtgcatgtgtgtggatatgcatgtgcatgggtgcgtgcgcctatgtgtgtgcctgtgcatgggtgtcatgggtatgggtgtgcgtgagtgtgcctgcctgtgcatgggtgtgtgtatgtgtacgtgtttgcatgggtgtcatgggtatgggtgtgcgtgagtgtgcctgcctgtgcatgggtgtcatgggtatgggtgtgcgtgagtgtgcctgcctgtgcatgggtgtgtgtgcatgtgtacgtgtttgcatgtgtatgggtgtgtatgtgcatgggtgcgtgtgcatgggtgcgtgtccatgggtgtgggtgtgcgtatgcatgggtgtgcctgcctgcgcgtgggtgtgcgtgtgcatgtgtatgtgtgtgcatgtgtatgggcgtgtatgttcatgggtgtctgtgcatgtgtgtgtgcatgtgtatgggcgtgtatgttcatgggtgtctgtgcatgtgtatgggcgtgtatgttcgtgggtgtctgtgcatgtgtgtgtgtgcagcgtcgctgagcagaaccgagagcaggacgtctctcttgtgcccctcagacagcccctcttgacaggcttggttttcccaggtgagctggtccacgtgcgcacacatgtacattgcacacacacacacacttatgcacatccacatctgtgcgcaggttcccttggtgacaagcccttccgagcaggctcagggatttaggctgggcctgctccttatctcatccccccacgtcagtcctcatggtggagtcagactggccgcagccattcccacccttccgcccgttggcatcgcaggacacttgccgttttcaaaggggcagatctggatccgcaccgcgtcaggggtcgcagaccagccctgtgggaggggctggggtcagcgcagcccacccatccctgtgctcccctcacccgccccaagtccaggccacacctccaccgacctccaggcacaggcacggcagctcctggctgtagggcaggaagacggcctgggagacgctgttggcggtcacctgcaacccagaaagggcggctgaggggccgcgcgggagggcgggggtggtctggggtgggcgggacctgcaccgaacggggcgggagcggggacgggaggtgggtggggcctaggcctggccgggggcggggcgcggaggtgggtggggcccaggcctggccgggggcggggcgcggaggtgggtggggcctaggcctggccgggggcggggcgcggggggtgggcggggcgcggggtgggcggggcctaaggctgaccggggcccggggcgcggaggtgggcggggcctaaggctgaccggggcccggggcgcgggcgctcactcgcacaggggcgccggcgtcctcgcaggtgaaccgcttgaggcagagccgcaggtagtagtcggggctcccggaggccctgggcacttgcaccagaatcgccttgcgcctccggtccacccagtagctgagcttccccgctgcaggaggcggcaagtcggggccgcgctgggaccagcggtcaccgacgcggggctctgtctgtcccgagagccccgacgtggtggctcctgctgggttcagacgtttgggagtcgcccgcccgagggcccctcaggatttcccaaatggggcagaagaccccggggagaggaagcctgtcgcagcgtctgagggtcttcgcaggggcgtcgaaggagggaactcaccgaggcagtcgggcacgctcctccccacgtcctcctctccgcagtctgcaaaccgcagaggcaatggcggggtgcgggctgccctgccctcaggggccatcctcctccacccgccccccatccacgcgctgtgcctctgtcatgcgacctcgaattaagccagaggtcttgcggggatctgtccagtgtgagggccaggcccctgccctgggcaagtcccaccccaagccaggccctggaggctgaacggtagctgtgctcagggggccctggggaccctaccttccacgaggtgcctctggtccagctggaccccgcagaaatgagggatggtcctcagggtgacatagaggtgctgggccacgctcaccgcaaagcagccaaagtgcacttggagctgagcaggtgcaggtgtgagctgcgtggactcagaggcactgcccaccccacccggccagctccacttgcatggctggagcttagagccagggatggcgcccaggaggagtggcgcccagtcttcgggacttgggtggcagagccctgccttggcctcacctgctgccccccctgctgccggtgggaggccctggccacccacacgctctgacactgcgtctcctgggtgtccaggctcatggcacaggcctccaggccccgcaggcgctctgggtggaggaaggacccggcagggtgcatcagagcagggccgcccctggctccggacggggccgtgggaccctgttcctctgccttctctctgtgaagtgcggttagcagcccccctccctcaccaggccgcccaaggtttgatgggaataaaaggcacctgggcccactgctggacctgcgggtgttaactcccaccctcgaggccacctctcaccatgcagggtgatggaggcgcgtacacgcaggagcatcgcgcagccgtcagaggggacacactgcatggcagtggaggacgtcagggcctccaggactgacctggacatggacacggggcgtggccggcagaagctgttaaaaatgttccctggggagggagaaggagcgtgaggcctcgagttccctggtgctcggaaaggctttgtgggtggttctgggaagggggagagagccctggggctgcagtctttgccagggggtctttactatcttgccccaggccaactggagagcaagtcccctggcatgtggtgagcccccaccccgagacacactccaaaatgtctgtgggaccccaggagtgggcctgggtcaggggggcaggctgcacaccagtctgcatcagagcagtggaagctgctgccccacctggccagcaagggggcaggaagcccaccacgacttgctggcaagctctgtcgactctgctcaaagacgaacagcagaaaaggccaacacgggcttgctgggacacctgggaggcgaccccaaggttgctgcagcccaggcctctgtccacagggaagcggccgcatcctcacagggaggacttgcccccagggccttctgctctgagaccaaacgccattctgagcagcctcaccagacgtgggcagtgtggagctgggtatcattttgggcactgggggctttgctcagccaggtttgcaggtgggactcagagcagaacttcacgtgagccacagagcctggcaacccagctgttccacaggaggactgccaccctctttatagaaggcatggccaccgaggcgtgggacccacatgctgttggtgagacagtgcggctgctgctcagcggagcccacactgaacacagcaccctgctgaggcaggagagtaaggaatgagggtaactgggggtgaagggagaagcaaaagaacagcaggtgcagccagttccaggcaagattaggcagcacaggccacagcctccctcctgtgataatgagacttcacttcagcctctgattggttgcaggccgatcctccacagggtgtaacccactggaaacctccaaagggcagctaggagtgttaccaaattcttttagctttatgaaaaccctgcggagcactgcatttggggccttggctgcttgcttcggcctgctcccgctctgtggagtgctccttcgcttcagtaaatctgtgccctccttactccattattttttgttgctttacttgtgtgttttgttcaacacagcaagaacctagacaactgacggttgagaccttccacccagtaactctgtgcctcaaaggggcactgggaatgaagtccgaatatgctatgggtaagaaatccaactctttcttttcttttctttttttttttttttttttgagacagtcccgctctgacgcccaggctggagcatagtggagtgatctcaggtcactgtaacctccgcctcccagcttcaagcaattctcctgcctcagcctcacgagtagtcgggattacaggcacgcaccaccacgcccagctaatttttgtatttttaatagagacaaggtttcaccatgctggccaggctggtctcaaactcctgatctcaggtgatccgcccacctcggcctcccaaagtgctgggataacaggtgtgagccaccacgcccagccagaaatccaactcttacaaattcccactgtagtccggatggactcacagggatctgatttatcctcctgcctgagacagctgggaaaccaaggcaaaatccatgagcaatggtttcaagacaagtgggcgtgagaaagtgagggacagtgagtcctgggagacaggaaacggccacagtgagctctgggaatgcgccactgtctggggagtgttctcaggcagtggtgggggtggatcccaagtggagcttggcacactccctgagaggagaaactgggatagagagtctgggcagccggaccgagtatgagaggggagaggataacgcagagagagctctggagaatatccactttgctaatactctgtggagtattcatgaacacaggcatgtgagggaacgaccagaggtggagaaagaacaacccaagagaatttgagggagtgggccgggcggggctcatgcctgtaatcccagcactttggaaggccaaggcgggcggatcacctgagatcaggagtttgagaccagcctggccaacatggtaaaacctgtctctactaaaaatacaaaaattagccagatgtggtggctcacgcctgtaatcccagctactcaggaagctgaggcaggagaatcgcttgaacccaggaggcagaggttgcagtgagccaagatcgtgccactgcactccagcctggagacagagtgagactccatctcaaaaaaaaaaaaaaaaaaaaaaaaggctgggcatggatcacacctgtattcccagcactttgagaggccactgcacccaactgacaaaattttaaaaaccacttatcatctcaatagtcacagaaaaattttttgacaaaattcaccatccattcccgattaaaaagaaaaaatatcagcaaacagggaatgaaatttcctcaaattgataaagatgatctgtgaaaaatctatatgtaacataacatttctcagtgaaataatagattatttccacccctcagataaaaaacaagacaaggatccctgctcttctcacttcgactcaatactgcaggggggaccctactccacacaatgaggcaggaaaagaaataggcttctcgctttgaaatgaagaaggaaagttgtgtacccttgtagatgacatgattgtctctgtagaaaacactagtatctacaaaaaaggcactgaaactaataagtttagcaaagttgcagaatacaagatcaatatacaaaaatccactatttcttttttgtttgttttagttttttgtttttttgtgttttttttgagacagagcctcactctgttgcccaggctgaagtgcagtggtgcgatctcggctcactgcaacctctgcttcccgggttcaagcgattcttgtgtctcagcctcctgagtagctaggactacaggtgcgtaccaccacacccgactaattttttaatttgtggtggagacagggtttcgccatgttggccaggctggtcttgaactcctgacggcaagtgatccacctgcctcagcctcccaaacactgtatttctatatactagcaaagaataactagaaattgaaaatttaaaaataaagctggatggtttggggataaaaagccaggctgtgctagggagtggggaggggagtgaggggagctttgttcccaaggctggtgtttccttcccttggagcatcatccccggggcttggtatgcagcaatcttcagagaaatgactgtgccttagagctcggtgtgtatgttgtcatccatatgtgtgaggccaacaactcccctttaatcctagcactttgggaggccgaggagggcagatcaccagaggtcaggggttcgagaccagcctggccaacatggtgaaaccctgtctctactaaaaatacaaaaatttgccaggtgtggtggtacacacctgtagtcctagctactcgggaggctgaggtaggagaggaagggaggcagaggttgcagtgagaagagatcatgccactgcactccagcctggatgacagagcaagactccatctcaaaaaaaaaaagacaacctcctttatgcaagaaatgagaaatctgcatcttttgaccctttctagaaaaaagacaaagacttattccaggcaaccaagaaagaatcaaaaccagaaagtaaaaaaaaaaaaaaaaaaaaaaggtgaagccacggaggagaaggactcacggtgagcaaggaaaatgaggacatatacagagttagtgaaacgggcgcaggaggagaagctgctcattgtgaaataaaatgtataaaaataagaacaggatcttgtcccaactaagctgacaaaatgaagaggaggctgtgtagaaggaagggtgagtaaagcagaaacacacaagattagtgtggtacaaaacagaattcattgttactgtgtggaaaaaactgtgaaactacaattcatcataaacacttagcaataaatatgttttgccttattcaaaataaggcataaaaataatatccacagagtcttactgaaaaaacgcctaacagatgtgcttgcttcaggaaggagaagggagctcaacaggaacaagtgggttacagaaaggagcagcgaggagcagggaatgggaaaacacgatggggaattgggaattcaagctggtgttgacagaggaggaggctgaggacaactctgtgtgtttaaaaatacctgggccgggcgcggtggctcacgcctgtaatcccagcacttcgggaggtcgaggcgggcggatcacttcgggtcaggagttcgagaccagcctggccaacatggtgaaaccccgtctctgctaaaaatacaatgattagctgggcatggtgctgctgggcgcctgtaattccagctacttgagaggctaaggcaggagaatcccttgaatccgggaggcggaagttgcagtgagccgagattgcgccactgtactccagcctgggcaacaaagcgagaccttgtccccctaccccccagaaaataaaaaaataaaatataccaaaaataaaaataaaaacaccctgggactacacttccctcatatgggagacccggccatttgcaccaactcaactgctgaaaagtaccaattgggctggagaaaaaaacatatgtttttttaaaaaccttcctagaaacgtaggagagctgcgaaaataatcaggatgggggtgctgaggaaagcagggcgtaggaggttgctttacaggggtggaggatggagggaacgtttccaacccagtgggagctgagggctttgtggggaggccccagcacatggtgaggaagaacttccccacgttgagctaggccttgacctgggttagccagagctggaccaaccctctccccaaagcccaggcactgttccagactcgctgagtggaggagcagggagagaaagctcccccaaagcccacaacccagtacagattcacagcccaggttgggcccaccaggaagacccatgaaacctcagtctgtgaatctggtttaaacggccccgacagtcagacactgctcctggcaccacccaggagcaacaggaatccagcctccgggaggccctgagtcctgggacgttgagccgctgaaggtaaacaagcacaccaggaagcagagagcccagagtgacgctgtggagagggtgggcccaggtgtcctccagtaacaagccacaggccaagcaggcgaaaaaacaggcttgaaaatacaggcagcaggaaaggctgtgatgagggaccaggcacacttgagagaaatggaattcctagaaacaaaaccaccacgacagaattaaaatacaacgggtgatttttaagagcagattggggccgggcgcagtggctcacgcctgtaatcccagcactttgggaggccgaggcgggcggatcatgaggtcaagagatcgagaccagcctggccaacatggtgaaactctgtctctactaaaaatacacaaaaaattacccaggcatggtggcacatgcctgtaatcccagctactcaggaggctgaggcaggtgaattgcttgagcccaggaggcagaggttgcagtgagccaagattgcaccactgcacttcagcgtgggcaaaacagtgagactctgtctcaaaaaaaaaaaaaaaaagggaggggatgttaaactaaaaaacctatatgacaattttcatagatgcagaaatttttcataaaattcaatacctattcatgatgaaagaatgtttagcaaactaggaaaagaaaggcacctctttgtctagatcagggacatctagtgcaaacatccaataaacttaatactgaacagtaaacctttggaatcattactattaatatcaggactcaaacaggaattccctcattcaccattgccctggagagctgagccaattccacaagatccgccccctccacccaatgcgtaggtttatgagctgtcattagctgcagaatatgtgatcatcattaaaaaaggagactccataggaaatctattagaaatactaaagagctttatcttttatttgtttatttatgtttttatgaggcagagtctcactccattgcccaggctggagtgcaatggtgcaatcttggctcactacaacctctgcctcctgggttcgagtgattctcttgcctcagcctcccaggtagctgggattacaggcaagtgccaccacactcagttaatttttttgggggggggattcttagtacagacaggtttcaccatgttggccaggctggtctcgaactcctgacgtcaggtgatccacctgcctcggcctcccaaagtgctgggattacaggtgtgagccaccgcatcagccatgctttgcatttgttgtttgtttgttactatagtccgctttgtgaatttgcatgtcatccttgcgcaggggccaagctgatctaatctcctcccttaagcttagaggtccttgaggtgaagaaacatttaagtaaagtttagccatctatttttctgttaaattcaagtaaaaataaaatagtttaaatgacataaggtaatttcatttctataaaataatttttatctgtttatcctgcaaatatctgtatatttggctacacaaatgtctagaacaggccaggcatggtggctcaagttcacaatcccagcactttgggaggccgaggcaggaggatcgcttgagcccaggagtttgagaacagcctgggtttggttgaccaaccagagataggaagacttcaggtctattcctatgaaaatcaaaaataagaaaaaaaaccccaaaatgcctagagcaatgtttgcctaggtaaacactgtttatttctacatggaggctttccagtgagccttaactttcttccttgtggcatctgcatcactcagagtccttttataaatagatacgctgtttaacaaagacaaggtagttgttaaaggcccagtagggatcactttacacagggaaaaagctttgctagaggagacggggttttccacctgctgcttctgggcggccggtttggaacgcaacgaggcattgtgcgttaagtggagacgtgggactctctggcaggcccacctctggccaggagccagggtggccttgcctgggtgtggccagggtcccacacgcatcggtgagtgatagaggtttgccctgcccagaagggaaccccagctgctggggacactgcaggacagacctgcctcccacggtggacaaagcggccctggtagcctggggtggggagtccaggccctgagcatcccccggggctgagatgtactcacggttcctgtggctcctgcaggcaaagccctggggacagaacagtgagaggggtgagcggctgagggcaccccctccccagcccatcctgctcctgccctgtccctcactcctgggggtcctgggctgccctgaatcctggcttctcctcagtgtcaggggcctggcccaaggctggcatgcggcggtcacttagtaaacagtgtggtctgaatccctctggaccctcaggccccagctccccgacccacttgtgcgtttaagtggacactagcagagcacccactacgtgccaggctcgcttaggtgctgggattcatgaacagaggaaaactgaaccatccccacctctccaggagctcacattccgagaagggggagacagaacgatccgaaacctgggaaatcagcaacttatattctgtgtaactaaaataaaggggtgggaaaataacagaggggtcaggaggagcaagaggggtccggatagtgtggggggtgcaggttataaatctaaggggtgcttggggggcctcatagaggtcaatttcatgggcctggaagcaagtgaggctgagttggtggtgcggggcgggggcatgccgtgcagtgaacaggtcctggatggtccaggtccaagctgcactcctgatttatgatcatccccagcccaacctgaccaagggcactcaaagaggggcatgaggacttgtggccaggctcccacggggcagaagggtcctgtgggacaggctgctcgcagacagcctgtgggtgaggcagaaggcgcccggcaccccggcaccaacggcgtgggagctgaggtccgagagcacagggtggcactggcgccctcagagcagggcaggacccccagagtccaggccccctgggggcggccactgagcctggggtgttggactgtgcagcccgcggtcaacacagccgctccattcttgaaaagagctgaccctctacagaccggacggggaagcccaggctgtcggggtgggggtgggggtggggggagctcaagatggagacctggacttctgctcctagcccaggtgggaacacggaaaaataaaagtcgggcccacttctgttccttgaattgtggagcgggcattaccggtggctacacctccttctaaatattttttattttggaatatgtttagatttacagagagtttacccaggatcccctcatctcaacagtttcccgtgcatctgcaaaacctggggagccacatgggtggcggcagtcagtgaccctcagtctggtgtggaatcggcggcagtcagtgaccctcagtctggtgtggaatcggcggcagtcagtgaccctcagtctggtgtggaatcacgtgctactagtgaactgttttctgttccagggtccagcgcaggaccccaccctgcagatggcctctgagtcttcgttctcaccccaccgtctctacccatttgccgaccaccccaataactccccagagactgccgtgagtgaccctcctccgcctgccatggccacgaaacccgccgcccgtgggcggagtatacaggctggacccagcgtcctgatggaagccccggcctcggcccctggtggggagcagggcctcaaacgaggggccggcggagctgaccccaggctgctgagggctccgcccaggcaaaaggggccgggctcacccggggcagcctctggggaacgggatccgagcaggcctcaggtgggcaggcgagggcagcccagaccagcccgggcacagagggagcggcggaggcagcgtggggaggcccagtgaggccgcctgtgtggaactgcaggggggcagtggcgtgggtccccgggcctccctcccgccaggtgccctgaagcccctctgggcgcccactgtggcctggactccccgcatccaccttcaggagagaaagaatccccgctgggggctcggaggccggggtgggctggagaggcgaagggcgtctgctctctctcctgacttcctggactctgaagcccacccagggctggccccgtggcccgagtgtctggggctgcaggagaagccgctgtcgggggcgcggaacgtcgcgcggttctgccccgcccctgccccacggcacggggagcgggacccgggcgcgctggggggaaggtggggggagcgggggcgggggggggctgagcccgggcgctgggcgcctcccccgcacggggttttccgtcgtgcttctcggggcttcccagcggccggcgtcggggggtgtgcagggaacccccagggcggctgctcgcggccccaccccgcccaagctcccctgcatgcggcccagcctcccgccgtcacccgcgcgggtccccccccagggcgcggctgtagccccagcctcccctccctggcttccccccgcgggcaggggctcccgcgccccctcgcaaccaccgccctgtccaaggctgcccaggcagcgcccctacacccacctccagcttcccgctcctcttgtcaccccttgacccctcctgctcaaccctccccaccccatcttccatgagaccctccctcagccccgccaaacccctcctctcctctcccctccagcacttcccctccttcctggcctcttccacccgcctcagcccctgcccttgcccctgcccctttccttggagtactgagggttcaatcttggtccccacccattccccaggatcacctggccgtcctagcgtggacagcgcggtcacacctcggaccgggaggctgcctgcataccccgcagccgcctcagcaaagctttccagcttgcacttcaaggccgcctccccccatgtctcccaactcagggaccatttcctcccagaggcaaaagtcgattctgaggtctcatctctcgcttctccttccccctcctagccaggatccccaggcctgccccctccctgttttccatctccactgcagggtggcatccggtggacacccctcccacctgaacccgcccatctcccctgctgccaccggttcccacgcatcccagcctgctttcttccttgttccacgaatgccctgtggatctgagcctgcccatggcacccagcactccagcccttgctgctcccctccctgagctgagccctctgctggacccgtctcaggccctgtggagctgctggatgtccccgcaagtgtcccctgaggtgaccaggccaccaccctaaaggcacatcttgctaactgctgtccccatgccaggaacggtgcacccagcaggtcctcagtgagtcctccctttccgggacaccttctgtgccctttccatgcctgtgtccccactgtgcccggccagccttgggcaccggggccccttcctgggatgctgggtacacttcctgctgcaggtgctgatgaagcgccctctcctgtaaggctgagtgagtgggctgtgcagtgagagccctccaccccaacccagccacctccactgccaacatctcattctcagcacgttctccgagtgtttccttggcaggtgtctacacaagcccaggtgttgcgggctcccgatggctcagagcagccgagcggggtggggtgggagccccggatgggcttgcgggctgccctagattctaacacagcctccttggaggtcacaggtgggtccgaggtgggctcaccctgccttgagcttccagcaaacacttcccggagcagctcggcagggtcaggccaggtctcccatccttctttcaccagcgctgccctcggaccccccagggccctgcaacccctcacctgctgatgtgctgagagcgtcaggccagacccacctgaggagaaaccagggccttatctgccacagtgtaggggcctaggaggaggcaggagcttacctgagaacaggagaggccacattctgtaatccgggggatggccaggctctggaaagtgccccaggtcaggcccaagaacgcgagtgcttgcccagccagcatctggctgtgcagtgagagctcccactggtaagcgtggatgtgagtggggcaagtttgcaggatgccctgtggcagcggctccaggctgaccctgcagctccagccccaaagacaaacagagggtggaggctgctcttcacagctggagcgagcgagacactccccctcccggcaaaacagggctcgcttcacagacagcagcccgggagactttccaccgcctggggccagaagactgtggccagacacttgtggagtttctaggtttccaaaggaagcatccagaaaccttggggcctttggggtccgaggacaccctaatggggttccccacagggcggccactggtgcagagatggctccaggccggcgggataggctgccgccggcgtgcacctccctcaggcatgcatgaggccaggagggtagacaagggccctggaaagctggctgggctggcagaggggtggaatctgtcctgggcactcataccccagagcccctggcttcagccccagcccctaaggggagccctctcctaagacctgagattccacccaagtccctggcctccacctcccctcaagatgcaaaaggccacctcccctgtgtggtcctccctatgagcccccccccactccggagggcaccccccgaggctgggaactctggggcccagcctctgctcagggagccgttctgtgtcatcttcttatttggagcatcaaatgcataggaaagtttctgggcagaagcttactgcttcccatttgcctccagccagggcagggggttggagagaaccagggtgcagttcttgggtcctcctggctcctcccttcctggacaggcacagaggcttctgcacctgcctcaggttctgggagggcactgccccacgtgtgtgtgtgtgtgtgtgtgtgtgtgtgtgtgtgtgtgtgtgtgtgtgtctgtgtgtgtgtgggggggggatggcgggagttaatagctggggagcctgggagtgtctagctggggtgttctgcctggaatacccacaggacaccccaagtgtggagggcggcaccacccccaggctgggagaggctgtgggcctcacactgtgggctcgggtagtcaggagggagcttgagaaacaagctctggggttcggtcccaggggagggaaggcggcaggggctgctgtgaccgtgaagtcctccctccctcccaccaccccgcactgcccacctccctgcctcctgggccagcacctcgaccctgcccccgcctggcctagagccctccatgggctggaacttatgcactcactgctgggcagagtagatggggctgagcccgccccctgcagcagcgtgcctgtggccacaatgccctggagagagtggctagtgccagcctccatgccacggcatggtcagcagcaggcaggcacatttgggggtggctcaggacgggccactgtcatcccctatcccaggctggctgagctgtaagacagatactccagctgggcctcgcccctcagcctggcctccagccctccttataccaggggacgatgggggctgctgtactgtggcaggggtgtcccagacgatgtccatgggcacggccagcaggatcattgggaaaggacaaatgtccctcccccatgggcccactcacacccaaacctctctccaggcctctctgggacaggcccccaccacgacacacccgttgcctgaaggcgccatcccagcgtgccgtgacgcaggcaggggctgcaggtggccagtagtcggtgatctcgtgtagggacggcccacggggtgtggctggtgctggttccaaggcccagggaaggacagtggggccggcctctgccctctgccccaggcccccggccaccctctccagcctgaggtcagagggctccagccctgtctctgagggctgggggattggccctgctcagtatccatgaagagccaggccacgggctcctgggcgggccccggccaccgagatcacccaccgcagctgggcgaggcctggggtgggggtggggtctttccaagtctgggtctccagggcagcacggccacacagcccagtgaccatcggtcgcccagaagcccaacggtgaagggatctgagggtccaaccccgggggctccctccgcgcccgcgctgggcaccagatgggaggaaacggggtgcggagaccctgggcggcgccgagactcgtcggacgaacgcgggaaggaacgaaccagcgtccgcccgggacccgggctggagccttccccagagcggctcggagggtccggagcgggtgcgggggtgctgggcacgaggttcccaagaaaaccacggcgaggacgcgggttcaccacaacagcgctgtgttctcggcctcagctccgcgcaggtttccacggagacgcgcgtggctccgggtcgtcgtcctggtccccgcgccggtcccgactcacggggtccgcgggctgcagctccgcccgccgagccgcacgaaggacgcgccctgcaggaccgcggcgcagaacgagcggcagcgcttgcagggcccggcgggtggcagcagcccgcggcacacgaggcagggcggcgctcgggggtccctcggcagccctggggagggaggggcgctgagaccgcgtgcgccggccccacattccccggccgcgcctccctccaccccgacagcactcgcccgccccggcgcgccccgggactccccaccccctacagcgccttcctccacctgcagtcgcgtccccgggccccgcccaccccgccccccgccaccgctcctccagcccactgaccttcccacaccccccgggaaccctggactgcgtccacagaccctgagcccacagatccctgaaacctcgcccctgtcctctcctaccccagcccacccccgaccgcgccccaggccccctgactgtgcctagcgccccttgacctcgaccccaggtccccggaccgcacccacccgtccctcaatccacacccaccaacaggcgacgcccgcgcccctcaaggccacgcccccaggcaggccccccagggtcacccttatcacctgcaagaccagccccaggtggctcccaactcgctcctgcatggagcccacctgcttcccccagctttcggaaaaccaagacctccactcaaacgcaggggggcgggggtagggtgtcgtccctctgggatgaaggctctgcggatgggaggtccccttccccacccccctcaccctccctaacgcccctccacctggccccccaccccagaggggcagtccagctctgcctctagcttgtcagcctctctcagccctcctccaggtgagtcctgcctagaaggacccaaccggccaggagatttggagaagagcagcccccaccccaactcgtcctgccctgctgtgcctgggctcaggttcagatgcctggtgctgaggacccatccccactgggccaggaccaagtgggtggtgggttcaggacggtgcctgcaggcgagggccagcagcatgctgggccagccacagagtcccaggatgggtcagcagctggaggggtcaggagggaggtgggagtgttaagactgggggtgctccaggagccaccgagtccccacaagaggctgcacccagtgcaggccatctggacacactggcaccttcgaagtgggcctgggctggggctcctggtggagctagaagacctgctacccacaacctgtggtcagacctcaccagggcccatgggcagttctgatgccaggagctgccggaggaagcacaccccaggcccaccatcccacgtggtgcccgtggtctggcaggcggccacgtggtgcccgtggtgtggcaggcggctgcagaccgtgccctctcctgcatggactcaaaggtggcagccgtgatgggtgagagcaggtagctgccgtccaccgcagggctggccactcagcaaggccaccccctgcatgggagctgctgcgttttgagaactttcacgcagttcctcggagcgtcacaggataggcaaggctggcaggtgtgaccaccatgtgtccctttcatccgagaggctggggccttggcctggctctcactggcctccaaccgctgtccttgccctggggctgtcccgggtccctggccagcccttctcagtggggtgagcctgtgccaagccccgtcccccatgtactggggctggtgagtcaaacttcaggttgcccaggccaggaaggactaggggaaggccagcctgcacacttgctgcagctatagctggtgggggagggacagaaggagccccagggtggggtagggatgtggggtgaagaggggactccctggttttcctagccgccagggctgtaggttcccaagcagccacagcccagcccagaagtgcaggcaccaccctgctggggcacccaccgcccacggcaaactccgagccccaggctgagtcactcttcctggggggctgggtggggagagcccccagtgcctatgcaaagcagtccttggcttccgggaacctcggaagggctgggccagcttggcccataggacaggccagggcccacgtggcacaagcagggcatgagcagcaggaagaacgaggtgggaacagctcccactccccagggctctcatcccagcggagagacgcacggaggccgggcacaggactgggaggtcaaatctgccagggtggcccagcgcagcaggccaggtagcactgcggggcagggccttgtcccccaggcacccagggcctgatgggacccaccggggtgcccagaaagtgtgtgtccagtaagtcggggcagaggctgggcccaccctaagtgaaggaggaggggacgtggtgtctgcggctctccgtgtgtctgtgcgtgattaatggagcatgcatgagctaaccgagcagctggtgtggggcctggaccctgctgagggaggggaggcccaaggcctgggccccaaccctgtatggaggccagggctggggtgagactcattgtggggtgtcagcaggctccggggagccactaaagcccatggggtgcactcagtacctgggagtctgggacccagaccagcccttccagggaaaaccaccaaataagggcataagataggaaaagcatcacaaaaacaagcaaaagcagcaggcaagacggtaaaggaggaccaggtccaggccagggaaggtgagtgagcccaaggagagggcgctctgaaaggtgcccggccccgaagctcctccctctgagactttgccaccagggccacctggagctctgggtcccaaggccctggagtgtggggacagaagacaccccatgcccccaacaatatgcagccccaaacagctgggtgcaagggtgaatcaaaaacagcagggtatggtgcacacctgtggtcccagctactcaggaggctgaagtaggaggatcgcttgagcctgagagttggaggctgcagttggaggctgtgactgcaccactgcactccagcctgggtgacagagtgagatcctgtctcagaaaaaaaaaaaaagaaagaaaaaagatcaaataattttattaaaaagtagaacttctaaaaatgaaaactttaagaaattaaaacttcaatgggttgatagcattctgaaatgagctggaagacaggcgaggagatatttttagaatgcagcacaggcagctaaataaatcaaacaaagaagtgggagactaaaagataccgggagagagagaaggcttagcaaacatttagtttgtattccaaagggaaagagacagaacggggtggaggcaatatttaaagacataatggctgagagagtcccataattgaataatgacaccagcgcacacatcaaagacattcaaattccaggttgaataagtaaaaatcaaactgaacactcaaaagctggcagatagaactgacagctccccttggagagtgatggctgactctgctgattttcccagagccacagcaaagacaagatggtggaaagacgtattcaatgttcggcgggagagtggctgcaacctgtactcctgctgcagagaatctgacgctgtcatgaacctgtgtggaaaagatattgacagaccaaaagctcatccgaacgtcccatcactggcaccttcctaagggacactgtcttgagcagaaagaaagtggttcagaatgaacatggttggaagtctgagactcaggaagagtgaagggcaaagaggaatgtatgtagtaaatctaaaaaccactggctgtgcaagcgatgatgataatcatgcccagtagactgttaaaaacattattaaacaggctgacagcaatagcaggaagtcagaagggagcacgggacttcacattttccaggcttcaaagtcgatatattgccaggtgggtataagtgtgacttccttcactttagattttgataagtttaacgtgcaatgagtaatttgtaggcagtgagtaaaacaccagaaacagagtctgtaacctccaaaccagaagaaggaaaaaccaaaatgagagaagaagcgtcaatgaaaactaaggcaagaacagagagaaaaaggaacatagaatagatgagatcaacaaaagttaaatgaaatcaaatggtaggtactgtggtcatcaggctccaaggcagcccccagtgatcctcacccccaggcaatcacgcatgtgtgctcccctcctgtctggatcaggattgaggtgcatggccagtagaatataggggcagcaggggtatgtgatgtcttgggtgaggtcataaagacctcatgaatctagtggtctctcttgaatcactcactggaggaagccagctgccatgttgtgaggacactcagccctgtggaaggtccacgtgggagggactgatggggggtgcaccatcagggaggtgggtccccagctccaggcaaaccttcagatgaggctgcctcagttcacaccgggactgagcttcagaagcatccctgaagcagcaccatgccgaggagcccttctcggactcctgagccacagaaaatgtggaggataaatgtttgctttgccacagctctgctttgcagtgatttcttatgcagaatcaatcaccacagaatccatgtacatgattacattaaacgtaaatgttacatgcactggttaaaagacactggcagtccggaattttatgcagagaaatatgtaaaacataagcttatataatgatgaaagaaaaaacataccaggaaaatcctcaccaaaataaaattagtaacaatctgaaaactctaaagcaagaactgacagaattacatgcatcttatcatacttttcttagtaactgataagcaaactaagaaaatgaaatatgtcaacaacacaataaacaaatctggcccaactcatgatactgaacaatttcagaattacatattatttgcaccaagaaatatttacaaaaattgatgaccaaaagcaactgacaatcatctaatgactcacaatcctccatctgacatgtactcctccatctgacatgcactcctccatctgacgtgcactcctccatctgatgtgcactcctccatctgacgtgcactcctccatctgacgtgcacacctccatctaacgtgccctcctccatctgatgacgtgcactcctccatctgacgtgcattcctccatctgacaatgtgtactcctccatctgacgtgcactactccatctgacgaaatgcactcctccatcagatgatgtgtactcctccatctgacatgcactcctccatctgacaacatgcactcctccatctgatgatgtgtactcctccatctgacatgcactcctccatctgacaacgtgcactcctccatttgacgtgaactcctccatctaacgacgtgtacccctccatctgacaacgtgcactcctccatctgacaacatgcactcctccatctgacaacgtgcactcctccatctgacatgtactcctccatctgacgatgtgcactccatctgatgtgcattcctccatctgatgatgtgtactccttcatctgacgtgcactccgccatctgacaacatgcactcctccatctgacgtgcactcctccatctgacaacgtgcactcctacatctgacgacgtgcactcctccatctgacgtgcactcctccatctgacgtgcactcctccatctgaatgtgtactcctccatctgatgatgtgtactcctccatctgacatgcactcctccatctgacgtgcattcctccatctgacgtgcactcctccatctgacaacgtgcattcctccatctgatgtgcactcctccatctgacctgcactcctccatctgatgatgtgcactcctccatctgatgtgcactcttccatctgacattcactcctccatctgatgatgtgtactcctccatctgatgtgcactcctccatctgacgtgcactcctccatctgatgtgtactcctccatctgacgtgcactcctccatctgacgacatgtactcctccatctgacaatgtgcactcctccatctgatgtgcactcctccatctgacgatgtgtactcctccatctgatgtgcactcctccatctgatatgcactcctccatctgacatgcactcctccatctgatgacgtgcactcctccatctgatgtgcactcctccatctgatgatgtgtactcctccatctgacgtgcactcctccatgtgacgacgtgcactcctccatctgacatgcactcctccatctgatgacgtgcactcctccatctgacgtgcactcctccatctgatgtgcactcctccatctgatgatgtgtactcctccatctgatgtgcactcctccatctgacgacgtgcactcctccatctgacatgcactcctccatctgatgatgtgcactcctccatctgacgacgtgcactcctccatctgacatgcactcctccatctgatgatgtgcactcctccatctgacgtgcactcctccatctgatgtgcactcctccatctgacgtgcactcctccatctgacgacgtgcactcctccatctgacatgcactcctccatctgacgacgtgcactcctccatctgatatgcactcctccatctgatgacatgcacttctccatctgacgtgcactcctccatctgatgatgtgtactcctccacctgacatgcagtcctccatctgacgtgcactcctccatctgacgacgtgcactcctccatctgacgtgcactcctccatctgatgatgtgcgctccttcatctgacatgcactcctccatctgatgatgtgtactcctccatctgacgacatgcactcctccatctgacgtgcactcctccatctgacgatgtgcactcctccatctgacatgcactcctccatctgatgacgtgcactcctccatctgatgatgtgcactcctccatctgacgacgtgcactcctacatctgacatgcactcctccttctgacaatgtgtactcctccgtctgatgtgcactcctccatctgacaatgtgcactcctccatctgatgcacactcctccgacgacgtgcactcctccatctgacaatgtgtactcctccatctgatgatgtgtactactccatctgacaatgtgtactcctccatctgacatgcactcctccatctgacaatgtgtactcctccatctgatgatgtgtactcctccatctgacgtgtactcctccatctgacgtgcactcctccatctgacaatgtgtactcctccatctgacatgcattcctccatctgacaatgtgcactcctccatctgatgtgcacgcctccatttgacaatgtgtactcctccatctgatgcgcattcctccatctgacgacgtgcactcctccatctgacgatgtgttttgatgaaaacccagcatcccctgtcacagttaagaaactcctgcccactcttaactctgcaggtccatgtaggtgtggagcagcaagaataagacacaaaaggcataaagatcataagggaagaagtgaaacggaattgatttgcaggtgatgtgactttgtcgaaaacccaaaggcatctacaagttgccagaatcaagaggtgaatttaccaacaagttgggacacagtgtccatgtacaaaatcagggcatgtcccacattttagcaacaaaccagaaccaagaggtgaatttaccaacacgtcaggacagagtgtccatgtacaaaatcagggcatgtcccacattttagcaacaaaccagaaccaagaggtgaatttaccaacacgtcaggacacagtgtccatgtacaaaaccagggcatttcgcacattttagcaacaaacaattggaaaataaaatttcaaatactattgataaaattatcaaaatttatttgtaaaatatacttataaaagtatcaaaaatccatcaaatacctaggaataaatgtaatgaaaactatgcaataatattgcttggagaaactgaaaaaaacctaaataaacgttgagatacatcatgtgcagggatcagaagcctcaatattgtaggatatcaattctccccaaaatgatctatagatttgacacaatctcaataaacatcccagcaggtctttttaaaacttaacatgaggctgggcacggtggctgacgcctgtaatcccagcactttgggaggccgaggcgggtggatcacaaggtcaggagatcgagaccatcctggctaacacggtgaaaccccgtccctactaaaaatacaaaaaaattagctgggcgtggtagtgtgcgcctgtcatcccagctactcaggaggctgaggcaggataatcgcttgaacctgggaggcggaggttgcagtgagccaagatcgcaccgctgcactccagcctggcaacaaagcgagactccgtctcaaaataaataaataaataaataaataaataaataaatacttaacatgaaaattcaggccaggtgcggtggctcacgcctgtaatcccggcactttgggaggccgaggtgggcagatcacgaggtcaggagttcgagaccagcctggccaacacagtgaaaccccatctctactaaaaatacaaaaaattagccgggcatggtcgtgggcacctgtaatcccagctacttgggaggctggggcaggagaatcacttgaactcaggaggcagaggttgcaatgagctgagatcatgtcactgcactccagcccgggcaactgtgcgagactctgtctcaaaacaaacaaacagacaacaataacaacaacaaaaccattcaaatgacatagagtagccaacgcaattttgaagaagaaacaaaattggaaaatgtatactatcatatttggttttgttttgtgttttgtttttgaggtggagtctctctctgtcaaccaggctggagtgcaatggcgcgatcttggctcactgcaacctccacctcctggattcaagcaactctcctgcttcagcctctttactagctgggattacaggtgcctgccaccatgcctggctattttttttttagtagtttcgccatgttggtcaggctagtttccaacttgtgacctcaaatgatccgcccgcctcggcctcccagagtgctggggttacaggtgtgagccaccactgtcgtatttgaaaacttcgaagacagtgtggtattgacataaggataggtaaatagattgttgaaacagcataaataatccagaattccttcaagagagtatatttttgacaaagatgcccaagtaattcagtgggaggaaggatggtctttttgatgatggtgctggaacaactggacagtcacaggaaaatctaaatttaacgttttatttaggaagcaagaattgcaattcagggcatatacacagacggggtgatctcactacgtccgaagaacaaagacaaggttgggagttttcttagaaacataaatgatctgtgttgtttcacaagcaagctcaccagcaagaccagtaagcaccaggagacctgtggggctctgatgggtgaatgatggtgtgggtgaaagcacgttcagagtcccagcaggttgtttcagcagctcgcagataaaactgtcttcagattacaggggctgctttaggtgctgggctcacaaaatgtttaatttttggagcaggtgccaggttatgttctgagtgtttttttcccctggccccttgattctgatttagttgtgtagcacaagagtgagcccatttgtatcattggcttttacaacaccatacacaagaattcactcaagacgcatcattgaccaaaatgtgaaagtcaaaaccataaagcttgtcgaaggaatcacagaagagcatttaatgcctgagaagctggacaccctgtttacactgagcgattattacataccgcatgcctgcatcatcatatttcacgtaacccacaaatatatacacctactgtgtacccacagaaataaaaaaaaaaacaaattagcaaaaactccaaaaaaaaaaaaaaaggcatcactaagaaagcaaaaaggcaaaaaccacagactgggaggaaacagtcccactgtgcatatctgacaaataaatacacagaagaggccgggcgcgggggctcaggcctgtcatcccagcacctgaggtcgggagttcgagaccagcctgcccaacatggtgaaaccccgtctctactaaaaatacaaaattagctgggcatggtggtgcgtgcctgtaatcccagctactcgggaggctgaggcaggagaatcgcttagaaccccagaggcttaggttgccgtgagccgagatcgtgcggttgcactccagcctgggcaacagagtgagaccttgtctcaaaaataaataaattaaataaatatacagaatctataaaaaccactacaagtaactaaccaaaggcaagcaacctaattttacaataggaaaaagacttagtaaggcattttgcaaagcaaaatatctgaaaggctaatgaacaaagtgctcagcatggctagtcacctgagaaacacgaattaaaaccacgatgagatatccgtacacctaccagactggctaaaaacacagcctgacaatacccagtgttgaccaggatgtggggcaaccaggactctcacgtggcaggtgggagtgcaaaacgccacaaccatattggaaatgggaagtttcttctaaagcaaaacccaagcatccttcatgacgtagtggtgccactcttggacacacagccaagacagacaaaggcacatgtccccgtaaaggccagaacaggatgatcagagcaacttcatttatcacagtcctacagtggaagcaaggcagctgtccgtcagcaggggaccaggcgggctctggcacatgtgtgcaatgcagtactgttatcaccgacaaagggtgcacactcgtcacactgtacagccgctgcacctcagagtgcagggtcagacacggaaatacacccgccactctgcacagccgccaccctgcacagccgccacctcagaggggagggtcagacacagaaatacgcctgccactctgcacagccaccacctcagagtggagggtcagacacggaaatacacccgccattctgcaccgccgccacctcagagcggagggtcagacacggaaatacgcctgccactctgcacagccaccacctcagagtggagggtcagacacggaaatacacccgccattctgcaccgccgccacctcagagcggagggtcagacatggaagcgcagaccgtgccgctccacctgtaagacgtgcaggggccaccaaaggtaattgatgatgatttaagtccaatagtgatgatcaccatttggagaagagactagaaaaggcaggaggctccgtgtggctgtgtgggtatcacacatgtgacaatccatcaagctgtgtctacttacggtctgtcctcactgtaggtaagtcataccttcacaagaccgtttggaaagagatactatttactaggcaagaaaaaccaccaaatggctagaaaaacatctaatgaatgacatgccagacttgccagaccttctatcctgaaaaccactgaggaaagtcaaagaacccggttaaatgaaccagatctggatcatggttggaaaactttatttaaaaaaaaagtcggccaggtgcggtggctcacgcctgtaatcccagcacttagggaggccgaggtgggtggatcacctgaggtcaggagttcgagattagcctgaccaatatgatgaaaccccatctctactaaaaatacaaaaaaattagctgggcgtggtggtgcgcgcctgtagtcccagctactcagggggctgaggcaggagaatcgcttgaacccaggaggtggatgttgcagtgagctgagattgtgccactgcactccagcctgggagacagaacgggactccgtctcaaaaaaaaaaaaaatctgctgggcgtggtggctcacgcctgtaatcccaacactttgggaggccaaggtgcgtggattgcctgagcttaggagtttccaaccagcctggccaacatggtgaaactctgtctctactaaaatacaaaatattaactgggcatggtggtgggcgcctgtggtcccagctactcaggaggctgaggcaggagaattgcttgaacccgggatatggaggttgcagtgagccaagatcgagccactgcactccagcctgggcaacagaatgagactccgtctcaaaaaaaaaaaaaaaaaaggatgtccgttctccccaagatctgcagattcaaggtgatcccagtcaaagtcccagcagtttgctgttcttaagccaacaagctccaagggccagcacgcacttcctgtcctgctggccggactgggcctggtgaccctgtcgccgcaggccttttgcagcacaggctctgagagcaacggtgcggttgcctgactgtcacggaacaaacacacaccaggcgagcactagcctgaggccgaggggcacatggagctggcctgagcccagccaggagtctggaagcaagcccagctcctcccggccgtgccctcgagggcctgaccgcgaaacgctcgtacgcacgggttggagttgtttgccacgcgtggcaactgcggcaggaacctgactcacgcacggacgccagcacccacaagtgagaggcgcctcagacacgtggtgtcggctttggaagcagctggtgggtggtgaggaaatgtcacagctctggaaagacagaggcctctgtaaggtggtgtcaaaatgccaggttgaatcaacagtcatctgcggggactctgaaggcaggcaatccgcccagtgaactggcagcaccgggcaggagggtctggagggagaaccctggtggcatggctggtgtgtgaggatcaaaggcagaggagatctttcctcttcagcatggtaatttggcactgggctaagcctccagctgcctcccgctggtgacctggtaaaggggaacataaactcctttggtcggcaacattgcttacggcaacactgccctgtggcaggcagaccacgtggggactggggagtcattggtgtctgggaggccacgtcactggccttcctgagtgatccccacacctgggaatgtgccctgcgggccatagccgcgggattgctgcaggaggaacttcgcctcccgtggggcaagaggcatctccgtgagtgggtcccagcccctgaatcgcagtgggaatcagggaggcggcaacacctgcgtgccgtcataaagacccccaccatgccctcgtaaagacccccatcacaccgtcctgaagacccccacataccctcgtaaagaccccatcacaccatcctaaagacccccacacacactcgtaaagaccccatcacaccatcctgaagaccccacacaccctcgtaaagaccccatcacaccgtcctaaagacccccacataccctcgtaaagaccccatcacaccgtcctgaagaccccacacaccctcgtaaagacccccatcacgctgtcctaaagacccccacataccctcgtaaagacccccatcacaccatcctaaagaccccacataccctcgtaaagacccccatcacaccgtcctgaagacccccacacaccctcgtaaagaccccatcacaccgtcctgaagacccccacacacactcgtaaagaccccatcacaccatcctgaagaccccacacaccctcgtaaagaccccatcacaccgtcctgaagaccccacacacactcgtaaagaccccatcacaccatcctgaagaccccacacaccctcgtaaagaccccatcacaccgtcctgaagaccccacacaccctcgtaaagaccccatcacaccgtcctgaagaccccacacaccctcgtaaagaccccatcacaccgtcctgaagaccccacacaccctcgtaaagaccccatcacaccatcctgaagaccccacacaccctcgtaaagaccccatcacaccatcctgaagaccccacacaccctcgtaaagaccccatcacaccgtcctaaagacccccacacaccctcgtaaagaccccatcacaccatcctgaagaccccacacacactcgtaaagaccccatcacaccgtcctaaagaccccccctattgccgggcgcggtggctcacgcctgtaatcccagcaccttgggaggctgaggcggcggatcacgaggtcaggaggtggagaccatcctgactaacacggtgaaaccccatctctactaaaaattagccgggcgcggtggcgggcgcctgtggtcccagctactcgggaggctgaggcaggagaatggcgcgaacccgggaggcggaggctgcagtgagccgagatcgcgccacggcacttcagcctcagcaacagagcaagactctgtctcaaaaaaacaaaaaaaacaagaccctctcgtcatgctgcctaaagacccccaccacgccctcgcgaggaccccccaccgcgccgtcctgaagacccccacgcgggaggaacggctgatgctgccctgctggtcagccgcgcccctgccccacgtccttctccgcgactctgaggccaagagcagcctgtggcagcccctgaagtctgaacgtgtggccgaggctcggaagagcccgatgggggccgggcgtggtggctcaggcctgtcacctcagcctccagagccttcagaaaaccgcacgccaaagccccgcggtcactttggcccctcgctcggccagggagcttggtgctgttcacggcgctgttcaaggtcctaactcaaatcctccgacccgcgccacaccccagaggtatggggacaaaggcgtcacccgccaggttctacagaggggaccccaccatccacctggccggcactcccacgccccccaccccgagacccccgtgccgggctgggacaggtgccccaaccccgctccccggctcccgccggcgcctccgtcaggggacaccccgggccccagcaccgaagcctgccctgcgccccgctctggaggatgcagcggctgctggcgagggttggggatgcagcaggcggcccccaagcccacagcgcaccgccggcggcgcaggttaccttttcctccgggcggcggacgcagcgcgccctctgctgtcttcaggccccgcagcacaggctccagcgggtgcgcatttagctggtttggatcccagcttttggcgggctgggctacggggacaccggtgtttggggcctgactgtccacgtggcgacaggggcaggccgggagctccaccttcccagcagctttggtgcgggtgggctgtgcggctccaccgctctcggctgccccccttaagggtgccagcaaggccagggggagccccttctcttccttcagtcccaagtcccgctggagagctggtgatgggggtccctgggcagggtctggcatggccgaggggccccgtgccttcagcggctgcgcgtccaacagcgaggccgaggccttgaggttgcagacgggcagcacctgcctcctggctctcctcacactgacgcccgccacgcagaggtcggacccgctgaatgggggcggctcaaccaccggctgtggggaaggaacaggttggggtgctgggctgtggccgggatagggggggtccctgcaggaggggtctgtgcaggaggggctggtcggggcacagacccccacctgactcaggagtgaacagtgaacacctggggtcccacgcagacccccaggaggcccccaggctctggagaacctgcggggaaccaaggcttcctgaggcttgggggtcagcctggggggccccacacccagggactcagctgctcttttcccgagtttagccacagagaggccgcaagagagaggcattggccacgcttcccaatgactccagcacatccgcaggcacagggaggcccgcgaaagatcctcagagtggaggaggcactgcaggccaaggcaaaggagcagcataggtggcctggaggctgcgggcatggagcccccacctctaaccacagtcaggactgggtgaggctgggaacaagagggaggaaagctggacagaggcactgagcctgagtgagcggggccgctccgcccgcacgcctggagtagccccttcctcggtgccgacgaggcactgagccccatgggagagcagggcaggcctgggccctcagcgggaccgagcatggtcacagagcaggatcggtgtcctccatagaccccgctgcactggcggcctgcagctccaccctcgcccagtgaccaggtggcaaagcatccacatggcgggcggccaccaaagtccccaggggcgggcgtggctcacctgcctccacaggagctcgaagttgccgatgtcacagctgcggtccacggccaccttgatggtgtcctcctgcacctgtgcacacagctgggccgtgaccggcgtggacgggtgcatggtggggctggaattgatctcgatcagccagggcctgaagtccctcccaaggacgaagtcagccccgtagagctcaaagctgttcttgcgaggctccacgtggtcctgggccaccttcatggcgtgggcgatggccttcttcatggacgggtagatgacgctgccccacacggcgccacggccctggcgctgcaggtactcctggaacctggtgctggtccacatgttgtgtgcgggcagcagggggctgcggcccacatcattcttcaggtacttctggacggcgttgttgcacaggtggatggcgctgcaggggggacgaggggcaggtgctcagcctcccttggcccaggagggcacccaaggccggtcctcccagccgtgctgagcccacccagctggctctagagaaccctgcccctgaggactccaaccctctgctggaggggcccagctgggatgagcgttactgtcccagatggagaaacagggctcagagaggccatgggattggccaggcgcacagctcacagctggaggcccagaaatgggcgctggcagggggccctggcttctcactgccctgcctgggagctgcttttgcacaggtgagttcctggaccccctccaggcccacttgaccagaggcagtgagcaggtgagggtcgtagcccctggccagctcctcccaggcctcttctgggtgtgacttcgagcatgacccaccaggcatgaccgcagccgctcgcctgggccggagttaactcccctgcaaggtctgtgtcgcgtgactctcaggcctccctggattctcactcgtaaaaagcagacccccttcctgcccagccgtcaggtcccctagcgcctcacaccaagcaagggccacacaatagtcagaggaagccttggtgcagacagagggtggcaggcgtcgctgtgtgcacagcacactcctgaggactccacaggctctcgccctcctgcccacgcggggacccgggtgaggtgggggtccatccaccctgggcagcacacttgcggatatctgagcctccaccaggcaccccacaggccgcctcccctgcgccagggcccaggtgctgcccacaccattccaatccccctgggcacaggcaaaatggtgccttttaagattttccagagatgatgcacagagcgtggggtgtagggcgctggctttgaaggccggtgggcctgggcctgtccctcggggagatcatcagcctcccaagcctcagtttccccatctgtgcctctcgtggtggcaggtggcagtgagggggccctgcccgtgctgcttctcactgcggctgctccaggcatgcaggcagcagcccattccctggcccgaggtgtccaggtcgcccaccgcactgacctgtccagcttgtccagggagaagcgctgagttgagaaccgcaagtaactctccttgtagaaccagatggtcagggggttccagtccgtgacgaggaaccactgtctgatgtcgaacttggtgtcacagatgagcagcggcgtctcgatgtacttctggaccacccacttgttgtccctggaaagagggtggtctgcagctgccagctccaggatctcctccacacggtccatgcacactatgtctgcaagaggccaccgctcaacccagcatgcacagccactgtgcagcgggacctgagctcctgagccctggggcagggtcgcagcttggccctgagacctgcactggctttgtccaaggccagcaggcagcatggttggtgggggcgatgggggagcagggaaggcttagcgctcatggatgaggctaaagccagtgcctgagtcccccaggctctcccccaacagaaccagcctctgagaccccagaggggacacagagatcagtgaaggggcagggacagagacacttttaaaagggagccaggaggatgggcatggtggcttatgcctgtaatcccagcactttgggaggccgaggcaggtgaatcacttgaggtcgggagttcaagaccagcctggccaacatggtgaaactccatctctactaaaaatacaaaaaattagccgggtgtggtgggcgcctgtagtcccagctacttgggaggctaaggcaggagaattgcttaaacctggaaggtggaggttgcagtgaggcaagattgcgccactgcacttcagcctgggcaacaagagtgaaactccgtttcaaaaaactaaaaataaaataataaaaataaaaaactaaaaaggaaagcatagaccagtttgtgaatacaaaggaggaaatcctgattaacccatcaacccggatcctgccctgtgatcggaacacatgctgtgaagacgcctccagctctgctccagcgcctgagtcctgacccccacgcctgcctcggcgttctgctccctcccttccttccctgtggtgctgtgggcctgaaactgtccctcactcacggctcctggcatcaagtgtggccgttggtggctatgaacgcggtgcagggagcatccgcaccaggggactcacctcggccccgggacttggccgcgggctttataatccagatgttccggagcccgtcaatgtccgtctgagggttcacagacgtgattctattcagcagagcctggcactgcgaaaagtaatttcttgaattggagatgaaagcatcgccactacaaagcaagatccagaaagtgcatgagacttggaggcctgggccccgcctcacccaccaagcaggcgctcggctctaggatggtctggggctggcctggcgggaaagggctgcgggtcggcccaggaagttctcccaacagtatggacacctggaaaacacagccctgtgaggctgctccagacgagggctgtgttaagacagtggggaccccggtgtgtgggtcggagctggccacagaccccaagcagcaccctgcctgggtggaaatggtgggatgcacgggtgggggtggggagatgcagccacgcggaaacgtgggagacacaggcgggggcagacgcagccatgcccagcttccgcctgtggttggtggtgcctgggaccgacccctggtaggaaagtggccggcccgtgcaggcctcctgtgtcccggccagctgccagcaccacatcctgggagctcagcatcattctgactcaagaccctttgcagtcacgggctagactcaggaaatcatcataaccacagggaataaggagagggtggggagagctgtttgaggggcttttagagttcgggggtgcactcctgctgcccggatggattggggggaagccatgccagtaccagcagctgccccagggcccgctggagccgtcctgcgtgggcagactcagagctgtgaagacctggtggggaccccatgacgtcctgacaaggtggctgcagcacaggagtgagagccagtggggctccaaggacgccagccgtgactctcacagccggcctgggctggggtggggaagcccctgaagacacaggacatcggggttccattcacacctgctgggggcagcttgaagggagaagtgaggctggggtgtccctgacaacatgggaggggccccaccactgtggaactgtggccgggggtgcctgggcgagagcccctgtagggacaagcccctcccagggaaggactgaaggcgacctcaggcagtggcacctcctggctctcaccggctgccacgcctcctccgtggtgagcgccgagcactcctgacctcaggatggcaacaggactgctcaactgtgatgagaacttggagcaaaccgggcacagccagccccccgcgcccctgaagcagccttgtctgtgcagcacaggtcagtccccaactattgtggtctaaatagggtgggtcacccatgacgtccaccatgttggtcactgccaaggccgcccaggataccagcaagctcccagtgacacggggctacagcgactccctcaggaggatgatctgtgggaaggaatccctcacagcctcccaggacagcccagccccgagcctgtgacagccctcacattggaaggtggtatttgggcaggaccactgtccccacaagtgtacgcgccactgtgttgcccctgctttggggggagaaggctgtgagcagtgagggatacagctgctcaggagcccagcggagcaccgcgcaggagctggcaaagtccaggaaccatgagatgcacatcccaaactcatcagagaacaagcacgggcctccagatgctgacggcgagcaggggccacagccagggctctctgggtcctgaccccagggcacacctgccaggggtcccagctgagcccagcaggtgaggactgacgggcccgaagcaccagggactccagagagaccccctccggcagcagccgggaatctcccctggacgcccaccctcctgacatggtttgggatgagacgaccacagggacttgcggggatccgatgctgccactggtggtcacccctgggtcttccttttaattcaggtctaagaaaacgcagtggggtgcatcctgccatactcaaaaaagtcaagttgaacagtgtgtacgtccttgtacactcgtgtacacaccacccagatcgagacaggaacgcctgggctcctcaacaggaacggagaccagttacggtgctgactatcactgcagacagggctgccctgttcctgaacttcctgtcaatgaaactacacaattggtgctcctttgtgtgtggcctctttcttttcttttctttttttttttttttaagactgagtgtcactctgtcacccaggcttgagtgcagtggcacgatcttggctcactgcaacctccacctcccaattcaagcgatgctcctgcctcagcctcccaagtagctgggattacaggcatgagccaccatgcccagctaacttttgtatttttagtagaaacagatttcaccatttttgccaggctggtctcaaactcctgacctcgggtgatccccccgcctcggcctccttaactgctgggattacaggtgtgagccgccgcgcccagccagtgtctggcttccttcgacctgactgtgagattcatccacgctgcagcatagctcagcccctccttggacacagtttggcagtttccagatttgggccatcatgaagtctttctgaggacacatgtttccatttctcttgcataaataccttggaatggattatctgggccattgggtatgtagatgcctaaacgtgtaagaaactgtcaaagacttttctaaatgggttgtgccaatttacactcccctagccgtgtgctagagttccagctgctccacacgttggcaaatacttgatgtcgttttaacttttttttttttttgagacagagtcttgctctgttgccccaggctggagtgcagtggcgccatctcagctcactgcagcctctctgcctcctgggttcaagagattcttctgcctcagcctcctgagtagctgggactacaggcacgcaccaccgcgcccagctaatttttgtatttttagtagagatgggtttcaccatattggccaggctggtctggaactcctgacctcatgatctgcccgcctcggcctagtgctgggattacaggcgtgagccaccacgcccggcccaatgttttcccattcttaaaaacctttcacatatatgatatatcaaactaatttttgtgtatttgtgaagcagaattcaaggtacatttttttttcgtatggctgaccactgtttaagcatcatttagtgaaaagaccaacctttccctaatgaattgcagcagcagcttggtctcgaatgcagtgaacacagataggagggtctatctttagactctattctcttacactgatcctatcccaatatcacatcttaactattgtaaacctagagtaagtcttgaaatttggagcacaagtcttccaattttgtttttctttatcaagtctgttttggctcttcttaaatcattcatatttctatataaatcagttcattaattcctcctgccccccaacaaaaaaaatacctctcaggattctggctgggattacattgactctattgattagtctgagaaaaacaaacatctctacactattgagtcttctaagtcattaacatgttatacacacacacacacacacgtttattaggtatttactgtctctaactttataactttaaatttagggtcttgaatgtattttgttagatttatttctagaggtttgttgttatttgatgttagtgtattgtgtttttagaatttcgtttcacgatttgttgctagaacacagaaatatgatggagtcttgtatattaactttgtacccagtgaccttgctgatttcacttaattttaatactttatcatttatttaaattatttaaatattaaattttttatatgaacaatcatatcatctacaaataggaactttatttcttcctttctgatctttatgccttacttttttttttcctgtactatttaactagtcagaccactcagtctatgctgaacagaagtctgatgatgagcaacttcgtctcattctgatttcaaggaggacactctcaataatatataaccactacgaaatatgttagctgttggattcttaaactttcaaatgaaaagatctggctgtgtgtagtcagtcacgcctgtaatgctagcactttgggaggccaaagcaggaggactgcttgaggccaggcattcaagacaagcctgggcaacatagcaagaccctgtctctacaaaataattaaaaaattagccagtgtggtggcacgtgcctggagtcccagctacttgagaagctgaggtggaaagattgcttgagcccaggagtttgaggttgcagtgagctatgattgtaccactgcactccagcctaggtggacggagtgagaccccaatctcaaaaaaaaaaaagaagagttttttcatttccaagttggctaaacaaatttactaggacaggtattaagtttcatcaatttttgcatctattgagatgatcttataccttttcttttctattctgaaagtgtaataaaattcactgattaacttttcaatgttaaaccaaccttgcattcttggaataaagcccatttggttctgatgtattatttcattcacatttcactggtttaattaaataatatttcggttaaagttttgtgtacatatatattcatgagaaatactggcctatgattttttgttattttacttttttcaagttttgatatcaggcttttctggcctcataaaatgattagaaaatgttctctctttctctgttacttgaaagcatttttgtgttattggaattaattttaattaatgaattaattaaatttaattaactagtgaaatcattatgggcttggatcctcctttgtaggaaagtttttaaattacagatttaggccgggtgcagtggctcatgcctgtaatcccagcactaacacgtatgtaactggagccctggaaggagagaagagagaacagggaagaaggaacatccaagaaataatggcctagagtattctaaatttgaggaaaaattctaacccacagatcaaaatgccccacgaacctcaaccaggagaaatacaaagaaactacttgtagaagcattataatcaaactgttgaaaaccaaagacagagaatatcttaaagcatcctgaggaaaagatattaccttcaaaaggaacaaaactcgtaactacagatgtgccagcgtggatggacctcaccaaccccacgtgtgccagcgtggatggacctcacggatctcatgtgtgtcagtgtggacagacctcactgaccccacgtgtatcagtgtggacggacctcatggacctcatgtgtgccagtgtggatggatctcacagacctcacatgtatcagcgtggacagacctcacagacctcacatgtgccagcgtggatggacctcatggacctcatgtgtgtcggtgtggacagacctcactgaccccacgtgtatcagtgtggacggacctcacggacctcatgtgtgccagcttggatggacctcacagacctcatgtgtgccagcagggacagacctcacagaccccaggtgtgccagcgtggacggacctcacagaccccacgtgtgccagtgtggacagagctcacggacctcacatgtgccagcatggatggacctcacgtgtgccagcgtggacggacctcacagacctcacatgtgccagtgtggatggacctcatggacctcatgtgtgccagcgtggacggacctcacggacctcacatgtgtcagcatggatggacctcacttgtgccggcgtaggcagacctcatggatcccacatgtgccagcatggacagacctcatggacctcacgtgtaacagcgtggatggacctcaaggacctcacatgtgccagtgtggacggacctcacagatctcatgtgtgccagcgtggacggacctcacagatttcatgttgggcacaagaagtcataaacgagagagcacagactgttccccaaatgtgaaatctgaaaacaaaactggttcatggttgcaggagccagaatgggttgtgacccctgtgggggttctcccgggaaaggttaataggggctgatgggggactggaaacgttttgtgtctcaagtgggctgtggctatgcaggtggacacgtaagcaaaatttcttccacctgtacaaatatgattatacactgtgtgcccttaaccgtatttatgtaatccctcaataaaaggaaaagaaaaatatttgattaattcacaagaagaagaaagagacaaaagaataaacaccaccctgggatgaagcatgaagctgccgcagaccctctgaaagaagtcactttcctgacttgcccatcagccggcacctgctcatgctccgggggtgccaggcccacctctgcccagctcctctctctggtggccgctgtcaagggagtgctgaacccctggccccaggaagaactgggccctcagcagggggcaagaaggccagggtcagcctttggacccctggagtggcaaatggtgatgatgagagtcagcgagccaggagctctgggcccaggcatacatctgccagtcattcaccagctgccaagctctgggcctcggcacacctctgccagtcactcgccagctgccaggagctctgggcccaggcacacctctgccagtcactcaccaacaccaagagtgaggcaggtgccccagtggagagacagacaaaccccacctgcctgtctcgggctgtggggggctcaaatgacatcataaccttctggattttgaagatgcacaagacaatgctactccccaaaggcaccctgagggggtatcatcctctcaacagtcatcagggtcctggtgggacaggcaacagagggcctgggcaccccgacacccataaggcaccccaagatccagacagacaccccaatacccaacaagtatcccagacatccagacagacaccacaatactcaacaagcatcccagacatccagacaggagccccaacgccaggacaggcatctcaacactcaataccccacaggtagcctaatgcccagacaggtgacccagttcccagaggctgcactgccccggcagctcctgcaatctgcactcacagctccgacatgtgccaggggcctgcgtaagtcttactgaacgagggagtagtactgctgggtcaggtcctcccactcggcctcagtgaggtcctccacggcatctgctgacgtgtcgatgtcctcatgctccagctgccccaggtaggcctggcacaccttgcacgcgatgtccacaagctgccccgggaggcccctgagctttgcctcagcattttcagcatctgaaacccagacacaggcacatgcagtgggaacctcacccaggggcagccctgcccgcctcgaggggtgatgtctaaagtcatggacaaaggctgctccactccctctgtgccccaatacccaacaagtatcccagatccccagacaggcaccccaatacccaaccaagcttctctgggcaaccgccctggatgtcacgcctgtgtctgggcaggtgacttcctccctcctgaacggtcccaacctccaatggctctgtgagtgccacctccccacaggaaacatatgggccctgccactggaccctcagctcctcacagtagcaattactgataagttcgacttcattaaaatgaaaaacttctgctctgtaaagaacaattttaagacaatgggaagacaagccacagactgggaggagatatttgcacacacttaataaaggaatattacctagagtatacagagacctcttgaaactcaacaataagaaaacataattttattttttatttttattgttttaagacagagttttgctcttgtcgcccaggctggatggcaagatcttggctcactgcaacctccgcctcctgggttcaagtgattctcctgcctcagcctcccgaacagctgggattacaggtgtgtgccaccttacccagccagaaaacaatttaaaaatgaacaatctgaacagtcacctcaccaaaaaatatatacagatggaaaacaagcatatgaacacatgctcaacatcatataccactatggactagcaattctgtatctacaagttttttctataaaataccctcagaaattcataaggaaatggaggctaggcacagtggctcacacctgcaatcccagcactttgggaggctgacacgggaggatcgctggagcctgaaagtttgagactagcctgggcaacacagtgagaccctgtctcacaacacaatcaccacaatcatgagacactaataaagacccaggagaatgctacaaacagaaccctgaccacatcagacgctggcgaggatgtggagaacaggaactctccctcattgctggtggaaatgcaaaatggtacagcgactttggaagacagtctggcagtttcttacaaaatgaaacatactcttgccataccacccagtaagtgcgttccttggtatttacccagatgaattcaaaacttatggtcacacaaagacctgcacacagatgtcgacagaaacgttattcatgatcgtcaaaacctggaagtgaccgagacgtccttcggtagatggatagacagataaacagtggtgccgagacgtccttcagtagatggatagatagataaacagtggtgccgacatgtccttcagtagatggatagatagataaacagtggtgccgacatgtccttcagtagatggatagatagataaacagtggtgccgagacgtccttcggtagatggatagatagataaacagtggtgccgacatgttcttcggtagatggatggatagataaacagtggtaccgagacacccttcggtagatggatagataaataaacagtggtgccgagacgtccttcggtagatggatagatagataaacagtggtgccgagacgtccttcggtagatggatagatagataaacagtggtgccgacatgttcttcggtagatggatagatagataaacagtggtaccgagacacccttcgttagatggatagatagataaacagtggtgccaacatgttcttcggtagatggatagatagataaacagtggtgccgacgtgtccttcagtagatggatagataaataaacagtggtagatctagacagtggagtatcactcagccctaaaaagaaaagcgctctcaagccatgaaaagacctggagggatcttaaatgcatattactaagtcgaagaagcccatctgaaaacgctccatgctacgtggttctaaccgaatggcattctagaaaaggcaaaaccgtggagacaggaagaagatcagtggtagccaagagctcgggggcggggggatgaagagacagagcacagggagttttagggccggggaccatctctgtctgatactggaatggtggatacacggcatcatacattgtccaaacctgtagaatgtataacaccatttgggttaccatgatgtgtcattgtaggttcatcaattgtgttaaaatcattaattaggccaggtacggtggatcaagcctgtaatcccagcactgtgggaggccgaggtgggcggatcacctgaagtcaggagttcgagaccagcctggccaacatggcaaaaccccatctctactaaaaatacaaaacattagccgggcgtggtggtgggcacccaactactcgggaggctgagacaggagaatcgcttgaacccaggaggcggaggttgcagtgagccaagatcatgccattgtacttcaacctgggtgacagagcaagactccatctcaaaaaaaaaaaaacattaattaggaggccatcagatgaggtggcccaagtgacctggtctccgaccaatgcaaactacaacctaactcagaattgaaaacggaatgtaagcacagccaatcacaggcagccagctgggaacaagttctcactcagcacaaatgaagccaccgctccagcgttcaccaatcaggatttatttcctctgtttccacgtttacctagaagggcttttcccctcggtggagccctgcagcctcctgattggcacaaatcaccgtttgctcaaatacactctaaaagtttaatgcgccaatgttcatctgtcaacagtcgaagcgcactgctctggtgggggatgttggcggtgcaggaggcgcgggggcaggagagtgtggtaaatcttgtaccctctgctcagctgtgctgtgaacctaaaactgctctagaaattacattttattaaaaccaacaaccacaaaaaagatttgggttttgtccaaaaacacgacggctggttcacatccctgtaccacccaggggcgcctctcccctgggcttcctgtgtcctctcccacggggcccctttggggagactcaggctgcggcatcgtggtggccgtggggtggggcaggcttccgaccacaggctggaaccacgtccgcggcacaggactgtggcagtgagtgtgggactcggacgtcccagggctgcgttaactgccaggtgctttacaaacggggtgactttgacgtttagccccacggttagaacagaaaacccgtctgccatgagaatcgagagagtctgaggcatcgctgtatccagccccggctgctgcaaccctcaggactgaccacacccaggaggcgggagggcccctgtggaggccccgagctctggtggcctggcactgccctgccccggcccagcgcaccttgcctgctgctcaggtcgctgctcccggcctcctccctctggtccctgggcttgcttctgctgctcctgctgcagctctggtggctgaccacccacttgaggatgctggatgccatggtgcgccggaagtcttctgaaaggacagcacagcctcgccctatctgtccgagccaggactggggactggagatggggccagggccacggaggctccccaacccgccccacttcccgccctcatagccgatggggcccaggcctgctcccacacccccagtctgcctgcccttctccctgcagtgtctctgtgactgcggccgtccagctgcacccctcggcctccgaccacggagccggccttgccccagctgctcgccgcgctgtccacaagcctagcacagaaccacacactccttgactgcccgccctccctcccggggcccctggcctctgtactgccatgaccatgaccatgggaggcctctccccggtcctctatcctcagaccctgccccatcagtctgtctcagcaccagggggatctttctagaagcctctctgctgacagcactggggccctctgccgtctcctcacttacccaggaactcctgctgctcactctcggtgcagaggctgtagcagcgtgggaagaaggagtcggggttggccgggacgtaccagggcaggctccgcatgttcacgcacagcccgatctccagagacagtggcgtgttaggcaggaggggcagctcagctcagctctgcctcgctcacaaggcgaggacgggccgtccacctcagacttgcctggctatggggcaccacacagcacccctagggcggatccctccccctccccagatatacggtcccccagggccccagaacaccccctccagccggtgggagcatggatgtgcaggccaggctcagacgcatccttgaggcagtggagggcgtggcaggccccagggaatggggaggctgcagctgagggcaccgagggcggtgggcactggggctccctccaggcccccaaacgggccacagggtgtcccacacctcagaccccaggagagggaggagcggctgcagggcccggaacgcagccacatgcccagcactgcccaccacacgcgaggtagcacgcgccattagagaggcatatcgtgaagtccccgcaccccgatgtctggtttgtcaccctgttaaggaaaaaagtggctggcccccagaaaacacagcgcacgctgactggctctgcacacggggtctttgaaggggccatgttgccactagcagcgctggcgctggcctgaccctggggtattaggtgcggaagggaaccttgtcctgcacctccgccccacactgtgctgaggcagccgcacctggcctgctgagagggacctctgtgccagggaagcccctcttccgggacccctccctcagcagggtccccacaccctgcgtcctgggcaggcctcagccctgggccttggtgggaagggtgtggcaagctgctttgtgcagggctggaggccgggggaggcgggggagtgcccggtgctggggggagcggcacctcttcccctggggtcccacagccccctcagcacccaaagcccggtggcagcccccagtcagccccatctttggcctctgtgccctgaggagggagcttctggggccccggattcacccagagacacagagcaaagggcacaggggtgctgggggtggggtgggcaccgagtgattctggccacggccttagaccaggagtcctgggatgcacccaggaggtgactggtggccactgaccagccaccgagggtccctaatggctgcagaagctcctccccaccacccttgccggctcccgccacgctcaagcgcggccggctcaccttggtggtgaaggaggctgtctttgcgtagtggttcagcatctggtcgtaggtcaggctgtgatagtcaatgatgtccctcttgatggtccagaggaggtacggcatctcattttttaccaacctagactggcaagaaaaaagtctttattgatgcccagcattcaaggttcacaccagccaggatgggatggagtgaggcaaccatcagaggacaaatggcgtgcagcgtgaggatcccagccgggctctgctgcaggcagtagtgctccttgtgggcctcctgcacatgggatgtggggcgcaaccaggaccacatacggtttccacagaggggcctcgggctctggggggccaccccgatgtggggctgcaggtggggtctgagccgtccgcatggggtctacgtgggtgtggggacgtgccacttgccgaggtgacacgacacttcataacccagagcttacagtccccaggaccgaagcccccaggcctgtaccatgggccctgcacacccctccctgagccccaggcactggcctcccgctcctcccctgctgatagaggggttggtcgtggagctgggggcctgttgttggtgcttttctgtttataacaatggcatgtgttaagtcaaaattccaaccaggctgggtgcagtggctcacgcctgtaatcccaacactttgggaggccaaggcaggcagatcacctgaggccaggagttcaagaccagcctgaccaacatggtgaaactcgtctctactaaaaatacaaaaattagccgggcgtggtggcgggcgcctgtaatcccaactactccggaggctgaggcaggagaatcacttgaacccaggaggcagaggttgcagtgagccgagattgcaccattgtaccccagcctgggcaacagagtgagactccatctgaaaacacccccccaaaaaagtgtgtgtgtgtgtgtgtgtgtgtgtgtgtaaataatagcatactaatcactaaccactgggtactggggtgagaaacagcatcgtcaacagagccgaagtcccccagccgcccccacccggtaactgccacctgcttctgtctgtcctccaggcacaatgagcagaatgtttctgtctctctggaatgcatgtgctacaatcctcatccccagggcgatggcataggaggctttaggattaggtcatgagcctgagccccttatgatgggctagcacccttataaaagaggccccagaaaaaccctcgcccctgggtgaggacgcagagagaagccagccgtccatgaagcaggacactctcacagcacccagccacactgccccaacccagactccagcctccagaacagtgaggaatgttctgatgtgtccacaccactgcccacggacctgtgggagccgctggagcacccaggatgctctgtaggaatggcactgactccaggaacctggaagggcgagctcactggccatgtgggaggcgcctcatcaaatctgggcccatttttctatttgtcttttcattactgatttgtgagttcttcatatattctggacatttgatcttttaaattttaagtactgcaaatgccgcctcccaccctggtttctctttcgccctctttatggtggagtgttgggagccccggagggactaggctgggctggggaggtggggaggcacatactactgtgttgctggagacaggagctcactcgctggccaggccccatcctgcaacacaccagccgggctgtccgagccctgccgggcctcagtgccctcagcttccacatgcgcacagcaggccagcccagtgtgggtggaggggagctgggagcaccgggtccacccactacacagcggctcatccagcaccgaagggctcgccccacccctgggggcagccaggccctgctgcccggtcaaggggccctgctgtgactggggctttgccctcgccgggctgccatccccccaggacatgggagagtgggcacggagcagggcgacggtgtgagaagctttggagaggccgcagctgaccatgacgcatgcaggggacgtaccatcacgtcgtggatgttgtctgttttctccaaagccatttcttgattttctttgactttggcacatgtatcatctgccaacaaaacacaggggaggcctgaacatgaagcctcagccagacttcccgcaccgggtccgttaccacaaccgcaggcaggacagcgactttacttccagaaacctggctccagatggggccttcccctggtggagcaggagcctctgtgggtcctgagtcaggcttggggcattctggcagcccccatacatccaatgagcgtccaccgcacagcacctccccagggctgtgacagggcttgggggcccgggattcctggaggcccaggtgtccccaggtgtggaatggtggagacagcccgggatgggggtgggagtgatagaggctgaggggccacaggcaggggtggaggaggagggggacatttgatccgggtctcaatggggccaagaggatgcagacacagctgtgcagatgtcagcgaggagcagccagcaccacgggggcctgaggagtggacttcagggacctggggctggaggagggacagctgaggccgggcggagagaggatgacagaaaccgcccgggcaggaggaggcctgggtggaggccacagggactctgagaagggagcagggctgggggcttgaaagggtttgcctggcacgaccgcctggggcagggaggccaggagggtgatggagacctggggtcggagataccccatcacgcacaccagggccgaggggcaggcaccacactcaggccggcgccgactcctcctgcccgtgacagacgcacacgccctgagctgagacgtgcgcctccgatacgctaccattgacccgggcgccttcatcctcgacatccggaatgaccttgggcaaaaagtggaacttcttctctacccagcccttccttcgcagagcggcccggaccaccgggtagtgtccgtagatagagaaaatcttcttctcctaaaatggcaagaggatattttattttatttcaatcatttttggggaataggcagattttggttgcatggataagcttgttagtgctggtttctgagatttgggggcacccatcacccaatatgtcctttttttttttttttgagatggaatctcactctgtcatccaggccggagtgcagtggggcaatctcagctcactgcaacctgtcttccaggttcaagcaattctcctgcctcagcctcccaagtagctgggattacaggtgcctgccactaaggaaggagaccactactactcctgctgccctcctcccccaccttgcctagttcacaagacaggaggagagaaagagcaaaaagttgggggaaaagaaaagtaagataaatagccagacaaccttggcaccaccacccagccctaggagttaaaaaaagtaataataataacatcaacccctgacctaaactacttgtgttatctgtaaattccagacactgcatgaaaaaagcattgtaaaactttctgttctgttagctgatgcatgcagcccccagtcacgtttcccatgcttacttgatgtatcacgaccctttcacgtggaccccttaaagttgtaagcctttaaaaaggccaagaatttccttttctgggagctcagttcttaagacgcgagtctgctgacactcccggccgaatgaaaacctcttccttctttaatccggtgtctgaggagttttgtctgtggctcatcctgctacaccaccaggcctggctaatgtttgtattttttagtagagatggggtttcatcatgttggccaggctggtcttgaactcctgacctcaggcgatctgcccaccttggcctcccacagtgctgggattacaggcgtgagccaccgcgcccagccccaatatgtaatcttttatccctctctcccctcccaatcttcccccaagtctccaaactctatcttatcattcttatgcctttgcatcctcatagcttagctccctcttatgagaacaagcgatatttggttttccattcctgagttacttcgcttggaagaatggccttcagctccatccaggttgctgcaaaagacattatctggttccttcttatggctgagcagtattccgtggtgcagatacaccacagtttctttatccgctcgttggttgatgggcattttgattggttccatatttttgcagttgtgaactgagctgctgcaaacatgcgtgagcaagtatcttttttgtatcatgacttcttatcatctgggtagatgcccaggagtacggttgctggatcaaatggtagatctacttttagtcctttaaggaatgtccacgctgttttccacagtggttgcactagtttatattcccaccagcagcgtaaaagtgttccctgttcaccacttccacgcggacctctattactttttcactctttcattatggccattcttgcaggaggaaggtggtatcacattgtggttttaattcgcatttccctgagaattagtgatgctgagcgctttttcacgtttgttggctgtttgtatagtattttaagtcaaggaattgaaaaataagttgattatttttctgtaagaggagttttcaaagcagaaggagacaaactgtgctctggcaggaagacatctgctcaaagaagaccatgcccacacccaggcacacagcggacgaagcggcacaattacagctgtagctgggaaccctgagtctgagtcccagcacccatacgagacatccggtcggtcccagcacctctctgggaaccccgagtctgagtcccagcacccacacgagacatctggttggtcccagcaccgctctgggccgctgtctactccgataatcagtctgaggcctgtcacccgcccacgtggctgtgcacgtgaatgagcctatcacccgaggctttggggagaacggtgggggagctggacagtccgcaagagggctggcaccctccgactccacaagacactctgccacccccaacaccctgcttagctgtggtcaaactgagtaactttagaaaaatggatgggcagaatacaattcctaaggaaaccaccaaaggaataaaaacagcgtaagatttccaacaggtaagagaggggaaagggggatttaaaaagtaaccagtccgggagagcacatgaaaggagaggaaaggaaaattgaaccaaaggaacgtactaaatgaatgaagataacagacacacctgaatacatcaacggtttaattatagataaatacactaaatgctccagacaaaaggcaaagagaccatcaaacacataggtatacagatgatggggtagaaaaggaaaagatagaaatatgagacaaaatagtctttgggacaaataaacattactaaggtaaagaaaaccatttcataattttaaaaagattcaattcactagaaagatacatgtgtatgcacctattaagaaggcattagttataaaaaacaaaactagaactacaaagtagacaaacccaagattataatagggtattttaacctgcttctctcagtaattgatagaatgcacagaccaataagttccataagactttagaggatttgaacaactcaaataacaaactctactctagtggctataaacagctcactctggcggagcacggtgggtcaagtcagtaatcccagcactgtgggaggccgaggtgggtggatcacctgaggtcaggagttcaagaccagcctggccaacatggtgaaaccccgtctctactaaaaatacaaaaattagccgagcatggtggtgcacacctgtagtcccagctactcaggaggctgaggcaggagaatcgcttgaacctggaaggcaaaggttgcagtgagccaagactgtgccactgcactctagcatgggtgacagagcgagactccatctcaaaaaaaaaaaaaaaaagcacactctacaccaactgttacataaattaacaaaatgttaggcgtaaagcaagtctaaacaaatttcaatggaataacattgcacatagcacattctcgaccacaatgcaatcaagctagaaaacaagaacaatataactacaaaaaagtaacaagtgtagactgtaagaacaatacttttaagtaacatgaactgtaaaatactttgaactgaacatagacaaacgtactccaaaataaaagcttgtgaaatgcagctaatgcggtacccagagggatagttgtagccttaaatgtttatacatttataaactttaaaacatttatgtttataaatgtttatacatttaaaggtttcagaagaaaatctgaaaattaatgagcggatatggttctacttatatgaagttccagaaaagcccaaaggacagtgagagaaagcacaaatagcgcatccatggttgccaggatttgggacaggggtggggaataaccgataggggccaaggggaactcctgagggtgatgaaatggtctttatgaagattgctgcctgactgcacatgtttgtacctgagggtgatggaacggtctttatggagactgtctgactgcccatatttgtacacgttctgctctccgtccgggtgtgtccggccgtaacatcaccgtgccgtgcacctgcagtctgcacatatttgtacacgttctgctctccgtccgggtgtgtccggccttaacatcaccatgccgtgcacctgcagtctgcacatatttgtacacgttctgctctccgtccgggtgtgtctggccataacctcaccatgccgtgcacctgcagtctgtgcactttcagtgtgtgctgtacctcagaggggagttaagggaatgcagatgttttctcacactattgccagctggatgacttggggttcctctgtggtcaggccttctgagcagtggaaatcgacacaccatcaagacaaagaaagccgcctttccccaggtcacttgctcttctcattccaagcatggcagacctggagccctcagctcccatttacagaacacgagagccttccttgtctccccagacacatatggggagcagaggtctcctccctccccaagggaggccttgcttacatcccagttaaaaggtaaggcctccctctcctgggctccctctcctggggagggagagtgccaactgccccatataagctcccagggccataatgttggggttcctctcctgaggtgcaaacccctctgcacacacaggtggaggcacagtgagcgtccctaaggggagctggggtgtggggaacctacgcaggcattctctgagtacctggaagtctgtttcccatccaggagcctcatgcttcctgtggggataagcagataaacagataaagccgggacaagcacccaccctaggacacacagcgggcggcgctggccaccccttggtgggaggcagagaagcattgcttctttctaaagtacggctaaaataaaaggtatctccaggctaggcgcagtcactcatgcctgtaatcccagtattttgggaggccaaggcgggcagatcacctgaggtcaggagttcgagaccagcctggccaacatagtgaaacctccatctctactaaaaaatacaaaaattagctgggcatggtggcgtgcacctgtagtcccagctactcgggaggctgaggcacaagaattgcttgaacccgggaggcagaggttgtggtaagctgagatcgtgccactgcactccagcctgggcaacaaagcaagacttcatctcaaaaataagttaagtaaataaatgaaaggtaacatgagccaagtccccacagggaggaggctgcagctcgggggcacagtgcgtcagaggccagatggacagattccaagttccaaaacaaatgtccttttaaaaaagtgtccccctccccaccgagtcccaaggagcatttaccttgattgctttttctgttaactgccttgctattttgtatctgtctaatctggaggaagaagccaagtcttgggaaattccttgttttaattctgcaaaagagaaggaggacatcaagtcaaaggacaaggcatccaaggccaggcacggtggctcatgcctgtaatcccagcactgtgggaggccgaggtggttggatcacctgaggccaggagttcgagaccagcctggccaacatggtgaaaccctgtctctactaaaaatactaaaattagccgggtgatggtagctcatgcctgtaatcccagctactcggaaggctgaggcaggcgaatcgcttgaatccaggaggcggaggttgtggtgagccgagatcgcgccattgcactccagcatgggcaacaagagcgaaactctgtctcaaaaaaaaaaaaaaaaaagacattcgtctgatgaggctgacatgaaatggcatattctgaggggtgctatccatgagccagcaaaattcatccacagtgatggagaccagagctgtgggagagggggtgtggccggagattggtccaaggaatggtggtagacgtgtcagcggtgtgtgaaccagagcgactccatcttgaataggggctggttaaaatgaggctgagacctacagggctgcattcccagatggtgaaggcattctaagtcacaggatgagataggaggtcggcacaagacacaggtcataaagaccgtgttgataaaacaggttgctgtaaagctggccacgacccaccaaaaccaagatgatgatgagagtgacctccggtcgtcctcactgctacactcccaccagcgccgtctcaaagaacataaataaaataaaattaaattaagaagttctgattatcaaaaggaagcatgaagtgactgacaaggccacatccatctgacaaagagcatgtatccaggacatacagagaattcctgcaagtccatgaggccatagcgcgatttaaccgcggcctgcagtcccggaaccgcactccgagaaggaagagctccaaatggccaataatcatgtgaaaaacagttcaacaccttgagctgtctggaaatgcaaattaaaaccacacacccgagtgcctgaaatggcagcgaggacacccactgcgggtggggacgggggcgggggcaccggagctctcgatctggcccttaaacggttgggggaccttctaaagctaagtatgcgcctgccatgtaacccagtcatttgactcctagggagcatttacccacgcaacgaagacgagtctgaagagggcaagggcaggaaggaagagagaggcgagtgcagggcctccacgacccgccaggagagccctccacacccacacgtttaatttcccagtttcccaggaagctggccagtgggatcggggtacaggaggcaggagccagcgccccccaacacccctggggtcctccgcctggaccgtccaagagaaggcgcctggttctgcagctcagtgaagtgcctgcccccagagtccctgatttcctggcagcaggctgcagccagcactgcctctgagcccgggccactctgggcgagtggctggcacacaggcaatacacgatacccactattttcttctctcccgtctccatctgaagaagaagccaacgatagccccttcctctctggttccatactggcctccgacagcttgccctttgctcctctgacccctagaggagagggtgtggtggttacaggaaactgggagggtgtggggggctctggggatggagagggttctgaggcccaagctgagggtcaggtctggggttggggatcagctctggggttgggatcaggtctgggttgggggatgaggtctggagttgggaggtcaggtctgagttggggtcaggtctggggatgggagtcaggtctggggttgggggtcaggtctggattaggggtcagctctggggttggggatcaggtctgggttgagggatcagttctaggttggggtcaggtctgggcttgggggtcaggtctgggtttgggggtcaggactgggtttggtgtcaggtctgggttgtgagtcaggtctgggttgtgagtcaggtctgggttgggggatcaggtctgggttggggtcaggtctgggttgggcgggaggtctgggttgggggtcaggtctgggttgggggtcaggtctgggttgggggatcaggtctggattgtgggtcaggtctgggttggggtcaggtctgggttggggggtcaggtctgggttgagcgggaggtctgggttgggggtcaggtctgggttggggtcaggtctgggttgagggtcaggtttgggttgagcgggaggtctgggttgggggtcaggtctgggttggggtcaggtctgggttgggagatcaggtctgggtttttggggtcaggtctgggtcggggtcaggtctgggttgggggtcaggtctgggttgtgggcatcaggtctcaattggggatcaggtctaggtcgagggggaggtctgggttgggggtgcaggtctaggttaatgaggagaggtatggggttctgaaggcagaggggagtggacagctgtggagttcccagaagatgggggaaggtggggagaacagctctgggctttcgagggcgggcgagtgggtagagttgggcaggtttagtgggggagttctgtggttccgagctaggcgggtctgggattcctagggtaaggggtctagaatttggaggcccggggcggggagggggtaggcctgggtttccgggtgtgggaggcgggtctggggttccgaaggcagatggggaggaggggtcctgtccgggatcggaagcgcggacgggcctggggttccgcggtcgggggtcgtgctcaccggggaccgggtcagtggctcgcgctgcgccgcccggcttcctggggttgcctgggacaacgtgctggggcggccacgcgcattgtgcacccccggtgcggcggctgctgggcccgtggcctcgggctgtgcagcggcggcggccccggggcgtggggctgcgcgggcggcggggggcgcgggggcgcggggagctgcggcgtgcggggggcgcgggccccgacgggcagcagtcatcagcgcttgggctgggcccgggttggggtccgggtcccgggctgctgtcggagcaggcgcggctgcggggtcggcggcgcgggacggtgcgcgccatggtgtccgccgggggagggcccgagtgtagccccgggtcacgcgctgcggccccgcgcccccctgtggaggtcacactccatcccccaccaggtcacaaagacccgcgggtcacatcctgcccctccccctcgggccccccaggcccgccaggccttctcgccctccccggggccctcatgccgccctctgtccctgggcccttccccgacgcgaggctggagcggcggggtgaggaggccgcgggcgctgggctcctcccgggctgcgcgctgcgggtcctggcggatgggggcgacggggtgaccgtatcagcgccccccgtcctgcggcggaacttgggagggccttggtatccgcagaaccactcgtggggtcccacgccgctgccccccggggggttctgagcccacccaggtccacacggcccctgtcgtttccccccgcaccccgcggatcaccccgccagggcagctcgtgtctgatctggcatctcggagtgggggtaggaaagacacacctgccccaccaggaccctcactcctggcaactttccaaagcctagatgtcttcatttggttttaaatcaactttattttgcatttaacttcccaagacaccccaaaagggaggttctgccccgactctgaaggggctggtgggggacttgaagggggggagtgggagcgtcccctggcgggggtggttcccttccagctccctccctcttccccggggaatgccactgggctctcaccagaccccagtactggcctctaggggttacacaaatcagtgagtgaaaagctggccctccctccacccgcccctcctccctgtgtcccgatgtttttagacctgagtgagctgacgctgctgagacacaatattaaatagccacagccacgtctgcaagtcagcgtttattgctcaagcgtattaaacaaaaatgtagactgaaagagacagttcttttaaaccccatttttccggattttttaagcgctctaaaataagaaaataagaaagtgcaagccagcaaaaacgctccaagtgcctaattctgactctgaaacttgagctctctggtctgcccccaagaagacatcagcccgccccgggtcgtccctgtggctcccaccccattcccaggagcagaccccgccagcctcaaagctgcagggaggtgggggtggcctgcagacagggtggggtctgcatccggtaccagtgacagcagcctctcctctcccacggtggcgcttgtttggggctgtggccaaagtgtttgcccggcccctgactgtgtccttccggagctgccgaggactgcagagagggcctggcttgtcccctctaggagcagctgggaaggtgtcttgcctgcatcccccttcaatggttgaaaataatgattccacttgtcatgaacaccatgaaggtatcttggcagccagagtcactcctgttccgcagtgggaaacctgggagggtcctcaaaccccctggcagggtctgcaggccgccccatccagctgcatctcccaggcctcctggttctttgatcttgatggccccaggccacagatgcatctccgggcctttccagcagcccatgggggaccagtcaatacaccccacggcggtgaagagaaaacgttcatgtcttctcagatcagaaggaaagaaacaaaaccattgtgaaggaaaacacctgctggaaagtaattatcaaagtaacagcattccagtttcacagtcgccccaactcactgtggatttactgccgtcagctgggaggacccaggcgccctcgggacgaggagacgcagggaaacccactcctggccatggcactacccaaagccagtgttattctcacacccaactgtccctgcagcctggcaggtgggcagtgaccgcctgggctgtaccctaagaccccaaaacagcggagatggagaagaccgctgccctggggccttctcagtgaggatcaagacaaagtacttgctaggaggtagagggcgctgggtgaacctgtgagaattcctgggctctgacctgatctgtcctgcattttgagtaatgggagcaaacacaggagggaggggctcagcttcccccggtcactggggccagggagacgtggtccagccggtttacaaagccttggatgcagccccacccccaagaacactgcctgtcacagcagcggccacgtggcactccaagctgggcatgacagtgcccgggacgtgggcagcggccatgtggcactccaagctgggcatgacagtgcccgggacgtgggcagcggccacgtggcactccaagctgggcatgacagcacccaggacgtgggccggccagtgtggcggtggatccctctagaatgactgggtctaagtagggagacagggcaggcgacccggcgtggactggtgtggatttcacctgggagagcagcggcagcctgtgtcgcttgcgcccaggctctggaggaggggcccctgcggctcccgggccaggacagaggcgcccagccctgctctcactgtccaggaagagccgctgggcagcctgagcctggggcaggtgcaccttgcagggaagtgggtaagatcccactgggctgactgagtacccgggacagaccctaagcgtggagggaggaagcccggtcagagtgggcaggagacgcagggacccacagtctggtcaggtccagagagcccactccagcccaagccatgagagaggcaggaagaggagctggggccagttcaggggtggggctctcaagaggccgagccgggggcccttcctcggcctgggaagttgcggccatgctcctgctgttacgacacgggagccactcggagctgactgatctcactgaggcacagactagccaacattggcctattttaaaattaaactaccctaggaagtgaaaaccccacctgcagcctggtttgccctcacacaagggaaaagaggtgttagaagcagtagctcagggcgattaggggttgtgcgtttccatgcttggggccaggctgggcgctgccacccggtttccgcgtctgggggtcactgggccatttgcaccacgacggctctccaggctttctccttgtcgaactccttcagggggctcctggccacctgcaaccgagacaggaaaggtgttacttcaccagggccacctgtgcggcgggaaggtggacacgccactcggccacaggcagcgagcagccagcgttcagaagttttcttcgaatgtgaaggaagtggggaaactaacccctgggcctctgtggaaagagataaaagccttcacttcctcagtgtcccagaaacgcctgcatccccccccgcacacacggtttctaccgagcctgggatggagcagcccttcactcggccccttgccctggctctggggcggggagcggggggaggccgcccaaggttgggcatgtgcctgacggctgaggaagaaaacacttaaggcagaggtaaccagatgcctccaggcaaaagggaggacagcgccagccccagctgtccaccctgagccccagttgtccaccctgagccccagctgtccaccctgagccccagttgtccaccctgagccccagccacccaccctgagcccctgggccccagccgtccaccctaagccccagccatccaccctgagccccagccgtccaccctgagccccagccgcccaccctgagccccaaccgcccaccctgagcccaagccacccaccttgagccccagccgtccatcctgagccccagccgcccaccctgagccccagccgcccaccctgagcccctgggaccagcagttctgggatctggggagaacacctcatgcgtctgactctgggccttgctggtcacaacagaaacccaggcgggtctcatttcaggcccagggactgccgtcctagcagggagactgaccacagccaggaaaaatggcagcaaagcaactgaggaggcaggttaagggaacagcagtagggagggtggagggtgggggcgacggggtcagctgagaaacgagccaagggcaagagagcgtcctccgggacttagcgggcactggaggctctgcaccaaggttctgaggccggtggtgtgctgaacacaggagggcagggtgtgcagggcaagagcagcggccggtccgcccaggatggcctagaggtggggcaggactcagagccccgctgagtggctgcccaggtgtttgggcatcaaggtgacagtcctagtggtcactgcacctgagggtcagcgggcaggtttgcccaggggagcaccaccaggacccgtagctcggtggggggaagacgctgagcctctgcctttcagatgtgggggcagcaagacagtaggcagggcccgggggaacattgttcaggcagtgacagccagaagttgttgacaccccagctttacggagccccatgtgccaggctgggtgggcattgccttccctgcagaaccgcgtccccaccagagaccagggaaggaaacttcaggacctgtgggagtcctcacaaagccctcttctgtgtctctaagagcaaatctgaaagcattaagtccagaatatttcccagggatgggtctgggtttacccaggctttgtgtttgtatttttaaaagacattttacggctgggcgcggtggctcacgcctgtaattccagcactttgggaggccaaggcaggcggatcatgaggtcaggagttcgagaccagtctaaccaacatagtgaaaccccatctctactaaaaatagaaaaattagctgggcttggtggcgggtgcctgtagtcccagctactcgggaggctgaggcaggagaattgcttgaacccaggaggcggaggttgtggtgagccgtgatcgcgccactgcactccagtctgggtgacagactgagactccttctcaaaaaaaaaaaaaaaaaagaaaagaaagacattttacttcttcggggtttttctggggtgtttttaaaaatacaaagtggcacaatgaatcttcgagggccacgtcgtgtggccctcggaggccctcaccaggacaggagcccccaccgcaggcctctcacctccccagcgggtgctcctgtgggccactcacctccccagcacccctgaaacccacaggcctctcacctccctggctgagcacccctgtgggccactcacctccccagtgcccccaccccacaggcttctcacctccctggctgggccccccatgggccactcacctccccagcacctgcaccgcaggccactcacctccccggctgggcacccctgtgggctactcacctccccagcaccccctccccctgcaggccactcacctccccggctgggcacccctgtgggccactcacctccccagcttccccccaccccacaggcttctcacctccctggctgggcacccccgtgggccactcacctccccagtgccccctccccctgcaggccactcacctccccagccaggcgctcctgcgggccgttctgggtgtcccaggatgcaccctgcagccttgcactgaccttgaagcgcacgcactggatggcggtgcccgtgttgaggccggcctgcagcaggagcactagcagcagcagcagcagcagcacatcgtaggatggctgcaggcggaaggaggtgtgagcagagtggcccagccgccctccagcccaggagaccaaagctccctcgtgcccacggccttcacaaagagcaggtgccagggctcgagtcggagccccagtaacccaaacgcattgctatttcaacaacctgatgataatcattctagctcaattaatgaggtcaattctgctttaaattccatcagcttgtgttcaacatacaggaataaaagtgaccgagccactgccaggccccgtggacagtgctggctgctagtggtcaagtcgctccacccctcctgctccaacacgcgcaaggctcagtcccagagccagagagaatgtccgcgggaggcagaagcgctgaccgttccgtgtcagcaggatcctgagcggaggagacagggggcagccgtcctggggggatggggtgcacagacccccaacagcttcacccctgagcaccagctgctaggaaggaaggggcaggaggcagcgcggtgagctcggcagggaagaggatggagggagcggccgaggatgcagggggccagagagtgaccacggagcacccaaaaccctctgtgcccatggatagctttcccgtgttggctcaagaaaaacaaagcaactaaatgttaacacacaaaagagccaaacatctatccaatgtcactgctacaaaaagtaagagaagaaacagaacgaacagctcttctcaagttaacataaaacttttttttgcgacagtctccctctgtcacccaggctggcgtgcagtggcgcgatctcggctcgctgcaacctctacatcccaggttcaagcgattctcctgcctcaacctcgccagtagctgggattacaggtacccgccaccacgcccagctaattttcgtagttttagtagagacggggtttcaccatgttagccaggctggtctcctaacctcaggtgatctgcctgcttcggcctcccaaactgctgggattacaggcatgtgccactacgcccggcctggattttaagtaattattagaaagtctggtacttgtgttcccagctggagtttaccctggaggatggtaaaggcatgggccccatgtggtctttgctcttcggttgttgagacaccatttattgcaaagcctatgctttcctcagtctcaaaaaaaaaaaatccagagccattaaagaaaatattaatcaacttaactatttaaaaaaatagctttcacataacaaaaatcacaacaagcagaacaagaaatagccgccaggctgagaccaccatttgtatcctccatcacagatggagctggtctcccccggcaccagggttagcggaaaatggtcaggagacatgagcagagtccactgaaaaagcaatgcagacgtcctcatgctttgtaagaggtcctcgtcctcacccacattgagacggaggtgctcccacccgtgtcaccgaactccagcgtgacaccctctgtggggggctgtggagaagtgagcaccttcacgccattggcaggagggaaggtggacggcccccattgaggaggtcgccgagatttatcagcatgacagctgcacctaccctctacccagcagtctctctcctagctggatatcctaaagatgcgctgaggattcaaaaggaagatgcgtgcaggttgttcacggaggagttatttatagtagcagacggttggaaataactcagtttccatcactagggactggctgggttgaccgggcagtcaggagcgatgaaggaattcagaagagctctgatccccttgggtatcgagaaaacaccaggataaattattaagtttaaaaaaacaagcaaggggctgggcacggtggcagaagcctcctcatcccagcactttgggaggccaaggtgggcggatcgcttgagcccaggagctcatgaccagctcaggcgacagagtgagaccctgtctctgaaaaataaaataagtaaatacataattaaaaagcgaggtacatggctgggcacagtggctcacgtctgtaatcccagcacttcgggaggccaaggtgggcggatcgcttcagcccaggagctcatgaccagcccgggcaacagagtgagaccctgtctctgaaaaataaaataaataaatacataactaaaaagcgaggtatatggctgggcacggtggctcacgtctgtaatcctagcactttgggaggccgagacaggcagatcacttaaggtcaggagttcaagaccagcctggccaacatagtgaaaccctgtctctgctaaaagtacaaaaattagccgggtgtgttggcatatgcctgtaatcccagatgctccggaggctgaggcaggagaatcacttgaacccaggaggcagaggttgcagtgagccaagactgtgccactgcactccagcctgggagacagagtgagactctatcttaaaaaaaaaaaaatggcaaggtacagaatagtgattctagtatacaagctattttgtaagaaagaaaaaaaaattatcatctggttgcccataagaggagcaggtcagtcaggcatgagaccacagcttttctgagctcgtcttttatagtttggcttttgaaccacataaatattttatatattcaaaaaataccattttaaaaagaaaaaaagcaccaagccctaaaatggaatacaaccagaggccattaaacttaatggggtatcgaacccagaggataaccccacacagaaaggggccgacttcgatggcgtgtggccgtcccctgctagcagaatgcatgctgaagataaaagggaagcctcaggctcactcaggagatggcccctgggtggtaatattgtctcttgtaatcgtgaacaattatatgcatattgtaagacaacatgaagtaggagatatattaaatgtcacaggaaacaaaataattggagtaggagtgggtgaagcaaacacaagagaagtgaagaaaaaaccctgggccgggtgttgtagctcactcctgtaatcccagcacctgtgggaggccgaggacgctatcccccttcagacagtgactccatgcccccatcagacagtgactccatcccccatcagacagtgactccattaccccattagacagtgactccatcccccgtcagacagtgactccatcccccgtcagacagtgactccatcccccgtcaggcagtgactctatcccctgtcaggcagtgactccatcccccgtcaggcagtgactccatccccccatcaggcagtgactctatcccctgtcaggcagtgactccatccccctgtcaggcagtgactccatccccccatcaggcagtgactccatccccccgtcaggcagtgactccatcccccgtcaggcagtgactccatcccccatcagtgactccatcccccatcagacagtgactccatcccccatcagacagtgactccatcccccatcaggcagtgaccccatcctccatcagacagtgactccatccatccatcagacagtgactccatccatccatcagacagtgactccatcccccatcagacagtgactccatcccccatcagacagtgactccatcccccatcagacagtgactccatccccccatcaggcagtgactccattccccatcagcacacgcatgttgacctggagcaaacagcttaatacaggtcttctaatgatttgggtgcaaaaccacttatactggaaaaaaaaaaacaaaaaaacaaaaaaacactaggtatctaagaaatacatctagctacacgtgcctgagcctcagaagtcgtgttggagataagctcctactgggtcagctcaaagtaacaggactttgaattctccttaaattcacctgttaaactcaatgcagttctgatgcaaatccgaaaagcatgtctcataaacccaggacagattctaaaatgggctcagggacagagtgggtcccaggtccctgtgaagcaggtggtggccccagatacagggcggaatcgaggccccgaggccctggggccaggctggcattggggagcacggtcaccgctgcccaggaacagcggaggaggtgcctcctggagctgtccctggagccagcgcccccagagtcccaggcaaagccagcaagggccaggccaacacgcagagcaccacatgtctggggggctctgaaataaaatacaactcacttttatggctggcgggtaatccttaaacatctccacgattctcatgatgctgaatgacagatatccagaggctgtgaacagcagcggagacgtgaggctgcttatggcaatcaggacctccacctggaaaaaaagcgcgggttgcaggaccacggccggagcctgggagcccaggacagcgggcgtggccagggctgggggggcgggcatggccgggcactcatgggcatagtcccaagctggttccctgcatgactcctgctgaaacctctgccttttcttttttctttttctttttttttttttttttttttgagacaagtctcgctgtgtcgccaggctggaatgcagtggcatgatcttggctcactgtaacctccgcctcccgggttcaagtgattctcctgcctcagcctcccgagtagctgggattacaggcgcccgccaccacacccagctaatttttgtatttttagtagagaccgtgttttgccacgttggtcaggctggtcttgaactcctgacctcaggtgatccacccacctcggcctcccaaagtgctgtgattacaggcatgagccaccgcgcccggcctgcctttctttcttttttgagaggcagcctagctgtgtagcccaggcaggagtgcggtggcacaatctctgatcactgcaacctctgcctcctgggttcaagcaattctcccgcctcggcctcttgagtagctgggattacagacatgcgccaccacacctggctaattgttttgtatttttagtagagacagggtttcaccatattgtcaggctggtcttcaactcctgaccttgtgatccacccaccttggcctcccaaagtgctgagattacaggcatgagcagcctgccttttcattcacagcacagtgccacaagttttgaaatacttaccatctaggcaaggtggctcacatctgtaatccaagcactttgggaggccgaggagggcggatcacctgaggtcacgagttcgagaccagcctggccaacatggtgaaacccccatctctactaaagatacaaaaactaagcgggtgtggtggcgcatgcctgtagtcccagctacttgggaggctgaggcaggagaatcgcttgaacccgggaggcagaggttacaatgagctgagatcgtaccactgcactccagcctgggtgacagagcaagactctgtctcaaacaaacaaaaccaagaaacaaaaaacatttacctgcaattctccactcttgaaaaaatagcccttccgcatgggtcacctccttcactgctctgaagtctgtccttttaacccaccccaaatcttcctgtttgacccatcaagtctcagagacagccttcactcatgccaagcatgggcagtcaccttgcaaagcactcagggtccacattttggcagcagtcattaacgatcgaccagttcaattgtttgcggtcagtttgtggcagtttcggccgggcgtggtggctcacaccggtaatcccagcactttgggaggttgaggtgagtggatcacctgaggtcaggagttcgagaccagcctggccaacatggtgaaaccccgtctctactaaaaatacaaaaattagccgggcatggtggcaggcgcctataatcccagctactcaggaggctgaggcaagagaatcacttgaacccgggaggcggaggttgcagtgagccaagatcgtgccattgcactccagcctgggggacaagagcgagactgcatctcaaaaaagaaaaaaaaacaatcgaccagccttaggaggtgcagatgatgctcagacactggtctccttccaagggttaggcacagagagcgcttccagtgtctacaccaccttgttcaggtctgcctgtccctgagaacagtccctgctgagcgggccagcctccacctcccacaaccccaccttcctcattgtgcaggccctgcagcccagtcactgcgctctcttgggctggagcctggtcacatggcaccaagggagggctaggccaggccctggccccgctcggtgggtccctggcacccagggctgaggggttcacccaccagacacttgctgggacactctgctgccacatgactggcaatggcacttggaaagcactaagagaaaagaaaaaggaaagattttagaggaaatagtcgaagaagtcgaattccaaacatgtgccctcccaccagtgacccctccatgcaggctgcctggctggcttgctgtggggggcaggggggatggtgcagtgcccaaaggcgcagctggggcagggacgggtccgcagggaagcaggggtagcctctcagaggttttgtgtgctctctgttcctcaaccattggtttaaaattttaagcctgtagaaaagctgcaagagcagtggagggggcatctgaggccccaaaatcaccagagtccttgacattcatatctgtgctctctccagctctcccagatagcctgatgcctgaacacctgagagtgctggctgagcccagggcacactcttgcacacacccaaagcaggaccacgctcgagagactccacgtggggccgatgtggtccatgcccagattcttccagttgtcctcatcatgttctttctttttaattttttaataatttttctttcttcttctcctttttttttttaagatggagtcttgctctgtcacccaggctggagtacggtggcgcgatcttgactcactgcaacctccacctcccaggttcaagcctcctgagtagctgggattataggcacccaccactacaccaggctaatgtttgtatttttagtagagacggggtttcgccttgttggccaggctggtctcgaactcctgacctcaggtgatccgcccgcctcggcctcccaaagtgctgggattacaggcatgagccaccgcacctggccctggtcatgttatttctagagctgtttgtttgtttgctcctgatccggattcggtctgccattgagctcgtagtctccttgtgggtccctgttaatcggggagtccctcagcctctgtcacctccgttacctggtcgcttctggggggtgcagcccatcagctgcagtcgggcctccgtgtgggacaggatttcctcatgatgagccttggggagcctcggaggagactctgcagtgccccagggtgtggactgccccttcctgatgacgctgacttgactcactgggttagggggatctgtaggttcctctgttggatgggcacctcttcctttttataaccaagaaatgcccttttcccacttattgtgaggagcctgccttagttccgcacaatgtaggcagagggaggatgcatgctcttcatcctcttcatctccccgaaggtgtccaggtgccagcaccccagcccggcctgctggggagggggctgcatcagccaggggctgtggtgagagggtgggcaggacagagatgggctccgagcaggggagcctgggcagcagggagaagactggggagctgaggggctgccagtgcaaaggccccaagccagctgctgaggtgggtgtggccctggccagggaggctgaggtgtcaatacaggggtctctcctgggcttggtgcttctgaaagggccttctagctgtaagcagcagtgagggcacaggaagggatggtggcttcagggtggcctattcagggccccagtgagccatgggagggcgggagtttccccgttcacccagcatggccactccggcccctgccctagagggccaggaagctcagccataggggctggggcagctcaatcaagggccctgccctggaagggtccaggcctgcagcccagcccccaactccagccccgagcacctgcctccagcccatggtgcagggcctgggcccctctgccgcacccaggccagactcaggcaggtggagctgggtccctcaccacgcatgcctcagcgctctcctctcctcctggggtctcctgccctgaagagagggttgggagtgtgggtggatttaggggcgcccagggggcagcacctgatgggcagggggtgctctccgggaagatggagagagcagagccacccccgaggcaggaggggtctgcgggatgggaggggcctctgtgatgagggctgactgcagggacagggaagggggtagggcaagtgcctttcattctcaactttttggaggtatgtggtctctgtcctccctcagcttcgggatgtaatccctgcgtttcagaccccagggtcagttgtacacacctgcaggcgtcattctctctgtcacagacccgcttgggtgggcacccatgtgagttctctgtctcagtagctgggcctggtcctaccccttccgggggtgtggctctatcccagctcggtcctgcctgggtctctttccctctctgagcgcctcagcagcccactaggtcgggcactggtgccctgggggcattgctctgtgcctactcgcccccacagggagctgaaacacagctgctgccaatgggatgtgtccacctggcaggcgtgggccccttctcggcagtccacccggccacaccgttcccgggcaggcgtgggccccttctccgcagtccacccggccataccattcccgggcaggcgtgggccccttctcggcagtccacctggccatactgctcccaggcaggcatgggcctcggcagcttcaggaagagccccactgctgcccaggaggagcctgtagctgatgctgggtgctcaccattcctgctcatgtacataagagagcaggggcaaaatctaaaagtccacacagcatgagacaaaccaggggctggccgtcaacaccggtgtgcaggccactacgcggcaaggtgctgagaacctcgtggggtctgcgtccggaggcaggtgggtggtggctctgggtgggctacaggctgtgaggggatctggggtgtggaggggttgctctagactcactgttctgagggaacacacctgtaatcccagcacttttgggggccgaggcaggcagatcacttgaggtcaggagttcaagaccagcctggccaacatggcaaaacccggtctctactaaaaatacaaaaaaattagctgggcatggtggtccacgcctgtaatcccagctacttgggaggctgaggtgggcaaattacttgaacccggggaggggcagaggttgtagtgaggtgatattgagccactgcactccagcctgggtggcagagtgagactccatctcaaaaaaataaataaataaaataaataaaacaatgcccatgtattgagcatgtggcatgtgtcaggtgctgtgtgacacatctgctgcagtaacatttaatgtaaagtaataacagaaatatgctgcattgtatgaaacacatagtgtaatataaatgcattatatattagaaaattatatagaataataaacatctacagcctgacattcatatgttaaaaagattagaataataaaaataattggtatttttttcaggaaaaataatataaaataatcacacaaactaatataaaagcagttaatactttgactcatttaatccttaactccccagttcttctgaagttgggggccagcgaggaccctctgtggtgactctctgtctgaatgcaccaagactgagctcggggcccagccacgcaggatctgagcagtgtggcccagagcggcggcgggcgggccagaggggttactcacggccactaggatccaaaagaacgtcactgagaggtgtgggcctgaaactgagtcatccacgttcagggcaatgatccccccgaggacggcagagatgcctgcgattacctcgacgacctggaggggacaggacagcatcggctcataaggaagtggagacacccccagattcccagaatgcactgtgcagacatggacccccaggagcagggtccagtgggctggccccagatctaaccgtggaggagcccacctggatggacccccagcctcacctggcccagaccccctctgccctcagctgcggcttttcacgtccctcctggagtaaaatagccaaagaggtgtttcccccactgctgcttttgtccacagaaactgagggtattgacctgacagtggtgagggcagaaaaccaagaccctcagactcccttccctgtctcacagtgtggcaggcggcggtgctcagaccctggaccccatcgaagggactcgggaaaacaggcctggggcagaagtagcttcccataggacacacccacccgtgccatgtgggtttgccattgccacggcaacactggacgtcaccacccctttccgtggcaatgatccaaccacctggacgttagcaccccttttctagaaatttctgcataatctgccccttaattagcatatacttaaaagtgggtataaataggaggcagagctgtctctgagctgctgctcgaggcacctgccggttggagagccctgctatactgccactgcaaacaaagctgctgtctgtcacctccagctcgcccttgaattctttcctggacaaagccaagaaccctgctggcctaagccctggttgtggactcatctgcccggcaccatcagggccgcaaccagcaccgccagactcagggaggggccgcaaccagcaccgccagactcagggaggggccgcaaccagcaccgccagactcagggaggggccgcaaccagcaccgccagactcagggagggctggggaagaaacacacgcccgaaaacctgctcccgtgaaggatctctgtgagtcgcaaacacagagctgtggccagcaggaaagccaggcataaggagtgggccagcaagggcttgggggccggaagggacctgggcagccaggccttgcgtccagaaggcacaaaactccagatgcacaaataaagctgaattcccagccaggcacggcggctcatgcctgtaatcctagcactttgggaggccgaggcagacggatcgtgaggtcaggagtttgagtacagcctggccaacatggtaaaccccgtctctactaaaaataacaaaaattagctgggcgtggtggcgggcacctgtaatcccagctactcgggaggctgaggcgggagaatcgcttcaactcaggaggcagaggttgcagtgaaccaagatcacaccactgcactctagcctgggcaacagcaggactccatctcaaaaaaaaaggaaaaaaaaaaaagaagcagaacggaaatggaacctaagagaggactgaaatgctaaataaggggaagtgaaggcactgggaaacacacacagacacagtcaagcacacaggaggctgtcccattgttggagtaaaaaggcaaaatgtcactaaatgtcacaagctagacaacaaggccaaggcggagggaagggggacagaccccgcatggtctgtttatcaaggagcgtattagaatatgaagggcaacccccaaaagaatactgaaaaatttcccatccaaaattagagggaaaaggaaggacggagcctctgccaattcaaaagaaggcagggaaggagggaaaaaggcaaaatcagggaaaatggaaaactcaaaagatggtaaaaataagtagaaatttatcagtaataactctcagaggaaatgggctacattcaaaaagctagggagagagaatgacaagataaagaacaaaatacagttacgtgctgcttataacaattataccaaagtacaaggcaagaaaagttgaaagtaagaaggagaaagaggccaggtgcggtggctcacacctgtaatcccagcactttggaaggcctgggtgggtggatcacttgaggtcaggagttcgagaccagcctggccaacatgccgaaaccctgcctctactaaaaataaaataattagccgggcgtggtggcatgtgcctgtagtcccagctcctcaggaggctgaggcaggagaattacttgaacctgggaggcagaggtggcggtgagctgagatagcaccactgcaccccagcctggctgatggagtgagactccgtctcaaaaaaaaaaaaaaaattcctcggggacaacagtgtcaactcacctacggcagtaacaaactccccctaaaaattacaggacaccagcagcacctttcgcgataaggaaggttattaccaatgataccaataacagactagagtctccacagatgaggcgcacgccgccatgcggtgtagacagccaactcttcgccaactcggaatcgaaacgtgacgtttaatccagcctcagtcacccccgacagagtatgagagaaaagagaaagaagggaagttttcttactgagtaagatttcaggacccgagcaggaaatggcacttcgtccagaatgttggcgctgtcagacatggagccctacgaagaaacagaactgtcaccccgggtgcacgggcacagggactcagcactgccgctggcatccggccgccgtgggcagtgggtcaggtcagcctgccgtgtagatgcgagaccgccttggaggcgcccgtggatctttgggcttgaggaaatgttcacacacattgtccttgcatatgaaaattagcagatgtggtgtctcctggtgatcccctggggacgagcactggactgagtcaggcttagggggaggggagggtacagcatctgtcttcacctccctgtagccagcggccgccaacccctcacccagctccagagcccctcctggccggggtttctgagacccaggagagaggggtctcatgggaatgccctggagcagcccagatcggccctccgagggtgacgctgagacccacctcgctcaccctggggtgatgcctctgcaccccctgccctgcggggtcagaagctgcacccaccttctttttcttgcagtcctcctcgctggaccgtgcagcgatgatcaccgtggccgccatgagcagctccagcaggagcagcaggatgaggttgaagttgatctgccaaggggcacacacgcttcagcaccgggcccgcctttctcacgccaccgcgcttcagcgtccaccggaccacctcacgggcaggctgcgcaggactctcagccacggtccccacttttcccatccagggccagctgtgaggcactgtgggctgcacactctcctgcctcacatgggcctttggggtcttttagtttttaaaaccattcttagtgcaaaggctgtacaaacacaggccagggctggatttggccttgggctctggtctaccgaccccattctgaacgctccttgttcccacaaaagccttcacggaatgtttagagtagcttcatgcatgattgtcaagcactgagaacataaggttttttggagggtaatgaaacgactgcaggccctgaccgtattggcagtgacatgaatttatatgtgtgttaatattcatagaagcatacattttaaaaagtcagtgtagctgtctgacaattttttttttttttttgagacggaggttcgctcttgttgcccaggctggagagcaaatggcgcaatctcggctcaccgcaacctctgcctcctgggttcaaatgattgtcctgcctcagcctcccgagtaagctggggttacaggcacctaccagcacgcccggctaattttgtatttttagtagagaggggtttctccatgttggtcaggctggtctcgaactcctgacctcaggtgttccgcccacctcggcctcccaaagtgctgagattacaggcgtgagccaccgcgcccggcctgacaatttttaaaatacatttaaaaaagaaagagtgcagaaccacattcaactaaaaacagagcctcgaaatatatgatgtcataacagagccacaggaagatgtagatatatcagtagaggtggggaaggacttgaaacacttttcttagaaactgacagatcaggcagagggaggcggctcacgcctgtgatcccagcactttgggggaccgaggcggttggatcacctgaggtcaggagttccagaccagcctgaccaacatggtgaaaccccttgtctactaaaaatacaaaaatcagctgggtacggtggcgcacgcctgtaatcccagctactcgggaggctgagacaggagaattgcttgaacccgagaggcggaggttgccgtgagccgagatggagccactgcactccagtctgggcgacagagcgagactgtctcaaaaaaaaaaaaaaatgacagatcaaaaagacaaaagcataaggagaactctaaaattcagaaaagtgtgacattaaccttgtcttttattttctgtatttctggtgctttgacctctggctccttcctgatcctgaagagacagctcctcccagggccagccgacagctacagtgagtaacttgcctctgagcagttcagatacaagccactgacccagggaccacaccccatctgctctccgtcttaataaagaagcgtcacaggccgggcgcggtggctcatacctgtaatcccagcactatgggaggccgaggtggatggatcacctgaggtcaggagtacaaggccagcctggccaacatggtgaaaccttgtctgtactaaaaatacaaaaattagccgagtgtggtggcacacgcctgtaatcccagctactccagaggctgaggcaggagaattgcttgaacccgggaggtagaggttgcagtgagccgagatggcgccactacactccagcctgggcgacagagcgagattccttctcaaaaacaaaacaaaacaaaacaaaaaggcagtgtgggtgttcccactgggtcctcctgtgtctgctcatttttcctgcccaacgagagtggccaggacatactcaagcctcctccagctttccccaatcatcaagtgcattccacatgtcacacaaagcaggaggccctccttgcagtatctcggatgaggtcctggtttcctttgggatttttgtctttttttttttttttttttttttgagacggagtcttgctctgtcttccaggctggagtgcagtggcgccatctcggctcccacaacctctgccccctacaatttcacatttttgtttagaggtgcattgaacaactgtcttacacagattggatgaaacatagtattatgtcactgttaatttttaaggactgttggaaaagacattgtttaccaataaatctgtcccgcagaatcacgagacttcaataaagacaattattttctttggatgcataaatctctcaactttagtcaaactcacgagctgtgaataacatttaccacctatttccagctcaacaaacatttgctgacaccattcgtgggagtggggctgtgggtgtcaggcgtctgcgcgaagctcgtgtgaactcacgtttattgctgatgggttcaggactagtttgcatccaaaccaaattaaacacgtagtggtcacagcaaacgtggaaacaaacaatatctgaaagttgggaatctgaaaaacaaggcaggaggggttttccttctttgaataataaaagaaaaaaggtaacagataaaccacacttcaggccattcactaaaaattatcctgattaggacataatggtggggagtcctgcgtgctcagcccgctctcccctctgtgcggcaaaggctgggctgggcaggagctttactgtctggggggcaacctcgggggcccctctcggtgccacaacgtctgtgcgtgggcacacacacaagcacacatgggcacactgtctgtcagcccctccggctttctccctggcagaggctgcctgcaagctagactcaccacattggcgttcctcctggagacggtgaagctcacaattgccgaggggatgcactggaatgaaaccggaatcccatgagcctgccgctcacctgagcaactgagactctgaaatactctaacatttgcgcttccagaaggatctgaatcatattcacaaaacagtgttgccagtccatgcaacacagtgggttggcttgactagaaggcccccaggtacttctcagttttaattttttcttgagatggggtctcactctgttgcccaagctgatcttaactttgggctcaaatgatctgttcacctcagcttcccaaagccctgcgattacaggcatgagccgctgcgcccaacccccaggtacttcaaaataatttattctgaaagaagtttttatttttctgatgtgctaaaaagatatttgttaatgaaggctcttctagctggataagctttgaagcctagaatgtaactcacgcaggcacaagacctggtctttgctgaaaattacccaaaaaaggaaaaagtatcagccgggtgcagtggctcacacctctagtcccaactactccggaggctgagctgggaggatctcttgagcccaggagttcgaggctgcagtgagctgtgaatactcggtgatagagtgagaccttgtctcaaaaaaagaaagaaagaaagaaagaaagaaagaaagaaagaaagaaagaaagaggaggtctggtgcagtggctcacacctgtaatcccagtactttgggaggctgaggcgggtggatcagagtcaggagtttgagaccagcctggccaacatagtgaaaccccatctctactaaaaatacaaaaaaaattagctgggcgtggtggcgggtgcctgtagtcccagctactcaggaggctgaggcaggagaattgcttgaacccaggaggtggaggttgcagtgagcagagacggcgccattgcactccagcctgtgtgacagagcaagactccgtcaaagaaagaaagaaagaaaaaaagaaagaaagaaagaggaaggaaggagcaaaggaagtagcaagactctgcatgtgagggaggcagaaaggagtcccacagccttcttgtcctcagccttcttgtccccacagggccacaccaaggctaggagtccagggccagggagggaggttgggacgtcagggacagggaggtggatggagtcgggccagcccaggcctgtggcccttgccgtgcagggccttgctcctgcagccatgggaccccgggccctgagtcgggggtgcaggccctgaggggctgagcacagcagtgctgggtgaggaggcagaagaagccccgtcggggcctgagcgaggggcagagctagggccaggacagccaggctcagctcagcacccactcaggtgccacgagggcccagggtagagaagaaaggccgggggcagggccgagtggggccaaggctgggcgggggtgggcacttgcccatatccggcagccgctgaggctgaaggggcacagctcacagctccactgggacaagggcggctcccatggtgaggataaaggccacggagaagcttccagagagggcagcagagtgggacgggtcacctgccccaaagggctttgttctaagggagcagagacccaggacagcacggggcggggcatccactttgtttttaagacatttcgggggcgctgctggggacagtcaccaacagtgtccctagagaaagggcaggggccagagacccagcaggcatgtggaagcgagaggaggggagagctcgggaccagctgaagcaggaggggcgtggggtccgcggcttgcgggccagaggggcatggggtccgcggcttgcgggccagaggggcatggggtgcgcggcttgcgggccagaggggcatggggtccatggcttgcgggccagagcccaggggtcagccagcatggtgctctagctgccgggacgctggggaggcagtggccggggttcacagaggaccaggggacagcggttgtctgtcctcccttgctctgaggatcagtgggtgcctccaccggccttggcactgtgtaagtttctaaaaacacaacatgaagctttgggaggatgtggggcacaggtcccagtcccctgagggcagatgctgccagctctggcaggacgcagccgcaggctcagaatcaacacgcaattccctgcacaggcgtctgcagagcaaggttcaggcctgcttcatcagtaattctcaaaggtgatgaactctacgtgaaactaaagtcatatgaagagttttttgtttttttcttgttgttgttgttttgagacgaagtttcactctcattgcccaggctggagtgcagtggcacaatctgggctcactgcaacctccgcctcccaggttcaagcgattctcctgcctcagcctcctgagtagctgggagtacaggcacccaccaccgcgcccagctaatttttgtatttttagtagagatggggtttgtccatgttggtcagactggtctcaaacacctgacctcaggtgatccacccacctccacccctcaaagtgctggcatgacagccatgagccactgtgcccggcccatatgaagaggtttgaatgaggtacaggtgacagaaacctgcacatctcagaacaaagaaaccagagcacgtgccggcgagcttgggcactggcagaggcgtggaggaagctgcttacagagcctgcagcacagcgcaagtaatccatctcagccgggaacacgttccccaggtacagcgaaaaccccgaggtcaccaggaggcagctctgcaagacagcgacagaatcccaggttacaacgcgccccgtccccaggctggaccctgacccttcaacttctgcttcactgtctgtgtattggtgactcacccacgtcccccagcatcaaccacacccgcacctgggacccgcccatcctggactcctcctgtaggacagacgcagccccgccgcagcccaggacatggaccagcctcccccagccatgtcggagcatggaccccccacgctgttatctggaggagagaagaaaggggatctgccaatatttagagcaaggaatggcacctctccccacaaaatactcctgccccaacatgttgtgcgtgcagtcttccagatcccacacccaggtccagacacgagactggaaaacaactgcccatccccctccgtctgcagaacctaatttccagatctggaagaagatccctccaggcaggggctccaggcccaggggctcctgagcagggaagaccctagcaggaggcagggagggtgctctctctcacgcacagcactgcaggggtgcggtggggagggggctctctctcacgcacagcacccccggggtgagtctgaggggagtcagtatcaaaggtcactgggacccagggtcctggcagaggaagcgaggtctggggcagaggggatctggcctgggcgggggaggggctgcgaccaagtccagggcaccaggtggaggagggcagagcccggagatggccaccaccacccgggagccgcctctgtccccagctccgaggcagacgcctgtcttggtggggcatgctcaggccacgggaggtgggcaggaccactgtgggtgctgcaggggctgccggcggaggccagggcacagggaggggagaaatcacagcctggatctcattctcagcccaagctacacggaaccgggggtccctgcatagaggcctgtcctgcagcatggctctgagcagctgcacacactcaggcccaagtggctcctccaatcatctctgtgcccacgactgtgcagggaatggccaggaccccagggaaatccctcggacatctggcgctgcccgtccaccccagacctgttcctttgttccccagctccctcccagccggcccctgaggccctccctaggaggaggaggtccctgaggttctctctgtgagggccgacctgaaggcctgagacgcctcctcccacctttgcaggtgacccctcagaggaccctgggcccccagagccgagggtcatggagactcctggggcccattcatggccctgggactgtccctaccctggtgggactaagccacaacctggagcagctcaaggctggcacaacagacacccataaattaataaaaataattgtgaaaacacaagcaaaacaagctcgtcggcatccaagagttctgcagcagcagggttagtctgagagttgctctctctgtcccacctggggctccagggcgctgcagtccgtcaccagagggaccagatgctcgtggccctccaagggcttagtgtggagctactcacccccatcagcacagagaagacccacgtcttgtggctgaagcaggggggcagtctcttcgacagctgcaggtcgctcggcttcgcgtctggggcatagctggcggggtcttgccggccccgctccagcgtgggcatccggtcataggccagctcctctctgaatggctcctgggtcatggcacttggggacaccacagctgtgctgaatgtacagccacgtgtcaccagttctttatctggaataaaattatcatcggctttggccactctgaggaaacttcaataagttgtttccaagaaatattttttaacaaaagaaatattgttcatactgaagtgctctaaatttgaagaagaaaatgagcacttgaatctaaaagtgaaaaagaaataactttcctagaaaaacggacctgaatagtctgggttcagggtgagattctacactttaaatgcctcattgatccatctgggccctccaggtgcaacacctgacaacatccatcggcaacttcgtccatgaacacatcacgccggggactcaagcacgttaaactgctccaattggtagctaaacgagagattgcaaaacatgcctctactcaacggcttaatgtctgagcacttacctcccccgctgctctgccgttgggagcactggtctctgggtgagggacttccagcaagaagtattcacaaatgaaacaaaagctcagcaaacttgagctgaaggcaggggaaggagagctgcttcctgaatatcaatgaggggaggaatcgggtggatcgtagaaatgtttcgtgttggttgtgtaaaccactgcctcggagctgtcagaacccaactaggaaaggaaggggccctgcctgtgccactcgccacagagctcgggtctctcagaagaaagaagcgtccctaagaatagaatcccaccaagtacacattctgagcaggctctgtttctgaaacgtaactgtttactcgaaggtcttctacatctttccaagtagcctttttccatcccccacagccacacggtgggaacctccttcacacggtcacataagcattcacgcactcggcttagctgtgtggccttgggcggctccggattcggccctgtggtttgcgtgggcagcccggatggctggtgggcccggtcctgctgccccctttatctctgctcaccaagcagagaaaaaccacagtaatgtgtgtcgcccagagacactggcaccctgacaactacagcaacgggttctttgtgcacattgtaaaaaggctcaaactaaagtttctgaaaaaccagctccttaaaccatgaacccacattaaaacttgagcaaagtcatcaggttccagaccatgggatgttctgttgtcttcgtttcaatcaagcaagaagcttttagtaagcttttattagcttttagtaagtttttattagcttttagtaagattacacatacaagcatccctgtcccagtgaaaatgcccactaaatcacctcgatcaaaatgcgtaagtgtcaagtacgcataaatgcagctcaaaacactttgctcaacctcacccccacaggaaacagcagtgataaatttttagcaataaacgaaagtttaagctatactagtattttagggttagttaattttgtgccagccaccacagccaatgttctgttgtcttcatttcaatcaagcaaggatgagaaataattttcaaaaactataatctgtgaagtcaagaactcattttaatggattgagaaacctcccaaacttcactatcttttaaagcgataaacgggattagtgggagtgggtccaactggatcgaatcctcctgtgtttctttttgtttggaaaaaaatgttaatcggatttcaacatttttttctttcaaaagttgctctccacttagaaatacaaacaagctgccctgaaccagaggttgcagagcaaatccctcagcttcccagatcataagtcatcacttgagaaatgctcccaagtttctgttggcaacactagtttctagaacaggccctgttctttcatacaatcttccaacaaattcttgctcctaaaatgcccttcatccctctgcctgctgatgtcccatcatcattcaacattcaacaaacatttatggggtggacaaagaagtgacgtccttcctataggctgtttacattcattgggggcacaggagtgcacaggataaacaaattagtgtgttatacagtgatatggtttggctgtgtccccactcaaatctcatcttgaattgtaattcccataattcctacatgtcgtggaaggggcccggtgggaggtaattgaatcatgggggtggttacccccatgctgctgttctcctgacaatgagtgaggtcttatgagatctgatggtcttttataaggggctttccccgcttttgctcaagacttctccttcctgccaccttgtgaagaaggacatgtttgcttccccttccaccatgattgtaagtttcctgaggcctcctcagccctgtggaactgtgagtcaattaaagctctttcctttataaggacttgactctaaaattacccagtcttgggtatgtccttatagcagcgtgagaacagactaatgcatccagtgacacacatgatttcctctatgagggaaaagaagtcaggggagagaaatgaggggctgctgtttgcaggggccagggcaggcctcagtgagaaggaggcagggaggggaggctggcagagttgaagcaaaggccacaggttggggaaggcaggcgaggaccatgcaagggggatacaggtaggacagccaggtgccagcacctgtgggtatggagacgactctgcttcaactctgagacagacctgctggaggggtctgggcagagcagcatccggtcactcactgggtggagagcaggctggggggtgggaggagcaggtgctgcctggcattgaggtggcagtgggcaagtggtgaggagggactgggctctgaacagggtttgaagagcggacgcaatctgctgtcagggcgacgttgctgagttctgtctgagcagtgaggacagagatgagaagaccagggtggagcaggtgtggagcgaggatctggagttccattctggacatgatgaggccgagatgtctgtgggcatctgccgggtctactgagtccagaatcccagggagtggcccgagctggggagctgaggggcagccctgcaggcacagcacccgctgcgagctgccctggcagggagcccatgagccaccagccctcatgcagctcgctcttgtttccaagctaatctcccaccaaccagtaggtccctgggaccctgctggctcctgtatgtgttccagcacccagcccaagacacaggcttagcggggatttgaaatgctagggagtgcgccactctctcccttcccacagcaagaactatcagtacactctgcatccatggacaggcaaggtccaggctgtcatcagactgacagatctgacctaggaaaataaagctatgtcaatcaaaaataagtcggggctgggcgcagtggctcacacctgtaatcccagcactcgggaggccaaggcgggtggatcacctgcgggtcagaagttcgagaccagcctgaccaacatggtaaaaccttgtcgctactaaaaatacaaaaaaaaaaaaaaaaaaaaaaaaaaaaaaaagccagcgtggtggcgcacgcctgtaatcccagctgctctggaggctgaggcaggagaatcacttgaacccgggaggtggaggctacagtgagctaagatc

SEQ ID NO: 632 - protein, 415 aa, Homo sapiens
AGSPSPRDQCSQRQSSGGDKELVTRGCTFSTAVVSPSAMTQEPFREELAYDRMPTLERGRQDPASYAPDAKPSDLQLSKRLPPCFSHKTWVFSVLMGSCLLVTSGFSLYLGNVFPAEMDYLRCAAGSCIPSAIVSFTVSRRNANVIPNFQILFVSTFAVTTTCLIWFGCKLVLNPSAININFNLILLLLLELLMAATVIIAARSSEEDCKKKKGSMSDSANILDEVPFPARVLKSYSVVEVIAGISAVLGGIIALNVDDSVSGPHLSVTFFWILVACFPSAIASHVAAECPSKCLVEVLIAISSLTSPLLFTASGYLSFSIMRIVEMFKDYPPAIKPSYDVLLLLLLLVLLLQAGLNTGTAIQCVRFKVSARLQGASWDTQNGPQERLAGEVARSPLKEFDKEKAWRAVVVQMAQ

SEQ ID NO: 633 - DNA, 412 bp, Homo sapiens
tttttttttttttttttcgtcgcttggagactagctctaaatattattggtaaagacttttgcaaacttcctgcaaagctcctaccgtaccactagaacttttaaaaagtttttcgtagctttctttcctccagatctatacaaggtccattcccccgccctccccaccctccccaggttttctctgtacaaaaatagtcccccaaaaagaagtccaggatctctctcataaaagttttcttgtcggcatcgcggtttttgcgtgagtgtggatgggattggtgttctcttttgcagctgtcatttgctgtgggtgatgggatttttttttttcctttttctttttgagcgtaccgggttttctccatgctgtttcttactctcctcttttgcacccccctcgtgccgaatt

SEQ ID NO: 634 - DNA, 493 bp, Homo sapiens
ttttttttttttttttttttacaagaaaaattgttagttttattggtattacagtgtacttttaatacaagctaaatacaaacacaattcttacatattcagccacttattctgcaaaacaacatgccaagatcaaccttgaaaagtttataaaaaccaaaatccagaaaatatcttcctcaactctaaggactccatatacaaatgcaaaaattgctatttgtcaataatcacattaagtgttgagttattgactgagcagtaaaaaacaatttctgatttttaaattaaatagctccagataaaagcatgttattttccacatacgctatctttgtattctgcacagagttccaaggcaaagattgctcctggctttatgaattaccagagatgatgacttgtgtggctgacttatcacaggtcttttactcttccttcctgatagatccttagcttctttgggaggtggcatatgaattggtttccacgg

SEQ ID NO: 635 - DNA, 340 bp, Homo sapiens
gacgctctcttcctgtctttgtggctccggaaaggcgtttgggatgccaacgatgaggctgctgtcatttgtggtgttggctctatttgctgtcactcaagcagaggaaggagccaggcttttggcttccaaatcactgctgaacagatacgccgtggagggacgagacctgaccttgcagtacaacatctacaatgttggctcaagtgctgcattagacgtggaactatctgatgattccttccctccagaagactttggcattgtgtctggaatgctcaatgtcaaatgggaccggattgcccctgctagcaatgtctcccacactgtggttcctgcg

SEQ ID NO: 636 - DNA, 464 bp, Homo sapiens
gtggcggcggtggcgctgggagctcctgtcaccgctggggccgggccgggcgggagtgcaggggacgtgagggcgcaagggccgggacatggggcccgccagccccgctgctcgcggtctaagtcgccgcccgggccagccgccgctgccgctgctgctgccactattgctgctgcttctgcgcgcgcagcccgccatcgggagcctggccggtgggagccccggcgcggccgaggccccggggtcggcccaggtggctggactatgcgggcgcctaacccttcaccgggacctgcgcaccggccgctgggaaccagacccacagcgctctcgacgctgtctccgggacccgcagcgcgtgctggagtactgcagacagatgtacccggagctgcagattgcacgtgtggagcaggctacgcaggccatccccatggagcgctggtgcgggggttcccggagcg

SEQ ID NO: 637 - DNA, 618 bp, Homo sapiens
ttggtcatgcagtgtactgcctcctatgcagagtatctgcaggtggtgaactatggcatcggaggacactatgagcctcactttgaccatgctacgtcaccaagcagccccctctacagaatgaagtcaggaaaccgagttgcaacatttatgatctatctgagctcggtggaagctggaggagccacagccttcatctatgccaacctcagcgtgcctgtggttaggaatgcagcactgttttggtggaacctgcacaggagtggtgaaggggacagtgacacacttcatgctggctgtcctgtcctggtgggagataagtgggtggccaacaagtggatacatgagtatggacaggaattccgcagaccctgcagctccagccctgaagactgaactgttggcagagagaagctggtggagtcctgtggctttccagagaagccaggagccaaaagctggggtaggagaggagaaagcagagcagcctcctggaagaaggccttgtcagctttgtctgtgcctcgcaaatcagaggcaagggagaggttgtaccaggggacactgagaatgacatttgatctgcccagcacggaagtcagataggtgccagtacaa

SEQ ID NO: 638 - DNA, 695 bp, Homo sapiens
aggattgcacttcgacggtgttctgtcatgggccatgggttgtatggcagccttactgaggccaagcagcttatgggatgttctttattgtgtgtgatggtattggttgtttggtagataagtgggaggaaaagtactgttgctacactattacaggcatgtttgatactagcagctaacactggtcactccaaagcactgtttctataggaacattgaagctattaagatgttttgattatcctaattacataatgaccgatttgagatagaggcctttaaatacattccatgccctccccagaaaatagtctgtgggagtcagttgccttggtgccaggtatgtgttctgatgtaggtcatgagtctttctacttaatgggaagggaagaacatttgtttccaggatgactttctggccagaataccggaaagcttttaggaagcttcgttcacatgctatttaaatgcacaaaatagacagtaaggatttatctgttcagtttttcttcccagtgaattaatttcagcttatatgggtgtcttcatttgaacatgaggaatattaggttatattttcagcagtggttttttcctttgccctttaaggagtggggataatgtccacggtggcccagcctcttgctgatggaacttcctgcattgtgcctccgatgatgtgtctttctgtgctg

SEQ ID NO: 639 - DNA, 373 bp, Homo sapiens
  misc_feature (154)..(154): n is a, c, g, or t
  misc_feature (368)..(368): n is a, c, g, or t
ctctttataatttagtttccatagaagttatatgtgcatttaaaaaaattcaatgctggagcgaccgtgtctggggagccgagccccgcttctcgctgcggtgagcccggactggggcacgcactgcgcagactccccgctgcagtgggcggantcccacaggccccgccccctcctcccaccctcgttcagcctgtccagacagaagctggggcccagcggaggtagcagcagacgcctgagagcgaggccgaggccccttcagggtttggagaccctgacacacccacctttttcacctggggctttgcgtattcccccagccttttaggggaaagatgaagcttaaatgatgtaccaggggtttnaaggt

SEQ ID NO: 640 - DNA, 406 bp, Homo sapiens
ttttttttttttttttttttgaggaaataaaacgtttattgagtaaatgtttatttagtaacagcaacacatagtttctcaagaagaggatgaactgaaaactcctctaaggcaggacgaagcaactttccattattcttagtttagaccagaatctttaattttatattctcctttaataactgtcaaaatacaccaaatacttagaggaaaatattcacagtataccaaaacattttaagataaagagcagtgtaagagtagtattctctacataccacagtatacaatgatgccttcctgcaggtttagaactattactactcaaaatattaatacatttatgcaaaatgattgagaaaattgaaatacctgcaaccttttccagtttgacttcaggaacagg

SEQ ID NO: 641 - DNA, 473 bp, Homo sapiens
taagtagtcttgaacatccacaagaaagtactgttcaaaccatcccttaaggagaggaagattcatctgggcttttctgtttgcttgctagtacactggaaacttggctcatttatttcccctgagagggtttgggcacaattttctgtagagcagcaagggtttcattatgaggtcacctgaagtattggcaaaaaatggaaatgtcagcttctctgattttgttgacctcagcatcagtgggcgcttgctcttcagaagtattcaaagggtttcaaagcttgacactctcgatagcactaaagatttgtgcaggcatgtaatccccttcttcagccacttcctgaatttgtggtgaatacaacatgagagctgcaggaactgtttgttctttggcataactgtcaaataagacctggtctccacattatggtacaccctaaattcctcaaaccatcccttactcccaacaa

SEQ ID NO: 642 - DNA, 352 bp, Homo sapiens
ttatggatgtaaattcaaacagtcatgctgagctattccgggctgacagtcacgttaaagacactaggtcgggcgccacagtgccacccaaggagaagaaggtaacgtggcaactgcacatttgccacacggttggaagtccttccttccttgctctgacactaacacggctcttatactcgacctttgtcccctctgtcttttttctctctcttttttttaactaatggagacacaggcataggttaaaatcagagatatcttgctcaggttttcagagcaaacactgtgttccagcccacagcatacaatagtatatgcagaatttagacactatcttcccaaactaaag

SEQ ID NO: 643 - DNA, 308 bp, Homo sapiens
ggtaggggaaaggaaaataatacaatttcaggggaagtcgccttcaggtctgctgcttttttattttttttttttcctactaaaaaaaaaatggacatagaaaacatcagtcttgaacttctcttcaagaacccgggctgcaaaggaaatctcctttgtttttgttatttatgtgctgtcaagttttgaagtggtgatctttagacagtgactgagtatggatcatttgaacgaggcaactcaggggaaagaacattcagaaatgtctaacaatgtgagtgatccgaagggtccaccagccaagattg

SEQ ID NO: 644 - DNA, 642 bp, Homo sapiens
tggcacgagggggattggcgggatgcggcgcgccgcgcgtgaacctccttggcctgggcgaagctgtgtggaccaagcaagtcaggagtgtggccatgttttctgagcaggctgcccagagggcccacactctactgtccccaccatcagccaacaatgccacctttgcccgggtgccagtggcaacctacaccaactcctcacaacccttccggctaggagagcgcagctttagccggcagtatgcccacatttatgccacccgcctcatccaaatgagacccttcctggagaaccgggcccagcagcactggggcagtggagtgggagtgaagaagctgtgtgaactgcagcctgaggagaagtgctgtgtggtgggcactctgttcaaggccatgccgctgcagccctccatcctgcgggaggtcagcgaggagcacaacctgctcccccagcctcctcggagtaaatacatacacccagatgacgagctggtcttggaagatgaactgcagcgtatcaaactaaaaggcaccattgacgtgtcaaagctggttacggggactgtcctggctgtgtttggctccgtgagagaccacgggaagtttttgggggaggactattgctttggtgaccttgctc

SEQ ID NO: 645 - DNA, 2344 bp, Homo sapiens
cctccctgactgggaactcgcttggccgcaatgacctggctgatggtgtgaactcgggccagggcctgggcatcgagatcatcgggaccctccagctggtgctatgcgtgctggctactaccgaccggaggcgccgtgaccttggtggctcagccccccttgccatcggcctctctgtagcccttggacacctcctggctattgactacactggctgtgggattaaccctgctcggtcctttggctccgcggtgatcacacacaacttcagcaaccactggattttctgggtggggccattcatcgggggagccctggctgtactcatctacgacttcatcctggccccacgcagcagtgacctcacagaccgcgtgaaggtgtggaccagcggccaggtggaggagtatgacctggatgccgacgacatcaactccagggtggagatgaagcccaaatagaaggggtctggcccgggcatccacgtagggggcaggggcaggggcgggcggagggaggggaggggtgaaatccatactgtagacactctgacaagctggccaaagtcacttccccaagatctgccagacctgcatggtcaagcctcttatgggggtgtttctatctctttctttctctttctgtttcctggcctcagagcttcctggggaccaagatttaccaattcacccactcccttgaagttgtggaggaggtgaaagaaagggacccacctgctagtcgcccctcagagcatgatgggaggtgtgccagaaagtcccccctcgccccaaagttgctcaccgactcacctgcgcaagtgcctgggattctaccgtaattgctttgtgcctttgggcaggccctccttcttttcctaacatgcaccttgctcccaatggtgcttggagggggaagagatcccaggaggtgcagtggagggggcaagctttgctccttcagttctgcttgctcccaagcccctgacccgctcggacttcctgcctgaccttggaatcgtccctatatcagggcctgagtgacctccttctgcaaagtggcagggaccggcagagctctacaggcctgcagcccctaagtgcaaacacagcatgggtccagaagacgtggtctagaccagggctgctctttccacttgccctgtgttctttccccaggggcatgactgtcgccacacgcctctgtgtacatgtgtgcagagcagacaggctacaaagcagagatcgacagacagccaggtagttggaactttctgttccctctggagaggcttccctacacagggcctgctattgcagaatgaagccatttagagggtgaaggagaaatacccatgttacttctctgacttttagttggtctttccatctatcactgcattatcttgctcattcttcagttctctactccctcttgtcagtgtagacacaggtcaccattatgctggtgtatgtttatcaaagagcacttgagctgtctgaagcccaaagcctgaggacagaaagaccctgatgcaggtcagcccatggaggcagatgcccttcctgggcctgggggttttccaagccctcagctggtcctgaccaggatggagcaagctcttcccttgctcatgagctcctgatcagaggcatttgagcagctgataacctgcacaggcttgctgtatgacccctggccacagccttccctctgcattgacctggaggggagaggtcagccttgacctaatgaggtagctatagttgcagcccaaggacagttcagagatcaggatcagctttgaaggctggattctatctacataagtcctttcaattccaccagggccagagcagctccaccactgtgcacttagccatgatggcaacagaaaccaagagacacaattacgcaggtatttagaaggagagggcaaccagaaggcccttaactatcaccagtgcatcacatctgcagcactctcttctctattccctagcaggaacttctagctcatttaacagataaagaaactgaggcccacggtttcagctagacaatgatttgccaggcctagtaaccaaggccctgtctctggctactccctggaccacgaggctgattcctctcatttccagcttctcagtttctgcctgggcaatgccaggggccaggagtggggagagttgtgatggaggggagaggggtcacacccaccccctgcctggttctaggctgctgcacaccaaggccctgcatctgtctgctctgcatatatgtctctttggagttggaatttcattatatgttaagaaaataaaggaaaatgacttgtaaggtc

SEQ ID NO: 646 - protein, 152 aa, Homo sapiens
SLTGNSLGRNDLADGVNSGQGLGIEIIGTLQLVLCVLATTDRRRRDLGGSAPLAIGLSVALGHLLAIDYTGCGINPARSFGSAVITHNFSNHWIFWVGPFIGGALAVLIYDFILAPRSSDLTDRVKVWTSGQVEEYDLDADDINSRVEMKPK

SEQ ID NO: 647 - DNA, 634 bp, Homo sapiens
  misc_feature (529)..(529): n is a, c, g, or t
tggcacgaggcctcgtgccaaggccctgaaggctcaggccgagcacgctgagaaggagaaggagcggctgcggcaggagcgcatgaggagccgagaggacgaggatgcgctggagcaggcccggcgggcccatgaggaggcacgtcggcgccaggagcagcagcagcagcagcgccaggagcaacagcagcagcagcaacagcaagcagctgcggtggctgccgccgccaccccacaggcccagagctcccagccccagtccatgctggaccagcagagggagttggcccggaagcgggagcaggagcgaagacgccgggaagccatggcagctaccattgacatgaatttccagagtgatctattgtcaatatttgaagaaaatcttttctgagcgcacctaggtggcttctgactttgattttctggcaaaacattgactttccatagtgttaggggcggtggtggaggtgggatcagcggccaggggatgcctcagggcctggccctcctgcatgctatgcccggngcaggcctgacgggcagctgaggattgcagagcctgtctgccttacggccagtcggacagacgtcccgccacccaccacccctcacagacgtccggtcagcacac

SEQ ID NO: 648 - DNA, 247 bp, Homo sapiens
cacttttgcctcctgcctcccaccatcagcatgccagcaaatttcctttctcatttgtagctacttttaaagtaaatgttgaagtcagtctttcatgttgactaatttctcatcttcattctcatcatttttctttctgtcggtcctaaggatcagcgttctctctctgaacacccttcagtgctgctggccatcctcattatggtcttgttcaaactagtgtttcttgagtccctcctgtaagtct

SEQ ID NO: 649 - DNA, 6378 bp, Homo sapiens
cccattactgttggagctacagggagagaaacaggaggagactgcaagagatcatttgggaaggccgtgggcacgctctttactccatgtgtgggacattcattgcggaataacatcggaggagaagtttcccagagctatggggacttcccatccggcgttcctggtcttaggctgtcttctcacagggctgagcctaatcctctgccagctttcattaccctctatccttccaaatgaaaatgaaaaggttgtgcagctgaattcatccttttctctgagatgctttggggagagtgaagtgagctggcagtaccccatgtctgaagaagagagctccgatgtggaaatcagaaatgaagaaaacaacagcggcctttttgtgacggtcttggaagtgagcagtgcctcggcggcccacacagggttgtacacttgctattacaaccacactcagacagaagagaatgagcttgaaggcaggcacatttacatctatgtgccagacccagatgtagcctttgtacctctaggaatgacggattatttagtcatcgtggaggatgatgattctgccattataccttgtcgcacaactgatcccgagactcctgtaaccttacacaacagtgagggggtggtacctgcctcctacgacagcagacagggctttaatgggaccttcactgtagggccctatatctgtgaggccaccgtcaaaggaaagaagttccagaccatcccatttaatgtttatgctttaaaagcaacatcagagctggatctagaaatggaagctcttaaaaccgtgtataagtcaggggaaacgattgtggtcacctgtgctgtttttaacaatgaggtggttgaccttcaatggacttaccctggagaagtgaaaggcaaaggcatcacaatgctggaagaaatcaaagtcccatccatcaaattggtgtacactttgacggtccccgaggccacggtgaaagacagtggagattacgaatgtgctgcccgccaggctaccagggaggtcaaagaaatgaagaaagtcactatttctgtccatgagaaaggtttcattgaaatcaaacccaccttcagccagttggaagctgtcaacctgcatgaagtcaaacattttgttgtagaggtgcgggcctacccacctcccaggatatcctggctgaaaaacaatctgactctgattgaaaatctcactgagatcaccactgatgtggaaaagattcaggaaataaggtatcgaagcaaattaaagctgatccgtgctaaggaagaagacagtggccattatactattgtagctcaaaatgaagatgctgtgaagagctatacttttgaactgttaactcaagttccttcatccattctggacttggtcgatgatcaccatggctcaactgggggacagacggtgaggtgcacagctgaaggcacgccgcttcctgatattgagtggatgatatgcaaagatattaagaaatgtaataatgaaacttcctggactattttggccaacaatgtctcaaacatcatcacggagatccactcccgagacaggagtaccgtggagggccgtgtgactttcgccaaagtggaggagaccatcgccgtgcgatgcctggctaagaatctccttggagctgagaaccgagagctgaagctggtggctcccaccctgcgttctgaactcacggtggctgctgcagtcctggtgctgttggtgattgtgatcatctcacttattgtcctggttgtcatttggaaacagaaaccgaggtatgaaattcgctggagggtcattgaatcaatcagcccggatggacatgaatatatttatgtggacccgatgcagctgccttatgactcaagatgggagtttccaagagatggactagtgcttggtcgggtcttggggtctggagcgtttgggaaggtggttgaaggaacagcctatggattaagccggtcccaacctgtcatgaaagttgcagtgaagatgctaaaacccacggccagatccagtgaaaaacaagctctcatgtctgaactgaagataatgactcacctggggccacatttgaacattgtaaacttgctgggagcctgcaccaagtcaggccccatttacatcatcacagagtattgcttctatggagatttggtcaactatttgcataagaatagggatagcttcctgagccaccacccagagaagccaaagaaagagctggatatctttggattgaaccctgctgatgaaagcacacggagctatgttattttatcttttgaaaacaatggtgactacatggacatgaagcaggctgatactacacagtatgtccccatgctagaaaggaaagaggtttctaaatattccgacatccagagatcactctatgatcgtccagcctcatataagaagaaatctatgttagactcagaagtcaaaaacctcctttcagatgataactcagaaggccttactttattggatttgttgagcttcacctatcaagttgcccgaggaatggagtttttggcttcaaaaaattgtgtccaccgtgatctggctgctcgcaacgtcctcctggcacaaggaaaaattgtgaagatctgtgactttggcctggccagagacatcatgcatgattcgaactatgtgtcgaaaggcagtacctttctgcccgtgaagtggatggctcctgagagcatctttgacaacctctacaccacactgagtgatgtctggtcttatggcattctgctctgggagatcttttcccttggtggcaccccttaccccggcatgatggtggattctactttctacaataagatcaagagtgggtaccggatggccaagcctgaccacgctaccagtgaagtctacgagatcatggtgaaatgctggaacagtgagccggagaagagaccctccttttaccacctgagtgagattgtggagaatctgctgcctggacaatataaaaagagttatgaaaaaattcacctggacttcctgaagagtgaccatcctgctgtggcacgcatgcgtgtggactcagacaatgcatacattggtgtcacctacaaaaacgaggaagacaagctgaaggactgggagggtggtctggatgagcagagactgagcgctgacagtggctacatcattcctctgcctgacattgaccctgtccctgaggaggaggacctgggcaagaggaacagacacagctcgcagacctctgaagagagtgccattgagacgggttccagcagttccaccttcatcaagagagaggacgagaccattgaagacatcgacatgatggacgacatcggcatagactcttcagacctggtggaagacagcttcctgtaactggcggattcgaggggttccttccacttctggggccacctctggatcccgttcagaaaaccactttattgcaatgcggaggttgagaggaggacttggttgatgtttaaagagaagttcccagccaagggcctcggggagcgttctaaatatgaatgaatgggatattttgaaatgaactttgtcagtgttgcctctcgcaatgcctcagtagcatctcagtggtgtgtgaagtttggagatagatggataagggaataataggccacagaaggtgaactttgtgcttcaaggacattggtgagagtccaacagacacaatttatactgcgacagaacttcagcattgtaattatgtaaataactctaaccaaggctgtgtttagattgtattaactatcttctttggacttctgaagagaccactcaatccatccatgtacttccctcttgaaacctgatgtcagctgctgttgaactttttaaagaagtgcatgaaaaaccatttttgaaccttaaaaggtactggtactatagcattttgctatcttttttagtgttaagagataaagaataataattaaccaaccttgtttaatagatttgggtcatttagaagcctgacaactcattttcatattgtaatctatgtttataatactactactgttatcagtaatgctaaatgtgtaataatgtaacatgatttccctccagagaaagcacaatttaaaacaatccttactaagtaggtgatgagtttgacagtttttgacatttatattaaataacatgtttctctataaagtatggtaatagctttagtgaattaaatttagttgagcatagagaacaaagtaaaagtagtgttgtccaggaagtcagaatttttaactgtactgaataggttccccaatccatcgtattaaaaaacaattaactgccctctgaaataatgggattagaaacaaacaaaactcttaagtcctaaaagttctcaatgtagaggcataaacctgtgctgaacataacttctcatgtatattacccaatggaaaatataatgatcagcaaaaagactggatttgcagaagttttttttttttttcttcatgcctgatgaaagctttggcaaccccaatatatgtattttttgaatctatgaacctgaaaagggtcagaaggatgcccagacatcagcctccttctttcaccccttaccccaaagagaaagagtttgaaactcgagaccataaagatattctttagtggaggctggatgtgcattagcctggatcctcagttctcaaatgtgtgtggcagccaggatgactagatcctgggtttccatccttgagattctgaagtatgaagtctgagggaaaccagagtctgtatttttctaaactccctggctgttctgatcggccagttttcggaaacactgacttaggtttcaggaagttgccatgggaaacaaataatttgaactttggaacagggttggaattcaaccacgcaggaagcctactatttaaatccttggcttcaggttagtgacatttaatgccatctagctagcaattgcgaccttaatttaactttccagtcttagctgaggctgagaaagctaaagtttggttttgacaggttttccaaaagtaaagatgctacttcccactgtatgggggagattgaactttccccgtctcccgtcttctgcctcccactccataccccgccaaggaaaggcatgtacaaaaattatgcaattcagtgttccaagtctctgtgtaaccagctcagtgttttggtggaaaaaacattttaagttttactgataatttgaggttagatgggaggatgaattgtcacatctatccacactgtcaaacaggttggtgtgggttcattggcattctttgcaatactgcttaattgctgataccatatgaatgaaacatgggctgtgattactgcaatcactgtgctatcggcagatgatgctttggaagatgcagaagcaataataaagtacttgactacctactggtgtaatctcaatgcaagccccaactttcttatccaactttttcatagtaagtgcgaagactgagccagattggccaattaaaaacgaaaacctgactaggttctgtagagccaattagacttgaaatacgtttgtgtttctagaatcacagctcaagcattctgtttatcgctcactctcccttgtacagccttattttgttggtgctttgcattttgatattgctgtgagccttgcatgacatcatgaggccggatgaaacttctcagtccagcagtttccagtcctaacaaatgctcccacctgaatttgtatatgactgcatttgtgggtgtgtgtgtgttttcagcaaattccagatttgtttccttttggcctcctgcaaagtctccagaagaaaatttgccaatctttcctactttctatttttatgatgacaatcaaagccggcctgagaaacactatttgtgactttttaaacgattagtgatgtccttaaaatgtggtctgccaatctgtacaaaatggtcctatttttgtgaagagggacataagataaaatgatgttatacatcaatatgtatatatgtatttctatatagacttggagaatactgccaaaacatttatgacaagctgtatcactgccttcgtttatatttttttaactgtgataatccccacaggcacattaactgttgcacttttgaatgtccaaaatttatattttagaaataataaaaagaaagatacttacatgttcccaaaacaatggtgtggtgaatgtgtgagaaaaactaacttgatagggtctaccaatacaaaatgtattacgaatgcccctgttcatgtttttgttttaaaacgtgtaaatgaagatctttatatttcaataaatgatatataatttaaagtt

SEQ ID NO: 650 - protein, 1089 aa, Homo sapiens
MGTSHPAFLVLGCLLTGLSLILCQLSLPSILPNENEKVVQLNSSFSLRCFGESEVSWQYPMSEEESSDVEIRNEENNSGLFVTVLEVSSASAAHTGLYTCYYNHTQTEENELEGRHIYIYVPDPDVAFVPLGMTDYLVIVEDDDSAIIPCRTTDPETPVTLHNSEGVVPASYDSRQGFNGTFTVGPYICEATVKGKKFQTIPFNVYALKATSELDLEMEALKTVYKSGETIVVTCAVFNNEVVDLQWTYPGEVKGKGITMLEEIKVPSIKLVYTLTVPEATVKDSGDYECAARQATREVKEMKKVTISVHEKGFIEIKPTFSQLEAVNLHEVKHFVVEVRAYPPPRISWLKNNLTLIENLTEITTDVEKIQEIRYRSKLKLIRAKEEDSGHYTIVAQNEDAVKSYTFELLTQVPSSILDLVDDHHGSTGGQTVRCTAEGTPLPDIEWMICKDIKKCNNETSWTILANNVSNIITEIHSRDRSTVEGRVTFAKVEETIAVRCLAKNLLGAENRELKLVAPTLRSELTVAAAVLVLLVIVIISLIVLVVIWKQKPRYEIRWRVIESISPDGHEYIYVDPMQLPYDSRWEFPRDGLVLGRVLGSGAFGKVVEGTAYGLSRSQPVMKVAVKMLKPTARSSEKQALMSELKIMTHLGPHLNIVNLLGACTKSGPIYIITEYCFYGDLVNYLHKNRDSFLSHHPEKPKKELDIFGLNPADESTRSYVILSFENNGDYMDMKQADTTQYVPMLERKEVSKYSDIQRSLYDRPASYKKKSMLDSEVKNLLSDDNSEGLTLLDLLSFTYQVARGMEFLASKNCVHRDLAARNVLLAQGKIVKICDFGLARDIMHDSNYVSKGSTFLPVKWMAPESIFDNLYTTLSDVWSYGILLWEIFSLGGTPYPGMMVDSTFYNKIKSGYRMAKPDHATSEVYEIMVKCWNSEPEKRPSFYHLSEIVENLLPGQYKKSYEKIHLDFLKSDHPAVARMRVDSDNAYIGVTYKNEEDKLKDWEGGLDEQRLSADSGYIIPLPDIDPVPEEEDLGKRNRHSSQTSEESAIETGSSSSTFIKREDETIEDIDMMDDIGIDSSDLVEDSFL

SEQ ID NO: 651 - DNA, 248 bp, Homo sapiens
  misc_feature (39)..(39): n is a, c, g, or t
  misc_feature (162)..(162): n is a, c, g, or t
  misc_feature (239)..(239): n is a, c, g, or t
ccgcgggaacgctgtcctggctgccgccacccgaacagnctgtcctggtgccccggttccctgccccgcgcccagtcatgaccctgcgcccctcactcctcccgctccatctgctgctgctgctgctgctcagtgcggcggtgtgccgggctgaggctgggntcgaaaccgaaagtcccgtccggaccctccaagtggagaccctggtggagcccccagtaaccatgtgccgagcccgntgcttttgg

SEQ ID NO: 652 - DNA, 811 bp, Homo sapiens
gattaggctaggtcgaggctgggtgttggcggggcggggcggcaccggttggtaggttgtaggaccggcgaggaataggaatcatggcggctgcgctgttcgtgctgctgggattcgcgctgctgggcacccacggagcctccggggctgccggcactagtcttcactaccgtagaagaccttggctccaagatactcctcacctgctccttgaatgacagcgccacagaggtcacagggcaccgctggctgaaggggggcgtggtgctgaaggaggacgcgctgcccggccagaaaacggagttcaaggtggactccgacgaccagtggggagagtactcctgcgtcttcctccccgagcccatgggcacggtcaacatccagctccacgggcctcccagagtgaaaggctgtagaagtcgtcatgaacacatcaacgagggggagacggccatgctggtctgcaagtcagagtccgtgccacctgtcactgactgggcctggtacaagatcactgactctgaggacaaggccctcatgaacggctccgagagcaggttcttcgtgagttcctcgcagggccggtcagagctacacattgagaacctgaacatggaggccgaccccggccagtaccggtgcaacggcaccagctccaagggctccgaccaggccatcatcacgctccgcgtgcgcagccacctggccgccctctggcccttcctgggcatcgtggctgaggtgctggtgctggtcaccatcatcttcatctacgagaagcgccggagccgaggacgtctggatgatgacg

SEQ ID NO: 653 - DNA, 315 bp, Homo sapiens
actccccgttgaagaaatacactcaaacttaacctcctccaagaaacgtggtctggtgtccccagccaaagccagtggggagctcagcaccatcagtgtcactgtacagaactgccatgcaggagcctccagggagcctcagacacaccatgctggagaacaggacaggaccaggggccagagcagacagaaggacctcctggcgcggaggctgtgccggggtggacacgtactgcagacacaagtacggggttggtgagatgcgttcaccagtgcagcggagagtatcaaactacggtgcacttgtgtatcctt

SEQ ID NO: 654 - DNA, 638 bp, Homo sapiens
ggaatcagtcggtaccatataggttggacgaggttgtggctgtgacagcccggaaggaagaggtggccttcctcatgagaagagagaggacacttgctcttccaaggaccctcttgtttgcaatgaggacagggtcctggaagtggcttgtaacctggcggtttggaacattctctactccagtgtcctggatttctgcagcaatgacaggcccccattctgttagtagtgtagggatgagccttggggttattagatgaagaaaaagaatgtgccaaggctgttgccatgtaattagcttagtgatggcattcttcctcctccaattcagccttttttatttttgatgttttctcctggttattgaaaacctcaaaggctgtatttaataaaataggaaagggagtttgtgggccttgctctaatttttggagtttttgtcttatgtctgggtaagcctgacttacaaaatgtacagcgagaatggattggccttcagggctttcagggtctaaatttacatatttacgcatggcctccaccaatctagcttggaaaagggtgaggttcttagacggctcctgggtgacttcttgtaatttagaaaattttacaggtcttagtacaggcgttttcat

SEQ ID NO: 655 - DNA, 588 bp, Homo sapiens
  misc_feature (542)..(542): n is a, c, g, or t
cccgggcattctggcgcggagcggagcggcggcgggcgcagctagcgggtcggccgcggagcggaggtgcagctcggcttcccccggcacccctccccctcgggcgccagccccacccctccgccggccgggccgaccccgccgtactatcccctgcggcgcgagcccggggcggctccaagcgccccccagcagacccccatcatgggcagccagagctccaaggctccccggggcgacgtgaccgccgaggaggcagcaggcgcttcccccgcgaaggccaacggccaggagaatggccacgtgaaaagcaatggagacttatcccccaagggtgaaggggagtcgccccctgtgaacggaacagatgaggcagccggggccactggcgatgccatcgagccagcaccccctagccagggtgctgaggccaagggggaggtcccccccaaggagacccccaagaagaagaagaaattctctttcaagaagcctttcaaattgagcggcctgtccttcaagagaaaatcggaagggagggntgggggtgattcttctgccttctcacccacagaggaagagcaggag

SEQ ID NO: 656 - DNA, 658 bp, Homo sapiens
ctcggcacgagggcttcaagccaattatggagtccgtcagttgctccgctgctgctgtcaggaccggagacatggacgtccagcgggacctgagcctggtgcctgagcggcttcagagacgcgaacaagaacggcagctggaagttgaaatggcggaaacaaaagcggcagaaccaggaggtagagaaggagaacagccactttttcgtcgccacctttgctcgggagcgagcggccgtggaagagcttctggagcgcgcggagtcggtcgagcggctggaggaggcggcctctcggctccaggggctgcagaaactaatcaacgactcagtttttttcctagccgcttacgacctgcggcagggcacaagaggcgctggcgcggctgcaggcggccttggccgagcggcgccgggggctgctgcccaacgaagcgtttcgctttcaacgacccggggcaaacgcgatgctgcttcgctctaccaaagtagacgcggctcctggcatccccccggcagttgacacgcttacaggactccccgctgcccaagaagggcggaaggagacctcggccccagctgggtctgccggttctccaacctggagtcccaagtcttggagacgacgagccagcgagttgcaccagcgcgacgttctt

SEQ ID NO: 657 - DNA, 251 bp, Homo sapiens
ggcacgaggctccgaacggtcttcttccgacagcttgctgcccgagaccagagttggtggctggacctcctgcgacttccgagttgcgatgctgtacttctctttgttttgggcggctcggcctctgcagagatgtgggcagctggtcaggatggccattcgggctcaacacagcaacgcagcccagactcatactggggaagcaaacaggggctggacaggccaggagagcctgtcggacagtgatcctg

SEQ ID NO: 658 - DNA, 480 bp, Homo sapiens
  misc_feature (331)..(331): n is a, c, g, or t
cacagaaagagaagcatccgaaatcatgaagagcatcggtgaggccatccagtatctgcattcaatcaacattgcccatcgggatgtcaagcctgagaatctcttatacacctccaaaaggcccaacgccatcctgaaactcactgactttggctttgccaaggaaaccaccagccacaactctttgaccactccttgttatacaccgtactatgtggctccagaagtgctgggtccagagaagtatgacaagtcctgtgacatgtggtccctgggtgtcatcatgtacatcctgctgtgtgggtatccccccttctactccaaccacggncttgccatctctccgggcatgaagactcgcatccgaatgggccagtatgaatttcccaacccagaatggtcagaagtatcagaggaagtgaagatgctcattcggaatctgctgaaaacagagcccacccagagaatgaccatcactga

SEQ ID NO: 659 - DNA, 3115 bp, Homo sapiens
ccaccatatcggtcccgtatttcacattgataaggtcctgtttcatttctcgtgacattgggtagaatgaggatcctgttttcaatgggtcgctttaccctgggactgacagggaggctctgaccatttagccaccaaatgtaggtgtagttctcactcttaggttcaccccgcggccgatcgtcccccatacctcggccatgcggcccctgctgctactggccctgctgggctggctgctgctggccgaagcgaagggcgacgccaagccggaggacaaccttttagtcctcacggtggccactaaggagaccgagggattccgtcgcttcaagcgctcagctcagttcttcaactacaagatccaggcgcttggcctaggggaggactggaatgtggagaaggggacgtcggcaggtggagggcagaaggtccggctgctgaagaaagctctggagaagcacgcagacaaggaggatctggtcattctcttcacagacagctatgacgtgctgtttgcatcggggccccgggagctcctgaagaagttccggcaggccaggagccaggtggtcttctctgctgaggagctcatctacccagaccgcaggctggagaccaagtatccggtggtgtccgatggcaagaggttcctgggctctggaggcttcatcggttatgcccccaacctcagcaaactggtggccgagtgggagggccaggacagcgacagcgatcagctgttttacaccaagatcttcttggacccggagaagagggagcagatcaatatcaccctggaccaccgctgccgtatcttccagaacctggatggagccttggatgaggtcgtgctcaagtttgaaatgggccatgtgagagcgaggaacctggcctatgacaccctcccggtcctgatccatggcaacgggccaaccaagctgcagttgaactacctgggcaactacatcccgcgcttctggaccttcgaaacaggctgcaccgtgtgtgacgaaggcttgcgcagcctcaagggcattggggatgaagctctgcccacggtcctggtcggcgtgttcatcgaacagcccacgccgtttgtgtccctgttcttccagcggctcctgcggctccactacccccagaaacacatgcgacttttcatccacaaccacgagcagcaccacaaggctcaggtggaagagttcctggcacagcatggcagcgagtaccagtctgtgaagctggtgggccctgaggtgcggatggcgaatgcagatgccaggaacatgggcgcagacctgtgccggcaggaccgcagctgcacctactacttcagcgtggatgctgacgtggccctgaccgagcccaacagcctgcggctgctgatccaacagaacaagaatgtcattgccccgctgatgacccggcatgggaggctgtggtcgaacttctggggggctctcagtgcagatggctactatgcccgttccgaggactacgtggacattgtgcaggggcggcgtgttggtgtctggaatgtgccctatatttcaaacatctacttgatcaagggcagtgccctgcggggtgagctgcagtcctcagatctcttccaccacagcaagctggaccccgacatggccttctgtgccaacatccggcagcaggatgtgttcatgttcctgaccaaccggcacacccttggccatctgctctccctagacagctaccgcaccacccacctgcacaacgacctctgggaggtgttcagcaaccccgaggactggaaggagaagtacatccaccagaactacaccaaagccctggcagggaagctggtggagacgccctgcccggatgtctattggttccccatcttcacggaggtggcctgtgatgagctggtggaggagatggagcactttggccagtggtctctgggcaacaacaaggacaaccgcatccagggtggctacgagaacgtgccgactattgacatccacatgaaccagatcggctttgagcgggagtggcacaaattcctgctggagtacattgcgcccatgacggagaagctctaccccggctactacaccagggcccagtttgacctggcctttgtcgtccgctacaagcctgatgagcagccctcactgatgccacaccatgatgcctccaccttcaccatcaacatcgccctgaaccgagtcggggtggattacgagggcgggggctgtcggttcctgcgctacaactgttccatccgagccccaaggaagggctggaccctcatgcaccctggacgactcacgcattaccatgaggggctccccaccaccaggggcacccgctacatcgcagtctccttcgtcgatccctaattggccaggcctgaccctcttggacctttcttctttgccgacaaccactgcccagcagcctctgggacctcggggtcccagggaacccagtccagcctcctggctgttgacttcccattgctcttggagccaccaatcaaagagattcaaagagattcctgcaggccagaggccggaacacacctttatggctggggctctccgtggtgttctggacccagcccctggagacaccattcacttttactgctttgtagtgactcgtgctctccaacctgtcttcctgaaaaaccaaggcccccttcccccacctcttccatggggtgagacttgagcagaacaggggcttccccaagttgcccagaaagactgtctgggtgagaagccatggccagagcttctcccaggcacaggtgttgcaccagggacttctgcttcaagttttggggtaaagacacctggatcagactccaagggctgccctgagtctgggacttctgcctccatggctggtcatgagagcaaaccgtagtcccctggagacagccactccagagaacctcttgggagacagaagaggcatctgtgcacagctcgatcttctacttgcctgtggggaggggagtgacaggtccacacaccacactgggtcaccctgtcctggatgcctctgaagagagggacagaccgtcagaaactggagagtttctattaaaggtcatttaaaccac

SEQ ID NO: 660 - protein, 727 aa, Homo sapiens [sequence omitted]

SEQ ID NO: 661 - DNA, 2051 bp, Homo sapiens
  misc_feature (1955)..(1955): n is a, c, g, or t
  misc_feature (2011)..(2011): n is a, c, g, or t
  misc_feature (2033)..(2033): n is a, c, g, or t
tcactatagggcgaattgggcctctagatgcatgctcgagcggccgccagtgtgatggatatctgcagaattcgcccttacgatttaggtgacactatagaaggtacgcctgcaggtaccggtccggaattcccgggtcgacccacgcgtccgcaatgaagccgagtgaatgggggctgaatgtgcgagtccatagctgaagaggagcgccagatggtggaggaatacacttatttatgaaactgtcttgagttcttcttgaattgccagttttcagcctcctcatgcctccgtctcctttagacgacagggtagtagtggcactatctaggcccgtccgacctcaggatctcaacctttgtttagactctagttaccttggctctgccaacccaggcagtaacagccaccctcctgtcatcgccaccaccgttgtgtccctcaaggctgcgaatctgacgtatatgccctcatccagcggctctgcccgctcgctgaattgtggatgcagcagtgccagctgctgcactgtggcaacctacgacaaggacaatcaggcccaaacccaagccattgccgctggcaccaccaccactgccatcggaacctctaccacctgccctgctaaccagatggtcaacaataatgagaatacaggctctctaagtccatcaagtggggtgggcagccctgtgtcagggacccccaagcagctagccagcatcaaaataatctaccccaatgacttggcaaagaagatgaccaaatgcagcaagagtcacctgccgagtcagggccctgtcatcattgactgcaggcccttcatggagtacaacaagagtcacatccaaggagctgtccacattaactgtgccgataagatcagccggcggagactgcagcagggcaagatcactgtcctagacttgatttcctgtagggaaggcaaggactctttcaagaggatcttttccaaagaaattatagtttatgatgagaataccaatgaaccaagccgagtgatgccctcccagccacttcacatagtcctcgagtccctgaagagagaaggcaaagaacctctggtgttgaaaggtggacttagtagttttaagcagaaccatgaaaacctctgtgacaactccctccagctccaagagtgccgggaggtggggggcggcgcatccgcggcctcgagcttgctacctcagcccatccccaccacccctgacatcgagaacgctgagctcacccccatcttgcccttcctgttccttggcaatgagcaggatgctcaggacctggacaccatgcagcggctgaacatcggctacgtcatcaacgtcaccactcatcttcccctctaccactatgagaaaggcctgttcaactacaagcggctgccagccactgacagcaacaagcagaacctgcggcagtactttgaagaggcttttgagttcattgaggaagctcaccagtgtgggaaggggcttctcatccactgccaggctggggtgtcccgctccgccaccatcgtcatcgcttacttgatgaagcacactcggatgaccatgactgatgcttataaatttgtcaaaggcaaacgaccaattatctccccaaaccttaacttcatggggcagttgctagagttcgaggaagacctaaacaacggtgtgacaccgagaatccttacaccaaagctgatgggcgtggagacggttgtgtgacaatggtctggatggaaaggattgctgctctccattaggagacaatgaggaaggaggatggattctggttttttttctttcttttttttttgtagttgggagtaaagtttgtgaatggaaacaaacttggttaaacactttatttttaacaagtgtaagaagactatacttttgatgccattgagattcaccttccacaaactggccaaattaaggaggttnaagaagtaattttttttaagcccaaccattaaaaatttaatacaacttggtttctncccctttttcctttaaagctantttgtaaaagtttatgag

SEQ ID NO: 662 - protein, 482 aa, Homo sapiens
MPPSPLDDRVVVALSRPVRPQDLNLCLDSSYLGSANPGSNSHPPVIATTVVSLKAANLTYMPSSSGSARSLNCGCSSASCCTVATYDKDNQAQTQAIAAGTTTTAIGTSTTCPANQMVNNNENTGSLSPSSGVGSPVSGTPKQLASIKIIYPNDLAKKMTKCSKSHLPSQGPVIIDCRPFMEYNKSHIQGAVHINCADKISRRRLQQGKITVLDLISCREGKDSFKRIFSKEIIVYDENTNEPSRVMPSQPLHIVLESLKREGKEPLVLKGGLSSFKQNHENLCDNSLQLQECREVGGGASAASSLLPQPIPTTPDIENAELTPILPFLFLGNEQDAQDLDTMQRLNIGYVINVTTHLPLYHYEKGLFNYKRLPATDSNKQNLRQYFEEAFEFIEEAHQCGKGLLIHCQAGVSRSATIVIAYLMKHTRMTMTDAYKFVKGKRPIISPNLNFMGQLLEFEEDLNNGVTPRILTPKLMGVETVV

SEQ ID NO: 663 - DNA, 193 bp, Homo sapiens
tttttttttttttttttaccgtattcatttttttatttaacttggggatggaatggggatagcatacattttatttgtacaatatttaacaatcacttatccaaggtggggttttatggggattttaagctttctgttaaatacttgcagaaaaaatagcaagtacgatttgacagtagtacaataacctgtg

SEQ ID NO: 664 - DNA, 405 bp, Homo sapiens
  misc_feature (76)..(76): n is a, c, g, or t
  misc_feature (345)..(345): n is a, c, g, or t
  misc_feature (367)..(367): n is a, c, g, or t
  misc_feature (392)..(392): n is a, c, g, or t
  misc_feature (404)..(404): n is a, c, g, or t
cccgaactagggatgtgacagagcgcgagacccagcctaaagagagcccggagccagcgtgggaggccgctgcctncgcgcgccttggtttttctgttccttttttttttttttttttaacttcctgcctatacacacgcagccatcagcccacaaagacatgactaccaacgcgggccccttgcacccatactggcctcagcacctaagactggacaactttgtacctaatgaccgccccacctgggcatatactgggctgggcctcttctctgtcacagggggtcttaggtcgtggaccacatgggctgttgttcagggtcgtgctggcggttgttcccattnggggatttgggcgggcgacttntccctgtgctgggttttgcagtgtnttggggtttcant

SEQ ID NO: 665 - DNA, 336 bp, Homo sapiens
gctgcatccaggggtaaatctggatactggctttctggtcctggggcgcagtcctgccctgctcagaactaaaatcctgagcgattgaagtctgtgtgttatgtcctaaggtgttttgtctgcagtttgagagcatgtctttctcctggtaaaaggaattagatccatagtcatacggcccccggctggaactgaacacgacattctcctgtggcgaataaaagggagtcgagtagatccggttctgggcaacggccgctccataggtcgagaaatgcctcactggatcataagcggtggaattgagggcgacgttggggaggacgtccgagcgct

SEQ ID NO: 666 - DNA, 454 bp, Homo sapiens
gcggccgcgcgcactcgcacccgctgcccccgaggccctcctgcactctccccggcgccgctctccggccctcgccctgtccgccgccaccgccgccgccgccagagtcgccatgcagatcccgcgcgccgctcttctcccgctgctgctgctgctgctggcggcgcccgcctcggcgcagctgtcccgggccggccgctcggcgcctttggctgccggttgcccagaccgctgcgagccggcgcgctgcccgccgcagccggagcactgcgagggcggccgggcccgggacgcgtgcggctgctgcgaggtgtgcggcgcgcccgagggcgccgcgtgcggcctgcaggagggcccgtgcggcgaggggctgcagtgcgtggtgcccttcggggtgccagcctcggccacggtgcggggcgcgcgcaggccggcctctgtgtgtgcgccagca

SEQ ID NO: 667 - DNA, 318 bp, Homo sapiens
  misc_feature (231)..(231): n is a, c, g, or t
catgctactcagaggaaggggcggttggtgcggcctccattgttcgtgttttaaggcgccatgaggggtgacagaggccgtggtcgtggtgggcgctttggttccagaggaggcccaggaggagggttcaggccctttgtaccacatatcccatttgacttctatttgtgtgaaatggcctttccccgggtcaagccagcacctgatgaaacttccttcagtgaggccttnctgaagaggaatcaggacctggctcccaattctggctgaacaggcatctatcctttctctggttgacaaaaataaacaatgtggatt

SEQ ID NO: 668 - DNA, 337 bp, Homo sapiens
ggccgcccaccggggtacgctctcccgcgcctgcgcaattccgccccgccccgtccccatctaccgaccggatgttagcagatttcccatagtgcctcgctagtggagggcatgataacacacgccggagggtcgcacgcgggttccagttgtgattgctggagttgtgtattgccaggaggctctccgagattggggtcgggtcactgcctcatcaaccggagcgatggcgtttctcggaagcatgttggggcgtgctgagtgcccttgggaggttctgaagcaaacctgtgcaacgggctgttggaagtcgaatgcggttcccccttcaagtttt

SEQ ID NO: 669 - DNA, 263 bp, Homo sapiens
ggcacgagccacaaactgcccaggagtgagtagctgctttcggtccgccggacacaccggacagatagacgtgcggacggcccaccaccccagcccgccaactagtcagcctgcgcctggcgcctcccctctccaggtccatccgccatgtggcccctgtggcgcctcgtgtctctgctggccctgagccaggccctgccctttgagcagagaggcttctgggacttcaccctggacgatgggccattcatgatgaacgatga

SEQ ID NO: 670 - DNA, 450 bp, Homo sapiens
  misc_feature (47)..(47): n is a, c, g, or t
  misc_feature (419)..(419): n is a, c, g, or t
  misc_feature (432)..(432): n is a, c, g, or t
tgggaactgtaaccctcaagaattctaaaagattctgtggaaaaganaatatttgctttaatgtttcccttgtgcactactgcgtccccctcttttatctttgaactctctttgcttgcccagattagttcaattttaagaatgatctgttcatttgtctgcttgaaactttgtacttttggggagcaagtcaaggaatgatggtcttatcgccacataatgctattaacaagcatggtttccactcattcatgcctgctcaattttttaagagggcctactatgagttagggcactaggcttgggcacagataagggattctgaggctggataaagcctgcagttccacagtggaacacttgctgttcagacagtcactggcacagataactatggcaacccaccatggacagctttngaggcggcctggncgataggggcaacccctt

SEQ ID NO: 671 - DNA, 545 bp, Homo sapiens
tggctaggtacgaggccgggtgttaatcggccgaggccctttcccaaggacaatctgcaagaaagcagcggcggaggagagctaagactaaaagagtggatcatgacccatgaagagcaccatgcagccaaaaccctggggattggcaaagccattgctgtcttaacctctggtggagatgcccaaggtatgaatgctgctgtcagggctgtggttcgagttggtatcttcaccggtgcccgtgtcttctttgtccatgagggttatcaaggcctggtggatggtggagatcacatcaaggaagccacctgggagagcgtttcgatgatgcttcagctgggaggcacggtgattggaagtgcccggtgcaaggactttcgggaacgagaaggacgactccgagctgcctacaacctggtgaagcgtgggatcaccaatctctgtgtcattgggggtgatggcagcctcactggggctgacaccttccgttctgagtggagtgacttgttgagtgaacctccagaaagcaggtaagatcacagatg

SEQ ID NO: 672 - DNA, 1206 bp, Homo sapiens
gcatgcaaccctctgcctccctcccacgttttccataatgattttatttatttatagctgacacaaggaagatggacccttctaaaccgtcttccaacgtggccggagtagtcatcattgtgatcctcctgattttaacgggtgctggccttgccgcctatttcttttataagaaaagacgtgtgcacctacctcaagagggcgcctttgaaaacactctgtattttaacagtcagtcaagcccaggaactagtgatatgaaagatctcgtgggcaatattgaacagaatgaacactcggtcatctagtacctcaatgcgattctgagatatttgaatttcataaaattgtaactgaaatttaaaatttttagttcaatgtgattgttttctttaaaatgagtactgaattgtactggtctgtccttttttcctttgcctaattgaagaaataattgcttgttttctagcctggcaagatattttcataaaagagggataacaatgctgattactaccttttaaaatattttagataaatgcacagcaccacagcaccacatctaagcattagtgatgggtagctgatgtcagcttcatgtggattttaagcactctagaaacaatgaagcttcttggcatattttaaggagctcccaaaatgtgttacctattaaattgtaactcagcaagtagaagaccatttgaaaagtcaggtacaaatttcctcaagtggcataaaaatgtagtcagttttctcttttaccagtttttatttccactccaattatttagaactttatttgtacatgtgcagaagaataaggcagctgagaatcttgtttcccccaagagagttttacaggctgagtgttgcaaatgtgttctttgtcctgttatatgtatatcaggaatacaaggatgtgaaataaaactgtaaatttgcataactggatgtacttagataatgtgaaataaacattaaagacaaggtctatttttaatagatttgcattttggtgatcttagtataaatttgcttttaaatgagatgtatttatccactcactttacactttaacttgacacttatgatattatttgtagagaaattctttaaatgaaactcatgaactattttgaaaaggagtgttgctaaaatgctgtgtgtaaaatgaattttttaccgtaatgattttgccagatc

SEQ ID NO: 673 - protein, 1456 aa, Homo sapiens [sequence omitted]

SEQ ID NO: 674 - DNA, 645 bp, Homo sapiens
  misc_feature (521)..(521): n is a, c, g, or t
  misc_feature (528)..(528): n is a, c, g, or t
ctggacaaggtgtttggggcatgctgcccccgtcaccgaggatctgtgtgggtagcctcaagctggagacattgtctggcctcactgcccactgggtagagacacctggatgacatttcagtacccgctggcagctcctcccactcatccagagacggccggtgggcaggcggggagagcagctttccttccctggagagaaccgtctttacctcagctcctagggcctccagccccccagctccaccacggtgacttggtgaagggggaccaatgccagaagaaaggggctgtagacccctattccccaccccatggccacagggcatctggcaataagactagtatacattgacctcccgttccctgcatgagggcggggagttccccctgctccatcccccattgcatgggggaagggcataaagaatcatttatatgcacgtggagactcctttctcatctggggcttttctggagggttgggagatgtggggaggttttttttttcttttttcttnctttctnttgcttctttgtgttctttgttcttctcgttttgtctcctttcttttctttcgtttgttttctgttgttattctctccctttttgtgccttttcttctttttactaatccttgtttt

SEQ ID NO: 675 - DNA, 516 bp, Homo sapiens
gggtcatcaccaaggtctgagtttccaaatgcaaaacatgacaatttcaggcataaatgggttaaccattaaacattctttagattctccaaggatcaactctgtaaactctgtacccattctgataatgacaattcatggacatctcttgactgtaaactacttcaggaaagtgatttttgatctgtacactcatatcacagtacctaacagtgcttcctaaaatgcaagaacacaaagcaggaataaatgaataaatactaaagtcaccttcttttctttctttttttttgatggagtttcccactgttgcctgggctaaagtgaaatggcgtgatctcgactcactgcaacgtccgcctccccagatcgaaacgattctcctgcctcaggctcctgagtagctgggattacaggcacacaccaccacgcccagctaatttttgtatttttagtagaggcgcggtttcaccatgcctggcaggatgttctccaactcctgacttcatgatccac

SEQ ID NO: 676 - DNA, 549 bp, Homo sapiens
  misc_feature (3)..(3): n is a, c, g, or t
  misc_feature (13)..(13): n is a, c, g, or t
ttnagacggcgcnactactactatgctgcgagaagacgacagaagggggaggccctgtctaggtagctggcaccaggagccgtgggcaagggaagaggccacaccctgccctgctctgctgcagccagaatgggtgtgaaggcgtctcaaacaggctttgtggtcctggtgctgctccagtgctgctctgcatacaaactggtctgctactacaccagctggtcccagtaccgggaaggcgatgggagctgcttcccagatgcccttgaccgcttcctctgtacccacatcatctacagctttgccaatataagcaacgatcacatcgacacctgggagtggaatgatgtgacgctctacggcatgctcaacacactcaagaacaggaaccccaacctgaagactctcttgtctgtcggaggatggaactttgggtctcaaagattttccaagatagcctccaacacccagagtcgccggactttcatcaagtcagtaccgccatttctgcgcacccatggctttgatgggctggaccttgcctggctc

SEQ ID NO: 677 - DNA, 509 bp, Homo sapiens
agtcagtgactacctgtgactcggtaactctcacagtcaccaaaattaagaggcaagaaggtcaaagaaaagcttaattttcagtaggccagcaccaacctcccttcccttccagaaatcatcattcctaccagcagtctccacaggcaaaacagagcacgtgagtgccccccaacaagctctgatgggacagcattcccagttctgactccgtttttccagtcttactttctaagatgatggctactggaaatggtaaacactcctttcatgacatgcacatgtatttgaaattgtagattacagaagagccccctttttacccggtaagaggattcaaaaactggtcctgttgcatcactcatgaccttttaaatgtttgggtttctcttgaagaagagaaaagcaatggtaatcatgttatacttatccttaccttaaagaaagttccgttgaagccgtccggaactttctattataccagcactattcctgaagccgtcgggtac

SEQ ID NO: 678 - DNA, 2194 bp, Homo sapiens
ctgagactggacctgaggagacctcagcctcggtgctcgggccgccccgcctctgccggaaagtccgcgccgccgctgccgccaccgtccgcagcccgagcgccccggagccgcaggccgccgccgcgcagagacgccgcggctgcgactaggcgcgcccagccgcacgtggcggacccgcccccaggcccgcagtgtcctggaccccgcaggcctccgctctcctgtcctcggccccgtccccagggccgcgatgagcttcctgagccgacagcagccgccgccaccccgccgcgccggggcggcctgcaccttgcggcagaagctgatcttctcgccctgcagcgactgtgaggaggaggaagaagaggaggaggaggagggcagcggccacagcaccggggaggactcggcctttcaagagcccgactcgccgctgccgcccgcgcggagccccacggagcccgggcccgagcgccgccgctcgcccgggccggcccccggcagccccggcgagctggaggaggacctgttgctgcccggcgcctgcccgggcgcggacgaggcgggcggtggggcggagggcgactcgtgggaggaggagggcttcggctcctcgtcgccggtcaagtcgccggcggccccctacttcctgggtagctctttctcgccggtgcgctgcggcggcccaggagatgcgtcgccgcggggttgcggggcgcgccgggcgggcgaaggccgccgctcgccgcggccggaccacccgggcaccccgccacacaagaccttccgcaagctgcgactcttcgacaccccgcacacgcccaagagtttgctctccaaagctcggggaattgattccagctctgttaaactccggggtagttctctcttcatggatacagaaaaatcaggaaaaagggaatttgatgtgcgacagactcctcaagtgaatattaatccttttactccggattctttgttgcttcattcctcaggacagtgtcgtcgtagaaagagaacgtattggaatgattcctgtggtgaagacatggaagccagtgattatgagcttgaagatgaaacaagacctgctaagagaattacaattactgaaagcaatatgaagtcccggtatacaacagaatttcatgagctagagaaaatcggctctggagaatttggttctgtatttaagtgtgtgaagaggctggatggatgcatttatgccattaagcgatcaaaaaagccattggcgggctctgttgatgagcagaacgctttgagagaagtatatgctcatgcagtgcttggacagcattctcatgtagttcgatatttctctgcgtgggcagaagatgatcatatgcttatacagaatgaatattgtaatggtggaagtttagctgatgctataagtgaaaactacagaatcatgagttactttaaagaagcagagttgaaggatctccttttgcaagttggccgaggcttgaggtatattcattcaatgtctttggttcacatggatataaaacctagtaatattttcatatctcgaacctcaatcccaaatgctgcctctgaagaaggagacgaagatgattgggcatccaacaaagttatgtttaaaataggtgatcttgggcatgtaacaaggatctccagtccacaagttgaagagggcgatagtcgttttcttgcaaatgaagttttacaggagaattatacccatctaccaaaagcagatatttttgcgcttgccctcacagtggtatgtgctgctggtgctgaacctcttccgagaaatggagatcaatggcatgaaatcagacagggtagattacctcggataccacaagtgctttcccaagaatttacagagttgctaaaagttatgattcatccagatccagagagaagaccttcagcaatggcactggtaaagcattcagtattgctgtccgcttctagaaagagtgcagaacaattacgaatagaattgaatgccgaaaagttcaaaaattcacttttacaaaaagaactcaagaaagcacagatggcaaaagctgcagctgaggaaagagcactcttcactgaccggatggccactaggtccaccacccagagtaatagaacatctcgacttattggaaagaaaatgaaccgctctgtcagccttactatatactga

SEQ ID NO: 679 - protein, 646 aa, Homo sapiens
MSFLSRQQPPPPRRAGAACTLRQKLIFSPCSDCEEEEEEEEEEGSGHSTGEDSAFQEPDSPLPPARSPTEPGPERRRSPGPAPGSPGELEEDLLLPGACPGADEAGGGAEGDSWEEEGFGSSSPVKSPAAPYFLGSSFSPVRCGGPGDASPRGCGARRAGEGRRSPRPDHPGTPPHKTFRKLRLFDTPHTPKSLLSKARGIDSSSVKLRGSSLFMDTEKSGKREFDVRQTPQVNINPFTPDSLLLHSSGQCRRRKRTYWNDSCGEDMEASDYELEDETRPAKRITITESNMKSRYTTEFHELEKIGSGEFGSVFKCVKRLDGCIYAIKRSKKPLAGSVDEQNALREVYAHAVLGQHSHVVRYFSAWAEDDHMLIQNEYCNGGSLADAISENYRIMSYFKEAELKDLLLQVGRGLRYIHSMSLVHMDIKPSNIFISRTSIPNAASEEGDEDDWASNKVMFKIGDLGHVTRISSPQVEEGDSRFLANEVLQENYTHLPKADIFALALTVVCAAGAEPLPRNGDQWHEIRQGRLPRIPQVLSQEFTELLKVMIHPDPERRPSAMALVKHSVLLSASRKSAEQLRIELNAEKFKNSLLQKELKKAQMAKAAAEERALFTDRMATRSTTQSNRTSRLIGKKMNRSVSLTIY

SEQ ID NO: 680 - DNA, 430 bp, Homo sapiens
  misc_feature (54)..(54): n is a, c, g, or t
  misc_feature (399)..(399): n is a, c, g, or t
  misc_feature (413)..(413): n is a, c, g, or t
  misc_feature (428)..(428): n is a, c, g, or t
ttgtcaaatatactgttgataaatatttatttttgtaaacttgaagtgtgtggnggccgtgggggagggacatgctggcagcaggcgccttcttcagctgtgggtcctaaaggcctttgatcctttgaagaagaaagacatggtatttgttcagcagacgccgaccactcagacggaggggcccctgggattccctgtctcagatggcctggtcttacgcctgtgtagatttcttctccattgggaatgaaggtgtcaggtgggactggaacgttctagatggtatgttccgtgatattaacaactctaaacccagggacagaccacaagccacacttcagaggcctcactgtgctgggggctttcggtgttccagggcgcccaaggtttggccaccancaccggttttctgnccttcgcgtttgctngg

SEQ ID NO: 681 - DNA, 676 bp, Homo sapiens
acagcccaaggtccaccgagcccgcaaaaccatgtccaaaccaggaaatggacagcccccggtccctgagaagcggccccctgaaatacagcatttccgcatgagtgatgatgtccactcactgggaaaggtgacctcagatctggccaaaaggaggaagctgaactcaggaggtggcctgtcggaggagttaggttctgcccggcgttcaggagaagtgaccctgacgaaaggggaccccgggtccctggaggagtgggagacggtggtgggtgatgacttcagtctctactatgattcctactctgtggatgagcgcgtggactccgacagcaagtctgaagttgaagctctaactgaacaactaacgtgaagaggaggaggagcgaagacggacggaacgaagaagacgacgaccgaggacggcaggcacgaggcaagacgcaagcaggacgatgaggagtcagggcaatcagtcagactaggagctcggtcccagtggccggccgcaaggccaagaagaaatggcgaagcagacacgccatgggctgaagccgtctcggaaacggcgcaagcgggagcctccccgggccacgagccacgaggagtgaatggcgcggcgctcctcaggccccagtgagtacatggaggtcctctggggtccctggaagctgcc

SEQ ID NO: 682 - DNA, 156 bp, Homo sapiens
gctagttaaggcggcacagggccgaggcgtagtgtgggtgactcctccgttccttgggtcccgtcgtctgtgatactgtttcgcagccatggcagaaccgcagcccccgtccggcggcctttttatctatgccgcctcagttgctgctccgacgcg

SEQ ID NO: 683 - DNA, 2184 bp, Homo sapiens
cgctatgcagagaaagcccccctggctcttctctctcaatccataatccagcgatgctgcagctgtaaaagcattaatagaaaatcaatccacaacctcgcggggcagcgatcgtcgagcgccgtttccaggctgccttccctggggtcgggagcggccccgctccccccgtggctggcgcggaatgtggtgatccgtcccggggcggggatgacttcatgcagccggagctccgcggcgggagcggaggctgctgctggcaggtggggcgcgggccggcgcgagctgaccgagcactcggcgggcgcggcgggactgcggcccgtggcggcgtgcgcggggacctgcgctgactaggtccggggaagtttcctgactttctgagaagccctggtttccccaaagaagtgatttctgatagaaatctgaaggtcatctccaagaaaaaagagatctagtatagtcaatgaattaaagacaagaaggtttccaatcagtccctgctatgtggatatttggtagcaatgactgatgtggaaactacatatgcagattttattgcttcaggaagaacaggtagaagaaatgcaatacatgatatcctggtttcctctgcaagtggcaacagcaatgaattagccttgaaattagcaggtcttgatatcaacaagacagaaggtgaagaagatgcacaacgaagttctacagaacaaagtggggaagcccagggagaagcagcaaaatctgaaagctaacaccccactttgaccctcgaccacacctgaaaatgtctcaaatctccaggagtatctggaatgcatttgtttccatgagtgaaaagaggaaaaagaaaatggctgtgctgcattgcaggaacctgctcattatcatgttaaaaatgagggcagaggctgtggctgcaggcagacttttccctacctctgtcattagcaatggttgaaatcatgtggcttgtgtttgggcgtcatttttgtatggatcctttcacttgatcatatgacgaaatgcttatagagagtagctccgacctagatgatgattcttcctgtagcatctggcccctcacaatgtcagaggatttaattgtgtctaattgcgaagggttgattgaaccccagagtttaaatatctctggctcaagtgttcacccagtaaaagaaagatccagaaagcactgtttttagcattacgtatctgtgtgttactgctgtgttatttacactgttttgtattgtacaatatatatgctcagcactgcccccttctctgattgcttatgaaaaacaaaatgatgtacattactgtgaatttttataccactcatttttaaaagggctgtcttttcattttagttttccatactgtggtggtgtacacaggatagaacacccttttttaaaacacagtctttccccttgctcattgtatgttgatgagttgattaagtctaacagattcatcaagactccattgctttattatagagacatttgaaaatatccattaatgtgaatatcacctgaattcagtctgtttggtgtctgcacagactggaattcaatctgtcaaatttgttttattctcaagtggagaacttctcccacataatatatatatatatatatattttaatttatgagaattttggacaattggaaaggtagaaaagaaaagccaagatcatactaaggactggaaatattttgttctatggaatcaaatttctcacaatgctgtatgatactatttaaatttggaggacaacttatcttcactaagctgaatcaggtggagaaagtaatctccttgcaatcatgtggacaccaatcacaaaagtaaagccctggtgttgtgttttcatgtcttttttcagccctctcagatccaaatgttattatgcactttttaatgtttgtaaacttttactaataattagtgtgaattgcattctgatacaataatgattatcattagaagctaacaaaattctcattaatactgtgtttgatggcctctgctgtgttttaacatcgtgcttcttatatggaaagtttttgtgagctgtgtaatccctctggtcagtattatgaaatcatttgtcagtggtaataaataaggaaccagtaatatgccaatggttcatgaattactggacaaatagca

SEQ ID NO: 684 - protein, 76 aa, Homo sapiens
MTDVETTYADFIASGRTGRRNAIHDILVSSASGNSNELALKLAGLDINKTEGEEDAQRSSTEQSGEAQGEAAKSES

SEQ ID NO: 685 - DNA, 255 bp, Homo sapiens
  misc_feature (59)..(59): n is a, c, g, or t
  misc_feature (248)..(248): n is a, c, g, or t
aaagtggtgaactgcgacgtgactggctagctgcgtgggtactggaacaagcaaacgangcagcgagcgaaggacgggagccggaccctgggccccgtggaactccagcctgcgccaccacgtcacgcacacgctcggcgctgcgatccgcgcatataacgatatttggatttgacctgcattttggaatttatctacacttaaaatgccaccagcagttggaggtccagttggatacacccccccanatggaag

SEQ ID NO: 686 - DNA, 391 bp, Homo sapiens
tccccatggttctcctacctaaatgattggtttccctatggctatttctccaagagttaagggatagctgcttaactatgcacctttacagaacattcttagcagtaatgctcaaatttaaaaggcacactcaagatacttccatgtcatggatccttccccaggtcccagtagtataaatatagggaagaggttagcatgaactttacaaattgttttaagtaatcctcttgaatgccagtcattaaaggactttgcccttctacatcaaattacatccttttcacaaatccccatttctgtaataactggtgcaaacctaaaggtgctttatagttttactactttgcagatttgcaatgctgcatataatgcagaagagcattaaaag

SEQ ID NO: 687 - DNA, 1441 bp, Homo sapiens
ccaatagtagtcattttaaatatatattctgaaatctttgcaaattttaacagaagagtcgaagctctgcgagacccaatatttgccaataagaatggttatgataattagcaccatggagcctcaggtgtcaaatggtccgacatccaatacaagcaatggaccctccagcaacaacagaaactgtccttctcccatgcaaacaggggcaaccacagatgacagcaaaaccaacctcatcgtcaactatttaccccagaatatgacccaagaagaattcaggagtctcttcgggagcattggtgaaatagaatcctgcaaacttgtgagagacaaaattacaggacagagtttagggtatggatttgttaactatattgatccaaaggatgcagagaaagccatcaacactttaaatggactcagactccagaccaaaaccataaaggtctcatatgcccgtccgagctctgcctcaatcagggatgctaacctctatgttagcggccttcccaaaaccatgacccagaaggaactggagcaacttttctcgcaatacggccgtatcatcacctcacgaatcctggttgatcaagtcacaggagtgtccagaggggtgggattcatccgctttgataagaggattgaggcagaagaagccatcaaagggctgaatggccagaagcccagcggtgctacggaaccgattactgtgaagtttgccaacaaccccagccagaagtccagccaggccctgctctcccagctctaccagtcccctaaccggcgctacccaggtccacttcaccaccaggctcagaggttcaggctggacaatttgcttaatatggcctatggcgtaaagagactgatgtctggaccagtccccccttctgcttgttcccccaggttctccccaattaccattgatggaatgacaagccttgtgggaatgaacatccctggtcacacaggaactgggtggtgcatctttgtctacaacctgtcccccgattccgatgagagtgtcctctggcagctctttggcccctttggagcagtgaacaacgtaaaggtgattcgtgacttcaacaccaacaagtgcaagggattcggctttgtcaccatgaccaactatgatgaggcggccatggccatcgccagcctcaacgggtaccgcctgggagacagagtgttgcaagtttcctttaaaaccaacaaagcccacaagtcctgaatttcccattcttacttactaaaatatatatagaaatatatacgaacaaaacacacgcgcgcacacacacacatacacgaaagagagagaaacaaacttttcaaggcttatattcaaccatggactttataagccagtgttgcctaagtattaaaacattggattatcctgaggtgtaccaggaaaggattttataatgcttag

SEQ ID NO: 688 - protein, 380 aa, Homo sapiens
MVMIISTMEPQVSNGPTSNTSNGPSSNNRNCPSPMQTGATTDDSKTNLIVNYLPQNMTQEEFRSLFGSIGEIESCKLVRDKITGQSLGYGFVNYIDPKDAEKAINTLNGLRLQTKTIKVSYARPSSASIRDANLYVSGLPKTMTQKELEQLFSQYGRIITSRILVDQVTGVSRGVGFIRFDKRIEAEEAIKGLNGQKPSGATEPITVKFANNPSQKSSQALLSQLYQSPNRRYPGPLHHQAQRFRLDNLLNMAYGVKRLMSGPVPPSACSPRFSPITIDGMTSLVGMNIPGHTGTGWCIFVYNLSPDSDESVLWQLFGPFGAVNNVKVIRDFNTNKCKGFGFVTMTNYDEAAMAIASLNGYRLGDRVLQVSFKTNKAHKS

SEQ ID NO: 689 - DNA, 669 bp, Homo sapiens
  misc_feature (528)..(528): n is a, c, g, or t
gaggtcttcgaggccctagattttcttcaggaggtgaacgtctatggagtcactgtgccagggcatgaaggcagggctggaatggcagccctagttctgcgtcccccccacgctttggaccttatgcagctctacacccacgtgtctgagaacttgccaccttatgcccggccccgattcctcaggctccaggagtctttggccaccacagagaccttcaaacagcagaaagttcggatggcaaatgagggcttcgaccccagcaccctgtctgacccactgtacgttctggaccaggctgtaggtgcctacctgcccctcacaactgcccggtacagcgccctcctggcaggaaaccttcgaatctgagaacttccacacctgaggcacctgagagaggaactctgtggggtgggggccgttgcaggtgtactgggctgtcagggatcttttctataccagaactgcggtcactattttgtaataaatgtggctggagctgatccagctgtctctgacctacaaaanaaaaaaaaaaaaaaaacttgagggggggcccggtacccaattcgccctatagtgagtcgtattacaattcactggccgtcggtttacaccgtcgtgactgggaaaaccctggccgtacccaacttaaatcgcttgcagcac

SEQ ID NO: 690 - DNA, 210 bp, Homo sapiens
  misc_feature (58)..(58): n is a, c, g, or t
  misc_feature (112)..(112): n is a, c, g, or t
  misc_feature (114)..(114): n is a, c, g, or t
  misc_feature (126)..(127): n is a, c, g, or t
  misc_feature (137)..(137): n is a, c, g, or t
  misc_feature (154)..(156): n is a, c, g, or t
  misc_feature (175)..(175): n is a, c, g, or t
  misc_feature (186)..(186): n is a, c, g, or t
  misc_feature (188)..(188): n is a, c, g, or t
  misc_feature (190)..(190): n is a, c, g, or t
  misc_feature (194)..(194): n is a, c, g, or t
  misc_feature (196)..(196): n is a, c, g, or t
  misc_feature (200)..(200): n is a, c, g, or t
  misc_feature (203)..(204): n is a, c, g, or t
  misc_feature (207)..(210): n is a, c, g, or t
tttggtgtctggctatggacccccatctgactgtccagctctctctcccccacccctnccggtgttgttattaaacgtctgtggagcttctgctgcaaggaacaaaaaagananaaatcaaaaaanngacaaaaaancacaaacagaagaggannnaaaagcaacaaataaaganaacacacagangngntttnanaaanaannggnnnn

SEQ ID NO: 691 - DNA, 1506 bp, Homo sapiens
gggcgggggtcgcggtccccccctcaacatggcggcagcggtgctctaggcgccggaagggggcgtgaatcggtgcgaccgcgcgcgtgcgcagtaccgggtccgcgcctgtccccgaaacttcgcaccccgtcgaactctcgcgagagcgtatctgcgtgtcgggacgtgcggaggctctcactttccgtcatggcgctgaaggtagcgaccgtcgccggcagcgccgcgaaggcggtgctcgggccagcccttctctgccgtccctgggaggttctaggcgcccacgaggtcccctcgaggaacatcttttcagaacaaacaattcctccgtccgctaagtatggcgggcggcacacggtgaccatgatcccaggggatggcatcgggccagagctcatgctgcatgtcaagtccgtcttcaggcacgcatgtgtaccagtggactttgaagaggtgcacgtgagttccaatgctgatgaagaggacattcgcaatgccatcatggccatccgccggaaccgcgtggccctgaagggcaacatcgaaaccaaccataacctgccaccgtcgcacaaatctcgaaacaacatccttcgcaccagcctggacctctatgccaacgtcatccactgtaagagccttccaggcgtggtgacccggcacaaggacatagacatcctcattgtccgggagaacacagagggcgagtacagcagcctggagcatgagagtgtggcgggagtggtggagagcctgaagatcatcaccaaggccaagtccctgcgcattgccgagtatgccttcaagctggcgcaggagagcgggcgcaagaaagtgacggccgtgcacaaggccaacatcatgaaactgggcgatgggcttttcctccagtgctgcagggaggtggcagcccgctaccctcagatcaccttcgagaacatgattgtggataacaccaccatgcagctggtgtcccggccccagcagtttgatgtcatggtgatgcccaatctctatggcaacatcgtcaacaatgtctgcgcgggactggtcgggggcccaggccttgtggctggggccaactatggccatgtgtacgcggtgtttgaaacagctacgaggaacaccggcaagagtatcgccaataagaacatcgccaaccccacggccaccctgctggccagctgcatgatgctggaccacctcaagctgcactcctatgccacctccatccgtaaggctgtcctggcatccatggacaatgagaatatgcacactccggacatcgggggccagggcacaacatctgaagccatccaggacgtcatccgccacatccgcgtcatcaacggccgggccgtggaggcctaggctggccctaggaccttcttggtttgctccttggattccccttcccactccagcaccccagccagcctggtacgcagatcccagaataaagcaccttctccctagaaaaaaaaaaaaaaaaaaaaaaaaaaa

SEQ ID NO: 692 - protein, 393 aa, Homo sapiens
MALKVATVAGSAAKAVLGPALLCRPWEVLGAHEVPSRNIFSEQTIPPSAKYGGRHTVTMIPGDGIGPELMLHVKSVFRHACVPVDFEEVHVSSNADEEDIRNAIMAIRRNRVALKGNIETNHNLPPSHKSRNNILRTSLDLYANVIHCKSLPGVVTRHKDIDILIVRENTEGEYSSLEHESVAGVVESLKIITKAKSLRIAEYAFKLAQESGRKKVTAVHKANIMKLGDGLFLQCCREVAARYPQITFENMIVDNTTMQLVSRPQQFDVMVMPNLYGNIVNNVCAGLVGGPGLVAGANYGHVYAVFETATRNTGKSIANKNIANPTATLLASCMMLDHLKLHSYATSIRKAVLASMDNENMHTPDIGGQGTTSEAIQDVIRHIRVINGRAVEA

SEQ ID NO: 693 - DNA, 1743 bp, Homo sapiens
ggcgcggggacgcgggtttctgcctcaggccctgccctgctctactctgcgctctctgcccgcgccgccgccgcctcagcctcggccctgcgctgcgcgcccggcccgtgctgccatggcctgccgcccgcgaagcccgccgaggcatcagagccgctgcgacggtgacgccagcccgccgtcccccgcgcgatggagcctgggacggaagcgcagagccgacggcaggcgctggaggcccgaagacgccgaggaggcagagcaccgcggcgccgagcgcagacccgagagctttaccactcctgaaggccctaaaccccgttccagatgctctgactgggcaagtgcagttgaagaagatgaaatgaggaccagagttaacaaagaaatggcaagatataaaaggaaactcctcatcaatgactttggaagagagagaaaatcatcatcaggaagttctgattcaaaggagtctatgtctactgtgccggctgactttgagacagatgaaagtgtcctaatgaggagacagaagcagatcaactatgggaagaacacaattgcctacgatcgttatattaaagaagtcccaagacaccttcgacaacctggcattcatcccaagacccctaataaatttaagaagtatagtcgacgttcatgggaccagcaaatcaaactctggaaggtggctctgcatttttgggatcctccagcggaagaaggatgtgatttgcaagaaatacaccctgtagaccttgaatctgcagaaagcagctccgagccccagaccagctctcaggatgactttgatgtgtactctggcacacccaccaaggtgagacacatggacagtcaagtggaggatgagtttgatttggaagcttgtttaactgaacccttgagagacttctcagccatgagctaactgccccctggcggccaggaagagaaacagctcctccccgactaggtggaaggctggccaggcaccaagcatgtgtgtgcacttgtacctggtggtttctctgttagcagtccattagctcatgctgaattatttttgccttactttcttaagaaacattaattttatgtatagtgagtatattttgcatgttttaaattgtaaatggagctaagtccaagaaagtacttgaagctctcttccagcgagcttaattgcgtaatccctgttgtcctccagggtaagctgacacgtctacataactggttttccacaggcatcttcagttattgcttgtcaggtggactgttttggatttaaccatgtaatccatgggaccaattgagagtcagctacttttataggcatcaaagtattctcagacacctttaatatctttatggaaacttaatttttggccttttatcaatatgtcataacagcattctgaagtcagacattgttaaattgagctattaaactaatgagttttatgtaagttatatggtcttaatttggtatttgtaaatagcactagttagactctttagaatactccaagagttagggcagcagagtggagcgatttagaaagaacattttaaaacaatcagttaatttaccatgtaaaattgctgtaaatgataatgtgtacagattttctgttcaaatattcaattgtaaacttcttgttaagactgttacgtttctattgcttttgtatgggatattgcaaaaataaaaaggaaagaaccctcaaaaaaaaaaaaaaaaaa

SEQ ID NO: 694 - protein, 270 aa, Homo sapiens
MACRPRSPPRHQSRCDGDASPPSPARWSLGRKRRADGRRWRPEDAEEAEHRGAERRPESFTTPEGPKPRSRCSDWASAVEEDEMRTRVNKEMARYKRKLLINDFGRERKSSSGSSDSKESMSTVPADFETDESVLMRRQKQINYGKNTIAYDRYIKEVPRHLRQPGIHPKTPNKFKKYSRRSWDQQIKLWKVALHFWDPPAEEGCDLQEIHPVDLESAESSSEPQTSSQDDFDVYSGTPTKVRHMDSQVEDEFDLEACLTEPLRDFSAMS

SEQ ID NO: 695 - DNA, 678 bp, Homo sapiens
ggctagtagaggctggtgttaattcggccgaggtcatctttgcagtacaggagctcgtgccgtggccacagcccacagcccacagccatgggctgggacctgacggtgaagatgctggcgggcaacgaattccaggtgtccctgagcagctccatgtcggtgtcagagctgaaggcgcagatcacccagaagatcggcgtgcacgccttccagcagcgtctggctgtccacccgagcggtgtggcgctgcaggacagggtcccccttgccagccagggcctgggccccggcagcacggtcctgctggtggtggacaaatgcgacgaacctctgagcatcctggtgaggaataacaagggccgcagcagcacctacgaggtgcggctgacgcagaccgtggcccacctgaagcagcaagtgagcgggctggagggtgtgcaggacgacctgttctggctgaccttcgaggggaagcccctggaggaccagctcccgctgggggagtacgtgctcaagcccctgagcaccgtgttcatgaatctgcgcctgcggggaggcggcacagagcctggcgggcggagctaagggcctccaccagcatccgagcaggatcaagggccggaaataaaggctgttgtaaagagaaaaaaaagaaaaaaaaaaaaaaaaaaaacctct

SEQ ID NO: 696 - DNA, 559 bp, Homo sapiens
  misc_feature (2)..(2): n is a, c, g, or t
  misc_feature (287)..(287): n is a, c, g, or t
  misc_feature (362)..(362): n is a, c, g, or t
  misc_feature (377)..(377): n is a, c, g, or t
  misc_feature (461)..(461): n is a, c, g, or t
  misc_feature (471)..(471): n is a, c, g, or t
  misc_feature (496)..(496): n is a, c, g, or t
  misc_feature (515)..(515): n is a, c, g, or t
  misc_feature (527)..(527): n is a, c, g, or t
  misc_feature (539)..(539): n is a, c, g, or t
  misc_feature (554)..(554): n is a, c, g, or t
anttctggcacaggaatccaaatatgaaaatcaaaagctttagtattcctcatcttctcttctggaagatttgcgttagagtttttgttgggccttcaaaaagctgtgttcagagttaggagaatatatccaataaaagatggtttcgtctaccaattggggaagtttcaccctctccctatctgaagaaaaaaatcaaaaacaaatgtccccggatctttcgatgcaagtcctggaggcagggagatcactgcctgcctggcccacgctgctgggacggctcgtcntccctgctttttgtttttcaaacctcctgcttctcccaccttgggaaggagaaagtgtgaaacccgggcagcggngatccttaggcggtncttggtggcccggagccggcccggccggaaaaccatagacctggttgtactgttagcttgttgtttgggggaccaaattttctngagagaactngagcacttttgttgtgtttttttgntttgttttttggttttttngccttggtcgantcccgaataaanttttgtgttccctcntttta

SEQ ID NO: 697 - DNA, 9649 bp, Homo sapiens
cagcgactcctctggctcccgagaagtggatccggtcgcggccactacgatgccgggagccgccggggtcctcctccttctgctgctctccggaggcctcgggggcgtacaggcgcagcggccgcagcagcagcggcagtcacaggcacatcagcaaagaggtttattccctgctgtcctgaatcttgcttctaatgctcttatcacgaccaatgcaacatgtggagaaaaaggacctgaaatgtactgcaaattggtagaacatgtccctgggcagcctgtgaggaacccgcagtgtcgaatctgcaatcaaaacagcagcaatccaaaccagagacacccgattacaaatgctattgatggaaagaacacttggtggcagagtcccagtattaagaatggaatcgaataccattatgtgacaattacactggatttacagcaggtgttccagatcgcgtatgtgattgtgaaggcagctaactccccccggcctggaaactggattttggaacgctctcttgatgatgttgaatacaagccctggcagtatcatgctgtgacagacacggagtgcctaacgctttacaatatttatccccgcactgggccaccgtcatatgccaaagatgatgaggtcatctgcacttcattttactccaagatacaccccttagaaaatggagagattcacatctctttaatcaatgggagaccaagtgccgatgatccttctccagaactgctagaatttacctccgctcgctatattcgcctgagatttcagaggatccgcacactgaatgctgacttgatgatgtttgctcacaaagacccaagagaaattgaccccattgtcaccagaagatattactactcggtcaaggatatttcagttggagggatgtgcatctgctatggtcatgccagggcttgtccacttgatccagcgacaaataaatctcgctgtgagtgtgagcataacacatgtggcgatagctgtgatcagtgctgtccaggattccatcagaaaccctggagagctggaacttttctaactaaaactgaatgtgaagcatgcaattgtcatggaaaagctgaagaatgctattatgatgaaaatgttgccagaagaaatctgagtttgaatatacgtggaaagtacattggagggggtgtctgcattaattgtacccaaaacactgctggtataaactgcgagacatgtacagatggcttcttcagacccaaaggggtatctccaaattatccaaggccatgccagccatgtcattgcgatccaattggttccttaaatgaagtctgtgtcaaggatgagaaacatgctcgacgaggtttggcacctggatcctgtcattgcaaaactggttttggaggtgtgagctgtgatcggtgtgccaggggctacactggctacccggactgcaaagcctgtaactgcagtgggttagggagcaaaaatgaggatccttgttttggcccctgtatctgcaaggaaaatgttgaaggaggagactgtagtcgttgcaaatccggcttcttcaatttgcaagaggataattggaaaggctgcgatgagtgtttctgttcaggggtttcaaacagatgtcagagttcctactggacctatggcaaaatacaagatatgagtggctggtatctgactgaccttcctggccgcattcgagtggctccccagcaggacgacttggactcacctcagcagatcagcatcagtaacgcggaggcccggcaagccctgccgcacagctactactggagcgcgccggctccctatctgggaaacaaactcccagcagtaggaggacagttgacatttaccatatcatatgaccttgaagaagaggaagaagatacagaacgtgttctccagcttatgattatcttagagggtaatgacttgagcatcagcacagcccaagatgaggtgtacctgcacccatctgaagaacatactaatgtattgttacttaaagaagaatcatttaccatacatggcacacattttccagtccgtagaaaggaatttatgacagtgcttgcgaatttgaagagagtcctcctacaaatcacatacagctttgggatggatgccatcttcaggttgagctctgttaaccttgaatccgctgtctcctatcctactgatggaagcattgcagcagctgtagaagtgtgtcagtgcccaccagggtatactggctcctcttgtgaatcttgttggcctaggcacaggcgagttaacggcactatttttggtggcatctgtgagccatgtcagtgctttggtcatgcggagtcctgtgatgacgtcactggagaatgcctgaactgtaaggatcacacaggtggcccatattgtgataaatgtcttcctggtttctatggcgagcctactaaaggaacctctgaagactgtcaaccctgtgcctgtccactcaatatcccatccaataactttagcccaacgtgccatttagaccggagtcttggattgatctgtgatggatgccctgtcgggtacacaggaccacgctgtgagaggtgtgcagaaggctattttggacaaccctctgtacctggaggatcatgtcagccatgccaatgcaatgacaaccttgacttctccatccctggcagctgtgacagcttgtctggctcctgtctgatatgtaaaccaggtacaacaggccggtactgtgagctctgtgctgatggatattttggagatgcagttgatgcgaagaactgtcagccctgtcgctgtaatgccggtggctctttctctgaggtttgccacagtcaaactggacagtgtgagtgcagagccaacgttcagggtcagagatgtgacaaatgcaaggctgggacctttggcctacaatcagcaaggggctgtgttccctgcaactgcaattcttttgggtctaagtcattcgactgtgaagagagtggacaatgttggtgccaacctggagtcacagggaagaaatgtgaccgctgtgcccacggctatttcaacttccaagaaggaggctgcacagcttgtgaatgttctcatctgggtaataattgtgacccaaagactgggcgatgcatttgcccacccaataccattggagagaaatgttctaaatgtgcacccaatacctggggccacagcattaccactggttgtaaggcttgtaactgcagcacagtgggatccttggatttccaatgcaatgtaaatacaggccaatgcaactgtcatccaaaattctctggtgcaaaatgtacagagtgcagtcgaggtcactggaactaccctcgctgcaatctctgtgactgcttcctccctgggacagatgccacaacctgtgattcagagactaaaaaatgctcctgtagtgatcaaactgggcagtgcacttgtaaggtgaatgtggaaggcatccactgtgacagatgccggcctggcaaattcggactcgatgccaagaatccacttggctgcagcagctgctattgcttcggcactactacccagtgctctgaagcaaaaggactgatccggacgtgggtgactctgaaggctgagcagaccattctacccctggtagatgaggctctgcagcacacgaccaccaagggcattgtttttcaacatccagagattgttgcccacatggacctgatgagagaagatctccatttggaacctttttattggaaacttccagaacaatttgaaggaaagaagttgatggcctatgggggcaaactcaagtatgcaatctatttcgaggctcgggaagaaacaggtttctctacatataatcctcaagtgatcattcgaggtgggacacctactcatgctagaattatcgtcaggcatatggctgctcctctgattggccaattgacaaggcatgaaattgaaatgacagagaaagaatggaaatattatggggatgatcctcgagtccatagaactgtgacccgagaagacttcttggatatactatatgatattcattacattcttatcaaagctacttatggaaatttcatgcgacaaagcaggatttctgaaatctcaatggaggtagctgaacaaggacgtggaacaacaatgactcctccagctgacttgattgaaaaatgtgattgtcccctgggctattctggcctgtcctgtgaggcatgcttgccgggattttatcgactgcgttctcaaccaggtggccgcacccctggaccaaccctgggcacctgtgttccatgtcaatgtaatggacacagcagcctgtgtgaccctgaaacatcgatatgccagaattgtcaacatcacactgctggtgacttctgtgaacgatgtgctcttggatactatggaattgtcaagggattgccaaatgactgtcagcaatgtgcctgccctctgatttcttccagtaacaatttcagcccctcttgtgtcgcagaaggacttgacgactaccgctgcacggcttgtccacggggatatgaaggccagtactgtgaaaggtgtgcccctggctatactggcagtccaggcaaccctggaggctcctgccaagaatgtgagtgtgatccctatggctcactgcctgtgccctgtgaccctgtcacaggattctgcacgtgccgacctggagccacgggaaggaagtgtgacggctgcaagcactggcatgcacgcgagggctgggagtgtgttttttgtggagatgagtgcactggccttcttctcggtgacttggctcgcctggagcagatggtcatgagcatcaacctcactggtccgctgcctgcgccatataaaatgctgtatggtcttgaaaatatgactcaggagctaaagcacttgctgtcacctcagcgggccccagagaggcttattcagctggcagagggcaatctgaatacactcgtgaccgaaatgaacgagctgctgaccagggctaccaaagtgacagcagatggcgagcagaccggacaggatgctgagaggaccaacacaagagcaaagtccctgggagaattcattaaggagcttgcccgggatgcagaagctgtaaatgaaaaagctataaaactaaatgaaactctaggaactcgagacgaggcctttgagagaaatttggaagggcttcagaaagagattgaccagatgattaaagaactgaggaggaaaaatctagagacacaaaaggaaattgctgaagatgagttggtagctgcagaagcccttctgaaaaaagtgaagaagctgtttggagagtcccggggggaaaatgaagaaatggagaaggatctccgggaaaaactggctgactacaaaaacaaagttgatgatgcttgggaccttttgagagaagccacagataaaatcagagaagctaatcgcctatttgcagtaaatcagaaaaacatgactgcattggagaaaaagaaggaggctgttgagagcggcaaacgacaaattgagaacactttaaaagaaggcaatgacatactcgatgaagccaaccgtcttgcagatgaaatcaactccatcatagactatgttgaagacatccaaactaaattgccacctatgtctgaggagcttaatgataaaatagatgacctctcccaagaaataaaggacaggaagcttgctgagaaggtgtcccaggctgagagccacgcagctcagttgaatgactcatctgctgtccttgatggaatccttgatgaggctaaaaacatctccttcaatgccactgcagccttcaaagcttacagcaatattaaggactatattgatgaagctgagaaagttgccaaagaagccaaagatcttgcacatgaagctacaaaactggcaacaggtcctcggggtttattaaaggaagatgccaaaggctgtcttcagaaaagcttcaggattcttaacgaagccaagaagttagcaaatgatgtaaaagaaaatgaagaccatctaaatggcttaaaaaccaggatagaaaatgctgatgctagaaatggggatctcttgagaactttgaatgacactttgggaaagttatcagctattccaaatgatacagctgctaaactgcaagctgttaaggacaaagccagacaagccaacgacacagctaaagatgtactggcacagattacagagctccaccagaacctcgatggcctgaagaagaattacaataaactagcagacagcgtcgccaaaacgaatgctgtggttaaagatccttccaagaacaaaatcattgccgatgcagatgccactgtcaaaaatttagaacaggaagctgaccggctaatagataaactcaaacccatcaaggaacttgaggataacctaaagaaaaacatctctgagataaaggaattgataaaccaagctcggaaacaagccaattctatcaaagtatctgtgtcttcaggaggtgactgcattcgaacatacaaaccagaaatcaagaaaggaagttacaataatattgttgtcaacgtaaagacagctgttgctgataacctcctcttttatcttggaagtgccaaatttattgactttctggctatagaaatgcgtaaaggcaaagtcagcttcctctgggatgttggatctggagttggacgtgtagagtacccagatttgactattgatgactcatattggtaccgtatcgtagcatcaagaactgggagaaatggaactatttctgtgagagccctggatggacccaaagccagcattgtgcccagcacacaccattcgacgtctcctccagggtacacgattctagatgtggatgcaaatgcaatgctgtttgttggtggcctgactgggaaattaaagaaggctgatgctgtacgtgtgattacattcactggctgcatgggagaaacatactttgacaacaaacctataggtttgtggaatttccgagaaaaagaaggtgactgcaaaggatgcactgtcagtcctcaggtggaagatagtgaggggactattcaatttgatggagaaggttatgcattggtcagccgtcccattcgctggtaccccaacatctccactgtcatgttcaagttcagaacattttcttcgagtgctcttctgatgtatcttgccacacgagacctgagagatttcatgagtgtggagctcactgatgggcacataaaagtcagttacgatctgggctcaggaatggcttccgttgtcagcaatcaaaaccataatgatgggaaatggaaatcattcactctgtcaagaattcaaaaacaagccaatatatcaattgtagatatagatactaatcaggaggagaatatagcaacttcgtcttctggaaacaactttggtcttgacttgaaagcagatgacaaaatatattttggtggcctgccaacgctgagaaacttgagtatgaaagcaaggccagaagtaaatctgaagaaatattccggctgcctcaaagatattgaaatttcaagaactccgtacaatatactcagtagtcccgattatgttggtgttaccaaaggatgttccctggagaatgtttacacagttagctttcctaagcctggttttgtggagctctcccctgtgccaattgatgtaggaacagaaatcaacctgtcattcagcaccaagaatgagtccggcatcattcttttgggaagtggagggacaccagcaccacctaggagaaaacgaaggcagactggacaggcctattatgtaatactcctcaacaggggccgtctggaagtgcatctctccacaggggcacgaacaatgaggaaaattgtcatcagaccagagccgaatctgtttcatgatggaagagaacattccgttcatgtagagcgaactagaggcatctttacagttcaagtggatgaaaacagaagatacatgcaaaacctgacagttgaacagcctatcgaagttaaaaagcttttcgttgggggtgctccacctgaatttcaaccttccccactcagaaatattcctccttttgaaggctgcatatggaatcttgttattaactctgtccccatggactttgcaaggcctgtgtccttcaaaaatgctgacattggtcgctgtgcccatcagaaactccgtgaagatgaagatggagcagctccagctgaaatagttatccagcctgagccagttcccaccccagcctttcctacgcccaccccagttctgacacatggtccttgtgctgcagaatcagaaccagctcttttgatagggagcaagcagttcgggctttcaagaaacagtcacattgcaattgcatttgatgacaccaaagttaaaaaccgtctcacaattgagttggaagtaagaaccgaagctgaatccggcttgcttttttacatggctcgcatcaatcatgctgattttgcaacagttcagctgagaaatggattgccctacttcagctatgacttggggagtggggacacccacaccatgatccccaccaaaatcaatgatggccagtggcacaagattaagataatgagaagtaagcaagaaggaattctttatgtagatggggcttccaacagaaccatcagtcccaaaaaagccgacatcctggatgtcgtgggaatgctgtatgttggtgggttacccatcaactacactacccgaagaattggtccagtgacctatagcattgatggctgcgtcaggaatctccacatggcagaggcccctgccgatctggaacaacccacctccagcttccatgttgggacatgttttgcaaatgctcagaggggaacatattttgacggaaccggttttgccaaagcagttggtggattcaaagtgggattggaccttcttgtagaatttgaattccgcacaactacaacgactggagttcttctggggatcagtagtcaaaaaatggatggaatgggtattgaaatgattgatgaaaagttgatgtttcatgtggacaatggtgcgggcagattcactgctgtctatgatgctggggttccagggcatttgtgtgatggacaatggcataaagtcactgccaacaagatcaaacaccgcattgagctcacagtcgatgggaaccaggtggaagcccaaagcccaaacccagcatctacatcagctgacacaaatgaccctgtgtttgttggaggcttcccagatgacctcaagcagtttggcctaacaaccagtattccgttccgaggttgcatcagatccctgaagctcaccaaaggcacaggcaagccactggaggttaattttgccaaggccctggaactgaggggcgttcaacctgtatcatgcccagccaactaataaaaataagtgtaaccccaggaagagtctgtcaaaacaagtatatcaagtaaaacaaacaaatatattttacctatatatgttaattaaactaatttgtgcatgtacatagaattctttctgtattcagatggtgctaattcagactccagactgaattttaattcaagttctttctcaagtctataaatattaaactgattatttcattctaaaaaaaaaaaaaaaaaa

SEQ ID NO: 698 - protein, 3122 aa, Homo sapiens
MPGAAGVLLLLLLSGGLGGVQAQRPQQQRQSQAHQQRGLFPAVLNLASNALITTNATCGEKGPEMYCKLVEHVPGQPVRNPQCRICNQNSSNPNQRHPITNAIDGKNTWWQSPSIKNGIEYHYVTITLDLQQVFQIAYVIVKAANSPRPGNWILERSLDDVEYKPWQYHAVTDTECLTLYNIYPRTGPPSYAKDDEVICTSFYSKIHPLENGEIHISLINGRPSADDPSPELLEFTSARYIRLRFQRIRTLNADLMMFAHKDPREIDPIVTRRYYYSVKDISVGGMCICYGHARACPLDPATNKSRCECEHNTCGDSCDQCCPGFHQKPWRAGTFLTKTECEACNCHGKAEECYYDENVARRNLSLNIRGKYIGGGVCINCTQNTAGINCETCTDGFFRPKGVSPNYPRPCQPCHCDPIGSLNEVCVKDEKHARRGLAPGSCHCKTGFGGVSCDRCARGYTGYPDCKACNCSGLGSKNEDPCFGPCICKENVEGGDCSRCKSGFFNLQEDNWKGCDECFCSGVSNRCQSSYWTYGKIQDMSGWYLTDLPGRIRVAPQQDDLDSPQQISISNAEARQALPHSYYWSAPAPYLGNKLPAVGGQLTFTISYDLEEEEEDTERVLQLMIILEGNDLSISTAQDEVYLHPSEEHTNVLLLKEESFTIHGTHFPVRRKEFMTVLANLKRVLLQITYSFGMDAIFRLSSVNLESAVSYPTDGSIAAAVEVCQCPPGYTGSSCESCWPRHRRVNGTIFGGICEPCQCFGHAESCDDVTGECLNCKDHTGGPYCDKCLPGFYGEPTKGTSEDCQPCACPLNIPSNNFSPTCHLDRSLGLICDGCPVGYTGPRCERCAEGYFGQPSVPGGSCQPCQCNDNLDFSIPGSCDSLSGSCLICKPGTTGRYCELCADGYFGDAVDAKNCQPCRCNAGGSFSEVCHSQTGQCECRANVQGQRCDKCKAGTFGLQSARGCVPCNCNSFGSKSFDCEESGQCWCQPGVTGKKCDRCAHGYFNFQEGGCTACECSHLGNNCDPKTGRCICPPNTIGEKCSKCAPNTWGHSITTGCKACNCSTVGSLDFQCNVNTGQCNCHPKFSGAKCTECSRGHWNYPRCNLCDCFLPGTDATTCDSETKKCSCSDQTGQCTCKVNVEGIHCDRCRPGKFGLDAKNPLGCSSCYCFGTTTQCSEAKGLIRTWVTLKAEQTILPLVDEALQHTTTKGIVFQHPEIVAHMDLMREDLHLEPFYWKLPEQFEGKKLMAYGGKLKYAIYFEAREETGFSTYNPQVIIRGGTPTHARIIVRHMAAPLIGQLTRHEIEMTEKEWKYYGDDPRVHRTVTREDFLDILYDIHYILIKATYGNFMRQSRISEISMEVAEQGRGTTMTPPADLIEKCDCPLGYSGLSCEACLPGFYRLRSQPGGRTPGPTLGTCVPCQCNGHSSLCDPETSICQNCQHHTAGDFCERCALGYYGIVKGLPNDCQQCACPLISSSNNFSPSCVAEGLDDYRCTACPRGYEGQYCERCAPGYTGSPGNPGGSCQECECDPYGSLPVPCDPVTGFCTCRPGATGRKCDGCKHWHAREGWECVFCGDECTGLLLGDLARLEQMVMSINLTGPLPAPYKMLYGLENMTQELKHLLSPQRAPERLIQLAEGNLNTLVTEMNELLTRATKVTADGEQTGQDAERTNTRAKSLGEFIKELARDAEAVNEKAIKLNETLGTRDEAFERNLEGLQKEIDQMIKELRRKNLETQKEIAEDELVAAEALLKKVKKLFGESRGENEEMEKDLREKLADYKNKVDDAWDLLREATDKIREANRLFAVNQKNMTALEKKKEAVESGKRQIENTLKEGNDILDEANRLADEINSIIDYVEDIQTKLPPMSEELNDKIDDLSQEIKDRKLAEKVSQAESHAAQLNDSSAVLDGILDEAKNISFNATAAFKAYSNIKDYIDEAEKVAKEAKDLAHEATKLATGPRGLLKEDAKGCLQKSFRILNEAKKLANDVKENEDHLNGLKTRIENADARNGDLLRTLNDTLGKLSAIPNDTAAKLQAVKDKARQANDTAKDVLAQITELHQNLDGLKKNYNKLADSVAKTNAVVKDPSKNKIIADADATVKNLEQEADRLIDKLKPIKELEDNLKKNISEIKELINQARKQANSIKVSVSSGGDCIRTYKPEIKKGSYNNIVVNVKTAVADNLLFYLGSAKFIDFLAIEMRKGKVSFLWDVGSGVGRVEYPDLTIDDSYWYRIVASRTGRNGTISVRALDGPKASIVPSTHHSTSPPGYTILDVDANAMLFVGGLTGKLKKADAVRVITFTGCMGETYFDNKPIGLWNFREKEGDCKGCTVSPQVEDSEGTIQFDGEGYALVSRPIRWYPNISTVMFKFRTFSSSALLMYLATRDLRDFMSVELTDGHIKVSYDLGSGMASVVSNQNHNDGKWKSFTLSRIQKQANISIVDIDTNQEENIATSSSGNNFGLDLKADDKIYFGGLPTLRNLSMKARPEVNLKKYSGCLKDIEISRTPYNILSSPDYVGVTKGCSLENVYTVSFPKPGFVELSPVPIDVGTEINLSFSTKNESGIILLGSGGTPAPPRRKRRQTGQAYYVILLNRGRLEVHLSTGARTMRKIVIRPEPNLFHDGREHSVHVERTRGIFTVQVDENRRYMQNLTVEQPIEVKKLFVGGAPPEFQPSPLRNIPPFEGCIWNLVINSVPMDFARPVSFKNADIGRCAHQKLREDEDGAAPAEIVIQPEPVPTPAFPTPTPVLTHGPCAAESEPALLIGSKQFGLSRNSHIAIAFDDTKVKNRLTIELEVRTEAESGLLFYMARINHADFATVQLRNGLPYFSYDLGSGDTHTMIPTKINDGQWHKIKIMRSKQEGILYVDGASNRTISPKKADILDVVGMLYVGGLPINYTTRRIGPVTYSIDGCVRNLHMAEAPADLEQPTSSFHVGTCFANAQRGTYFDGTGFAKAVGGFKVGLDLLVEFEFRTTTTTGVLLGISSQKMDGMGIEMIDEKLMFHVDNGAGRFTAVYDAGVPGHLCDGQWHKVTANKIKHRIELTVDGNQVEAQSPNPASTSADTNDPVFVGGFPDDLKQFGLTTSIPFRGCIRSLKLTKGTGKPLEVNFAKALELRGVQPVSCPAN

SEQ ID NO: 699 - DNA, 2742 bp, Homo sapiens
gtcactcgtataaaaacctatgctttgaaggttctcgtgtgtctcggcctgcaggtctcgctcagagctgtgtccctgaacatccaccctgctggggtggcttgacgcacttctgtgcaaatctgttcgctcgcaaccctacctacctctctcccgaaccggagaaaaccttcggcggggtccttccgggttttgtgtcgaatctgcggcggcgacccggcgccgcgtcacgcggtggtgaatgtgcggcagtacgcgcgccgcgtcgtttacgcggcgatttcatcatgctccgagccggcggcgcgcgccgcttccgtcgccaccctctctggacagcccagggccgcaggctcatgccctctccgcgtccagtgctgcttagaggtgctcgcgccgctctgctgctgctgctgccgccccggctcttagcccgaccctcgctcctcctccgccggtccctcagcgcggcctcctgcgccccgatctccttgcccgccgccgcctcccggagcagcatggacggcgcgggggctgaggaggtgctggcacctctgaggctagcagtgcgccagcagggagatcttgtgcgaaaactcaaagaagataaagcaccccaagtagacgtagacaaagcagtggctgagctcaaagcccgcaagagggttctggaagcaaaggagctggcgttacagcccaaagatgatattgtagaccgagcaaaaatggaagataccctgaagaggaggtttttctatgatcaagcttttgctatttatggaggtgttagtggtctgtatgactttgggccagttggctgtgctttgaagaacaatattattcagacctggaggcagcactttatccaagaggaacagatcctggagatcgattgcaccatgctcacccctgagccagttttaaagacctctggccatgtagacaaatttgctgacttcatggtgaaagacgtaaaaaatggagaatgttttcgtgctgaccatctattaaaagctcatttacagaaattgatgtctgataagaagtgttctgtcgaaaagaaatcagaaatggaaagtgttttggcccagcttgataactatggacagcaagaacttgcggatctttttgtgaactataatgtaaaatctcccattactggaaatgatctatcccctccagtgtcttttaacttaatgttcaagactttcattgggcctggaggaaacatgcctgggtacttgagaccagaaactgcacaggggattttcttgaatttcaaacgacttttggagttcaaccaaggaaagttgccttttgctgctgcccagattggaaattcttttagaaatgagatctcccctcgatctggactgatcagagtcagagaattcacaatggcagaaattgagcactttgtagatcccagtgagaaagaccaccccaagttccagaatgtggcagaccttcacctttatttgtattcagcaaaagcccaggtcagcggacagtccgctcggaaaatgcgcctgggagatgctgttgaacagggtgtgattaataacacagtattaggctatttcattggccgcatctacctctacctcacgaaggttggaatatctccagataaactccgcttccggcagcacatggagaatgagatggcccattatgcctgtgactgttgggatgcagaatccaaaacatcctacggttggattgagattgttggatgtgctgatcgttcctgttatgacctctcctgtcatgcacgagccaccaaagtcccacttgtagctgagaaacctctgaaagaacccaaaacagtcaatgttgttcagtttgaacccagtaagggagcaattggtaaggcatataagaaggatgcaaaactggtgatggagtatcttgccatttgtgatgagtgctacattacagaaatggagatgctgctgaatgagaaaggggaattcacaattgaaactgaagggaaaacatttcagttaacaaaagacatgatcaatgtgaagagattccagaaaacactatatgtggaagaagttgttccgaatgtaattgaaccttccttcggcctgggtaggatcatgtatacggtatttgaacatacattccatgtacgagaaggagatgaacagagaacattcttcagtttccctgctgtagttgctccattcaaatgttccgtcctcccactgagccaaaaccaggagttcatgccatttgtcaaggaattatcggaagccctgaccaggcatggagtatctcacaaagtagacgattcctctgggtcaatcggaaggcgctatgccaggactgatgagattggcgtggcttttggtgtcaccattgactttgacacagtgaacaagaccccccacactgcaactctgagggaccgtgactcaatgcggcagataagagcagagatctctgagctgcccagcatagtccaagacctagccaatggcaacatcacatgggctgatgtggaggccaggtatcctctgtttgaagggcaagagactggtaaaaaagagacaatcgaggaatgaggacaattttgacaacttttgaccacttgcgctaataaaaaaaaaaaaactactcttatgtccactttacaaaagaaaacagcattgtgattactcccagggaccgtattttatcttcagtggctgcctgattttacccccacaattaaagttgaaggaatcctga

SEQ ID NO: 700 - protein, 685 aa, Homo sapiens
MDGAGAEEVLAPLRLAVRQQGDLVRKLKEDKAPQVDVDKAVAELKARKRVLEAKELALQPKDDIVDRAKMEDTLKRRFFYDQAFAIYGGVSGLYDFGPVGCALKNNIIQTWRQHFIQEEQILEIDCTMLTPEPVLKTSGHVDKFADFMVKDVKNGECFRADHLLKAHLQKLMSDKKCSVEKKSEMESVLAQLDNYGQQELADLFVNYNVKSPITGNDLSPPVSFNLMFKTFIGPGGNMPGYLRPETAQGIFLNFKRLLEFNQGKLPFAAAQIGNSFRNEISPRSGLIRVREFTMAEIEHFVDPSEKDHPKFQNVADLHLYLYSAKAQVSGQSARKMRLGDAVEQGVINNTVLGYFIGRIYLYLTKVGISPDKLRFRQHMENEMAHYACDCWDAESKTSYGWIEIVGCADRSCYDLSCHARATKVPLVAEKPLKEPKTVNVVQFEPSKGAIGKAYKKDAKLVMEYLAICDECYITEMEMLLNEKGEFTIETEGKTFQLTKDMINVKRFQKTLYVEEVVPNVIEPSFGLGRIMYTVFEHTFHVREGDEQRTFFSFPAVVAPFKCSVLPLSQNQEFMPFVKELSEALTRHGVSHKVDDSSGSIGRRYARTDEIGVAFGVTIDFDTVNKTPHTATLRDRDSMRQIRAEISELPSIVQDLANGNITWADVEARYPLFEGQETGKKETIEE

SEQ ID NO: 701 - DNA, 3015 bp, Homo sapiens
cccttatggcgattgggcggctgcagagaccaggactcagttcccctgccctagtctgagcctagtgggtgggactcagctcagagtcagttttccagaagcaggtttcagtgcagagttttcctacacttttcctgcgctagagcagcgagcagcctggaacagacccaggcggaggacacctgtgggggagggagcgcctggaggagcttagagaccccagccgggcgtgatctcaccatgtgcggatttgcgaggcgcgccctggagctgctagagatccggaagcacagccccgaggtgtgcgaagccaccaagactgcggctcttggagaaagcgtgagcagggggccaccgcggtctccgcgcctgtctgcaccctgtcgcctgagctgcctgacagtgacaatgacatcccagttaccagtgtccttgaattgatagtggcttctgtttgtcagtctcatataagaactacagctcatcaggaggagatcgcagcagggtaagagacaccaacaccatgttctgcacgaagctcaaggatctcaagatcacaggagagtgtcctttctccttactggcaccaggtcaagttcctaacgagtcttcagaggaggcagcaggaagctcagagagctgcaaagcaaccgtgcccatctgtcaagacattcctgagaagaacatacaagaaagtcttcctcaaagaaaaaccagtcggagccgagtctatcttcacactttggcagagagtatttgcaaactgattttcccagagtttgaacggctgaatgttgcacttcagagaacattggcaaagcacaaaataaaagaaagcaggaaatctttggaaagagaagactttgaaaaaacaattgcagagcaagcagttgcagcaggagttccagtggaggttatcaaagaatctcttggtgaagaggtttttaaaatatgttacgaggaagatgaaaacatccttggggtggttggaggcacccttaaagattttttaaacagcttcagtacccttctgaaacagagcagccattgccaagaagcaggaaaaaggggcaggcttgaggacgcctccattctatgcctggataaggaggatgattttctacatgtttactacttcttccctaagagaaccacctccctgattcttcccggcatcataaaggcagctgctcacgtattatatgaaacggaagtggaagtgtcgttaatgcctccctgcttccataatgattgcagcgagtttgtgaatcagccctacttgttgtactccgttcacatgaaaagcaccaagccatccctgtcccccagcaaaccccagtcctcgctggtgattcccacatcgctattctgcaagacatttccattccatttcatgtttgacaaagatatgacaattctgcaatttggcaatggcatcagaaggctgatgaacaggagagactttcaaggaaagcctaattttgaagaatactttgaaattctgactccaaaaatcaaccagacgtttagcgggatcatgactatgttgaatatgcagtttgttgtacgagtgaggagatgggacaactctgtgaagaaatcttcaagggttatggacctcaaaggccaaatgatctacattgttgaatccagtgcaatcttgtttttggggtcaccctgtgtggacagattagaagattttacaggacgagggctctacctctcagacatcccaattcacaatgcactgagggatgtggtcttaataggggaacaagcccgagctcaagatggcctgaagaagaggctggggaagctgaaggctacccttgagcaagcccaccaagccctggaggaggagaagaaaaagacagtagaccttctgtgctccatatttccctgtgaggttgctcagcagctgtggcaagggcaagttgtgcaagccaagaagttcagtaatgtcaccatgctcttctcagacatcgttgggttcactgccatctgctcccagtgctcaccgctgcaggtcatcaccatgctcaatgcactgtacactcgcttcgaccagcagtgtggagagctggatgtctacaaggtggagaccattggcgatgcctattgtgtagctgggggattacacaaagagagtgatactcatgctgttcagatagcgctgatggccctgaagatgatggagctctctgatgaagttatgtctccccatggagaacctatcaagatgcgaattggactgcactctggatcagtttttgctggcgtcgttggagttaaaatgccccgttactgtctttttggaaacaatgtcactctggctaacaaatttgagtcctgcagtgtaccacgaaaaatcaatgtcagcccaacaacttacagattactcaaagactgtcctggtttcgtgtttacccctcgatcaagggaggaacttccaccaaacttccctagtgaaatccccggaatctgccattttctggatgcttaccaacaaggaacaaactcaaaaccatgcttccaaaagaaagatgtggaagatggcaatgccaattttttaggcaaagcatcaggaatagattagcaacctatatacctatttataagtctttggggtttgactcattgaagatgtgtagagcctctgaaagcactttagggattgtagatggctaacaagcagtattaaaatttcaggagccaagtcacaatctttctcctgtttaacatgacaaaatgtactcacttcagtacttcagctcttcaagaaaaaaaaaaaaaccttaaaaagctacttttgtgggagtatttctattatataaccagcacttactacctgtactcaaaattcagcaccttgtacatatatcagataattgtagtcaattgtacaaactgatggagtcacctgcaatctcatatcctggtggaatgccatggttattaaagtgtgtttgtgatagtgtcgtcaaaaaaaaaaaaaaaaaaaaaaaaaaaaaaaaa

SEQ ID NO: 702 - protein, 690 aa, Homo sapiens
MFCTKLKDLKITGECPFSLLAPGQVPNESSEEAAGSSESCKATVPICQDIPEKNIQESLPQRKTSRSRVYLHTLAESICKLIFPEFERLNVALQRTLAKHKIKESRKSLEREDFEKTIAEQAVAAGVPVEVIKESLGEEVFKICYEEDENILGVVGGTLKDFLNSFSTLLKQSSHCQEAGKRGRLEDASILCLDKEDDFLHVYYFFPKRTTSLILPGIIKAAAHVLYETEVEVSLMPPCFHNDCSEFVNQPYLLYSVHMKSTKPSLSPSKPQSSLVIPTSLFCKTFPFHFMFDKDMTILQFGNGIRRLMNRRDFQGKPNFEEYFEILTPKINQTFSGIMTMLNMQFVVRVRRWDNSVKKSSRVMDLKGQMIYIVESSAILFLGSPCVDRLEDFTGRGLYLSDIPIHNALRDVVLIGEQARAQDGLKKRLGKLKATLEQAHQALEEEKKKTVDLLCSIFPCEVAQQLWQGQVVQAKKFSNVTMLFSDIVGFTAICSQCSPLQVITMLNALYTRFDQQCGELDVYKVETIGDAYCVAGGLHKESDTHAVQIALMALKMMELSDEVMSPHGEPIKMRIGLHSGSVFAGVVGVKMPRYCLFGNNVTLANKFESCSVPRKINVSPTTYRLLKDCPGFVFTPRSREELPPNFPSEIPGICHFLDAYQQGTNSKPCFQKKDVEDGNANFLGKASGID

SEQ ID NO: 703 - DNA, 471 bp, Homo sapiens
tgccaccgtcttctgtctctacctccctcctggctggccaatggctctgtgttcctgggcctgctgctggctgtccagagtaggggttgcttagagctgtgtgcatccctgcgggtggtgtgggagtgggcggttgtctaaaggcaggtcccctctactgataaacaaggaccggagatagacctagaggctgacattcttggctcccccagcctacaccccccccacctcgatttcccacagagccctagggacgggtagccagctctgtggcatggtatctggaggcaggccagcaacctgatgtgcatgccacggcccgtccctctccccactcagagctgcagtagcctggaggttcagagagccgggctactctgagaagaagacaccaagtggattctgcttcccctgggacagcactgagcgagtgtggagagaggtacagccctcggcctacaagctctttag

SEQ ID NO: 704 - DNA, 2156 bp, Homo sapiens
ggaggccagtgcgcggccgcggtgctctaccggcgtgtcgctccgccccagggagagccggcgctaccatggaggagtaccatcgccactgcgacgaggttggcttcaatgctgaggaagcccacaatattgtcaaagagtgtgtagatggggttttaggtggtgaagattataatcacaacaacatcaaccagtggactgcaagcatagtggaacaatccttaacacacctggttaagttgggaaaagcctataaatatattgtgacctgtgcagtggtccagaagagcgcatatggctttcacacagccagctcctgtttttgggataccacatctgatggaacctgtaccgtaagatgggagaaccggaccatgaactgtattgtcaacgtttttgccattgctattgttctttaactgactaaaaatgttgggctaaagccattaacttaagaatttgtcagtgtatcctttccaaaaagagtaatagttgtttactagtgtgctagatgaaaagcgtgcaatatgctttaaagctatcaacaaaaactgaatattataagcaagcaatatcatagtaattggcagattagctcatattctatacagcatcgtttaaataggaaaaatttaatgctagcaaaaaataaatttagaatatggcatgacatgaaaatacaatcttatatttacaccagcttttcactaatattttgtacctaaggtgatggggaactccattcagataataaaattctctttcagctagagaagttaacaggaataaatatatgaacaaaaaagctgcaaggataaatgtggagaaaatgatgagaattagctaacatttttaagtttttttaaactttcttcccctcagttgtacttaatatttagtggaaagtaataatttttttattttctatcaactaatagtatagtaacaactatgattaacttgtttactttttctgaggattagtaaatcaattttttttaatttcaaattttggatttacacttgagggtaaattaaatctggtaaactgaatttcctagttaaataaaattagttgcagtatatgatgaacagtgtatgactcaaacagctgccttacaattcactcattccatgtggaacaaacatttatcagatgcctattatgggcatatgtctctgctaagcaccatagttgtcaatgtgctgtgcaaatgctaagttccttttagcaattgttcagttggaagacgtattaatatttggggaaggaaaagaaagtagttgttttacaagggaggaaaaaagtgaatctggttacacatatggaagtaagcaaaatgaaaagcacttattgctttctgacagaattatagatgtaattttaagagttgctcctagcaagttaaaagtgcatataaaatatgcaactcttagttaaaggccttattatcagtcttacctatacaagtagtaaattttgtcattgctttagttacaaccatctgtaaataacttaaaagacttattatgtggggttcaaattgagtggaataaagtatagattaaaagtatacaatccttagcacgttatctcagggcttatgaaatgtaattaaatttattaagaaaatagatgaaaaattagggtacacagctggccaccaaatgcgaagtcaatctgctacttaaccctgaaaacaaaatcagttttgcatattaccactaacactaatacatatagagagcggaaccataactcattgaattttggagaggaataagcttagcgttaatattgacaatattaaggcaatattcttgtaggaatactatgtgcatgtttgatattttgccaaataacaataattaataattgttcaatgtttaagaataatattaacaaaataaaggagtttaatgcagtgatctttgtttttggcacatcaaaaattctcagtcattattcatgtttcttttatgctgctggcttttgtgccctggaagatcataatagtgaccaaaatatacatgcagacttgttttttattattgttgtttaagcataatttaagaaaaaaaatttttacctggtgaacttgctatctgctctgtttctagttaaaatataataaatattatcttcctgtgctgta

SEQ ID NO: 705 - protein, 116 aa, Homo sapiens
MEEYHRHCDEVGFNAEEAHNIVKECVDGVLGGEDYNHNNINQWTASIVEQSLTHLVKLGKAYKYIVTCAVVQKSAYGFHTASSCFWDTTSDGTCTVRWENRTMNCIVNVFAIAIVL

SEQ ID NO: 706 - DNA, 4371 bp, Homo sapiens
gggttcagtagtttgggaagggagctgggggaggcagtggcggctggagtaggtaggcgagtaaaaggaggaggaagggctggggagaagagcgaggctgtagcggctgcctgttgagggaggaagaggtggggggtgtggaggagggggaggagagagagatgacatggggagaggaggaggggggttggacgtgggaggaggaggagagggctcgagggaccgtctgtcgcgggacgggctggccagctggggcgcggagcctggaggaggaggcagcggcagcggcagcagcagccctccgagcagcagcagctgcagcagcagaaacaagtaccagccacaaagcggctcctctggcccaagcagccacagtccccccgccgcgatggcgctgcaaagccaggcgagcgaggaagcaaaggggccctggcaggaggcagaccaggaacagcaggagccggtgggtagcccagagccggagtctgagccggagcctgagcccgagcccgagcccgtgccagtgcccccgcccgagccccagccggagccccagcccctaccggaccccgcacccctgccggagctggagttcgagtccgagcgggtgcacgaacccgagcccacgcctacggtagagacccgcggcaccgcgcgcggcttccagcctcccgaaggtggcttcggctgggtggtggtgttcgctgccacctggtgcaacggctccatcttcggcatccataactctgtcgggatcctctactccatgctgctagaggaggaaaaggaaaaaaatcgccaagtggagttccaagcagcatgggtcggagccctcgcgatgggtatgatcttcttctgttctcccattgtgagtatattcactgaccgtttgggctgccgaatcacagcaaccgcgggggctgccgttgctttcattggcctccataccagctccttcaccagctccctaagcctgcgctacttcacctacgggattctctttggttgtggctgttccttcgcctttcagccatccctcgtcatcctgggccactactttcaacgccgcctgggtctggccaatggtgtggtgtctgctgggagtagcattttctccatgtccttccccttcctcatcagaatgctgggggataagatcaagctggcccaaaccttccaggtgctgagtaccttcatgtttgttcttatgctgctttcactcacctaccggcccctcctgcccagctcccaggacaccccaagcaagagaggtgtccgcaccctgcaccagcgctttctggctcagctcaggaagtacttcaacatgcgagtgttccgccaacgcacttaccgcatctgggccttcggaattgctgctgctgcccttggctactttgttccctatgtacacctgatgaagtatgtggaggaggagttctcagaaatcaaggagacctgggtgctcttggtgtgtattggggctacctcaggccttgggcgtcttgtgtcaggccacatcagtgactccatccctggacttaagaagatctacttgcaggtcctttccttcctgctcctgggcctgatgtccatgatgattcccctgtgccgggacttcgggggccttatcgtcgtctgtcttttcctgggcctttgcgatggcttcttcatcaccatcatggcccccattgcatttgagctggtgggcccaatgcaggcctcacaggccattggctacctcctgggcatgatggccctgccaatgattgctgggccccccattgcaggcctactccgcaactgttttggggactaccatgtggccttctactttgccggtgtgccccccatcatcggggctgtaatcctcttcttcgtccctctgatgcatcaaaggatgttcaagaaagagcagagagattccagcaaggataagatgttggcccctgacccagaccccaatggggagctactgccgggctcccccaaccctgaggaaccaatctaatgcctttcttgccattgtgtgccctttcccagctcttccccttcatcccaccctgctcagcatttacatttttgccaccagcacacttgttcccagacctgcgcacacagcatttcagccacctgacaatctccttggagtcaaagctccaggtgttccaaactcattaactaaattctccccagaatgcttttaaattttccagggcctttctcctcccaggatctgggaaagcttgggaaccacccctggcctttggaacctctccatatactttctaagctctgggggaggaggaggatgggacctcctggacccagcttgttagtcacccactataatcaactgccaaaggtgctactgtgtccccaggagcctaatagggtaggcccaaatctctgtttgctgaggaggtcattgccatccatatttgggagccactgggtggaggggcagggaggcaaaatgagacaagtagccttggttagtcttagagttgctgatgactgtggcttcccaagaactgggtacaagcagtgcccttattgtatggttggttaacagtctgctcccctcttcccttccttctttttttcctctactgacttctctccatactctttcccctctatttctttgtatgactgtcatagacacatgggtgcttgaagaaaggagggacccggaacttgggccaatcagcctcaccttgtcccagtccactcctaacactagcatcagtcccactcatctcaggctgagccacatctcactttttcgctcaagctatataatcctagactggaagagtagaatatcatatagggaagaaaccttaaacaccacagtgttccatgttccagtcactgatttttacaaatcttacagtccaaggcattaacctcaaggccctcccagcaccccattcttgtatacacatggcaaaatgtgaagaaactcctttcatctcagcaggtagaggaggactgatgacacgagctgccatggcgggaggaggggcagtagttattgatatggtgagccccatctctcagttttcatgacaggtctatatttctacctgggccaggccaggaaagagactatttaagaaaaaaaaaatcagttcctagcctggatcccaaaaaggtacaggcagcagttgcacatagggttggaaaatttcttttgggaaggggaagccatcccagcctttaccacccaatgtgtctcccatgctgggcatcctaggccactttgcttagagggcattaaaggtgccatgaaaggtagactctgaaccactttgatccctctgaagtaggtgactgatgcctccttatgcccaggctctggcaacagtcttactgaagaacattcccagtgcccctggctaggggcagagggcactgccaggctgtgttcagttagcacagctcacctcattaggagctcagcctctctcctcactctgcctctttgtgtctctttttctcctctctgagcctttgtctattgtgttcctgtcacccaccctttcatcatctttttgccaggcattcctggctgtcacttggagccaacagtaacttgccaccttaaggcagggtcatccccgggccaggaggatgaggttgtcctgaggggctccaaagaagacaatagttcccactcatgattttccgttacaaacaggcagctggggcatggttggcctccaatgatttcattcaaggccaaagtcctgagccccctccgctggtcccagtccagctcttatcaactccccaaaggaaaacccactggttcttagctctgtgggtaggaaggggccctagaaagggcctagttactatcctgtcagttctaacagtagtggaacaggagaatctgggccctaggagccctgtaactcccaggagagaccactgaaaatactggagcaacaatgcccctgcttccatttctccccacctcactctcaccaagtcaccagagggtggttctgtaggacctcttttgttgcttaagatgcagatggctcttaagaatcaggcagtcgcccacttctctccagatgaagggaagacattcataggtcccaaatctgcccattcagatgtcacataatatggtgggatatcaatttacttcttccacacatgtggttgtgcacatgtgagcttgtgtgcttttggagagaatgttgattggcaaaagcagcacagtattaatatttagagtaggatgcagcctcttatgcaccacagttaaatctagaacgaacaaaatttcagagctcaagacatgggacatttaaatcctcaaggagtttggaacaaaataaacagatctaaaaattt

SEQ ID NO: 707 - protein, 613 aa, Homo sapiens
MGRGGGGLDVGGGGEGSRDRLSRDGLASWGAEPGGGGSGSGSSSPPSSSSCSSRNKYQPQSGSSGPSSHSPPAAMALQSQASEEAKGPWQEADQEQQEPVGSPEPESEPEPEPEPEPVPVPPPEPQPEPQPLPDPAPLPELEFESERVHEPEPTPTVETRGTARGFQPPEGGFGWVVVFAATWCNGSIFGIHNSVGILYSMLLEEEKEKNRQVEFQAAWVGALAMGMIFFCSPIVSIFTDRLGCRITATAGAAVAFIGLHTSSFTSSLSLRYFTYGILFGCGCSFAFQPSLVILGHYFQRRLGLANGVVSAGSSIFSMSFPFLIRMLGDKIKLAQTFQVLSTFMFVLMLLSLTYRPLLPSSQDTPSKRGVRTLHQRFLAQLRKYFNMRVFRQRTYRIWAFGIAAAALGYFVPYVHLMKYVEEEFSEIKETWVLLVCIGATSGLGRLVSGHISDSIPGLKKIYLQVLSFLLLGLMSMMIPLCRDFGGLIVVCLFLGLCDGFFITIMAPIAFELVGPMQASQAIGYLLGMMALPMIAGPPIAGLLRNCFGDYHVAFYFAGVPPIIGAVILFFVPLMHQRMFKKEQRDSSKDKMLAPDPDPNGELLPGSPNPEEPI

SEQ ID NO: 708 - DNA, 3781 bp, Homo sapiens
ctgtctgagcatttcactgcggagcctgagcgcgcctgcctgggaaaacactgcagcggtgctcggactcctcctgtccagcaggaggcgcggcccggcagctcccgcatgcgcagtgcgctcggtgtcagacggcccggatcccggttaccggcccctcgctcgctgctcgccagcccagactcggccctggcagtggcggctggcgattcggaccgatccgacctgggcggaggtggcccgcgccccgcggcatgagccggtgaccaagctcggggccgagcgggaggcagccgtggccgagccacagggatctgattcctcccagggggatgtcctgcgcctcagggtccggtggtggcctgcggcatcccttgcggtgccagaagccgtgggacgagtgtctttaatgttatagagctactcagagttgctgtttctccttgagatgcttttggagtgtgaggaagaggctgtctgtgtcattatgtgtgcgtcggtcaagtataatatccggggtcctgccctcatcccaagaatgaagaccaagcaccgaatctactatatcaccctcttctccattgtcctcctgggcctcattgccactggcatgtttcagttttggccccattctatcgagtcctcaaatgactggaatgtagagaagcgcagcatccgtgatgtgccggttgttaggctgccagccgacagtcccatcccagagcggggggatctcagttgcagaatgcacacgtgttttgatgtctatcgctgtggcttcaacccaaagaacaaaatcaaggtgtatatctatgctctgaaaaagtacgtggatgactttggcgtctctgtcagcaacaccatctcccgggagtataatgaactgctcatggccatctcagacagtgactactacactgatgacatcaaccgggcctgtctgtttgttccctccatcgatgtgcttaaccagaacacactgcgcatcaaggagacagcacaagcgatggcccagctctctaggtgggatcgaggtacgaatcacctgttgttcaacatgttgcctggaggtcccccagattataacacagccctggatgtccccagagacagggccctgttggctggtggcggcttttctacgtggacttaccggcaaggctacgatgtcagcattcctgtctatagtccactgtcagctgaggtggatcttccagagaaaggaccaggtccacggcaatacttcctcctgtcatctcaggtgggtctccatcctgagtacagagaggacctagaagccctccaggtcaaacatggagagtcagtgttagtactcgataaatgcaccaacctctcagagggtgtcctttctgtccgtaagcgctgccacaagcaccaggtcttcgattacccacaggtgctacaggaggctactttctgtgtggttcttcgtggagctcggctgggccaggcagtattgagcgatgtgttacaagctggctgtgtcccggttgtcattgcagactcctatattttgcctttctctgaagttcttgactggaagagagcatctgtggttgtaccagaagaaaagatgtcagatgtgtacagtattttgcagagcatcccccaaagacagattgaagaaatgcagagacaggcccggtggttctgggaagcgtacttccagtcaattaaagccattgccctggccaccctgcagattatcaatgaccggatctatccatatgctgccatctcctatgaagaatggaatgaccctcctgctgtgaagtggggcagcgtgagcaatccactcttcctcccgctgatcccaccacagtctcaagggttcaccgccatagtcctcacctacgaccgagtagagagcctcttccgggtcatcactgaagtgtccaaggtgcccagtctatccaaactacttgtcgtctggaataatcagaataaaaaccctccagaagattctctctggcccaaaatccgggttccattaaaagttgtgaggactgctgaaaacaagttaagtaaccgtttcttcccttatgatgaaatcgagacagaagctgttctggccattgatgatgatatcattatgctgacctctgacgagctgcaatttggttatgaggtctggcgggaatttcctgaccggttggtgggttacccgggtcgtctgcatctctgggaccatgagatgaataagtggaagtatgagtctgagtggacgaatgaagtgtccatggtgctcactggggcagctttttatcacaagtattttaattacctgtatacctacaaaatgcctggggatatcaagaactgggtagatgctcatatgaactgtgaagatattgccatgaacttcctggtggccaacgtcacgggaaaagcagttatcaaggtaaccccacgaaagaaattcaagtgtcctgagtgcacagccatagatgggctttcactagaccaaacacacatggtggagaggtcagagtgcatcaacaagtttgcttcagtcttcgggaccatgcctctcaaggtggtggaacaccgagctgaccctgtcctgtacaaagatgactttcctgagaagctgaagagcttccccaacattggcagcttatgaaacgtgtcattggtggaggtctgaatgtgaggctgggacagagggagagaacaaggcctcccagcactctgatgtcagagtagtaggttaagggtggaaggttgacctacttggatcttggcatgcacccacctaacccactttctcaagaacaagaacctagaatgaatatccaagcacctcgagctatgcaacctctgttcttgtatttcttatgatctctgatgggttcttctcgaaaatgccaagtggaagactttgtggcatgctccagatttaaatccagctgaggctccctttgttttcagttccatgtaacaatctggaaggaaacttcacggacaggaagactgctggagaagagaagcgtgttagcccatttgaggtctggggaatcatgtaaagggtacccagacctcacttttagttatttacatcaatgagttctttcagggaaccaaacccagaattcggtgcaaaagccaaacatcttggtgggatttgataaatgccttgggacctggagtgctgggcttgtgcacaggaagagcaccagccgctgagtcaggatcctgtcagttccatgagctattcctctttggtttggctttttgatatgattaaaattattttttattcctttttctactgtgtcttaaacaccaattcctgatagtccaaggaaccacctttctcccttgatatatttaactccgtctttggcctgacaacagtcttctgcccatgtctgggaacacacgccaggaggaatgtctgataccctctgcatcaagcgtaagaaggtcccaaatcataaccattttaagaacagatgactcagaaacctccagaggaatctgtttgcttcctgattagatccagtcaatgttttaaaggtattgtcagagaaaaacagagggtctgtactagccatgcaaggagtcgctctagctggtacccgtaaaagttgtgggattgtgaccccccatcccaaggggatgccaaaatttctctcattcttttggtataaacttaacattagccagggaggttctggctaacgttaaatgctgctatacaactgctttgcaacagttgctggtatatttaaatcattaaatttcagcatttactaat

SEQ ID NO: 709 - protein, 718 aa, Homo sapiens
MCASVKYNIRGPALIPRMKTKHRIYYITLFSIVLLGLIATGMFQFWPHSIESSNDWNVEKRSIRDVPVVRLPADSPIPERGDLSCRMHTCFDVYRCGFNPKNKIKVYIYALKKYVDDFGVSVSNTISREYNELLMAISDSDYYTDDINRACLFVPSIDVLNQNTLRIKETAQAMAQLSRWDRGTNHLLFNMLPGGPPDYNTALDVPRDRALLAGGGFSTWTYRQGYDVSIPVYSPLSAEVDLPEKGPGPRQYFLLSSQVGLHPEYREDLEALQVKHGESVLVLDKCTNLSEGVLSVRKRCHKHQVFDYPQVLQEATFCVVLRGARLGQAVLSDVLQAGCVPVVIADSYILPFSEVLDWKRASVVVPEEKMSDVYSILQSIPQRQIEEMQRQARWFWEAYFQSIKAIALATLQIINDRIYPYAAISYEEWNDPPAVKWGSVSNPLFLPLIPPQSQGFTAIVLTYDRVESLFRVITEVSKVPSLSKLLVVWNNQNKNPPEDSLWPKIRVPLKVVRTAENKLSNRFFPYDEIETEAVLAIDDDIIMLTSDELQFGYEVWREFPDRLVGYPGRLHLWDHEMNKWKYESEWTNEVSMVLTGAAFYHKYFNYLYTYKMPGDIKNWVDAHMNCEDIAMNFLVANVTGKAVIKVTPRKKFKCPECTAIDGLSLDQTHMVERSECINKFASVFGTMPLKVVEHRADPVLYKDDFPEKLKSFPNIGSL

SEQ ID NO: 710 - DNA, 1914 bp, Homo sapiens
tgagaagggcaaatgctatcattggaaaaactgacaaaagtcccaataggaaaaataaggaagtggagagttactatgtttctaatttttcatgtgcttctatttttttcctacttcagagccattgactaatagttgagtataacacaggttgtgtttccgggctgctgaaacatgacactaatattttcaaagaactgtggaagcctaaaaggaagccaatgagaaataactaaatgagagtttaggactgcagccttcattttcattcaaagatttaaaagtttccataaagtaaaatgttcttctccggccacctgttttcatagttctgtgttttccttcaggcctttctggcttcctatatggcagtaagaaaatgatgtgcttaatgattacaaatttcatatggaatacgaactttcagtttgtacatatgatgcacagagatgcttttgtggttttattggttttcatattacaaacaaagaaactagaaaatgaaaccattccaaaagtggaagtaatttctcactgcccctgtgataaactgtggtcactggctgtggcagcaactattataagatgctctgaaactcttcagacactgagggggcaccagaggagcagactacaagaatggcacacgctatggaaaactcctggacaatcagtaaagagtaccatattgatgaagaagtgggctttgctctgccaaatccacaggaaaatctacctgatttttataatgactggatgttcattgctaaacatctgcctgatctcatagagtctggccagcttcgagaaagagttgagaagttaaacatgctcagcattgatcatctcacagaccacaagtcacagcgccttgcacgtctagttctgggatgcatcaccatggcatatgtgtggggcaaaggtcatggagatgtccgtaaggtcttgccaagaaatattgctgttccttactgccaactctccaagaaactggaactgcctcctattttggtttatgcagactgtgtcttggcaaactggaagaaaaaggatcctaataagcccctgacttatgagaacatggacgttttgttctcatttcgtgatggagactgcagtaaaggattcttcctggtctctctattggtggaaatagcagctgcttctgcaatcaaagtaattcctactgtattcaaggcaatgcaaatgcaagaacgggacactttgctaaaggcgctgttggaaatagcttcttgcttggagaaagcccttcaagtgtttcaccaaatccacgatcatgtgaacccaaaagcatttttcagtgttcttcgcatatatttgtctggctggaaaggcaacccccagctatcagacggtctggtgtatgaagggttctgggaagacccaaaggagtttgcagggggcagtgcaggccaaagcagcgtctttcagtgctttgacgtcctgctgggcatccagcagactgctggtggaggacatgctgctcagttcctccaggacatgagaagatatatgccaccagctcacaggaacttcctgtgctcattagagtcaaatccctcagtccgtgagtttgtcctttcaaaaggtgatgctggcctgcgggaagcttatgacgcctgtgtgaaagctctggtctccctgaggagctaccatctgcaaatcgtgactaagtacatcctgattcctgcaagccagcagccaaaggagaataagacctctgaagacccttcaaaactggaagccaaaggaactggaggcactgatttaatgaatttcctgaagactgtgagaagtacaactgagaaatcccttttgaaggaaggttaatgtaacccaacaagagcacattttatcatagcagagacatctgtatgcattcctgtcattacc

SEQ ID NO: 711 - protein, 403 aa, Homo sapiens [sequence omitted]

SEQ ID NO: 712 - DNA, 407 bp, Homo sapiens
tttttctgtctcaggactttcagggaaaacaatgttttcttaccaatgggcattttcaaagactctaagttggtatgtcagtcagtgtacagacaacgtgatccgcaaggcacgggcaccaccctgccgtgaaccacatctcagccaatcttccgcaaagaaatgtacccaaaaacttttctgtaaattcaggaaggtgatccacaccttccacattttgttttgaaacaatgatggtattttaaaagttcttcaaattaacaaaagtgatatcagaaatataaacatttctaaaacagagcgggctgtgaggagtgattttgccaaacttaagtcagtagcacttgacttatatctgcttttagtctgcggtggcaccacgcttaccaaggcacagtatccccttg

SEQ ID NO: 713 - DNA, 375 bp, Homo sapiens
ggtaccaggagggggcctggctgcccagggcgccccccgggcccggcgccccgcaggccgaggccatggcccgcgcagggctcagcaccgcccgcccccgccgccccgcgccatccgccccgagacgctcagggctgaggctggggccgggcccggggcccgggcttgaggatccgtgggccggacagagccggggatcgggactcagcactccgccgcgcaggccgcctcgttcaccgcgcagccgccgctgcctgcagcgccggcctcaacccgccccgcgcctcggtcccggagccgctggcccactgggtgacctcgggcaagtcgcggcgcggggttgagcgtcggcttcccgctctggaaaatggggat

SEQ ID NO: 714 - DNA, 444 bp, Homo sapiens
  misc_feature (378)..(378): n is a, c, g, or t
  misc_feature (440)..(440): n is a, c, g, or t
aaggtgcaccgtttcatagacgcaaccttaacttactatttagatgagatctttctaaagaaaaaaaaaagagatgatatattttttgtaaacaatatttctatcacaggcatccataaactgaaatgactacagttgtgcaaacaggtgtcacagtgaagttgagcatttggagaaaaaaataaaaagcaaaatttgcaggaagaactgctaaattaatactttatcccaaaatgccacgtatgcctcaccctctctgttctatccaaaaccaaggaccagagtgctccaatggtaggccccagttgtctcgatgtaggtagaggcaccaccctccccgaggttgcgtgtggtgtgggactatccccatgaggctgnccactacttgatttttctttgggtgggccgtaacagcctttgatttgtggggctctgccacngttt

SEQ ID NO: 715 - DNA, 596 bp, Homo sapiens
ggcacgagggtcccccggaagtggagcccgggacttccactcgtgcgtgaggcgagaggagccggagacgagaccagaggccgaactcgggttctgacaagatggccgggctgccccgcaggatcatcaaggaaacccagcgtttgctggcagaaccagttcctggcatcaaagccgaaccagatgagagcaacgcccgttattttcatgtggtcattgctggccctcaggattccccctttgagggagggacttttaaacttgaactattccttccagaagaatacccaatggcagcccctaaagtacgtttcatgaccaaaatttatcatcctaatgtagacaagttgggaagaatatgtttagatattttgaaagataagtggtccccagcactgcagatccgcacagttctgctatcgatccaggccttgttaagtgctcccaatccagatgatccattagcaaatgatgtagcggagcagtggaagaccaacgaagcccaagccatagaaacagctagagcatggactaggctatatgccatgaataatatttaaaattgatacgatcatcaagtgtgcatcacttctcct

SEQ ID NO: 716 - DNA, 2500 bp, Homo sapiens
cggggggatcttggctgtgtgtctgcggatctgtagtggcggcggcggcggcggcggcggggaggcagcaggcgcgggagcgggcgcaggagcaggcggcggcggtggcggcggcggttagacatgaacgccgcctcggcgccggcggtgcacggagagccccttctcgcgcgcgggcggtttgtgtgattttgctaaaatgcatcaccaacagcgaatggctgccttagggacggacaaagagctgagtgatttactggatttcagtgcgatgttttcacctcctgtgagcagtgggaaaaatggaccaacttctttggcaagtggacattttactggctcaaatgtagaagacagaagtagctcagggtcctgggggaatggaggacatccaagcccgtccaggaactatggagatgggactccctatgaccacatgaccagcagggaccttgggtcacatgacaatctctctccaccttttgtcaattccagaatacaaagtaaaacagaaaggggctcatactcatcttatgggagagaatcaaacttacagggttgccaccagcagagtctccttggaggtgacatggatatgggcaacccaggaaccctttcgcccaccaaacctggttcccagtactatcagtattctagcaataatccccgaaggaggcctcttcacagtagtgccatggaggtacagacaaagaaagttcgaaaagttcctccaggtttgccatcttcagtctatgctccatcagcaagcactgccgactacaatagggactcgccaggctatccttcctccaaaccagcaaccagcactttccctagctccttcttcatgcaagatggccatcacagcagtgacccttggagctcctccagtgggatgaatcagcctggctatgcaggaatgttgggcaactcttctcatattccacagtccagcagctactgtagcctgcatccacatgaacgtttgagctatccatcacactcctcagcagacatcaattccagtcttcctccgatgtccactttccatcgtagtggtacaaaccattacagcacctcttcctgtacgcctcctgccaacgggacagacagtataatggcaaatagaggaagcggggcagccggcagctcccagactggagatgctctggggaaagcacttgcttcgatctattctccagatcacactaacaacagcttttcatcaaacccttcaactcctgttggctctcctccatctctctcagcaggcacagctgtttggtctagaaatggaggacaggcctcatcgtctcctaattatgaaggacccttacactctttgcaaagccgaattgaagatcgtttagaaagactggatgatgctattcatgttctccggaaccatgcagtgggcccatccacagctatgcctggtggtcatggggacatgcatggaatcattggaccttctcataatggagccatgggtggtctgggctcagggtatggaaccggccttctttcagccaacagacattcactcatggtggggacccatcgtgaagatggcgtggccctgagaggcagccattctcttctgccaaaccaggttccggttccacagcttcctgtccagtctgcgacttcccctgacctgaacccaccccaggacccttacagaggcatgccaccaggactacaggggcagagtgtctcctctggcagctctgagatcaaatccgatgacgagggtgatgagaacctgcaagacacgaaatcttcggaggacaagaaattagatgacgacaagaaggatatcaaatcaattactagcaataatgacgatgaggacctgacaccagagcagaaggcagagcgtgagaaggagcggaggatggccaacaatgcccgagagcgtctgcgggtccgtgacatcaacgaggctttcaaagagctcggccgcatggtgcagctccacctcaagagtgacaagccccagaccaagctcctgatcctccaccaggcggtggccgtcatcctcagtctggagcagcaagtccgagaaaggaatctgaatccgaaagctgcgtgtctgaaaagaagggaggaagagaaggtgtcctcggagcctccccctctctccttggccggcccacaccctggaatgggagacgcatcgaatcacatgggacagatgtaaaagggtccaagttgccacattgcttcattaaaacaagagaccacttccttaacagctgtattatcttaaacccacataaacacttctccttaacccccatttttgtaatataagacaagtctgagtagttatgaatcgcagacgcaagaggtttcagcattcccaattatcaaaaaacagaaaaacaaaaaaaagaaagaaaaaagtgcaacttgagggacgactttctttaacatatcattcagaatgtgcaaagcagtatgtacaggctgagacacagcccagagactgaacggc

SEQ ID NO: 717 - protein, 667 aa, Homo sapiens
MHHQQRMAALGTDKELSDLLDFSAMFSPPVSSGKNGPTSLASGHFTGSNVEDRSSSGSWGNGGHPSPSRNYGDGTPYDHMTSRDLGSHDNLSPPFVNSRIQSKTERGSYSSYGRESNLQGCHQQSLLGGDMDMGNPGTLSPTKPGSQYYQYSSNNPRRRPLHSSAMEVQTKKVRKVPPGLPSSVYAPSASTADYNRDSPGYPSSKPATSTFPSSFFMQDGHHSSDPWSSSSGMNQPGYAGMLGNSSHIPQSSSYCSLHPHERLSYPSHSSADINSSLPPMSTFHRSGTNHYSTSSCTPPANGTDSIMANRGSGAAGSSQTGDALGKALASIYSPDHTNNSFSSNPSTPVGSPPSLSAGTAVWSRNGGQASSSPNYEGPLHSLQSRIEDRLERLDDAIHVLRNHAVGPSTAMPGGHGDMHGIIGPSHNGAMGGLGSGYGTGLLSANRHSLMVGTHREDGVALRGSHSLLPNQVPVPQLPVQSATSPDLNPPQDPYRGMPPGLQGQSVSSGSSEIKSDDEGDENLQDTKSSEDKKLDDDKKDIKSITSNNDDEDLTPEQKAEREKERRMANNARERLRVRDINEAFKELGRMVQLHLKSDKPQTKLLILHQAVAVILSLEQQVRERNLNPKAACLKRREEEKVSSEPPPLSLAGPHPGMGDASNHMGQM

SEQ ID NO: 718 - DNA, 476 bp, Homo sapiens
  misc_feature (25)..(25): n is a, c, g, or t
ccacctcccaggttcatgccattcncttgtctcagcctcccgagtagctgggactacaggcacctgccagtacgcctggctaattttttttgtatttttagtagagatggggtttcaccatgttagccaggatggtcttgatctcctgacctcgtgatctgcctgcctcggcctcccaaagtgctgggattacaggcatgagccaccatgcctggcatcattattgatttatgtcattgttatccctctaccgcagagaccttctttcactttccatttccctgggagttcacgtgaagtagtgaatgggtcaaaatcttaacagtggttgttgatcaagtccctcctttcttatccttggcactgaataaatctttggttttccataatcaaagggtgagggagacttcttttgtctacattattcagctttctgtaagctatgctgtggccattttgagaaaaaagcccccagg

SEQ ID NO: 719 - DNA, 2443 bp, Homo sapiens
aaatggcgtgcccgtctctccgccggccccctgcctcgcagtggtttctcctgcagctcccctgggctccgcggccagtagtgcagcccgtggagccgcggctttgcccgtctcctctgggtggccccagtgcgcgggctgacactcattcagccggggaaggtgaggcgagtagaggctggtgcggaacttgccgcccccagcagcgccggcgggctaagcccagggccgggcagacaaaagaggccgcccgcgtaggaaggcacggccggcggcggcggagcgcagcgatggccgggcgagggggcagcgcgctgctggctctgtgcggggcactggctgcctgcgggtggctcctgggcgccgaagcccaggagcccggggcgcccgcggcgggcatgaggcggcgccggcggctgcagcaagaggacggcatctccttcgagtaccaccgctaccccgagctgcgcgaggcgctcgtgtccgtgtggctgcagtgcaccgccatcagcaggatttacacggtggggcgcagcttcgagggccgggagctcctggtcatcgagctgtccgacaaccctggcgtccatgagcctggtgagcctgaatttaaatacattgggaatatgcatgggaatgaggctgttggacgagaactgctcattttcttggcccagtacctatgcaacgaataccagaaggggaacgagacaattgtcaacctgatccacagtacccgcattcacatcatgccttccctgaacccagatggctttgagaaggcagcgtctcagcctggtgaactcaaggactggtttgtgggtcgaagcaatgcccagggaatagatctgaaccggaactttccagacctggataggatagtgtacgtgaatgagaaagaaggtggtccaaataatcatctgttgaaaaatatgaagaaaattgtggatcaaaacacaaagcttgctcctgagaccaaggctgtcattcattggattatggatattccttttgtgctttctgccaatctccatggaggagaccttgtggccaattatccatatgatgagacgcggagtggtagtgctcacgaatacagctcctccccagatgacgccattttccaaagcttggcccgggcatactcttctttcaacccggccatgtctgaccccaatcggccaccatgtcgcaagaatgatgatgacagcagctttgtagatggaaccaccaacggtggtgcttggtacagcgtacctggagggatgcaagacttcaattaccttagcagcaactgttttgagatcaccgtggagcttagctgtgagaagttcccacctgaagagactctgaagacctactgggaggataacaaaaactccctcattagctaccttgagcagatacaccgaggagttaaaggatttgtccgagaccttcaaggtaacccaattgcgaatgccaccatctccgtggaaggaatagaccacgatgttacatccgcaaaggatggtgattactggagattgcttatacctggaaactataaacttacagcctcagctccaggctatctggcaataacaaagaaagtggcagttccttacagccctgctgctggggttgattttgaactggagtcattttctgaaaggaaagaagaggagaaggaagaattgatggaatggtggaaaatgatgtcagaaactttaaatttttaaaaaggcttctagttagctgctttaaatctatctatataatgtagtatgatgtaatgtggtcttttttttagattttgtgcagttaatacttaacattgatttattttttaatcatttaaatattaatcaactttccttaaaataaatagcctcttaggtaaaaatataagaacttgatatatttcattctcttatatagtattcattttcctacctatattacacaaaaaagtatagaaaagatttaagtaattttgccatcctaggcttaaatgcaatattcctggtattatttacaatgcagaattttttgagtaattctagctttcaaaaattagtgaagttcttttactgtaattggtgacaatgtcacataatgaatgctattgaaaaggttaacagatacagctcggagttgtgagcactctactgcaagacttaaatagttcagtataaattgtcgtttttttcttgtgctgactaactataagcatgatcttgttaatgcatttttgatgggaagaaaaggtacatgtttacaaagaggttttatgaaaagaataaaaattgacttcttgcttgtacatataggagcaatactattatattatgtagtccgttaacactacttaaaagtttagggttttctcttggttgtagagtggcccagaattgcattctgaatgaataaaggttaaaaaaaaatccccagtgaaaaaaaa

SEQ ID NO: 720 - protein, 476 aa, Homo sapiens
MAGRGGSALLALCGALAACGWLLGAEAQEPGAPAAGMRRRRRLQQEDGISFEYHRYPELREALVSVWLQCTAISRIYTVGRSFEGRELLVIELSDNPGVHEPGEPEFKYIGNMHGNEAVGRELLIFLAQYLCNEYQKGNETIVNLIHSTRIHIMPSLNPDGFEKAASQPGELKDWFVGRSNAQGIDLNRNFPDLDRIVYVNEKEGGPNNHLLKNMKKIVDQNTKLAPETKAVIHWIMDIPFVLSANLHGGDLVANYPYDETRSGSAHEYSSSPDDAIFQSLARAYSSFNPAMSDPNRPPCRKNDDDSSFVDGTTNGGAWYSVPGGMQDFNYLSSNCFEITVELSCEKFPPEETLKTYWEDNKNSLISYLEQIHRGVKGFVRDLQGNPIANATISVEGIDHDVTSAKDGDYWRLLIPGNYKLTASAPGYLAITKKVAVPYSPAAGVDFELESFSERKEEEKEELMEWWKMMSETLNF

SEQ ID NO: 721 - DNA, 1783 bp, Homo sapiens
ggagggagcgaggccggggagtccgctccagcggggcgctccagtccctcagacgtgggctgagcttgggacgagctgcgttccgccccaggccactgtagggaacggcggtggcgcctccccagcaaaccggaccgactgggtccagccgccgcagggaatgacaccggtgctcctacagccacggctccgggcggggaaggcgagccccacagccggccctgcgacgcccgcctgggcagcaccgataaggagctgaaggcaggagccgccgccacgggcagcgcccccacagcgccagggaccccctggcagcgggagccgcgggtcgaggttatggatccagcgggcggcccccggggcgtgctcccgcggccctgccgcgtgctggtgctgctgaacccgcgcggcggcaagggcaaggccttgcagctcttccggagtcacgtgcagccccttttggctgaggctgaaatctccttcacgctgatgctcactgagcggcggaaccacgcgcgggagctggtgcggtcggaggagctgggccgctgggacgctctggtggtcatgtctggagacgggctgatgcacgaggtggtgaacgggctcatggagcggcctgactgggagaccgccatccagaagcccctgtgtagcctcccagcaggctctggcaacgcgctggcagcttccttgaaccattatgctggctatgagcaggtcaccaatgaagacctcctgaccaactgcacgctattgctgtgccgccggctgctgtcacccatgaacctgctgtctctgcacacggcttcggggctgcgcctcttctctgtgctcagcctggcctggggcttcattgctgatgtggacctagagagtgagaagtatcggcgtctgggggagatgcgcttcactctgggcaccttcctgcgtctggcagccctgcgcacctaccgcggccgactggcctacctccctgtaggaagagtgggttccaagacacctgcctcccccgttgtggtccagcagggcccggtagatgcacaccttgtgccactggaggagccagtgccctctcactggacaatggtgcccgacgaggactttgtgctaatcctggcactgctgcactcgcacctgggcagtgagatgtttgctgcacccatgggccgctgtgcagctggcgtcatgcatctgttctacgtgcgggcgggagtgtctcgtgccatgctgctgcgcttcttcctggccatggagaagggcaggcatatggagtatgaatgcccctacttggtatatgtgcccgtggtcgccttccgcttggagcccaaggatgggaaaggtgtgtttgcagtggatggggaattgatggttagcgaggccgtgcagggccaggtgcacccaaactacttctggatggtcagtggttgcgtggagcccccgcccagctggaagccccagcagatgccaccgccagaagagcccttatgacccctgggccacgctgtgccttagtgtctacttgcaggacccttcctccttccctagggctgcagggcctgtccacagttcctgtgggggtggaggagactcctctggagaagggtgagaaggtggaggttatgctttggggggacaggccagaatgaagtcctgggtcaggagcccagctggctgggcccagctgcctatgtaaggccttctagtttgttctgagacccccaccccacgaaccaaatccaaataaagtgacattcccagcctgaaaaaaaaaaaaaaaaaa

SEQ ID NO: 722 - protein, 384 aa, Homo sapiens
MDPAGGPRGVLPRPCRVLVLLNPRGGKGKALQLFRSHVQPLLAEAEISFTLMLTERRNHARELVRSEELGRWDALVVMSGDGLMHEVVNGLMERPDWETAIQKPLCSLPAGSGNALAASLNHYAGYEQVTNEDLLTNCTLLLCRRLLSPMNLLSLHTASGLRLFSVLSLAWGFIADVDLESEKYRRLGEMRFTLGTFLRLAALRTYRGRLAYLPVGRVGSKTPASPVVVQQGPVDAHLVPLEEPVPSHWTMVPDEDFVLILALLHSHLGSEMFAAPMGRCAAGVMHLFYVRAGVSRAMLLRFFLAMEKGRHMEYECPYLVYVPVVAFRLEPKDGKGVFAVDGELMVSEAVQGQVHPNYFWMVSGCVEPPPSWKPQQMPPPEEPL

SEQ ID NO: 723 - DNA, 614 bp, Homo sapiens
ctgtgtccatttgaaggctaaagaaactgcagctcagaccagttcagcaactctcctacatcgtgtggctaaagctaagaattgtgacccatttttctgaatccaggtccccgcgatgccctgggttcagaccctaacaccctcccgtccctgagtgctggggatttaaggcagcagtgcctcctttcaggaaatcacacacacactggaaactcctgcatacttctcttactataatctgtcaccaaagactggatattcctgtgctggggctcgtgccagcgcctcgggctgccaggtgctgctttccaactcccacatgggctgccctccccctactgctacccacagggcccccactccacctgctcccagacgaggccaactcctggccaagcttaggggcacagcggaggcgctctgtttctgatttttctcgccttccttggagatgcctgtgcttggaagggaaggcagaacattgcatcttggaacaaatctgcttttgatcatgcaaatgaatgcctggataatgtaggcagactgtcaatttcaccagttagaaagaaagagaaaagggggagaaattccccatgacagcgactgatgaagaa

SEQ ID NO: 724 - DNA, 565 bp, Homo sapiens
acttgaatttaggtgacactatagaagagctatgacgtcgcatgcacgcgtacgtaagcttggatcctctagagcggccgcctactactactaaattcgcggccgcgtcgacctgaacagatccaaatccctcttgcagagtcacatagaaatatattctcttacagccttcaaagatatcagccctgctcctttattagttagcaatattttgagccagttcaacattaatattagtaaaaagtttagttatacttttcaagaagtagagaagttccattctctaaccttttctgctttagcctctgaagacttaaatacatagaaaacaaaacagaaatgaaattaagaaatgtttgaaatagggcaacccgctcgggtccccttccacactgtggaagcttttttcttccgctctttgcaataaatcttgctgcaaaaaaaaaaaaaaaagtcgacgcggccgcgaatttagtagtagtagtcgacccgggaattccggaccggtacctgcaggcgtaccagctttccctatagtgagtcgtattagagcttggcgtaatca

SEQ ID NO: 725 - DNA, 127 bp, Homo sapiens
  misc_feature (88)..(88): n is a, c, g, or t
  misc_feature (91)..(91): n is a, c, g, or t
  misc_feature (102)..(102): n is a, c, g, or t
gagagcacatgcacactgtcagggctagcctgcctgcttacgcgcgctgcggattgttgctccgttgtacctgctggggaattctccncgntactgcttganatcttccaccccttacaaaatcaga

SEQ ID NO: 726 - DNA, 404 bp, Homo sapiens
  misc_feature (58)..(58): n is a, c, g, or t
  misc_feature (246)..(246): n is a, c, g, or t
  misc_feature (329)..(329): n is a, c, g, or t
  misc_feature (354)..(354): n is a, c, g, or t
  misc_feature (360)..(360): n is a, c, g, or t
  misc_feature (380)..(380): n is a, c, g, or t
aactcacacacaatggaaagacatgccaagatatcgatgaatgtctggagcagaatgngcactgtggacccaatcgcatgtgcttcaacatgagaggaagctaccagtgcatcgatacaccctgtccacccaactaccaacgggatcctgtttcagggttctgcctcaagaactgtccacccaatgatttggaatgtgccttgagcccatatgccttggaatacaaactcgtctccctcccatttnggaatagccaccaatcaagatttaatccggctggttgcatacacacagggtgggagtgatggcatcccgggacaactttcctncatgggtaggttgagggaacagatngtttcntttttgcctttgaggggatngaaaaccttgaaaggagtgggtgt

SEQ ID NO: 727 - DNA, 474 bp, Homo sapiens
  misc_feature (203)..(203): n is a, c, g, or t
  misc_feature (474)..(474): n is a, c, g, or t
cgataattcccagagcgcacagagccctgcaggttcctgggtccttctccagagaagaggcacagagattctggcagcaaggttcagaaggggtgaggaaactgggcactgacaaagggaggggattggctcaaattcgaccccagagtcagctctggtggggttgggagcctggatgggtgggagaagatagaatccaatcngtgaaaaccataagggaccttcaaactcatcttgcccagatgtctcccatttcacagatgagggaactgaggttttgagagcttcccctgaggactctgcaaaacgaggtggtgtctggtttggatgaaagtggtcggtgattcctcaactcctgccctgcctccctctctcgttcctccctaacatgttatgctcttgttggggctgggatgccctaggccaaggttaacaaatcctgggtttggaaaattgctgctgggggtggtatcn

SEQ ID NO: 728 - DNA, 445 bp, Homo sapiens
  misc_feature (386)..(386): n is a, c, g, or t
ccgcccttcctgcctaacctgttgtcttggctgaccccagaactcctgcaccacgagtcggagtccgggcgaggagatcagcaggggttttcgagggagcctggggcccagggcaggggtacgcgggtcaactcaacagatgtaaggcgtggccgaaccccattcagctagcagtacccagcctcagccacagtcgctgcccttacccaagatggcggcccacaccgcttccgtcgctgctgtagtcgcttcctgcggccagcccgggttcaatcagcggccgacaactgtctagggctcagacaccaccagccaatgagggagggcaggtgggagccgcccgtctgggctcgcggctcctggaccaatgggaaagtggcatgtgngaggggcgccgggggccccccgccaatggggagctacggcgcgcggccgggacttggag

SEQ ID NO: 729 - DNA, 210 bp, Homo sapiens
  misc_feature (81)..(81): n is a, c, g, or t
  misc_feature (113)..(113): n is a, c, g, or t
gcccggagaacggggaggaatatgctgtggagctcctctgccatataaacaaaaagaggaaatctttcaaacatggctgangcaaagacccactggcttggagcagccctgtntcttatccctttaattttcctcatctctggggctgaagcagcttcatttcagagaaaccagctgcttcagaaagaaccagacctcaggttggaaaat

SEQ ID NO: 730 - DNA, 673 bp, Homo sapiens
  misc_feature (15)..(15): n is a, c, g, or t
atccaggatgcctantgaatcgtacagtgtgagctgtgctgcccacgcccgccagacacttcctgggacagcacagaaggagaacaggacgcttcaaggtgacagtcatccgggttctggtgcagatcaactttccacgtgtgccatcttggacaagtcattatctagctgggcctcactcgaggtatgatggcgcctgacaggctccacaaggctgaaaagaactagccatgtcttccatctcagctctgagggggtgcgtaccaaaggaccaaaggaagggattggtcttcacccccttcctgctcaggaaagccttagttgtgcccatcttttctctgggagggctttgctacccaagacccagttcccagggtgctcgcggaagcgctgtccttcattaacacgggcagccagagccccctagaagcgtcctggatcccaggtgcccctcgagttaagacagaacccccacctaccccaggtttaccaggggcgggaactaaccagcacttttcaaaaaaggtcaagccgaggcatcgtccagccaaacaggccattggtgacaggaaacacactcagccagaagcagctcacatgtgtgtcgtgctctgagtgctgggtcctcagtggtccactggcccgagcgggaggtcccggcagcagtttcctc

SEQ ID NO: 731 - DNA, 484 bp, Homo sapiens
aatcttttatttttttttttttctttttttttggttttttgtaaagaccaggtctcgctacattgcccacgctagtttcgaactcctgagttcaagcaatcctcctgcctcggcctcccaaatataggcttgagccactgcacccagcctaaagttaatttctatataacgaaacctacttttccactgatatttattataatataaaaaataagttcttttggaaaaagacatggaaacaaaataagtaacatgaaactttccttggaaatactcttaactagaagtaataacacacaaatgcaaatagacaagttttttttaaactgacagtagaaaaatcaccccaaaatccaaagccattatatctttaatatgaccacagaaaaatagttattattttctatagtattcagatcttgttttccaaccttgaggaagctaccagtattaaaaaaaagcatagtgagctgagccataaaag

SEQ ID NO: 732 - DNA, 252 bp, Homo sapiens
  misc_feature (198)..(208): n is a, c, g, or t
gagaagacgacagaagggggcatgaggtggtgcttctggggtgttctgtttcttgatctggttgccggttacctgggtgctttccgtttgtgaacattcttggagctgtacacttttgatctgggcacttttctgtgtgtatgttatacttcaataaaaagttgggctttgtgactagcaaaaaaaaaaaaaaaaaannnnnnnnnnnggaaaaaaaaaaaaaaaaaaaaaaaaaaaaagtcgtatcgatgt

SEQ ID NO: 733 - DNA, 238 bp, Homo sapiens
gggtacaatatatattaaataagcacacatacaacaaaagtaggtgttggtaagcttacataaatgtgaccagtagcttgctgaaacctaactttttatttgttcatggaactttctagaccgtaactacactgaataatgagaatctgctgtaatctttttaggtgctgtagatgagccattgggttaaattattacagtatgtttcagactgctctatattgaaccggatagcttg

SEQ ID NO: 734 - DNA, 407 bp, Homo sapiens
  misc_feature (2)..(2): n is a, c, g, or t
antgacttcctccttcctctgatggcagtatatagttttcacattttaattcctcctcctgagatgcactatacttaaaaccattctctcccctgctaacagaagggtgtgaatctggtttactttgagcattaggatttgcccctttggaattctgcactccagttacttaactttcccttcagaatacatgtggaaagaaagaaagaaatagcgatgactccacttttgcccctgtggaccttgaacaaagcagttcttcccaaattatactttttttttttttaaataaggtgagcaggatgactggggagagagaaacatttgactttgactgcctcccccattctttgctgtgagctggaaagtgtgcagttggtcgtctttcttctcctttctttaggatg

SEQ ID NO: 735 - DNA, 2058 bp, Homo sapiens
gcacgaggaagccacagatctcttaagaactttctgtctccaaaccgtggctgctcgataaatcagacagaacagttaatcctcaatttaagcctgatctaacccctagaaacagatatagaacaatggaagtgacaacaagattgacatggaatgatgaaaatcatctgcgcaactgcttggaaatgtttctttgagtcttctctataagtctagtgttcatggaggtagcattgaagatatggttgaaagatgcagccgtcagggatgtactataacaatggcttacattgattacaatatgattgtagcctttatgcttggaaattatattaatttacgtgaaagttctacagagccaaatgattccctatggttttcacttcaaaagaaaaatgacaccactgaaatagaaactttactcttaaatacagcaccaaaaattattgatgagcaactggtgtgtcgtttatcgaaaacggatattttcattatatgtcgagataataaaatttatctagataaaatgataacaagaaacttgaaactaaggttttatggccaccgtcagtatttggaatgtgaagtttttcgagttgaaggaattaaggataacctagacgacataaagaggataattaaagccagagagcacagaaataggcttctagcagacatcagagactataggccctatgcagacttggtttcagaaattcgtattcttttggtgggtccagttgggtctggaaagtccagttttttcaattcagtcaagtctatttttcatggccatgtgactggccaagccgtagtggggtctgataccaccagcataaccgagcggtataggatatattctgttaaagatggaaaaaatggaaaatctctgccatttatgttgtgtgacactatggggctagatggggcagaaggagcaggactgtgcatggatgacattccccacatcttaaaaggttgtatgccagacagatatcagtttaattcccgtaaaccaattacacctgagcattctacttttatcacctctccatctctgaaggacaggattcactgtgtggcttatgtcttagacatcaactctattgacaatctctactctaaaatgttggcaaaagtgaagcaagttcacaaagaagtattaaactgtggtatagcatatgtggccttgcttactaaagtggatgattgcagtgaggttcttcaagacaactttttaaacatgagtagatctatgacttctcaaagccgggtcatgaatgtccataaaatgctaggcattcctatttccaatattttgatggttggaaattatgcttcagatttggaactggaccccatgaaggatattctcatcctctctgcactgaggcagatgctgcgggctgcagatgattttttagaagatttgcctcttgaggaaactggtgcaattgagagagcgttacagccctgcatttgagataagttgccttgattctgacatttggcccagcctgtactggtgtgccgcaatgagagtcaatctctattgacagcctgcttcagattttgcttttgttcgttttgccttctgtccttggaacagtcatatctcaagttcaaaggccaaaacctgagaagcggtgggctaagataggtcctactgcaaaccacccctccatatttccgtaccatttacaattcagtttctgtgacatctttttaaaccactggaggaaaaatgagatattctctaatttattcttctataacactctatatagagctatgtgagtactaatcacattgaataatagttataaaattattgtatagacatctgcttcttaaacagattgtgagttctttgagaaacagcgtggattttacttatctgtgtattcacagagcttagcacagtgcctggtaatgagcaagcatacttgccattacttttccttcccactctctccaacatcacattcactttaaatttttctgtatatagaaaggaaaactagcctgggcaacatgatgaaaccccatctccactgc

SEQ ID NO: 736 - protein, 413 aa, Homo sapiens
MVERCSRQGCTITMAYIDYNMIVAFMLGNYINLRESSTEPNDSLWFSLQKKNDTTEIETLLLNTAPKIIDEQLVCRLSKTDIFIICRDNKIYLDKMITRNLKLRFYGHRQYLECEVFRVEGIKDNLDDIKRIIKAREHRNRLLADIRDYRPYADLVSEIRILLVGPVGSGKSSFFNSVKSIFHGHVTGQAVVGSDTTSITERYRIYSVKDGKNGKSLPFMLCDTMGLDGAEGAGLCMDDIPHILKGCMPDRYQFNSRKPITPEHSTFITSPSLKDRIHCVAYVLDINSIDNLYSKMLAKVKQVHKEVLNCGIAYVALLTKVDDCSEVLQDNFLNMSRSMTSQSRVMNVHKMLGIPISNILMVGNYASDLELDPMKDILILSALRQMLRAADDFLEDLPLEETGAIERALQPCI

SEQ ID NO: 737 - DNA, 514 bp, Homo sapiens
gcggcagtgaatcgagctcgtgtacgcatcgaagcatcttgtggggactgaggtggaggatcgcttgggcccaggaggcggagggtgcagtgaactgagattgcgccactgcaatctcagcctgggagacagagagagacgtctcctgttctcctggagaacaacaagtcatgatgtcagacaagaacttggattttggagacacgggtttgaatttcagtcattcattcttttattcagtaaatatctagcaagtactgacatgtcccagatgttgttttactcactggttatacgatgggagggagacagagaaagagagagagagagagagagagagagagagagacgctattctaaaagcttgaagtctaggctgtgcagagtggctcatgcctattatcgcagcactctgggaggctgagatgggtggatcatgaggtcaggagattgagatcatcccggctaacacagtgaaactccctctctacaaaaatacaaaaaattagctgag

SEQ ID NO: 738 - DNA, 624 bp, Homo sapiens
ctcggcacgagggcgccgcgtgcagaggtgctcaagcctcctcgcggtgcgcagtcagtgccgccgcgcccggcctcccgcacgccccgcaggtagcgcccccgcccgcggcccagagtgcgctcgcgccggcaccagctcccggataaacggcgcgccgcgcggagatgacagccgaggagatgaaggcgaccgagagcggggcgcagtcggcgccgctgcccatggagggagtggacatcagccccaaacaggacgaaggcgtgctgaaggtcatcaagagagagggcacaggtacagagatgcccatgattggggaccgagtctttgtccactacactggctggctattagatggcacaaagtttgactccagtctggatcgcaaggacaaattctcctttgacctgggaaaaggggaggtcatcaaggcttgggacattgccatagccaccatgaaggtgggggaggtgtgccacatcacctgcaaaccagaatatgcctacggttcagcaggcagtcctccaaagattccccccaatgccacgcttgtatttgaggtggagttgtttgagtttaagggagaagatctgacggaagaggaagatggcggaatcattcgca

SEQ ID NO: 739 - DNA, 564 bp, Homo sapiens
  misc_feature (16)..(16): n is a, c, g, or t
  misc_feature (18)..(18): n is a, c, g, or t
  misc_feature (20)..(20): n is a, c, g, or t
  misc_feature (313)..(313): n is a, c, g, or t
  misc_feature (469)..(469): n is a, c, g, or t
  misc_feature (477)..(477): n is a, c, g, or t
  misc_feature (531)..(531): n is a, c, g, or t
  misc_feature (549)..(549): n is a, c, g, or t
  misc_feature (555)..(555): n is a, c, g, or t
cctggaggaggcggcngngngcagtacctccagagcgcaaggccggcgggagaaaagctgaggaagtggaaatctgtggctggagctcagcagggaggatttcttctccacgctgtcctcgagggccgccctgaacatgttgtagtggagcttccgtctgtcttcagcttccgtcaacactgaaccagctcatctaagcaccagacacaagattttactgcttttgtcaggtggagtgggaagtcgcacccacgtctggccagttgggtcggctgtaactcagactttggactgacttgtcacccaagctcantatagcaaggagttcctgatggcagctagggggagctgacatcagtgtcagctcaagactctttaggcagtttacctcaatcctcccaatagttcctaatccttacacaatatggagccaagtccctaaagatgctcattggttcacagtattagncttaatgnctaattaaggatggttttcttgtggtatacctttacacctggactcccagtatntttttgcttttgaatganctgatncagacacta

SEQ ID NO: 740 - DNA, 240 bp, Homo sapiens
gagccacccttacttcagaagaacggcatggggtgggggggccttaggtggtgcccgcctcacctatgactgccaaaagcggtcatggggttatttttaaacatggggaggaagtatttattgttcctgggctgcagagagctgggcggagtgtggaattcttctcgggaggcagtcctgggtcctttccaccatggcacctaagaagcaagaagagagccggggccccaactccaacgt

SEQ ID NO: 741 - DNA, 7787 bp, Homo sapiens
gagacaaaggctgccgtcgggacgggcgagttagggacttgggtttgggcgaacaaaaggtgagaaggacaagaagggaccgggcgatggcagcaggggagccccgcgggcgcgcgtcctcgggagtggcgccgtgacacgcatggtttccccggacccgcggcggcgctgacttccgcgagtcggagcggcactcggcgagtccgggactgcgctggaacaatggataacttcttcaccgagggaacacgggtctggctgagagaaaatggccagcattttccaagtactgtaaattcctgtgcagaaggcatcgtcgtcttccggacagactatggtcaggtattcacttacaagcagagcacaattacccaccagaaggtgactgctatgcaccccacgaacgaggagggcgtggatgacatggcgtccttgacagagctccatggcggctccatcatgtataacttattccagcggtataagagaaatcaaatatatacctacatcggctccatcctggcctccgtgaacccctaccagcccatcgccgggctgtacgagcctgccaccatggagcagtacagccggcgccacctgggcgagctgcccccgcacatcttcgccatcgccaacgagtgctaccgctgcctgtggaagcgctacgacaaccagtgcatcctcatcagtggtgaaagtggggcaggtaaaaccgaaagcactaaattgatcctcaagtttctgtcagtcatcagtcaacagtctttggaattgtccttaaaggagaagacatcctgtgttgaacgagctattcttgaaagcagccccatcatggaagctttcggcaatgcgaagaccgtgtacaacaacaactctagtcgctttgggaagtttgttcagctgaacatctgtcagaaaggaaatattcagggcgggagaattgtagattatttattagaaaaaaaccgagtagtaaggcaaaatcccggggaaaggaattatcacatattttatgcactgctggcagggctggaacatgaagaaagagaagaattttatttatctacgccagaaaactaccactacttgaatcagtctggatgtgtagaagacaagacaatcagtgaccaggaatcctttagggaagttattacggcaatggacgtgatgcagttcagcaaggaggaagttcgggaagtgtcgaggctgcttgctggtatactgcatcttgggaacatagaatttatcactgctggtggggcacaggtttccttcaaaacagctttgggcagatctgcggagttacttgggctggacccaacacagctcacagatgctttgacccagagatcaatgttcctcaggggagaagagatcctcacgcctctcaatgttcaacaggcagtagacagcagggactccctggccatggctctgtatgcgtgctgctttgagtgggtaatcaagaagatcaacagcaggatcaaaggcaatgaggacttcaagtctattggcatcctcgacatctttggatttgaaaactttgaggttaatcactttgaacagttcaatataaactatgcaaacgagaaacttcaggagtacttcaacaagcatattttttctttagaacaactagaatatagccgggaaggattagtgtgggaagatattgactggatagacaatggagaatgcctggacttgattgagaagaaacttggcctcctagcccttatcaatgaagaaagccattttcctcaagccacagacagcaccttattggagaagctacacagtcagcatgcgaataaccacttttatgtgaagcccagagttgcagttaacaattttggagtgaagcactatgctggagaggtgcaatatgatgtccgaggtatcttggagaagaacagagatacatttcgagatgaccttctcaatttgctaagagaaagccgatttgactttatctacgatctttttgaacatgtttcaagccgcaacaaccaggataccttgaaatgtggaagcaaacatcggcggcctacagtcagctcacagttcaaggactcactgcattccttaatggcaacgctaagctcctctaatcctttctttgttcgctgtatcaagccaaacatgcagaagatgccagaccagtttgaccaggcggttgtgctgaaccagctgcggtactcagggatgctggagactgtgagaatccgcaaagctgggtatgcggtccgaagaccctttcaggacttttacaaaaggtataaagtgctgatgaggaatctggctctgcctgaggacgtccgagggaagtgcacgagcctgctgcagctctatgatgcctccaacagcgagtggcagctggggaagaccaaggtctttcttcgagaatccttggaacagaaactggagaagcggagggaagaggaagtgagccacgcggccatggtgattcgggcccatgtcttgggcttcttagcacgaaaacaatacagaaaggtcctttattgtgtggtgataatacagaagaattacagagcattccttctgaggaggagatttttgcacctgaaaaaggcagccatagttttccagaagcaactcagaggtcagattgctcggagagtttacagacaattgctggcagagaaaagggagcaagaagaaaagaagaaacaggaagaggaagaaaagaagaaacgggaggaagaagaaagagaaagagagagagagcgaagagaagccgagctccgcgcccagcaggaagaagaaacgaggaagcagcaagaactcgaagccttgcagaagagccagaaggaagctgaactgacccgtgaactggagaaacagaaggaaaataagcaggtggaagagatcctccgtctggagaaagaaatcgaggacctgcagcgcatgaaggagcagcaggagctgtcgctgaccgaggcttccctgcagaagctgcaggagcggcgggaccaggagctccgcaggctggaggaggaagcgtgcagggcggcccaggagttcctcgagtccctcaatttcgacgagatcgacgagtgtgtccggaatatcgagcggtccctgtcggtgggaagcgaattttccagcgagctggctgagagcgcatgcgaggagaagcccaacttcaacttcagccagccctacccagaggaggaggtcgatgagggcttcgaagccgacgacgacgccttcaaggactcccccaaccccagcgagcacggccactcagaccagcgaacaagtggcatccggaccagcgatgactcttcagaggaggacccatacatgaacgacacggtggtgcccaccagccccagtgcggacagcacggtgctgctcgccccatcagtgcaggactccgggagcctacacaactcctccagcggcgagtccacctactgcatgccccagaacgctggggacttgccctccccagacggcgactacgactacgaccaggatgactatgaggacggtgccatcacttccggcagcagcgtgaccttctccaactcctacggcagccagtggtcccccgactaccgctgctctgtggggacctacaacagctcgggtgcctaccggttcagctctgagggggcgcagtcctcgtttgaagatagtgaagaggactttgattccaggtttgatacagatgatgagctttcataccggcgtgactctgtgtacagctgtgtcactctgccgtatttccacagctttctgtacatgaaaggtggcctgatgaactcttggaaacgccgctggtgcgtcctcaaggatgaaaccttcttgtggttccgctccaagcaggaggccctcaagcaaggctggctccacaaaaaaggggggggctcctccacgctgtccaggagaaattggaagaagcgctggtttgtcctccgccagtccaagctgatgtactttgaaaacgacagcgaggagaagctcaagggcaccgtagaagtgcgaacggcaaaagagatcatagataacaccaccaaggagaatgggatcgacatcattatggccgataggactttccacctgattgcagagtccccagaagatgccagccagtggttcagcgtgctgagtcaggtccacgcgtccacggaccaggagatccaggagatgcatgatgagcaggcaaacccacagaatgctgtgggcaccttggatgtggggctgattgattctgtgtgtgcctctgacagccctgatagacccaactcgtttgtgatcatcacggccaaccgggtgctgcactgcaacgccgacacgccggaggagatgcaccactggataaccctgctgcagaggtccaaaggggacaccagagtggagggccaggaattcatcgtgagaggatggttgcacaaagaggtgaagaacagtccgaagatgtcttcactgaaactgaagaaacggtggtttgtactcacccacaattccctggattactacaagagttcagagaagaacgcgctcaaactggggaccctggtcctcaacagcctctgctctgtcgtccccccagatgagaagatattcaaagagacaggctactggaacgtcaccgtgtacgggcgcaagcactgttaccggctctacaccaagctgctcaacgaggccacccggtggtccagtgccattcaaaacgtgactgacaccaaggccccgatcgacacccccacccagcagctgattcaagatatcaaggagaactgcctgaactcggatgtggtggaacagatttacaagcggaacccgatccttcgatacacccatcaccccttgcactccccgctcctgccccttccgtatggggacataaatctcaacttgctcaaagacaaaggctataccacccttcaggatgaggccatcaagatattcaattccctgcagcaactggagtccatgtctgacccaattccaataatccagggcatcctacagacagggcatgacctgcgacctctgcgggacgagctgtactgccagcttatcaaacagaccaacaaagtgccccaccccggcagtgtgggcaacctgtacagctggcagatcctgacatgcctgagctgcaccttcctgccgagtcgagggattctcaagtatctcaagttccatctgaaaaggatacgggaacagtttccaggaaccgagatggaaaaatacgctctcttcacttacgaatctcttaagaaaaccaaatgccgagagtttgtgccttcccgagatgaaatagaagctctgatccacaggcaggaaatgacatccacggtctattgccatggcggcggctcctgcaagatcaccatcaactcccacaccactgctggggaggtggtggagaagctgatccgaggcctggccatggaggacagcaggaacatgtttgctttgtttgaatacaacggccacgtcgacaaagccattgaaagtcgaaccgtcgtagctgatgtcttagccaagtttgaaaagctggctgccacatccgaggttggggacctgccatggaaattctacttcaaactttactgcttcctggacacagacaacgtgccaaaagacagtgtggagtttgcatttatgtttgaacaggcccacgaagcggttatccatggccaccatccagccccggaagaaaacctccaggttcttgctgccctgcgactccagtatctgcagggggattatactctgcacgctgccatcccacctctcgaagaggtttattccctgcagagactcaaggcccgcatcagccagtcaaccaaaaccttcaccccttgtgaacggctggagaagaggcggacgagcttcctagaggggaccctgaggcggagcttccggacaggatccgtggtccggcagaaggtcgaggaggagcagatgctggacatgtggattaaggaagaagtctcctctgctcgagccagtatcattgacaagtggaggaaatttcagggaatgaaccaggaacaggccatggccaagtacatggccttgatcaaggagtggcctggctatggctcgacgctgtttgatgtggagtgcaaggaaggtggcttccctcaggaactctggttgggtgtcagcgcggacgccgtctccgtctacaagcgtggagagggaagaccactggaagtcttccagtatgaacacatcctctcttttggggcacccctggcgaatacgtataagatcgtggtcgatgagagggagctgctctttgaaaccagtgaggtggtggatgtggccaagctcatgaaagcctacatcagcatgatcgtgaagaagcgctacagcacgacacgctccgccagcagccagggcagctccaggtgaaggcgggacagagcccacctgtctttgctacctgaacgcaccaccctctggcctaggctggctccagtgtgccatgcccagccaaaacaaacacagagctgcccaggctttctggaagcttctggtctgagggaggtgtctccgaggatccttttgcctgccgccttcattgatcctgtattaagctgtcaactttaacagtctgcacagtttccaaagctttactactcttagaggacacatgccttaaaaaaggaggggaggaaccacgctgccaccaaagcagccggaagtgccttaacttgtggaaccaacactaatcgaccgtaactgtgctactgaagggaactgcctttcccccttctgggggagacttaacagagcgtggaaggggggcattctctgtcaatgatgcactaacctcccaacctgatttccccgaatctgagggaaggtgagggagtgggaagggggatggagagctcgaggggacagtgtgtttgagctggagtgctgcgggcagcctttctcatggaatgacatgaatcaacttttttctttgtttcatcttttaagtgtacgtgcttgcctgttcgtgcatgtgttcataaactcaacactttaatcatggtttcatgagcattaaaaagcaaagggaaaaaggatgtgtaatggtgtacacagtctgtatattttaataatgcagagctatagtctcaattgttactttataaggtggttttattaacaaacccaaatcctggattttcctgtctttgctgtattttgaaaaacacgtgttgactccattgttttacatgtagcaaagtctgccatctgtgtctgctgtattataaacagataagcagcctacaagataactgtatttataaaccactcttcaacagctggctccagtgctggttttagaacaagaatgaagtcattttggagtctttcatgtctaaaagatttaagttaaaaacaaagtgttacttggaaggttagcttctatcattctggatagattacagatataataaccatgttgactatgggggagagacgctgcattccagaaacgtcttaacacttgagtgaatcttcaaaggaccctgacattaaatgctgaggctttaatacacacatattttatcccaagtttataatggtggtctgaacaaggcacctgtaaataaatcagcatttatgaccagaagaaaaataatctggtcttggactttttatttttatatggaaaagttttaaggacttgggccaactaagtctacccacacgaaaaaagaaatttgccttgtccctttgtgtacaaccatgcaaaactgtttgttggctcacagaagttctgacaataaaagatactagct

SEQ ID NO: 742 - protein, 2058 aa, Homo sapiens
MDNFFTEGTRVWLRENGQHFPSTVNSCAEGIVVFRTDYGQVFTYKQSTITHQKVTAMHPTNEEGVDDMASLTELHGGSIMYNLFQRYKRNQIYTYIGSILASVNPYQPIAGLYEPATMEQYSRRHLGELPPHIFAIANECYRCLWKRYDNQCILISGESGAGKTESTKLILKFLSVISQQSLELSLKEKTSCVERAILESSPIMEAFGNAKTVYNNNSSRFGKFVQLNICQKGNIQGGRIVDYLLEKNRVVRQNPGERNYHIFYALLAGLEHEEREEFYLSTPENYHYLNQSGCVEDKTISDQESFREVITAMDVMQFSKEEVREVSRLLAGILHLGNIEFITAGGAQVSFKTALGRSAELLGLDPTQLTDALTQRSMFLRGEEILTPLNVQQAVDSRDSLAMALYACCFEWVIKKINSRIKGNEDFKSIGILDIFGFENFEVNHFEQFNINYANEKLQEYFNKHIFSLEQLEYSREGLVWEDIDWIDNGECLDLIEKKLGLLALINEESHFPQATDSTLLEKLHSQHANNHFYVKPRVAVNNFGVKHYAGEVQYDVRGILEKNRDTFRDDLLNLLRESRFDFIYDLFEHVSSRNNQDTLKCGSKHRRPTVSSQFKDSLHSLMATLSSSNPFFVRCIKPNMQKMPDQFDQAVVLNQLRYSGMLETVRIRKAGYAVRRPFQDFYKRYKVLMRNLALPEDVRGKCTSLLQLYDASNSEWQLGKTKVFLRESLEQKLEKRREEEVSHAAMVIRAHVLGFLARKQYRKVLYCVVIIQKNYRAFLLRRRFLHLKKAAIVFQKQLRGQIARRVYRQLLAEKREQEEKKKQEEEEKKKREEEERERERERREAELRAQQEEETRKQQELEALQKSQKEAELTRELEKQKENKQVEEILRLEKEIEDLQRMKEQQELSLTEASLQKLQERRDQELRRLEEEACRAAQEFLESLNFDEIDECVRNIERSLSVGSEFSSELAESACEEKPNFNFSQPYPEEEVDEGFEADDDAFKDSPNPSEHGHSDQRTSGIRTSDDSSEEDPYMNDTVVPTSPSADSTVLLAPSVQDSGSLHNSSSGESTYCMPQNAGDLPSPDGDYDYDQDDYEDGAITSGSSVTFSNSYGSQWSPDYRCSVGTYNSSGAYRFSSEGAQSSFEDSEEDFDSRFDTDDELSYRRDSVYSCVTLPYFHSFLYMKGGLMNSWKRRWCVLKDETFLWFRSKQEALKQGWLHKKGGGSSTLSRRNWKKRWFVLRQSKLMYFENDSEEKLKGTVEVRTAKEIIDNTTKENGIDIIMADRTFHLIAESPEDASQWFSVLSQVHASTDQEIQEMHDEQANPQNAVGTLDVGLIDSVCASDSPDRPNSFVIITANRVLHCNADTPEEMHHWITLLQRSKGDTRVEGQEFIVRGWLHKEVKNSPKMSSLKLKKRWFVLTHNSLDYYKSSEKNALKLGTLVLNSLCSVVPPDEKIFKETGYWNVTVYGRKHCYRLYTKLLNEATRWSSAIQNVTDTKAPIDTPTQQLIQDIKENCLNSDVVEQIYKRNPILRYTHHPLHSPLLPLPYGDINLNLLKDKGYTTLQDEAIKIFNSLQQLESMSDPIPIIQGILQTGHDLRPLRDELYCQLIKQTNKVPHPGSVGNLYSWQILTCLSCTFLPSRGILKYLKFHLKRIREQFPGTEMEKYALFTYESLKKTKCREFVPSRDEIEALIHRQEMTSTVYCHGGGSCKITINSHTTAGEVVEKLIRGLAMEDSRNMFALFEYNGHVDKAIESRTVVADVLAKFEKLAATSEVGDLPWKFYFKLYCFLDTDNVPKDSVEFAFMFEQAHEAVIHGHHPAPEENLQVLAALRLQYLQGDYTLHAAIPPLEEVYSLQRLKARISQSTKTFTPCERLEKRRTSFLEGTLRRSFRTGSVVRQKVEEEQMLDMWIKEEVSSARASIIDKWRKFQGMNQEQAMAKYMALIKEWPGYGSTLFDVECKEGGFPQELWLGVSADAVSVYKRGEGRPLEVFQYEHILSFGAPLANTYKIVVDERELLFETSEVVDVAKLMKAYISMIVKKRYSTTRSASSQGSSR

SEQ ID NO: 743 - DNA, 735 bp, Homo sapiens
ttttttttttttttttttttttttttttttttttttttttttttttttttttttctgattaagtttaccgtgttatatgggagcggttcatggcgccccgaaacaattacaataatatatcaaagatcactgatcacagatcactataacacatataataacaatgaaaatgcttgaaatattgcaggcaattaccaaaatgcagtggagagacccaaaatgggcacatgctattggaaaaatggggccaacagatttgcttaaagcagtgttgacacaaatcttcaatttctctgctttgcttttcttaacctattgctgtcacatatatgtcccaaaaccttcaatttctttaaaaattctgctacctgtgaagggcaataaatcaaggcatgcctgtatactctctcctgttatcctttctccagcctctgcacccccctcagcctcagcccctctgcacccctgcccctggcaccttcccacacctgagctctgcgttgtcaccctggggaaatgccaccctttagggaagtctccaacttattcagtctgtaactgtcagagcatacagatggctcatctatcttaacagttactgcatgtcactggtacttaattcagtcagccactcagccttttggggagcatttgttgagtgcctactctgtgccaagggagagctaatattgagcataagcacaggattcttgccttcagggagcttacagtcta

SEQ ID NO: 744 - DNA, 467 bp, Homo sapiens
agaggcttgacagagctgttacttatgtgtgagggctttattctcaggcagtagtttattcatcatttggtaagcccctccccacactcctctaatttaaacaagtagtgaaggcttatcttaaactgtgtagtaccttagacttggcatttatttttgatagagcagagataaaatattttgatggaaggaaatcaattttctgtaactgatgatgtgaaaattttattttctgggaaattatatagccattcaaaaattcaaagtatgttattatgattggttacaagagaataatgttacatgtttaattgtaatatttgtctcctatcattttcttccctttcagtcataataaatgatttacaaaacccaaaaaaaaaaaaaaaaaaaaaaaactcgagggggggcccggtacccaattcgccctatagtgagtcgtattacaattcactggccgtcgttta

SEQ ID NO: 745 - DNA, 257 bp, Homo sapiens
  misc_feature (38)..(38): n is a, c, g, or t
  misc_feature (49)..(49): n is a, c, g, or t
ttactcttcagcgaaatctccttcatctctgatgtggngaacaattccngtccggcactgggaggcaccttcccgccagccccctggtggccgcctggcccacctcccaccaacttcagcagcttggagctggagcccagaggccagcagcccgtggccaaggccgaggggagcccgaccgccatcctcatcggctgcctggtggccatcatcctgctcctgctgctcatcattgccctcatgctctggcggctgca

SEQ ID NO: 746 - DNA, 391 bp, Homo sapiens
ttttttttttttttctaaagtaatacctttattctggagaaaacaaacacctccaaaaaaattctaaaagattttgagaggggaaaatatagacacacaactgcattcattctgatcttccacacaaagatcaggtgaagaaatctatgcagctatacatgctaggacctgttgtacaccatccctgcaaccccatagaaagaaaaaaaactcttttttcaaaatagaagcagtattcttctacgaaaacaaaacaatcacatgtgactactggaaatgttagtgttacacagagtcctttaaaaataaatcacagccaaagttccataaagtacagaagcttgaaacagaaaataaaaatgactgaagagtgatgatgggagcctgaagc

SEQ ID NO: 747 - DNA, 453 bp, Homo sapiens
tttttttttttttttttttttttaaagaaaaatttaaaagtttattgttcaaacaagaagtacagaccacaatctaaaagactcaaatcaagtggtaagaaattaatcttacagcagttacaacacagtttataatgcataaagggggggaatattttgaccttttttataattggctgttatacattctttttagggcaagttgagctgtttaagcttgttggtctatagctgattggtttaatttcagtgaatcatgctggcaaggatgtaaagcttacattttgcatttcatttatgatcagagacagcatttcaggaaaatcagaatgattagttttggttacacggttgcgggtagtcagccttagggtatttctaaactggggcttccatttttatttttcgttaataatacctgcatgagatgggcagctcaggtcttaaggtcac

SEQ ID NO: 748 - DNA, 8257 bp, Homo sapiens
taaatttaaaggcggggcggcctgtgagccctgaagtgccggccgcggagggtcctggccattttggtgggaccagttcagcctgataggatggcggaggaaggagccgtggccgtctgcgtgcgagtgcggccgctgaacagcagagaagaatcacttggagaaactgcccaagtttactggaaaactgacaataatgtcatttatcaagttgatggaagtaaatccttcaattttgatcgtgtctttcatggtaatgaaactaccaaaaatgtgtatgaagaaatagcagcaccaatcatcgattctgccatacaaggctacaatggtactatatttgcctatggacagactgcttcaggaaaaacatataccatgatgggttcagaagatcatttgggagttatacccagggcaattcatgacattttccaaaaaattaagaagtttcctgatagggaatttctcttacgtgtatcttacatggaaatatacaatgaaaccattacagatttactctgtggcactcaaaaaatgaaacctttaattattcgagaagatgtcaataggaatgtgtatgttgctgatctcacagaagaagttgtatatacatcagaaatggctttgaaatggattacaaagggagaaaagagcaggcattatggagaaacaaaaatgaatcaaagaagcagtcgttctcataccatctttaggatgattttggaaagcagagagaagggtgaaccttctaattgtgaaggatctgttaaggtatcccatttgaatttggttgatcttgcaggcagtgaaagagctgctcaaacaggcgctgcaggtgtgcggctcaaggaaggctgtaatataaatcgaagcttatttattttgggacaagtgatcaagaaacttagtgatggacaagttggtggtttcataaattatcgagatagcaagttaacacgaattcttcagaattccttgggaggaaatccaaagacacgtattatctgcacaattactccagtatcttttgatgaaactcttactgctctccagtttgccagtactgctaaatatatgaagaatactccttatgttaatgaggtatcaactgatgaagctctcctgaaaaggtatagaaaagaaataatggatcttaaaaaacaattagaggaggtttctttagagacgcgggctcaggcaatggaaaaagaccaattggcccaacttttggaagaaaaagatttgcttcagaaagtacagaatgagaaaattgaaaacttaacacggatgctggtgacctcttcttccctcacgttgcaacaggaattaaaggctaaaagaaaacgaagagttacttggtgccttggcaaaattaacaaaatgaagaactcaaactatgcagatcaatttaatataccaacaaatataacaacaaaaacacataagctttctataaatttattacgagaaattgatgaatctgtctgttcagagtctgatgttttcagtaacactcttgatacattaagtgagatagaatggaatccagcaacaaagctactaaatcaggagaatatagaaagtgagttgaactcacttcgtgctgactatgataatctggtattagactatgaacaactacgaacagaaaaagaagaaatggaattgaaattaaaagaaaagaatgatttggatgaatttgaggctctagaaagaaaaactaaaaaagatcaagagatgcaactaattcatgaaatttcgaacttaaagaatttagttaagcatcgagaagtatataatcaagatcttgagaatgaactcagttcaaaagtagagctgcttagagaaaaggaagaccagattaagaagctacaggaatacatagactctcaaaagctagaaaatataaaaatggacttgtcatactcattggaaagcattgaagacccaaaacaaatgaagcagactctgtttgatgctgaaactgtagcccttgatgccaagagagaatcagcctttcttagaagtgaaaatctggagttgaaggagaaaatgaaagaacttgcaactacatacaagcaaatggaaaatgatattcagttatatcaaagccaattggaggcaaaaaagaaaatgcaagttgatctggagaaagaattacaatctgcttttaatgagataacaaaactcacctcccttatagatggcaaagttccaaaagatttgctctgtaatttggaattggaaggaaagattactgatcttcagaaagaactaaataaagaagttgaagaaaatgaagctttgcgggaagaagtcattttgctttcagaattgaaatctttaccttctgaagtagaaaggctgaggaaagagatacaagacaaatctgaagagctccatataataacatcagaaaaagataaattgttttctgaagtagttcataaggagagtagagttcaaggtttacttgaagaaattgggaaaacaaaagatgacctagcaactacacagtcgaattataaaagcactgatcaagaattccaaaatttcaaaacccttcatatggactttgagcaaaagtataagatggtccttgaggagaatgagagaatgaatcaggaaatagttaatctctctaaagaagcccaaaaatttgattcgagtttgggtgctttgaagaccgagctttcttacaagacccaagaacttcaggagaaaacacgtgaggttcaagaaagactaaatgagatggaacagctgaaggaacaattagaaaatagagattctccgctgcaaactgtagaaagggagaaaacactgattactgagaaactgcagcaaactttagaagaagtaaaaactttaactcaagaaaaagatgatctaaaacaactccaagaaagcttgcaaattgagagggaccaactcaaaagtgatattcacgatactgttaacatgaatatagatactcaagaacaattacgaaatgctcttgagtctctgaaacaacatcaagaaacaattaatacactaaaatcgaaaatttctgaggaagtttccaggaatttgcatatggaggaaaatacaggagaaactaaagatgaatttcagcaaaagatggttggcatagataaaaaacaggatttggaagctaaaaatacccaaacactaactgcagatgttaaggataatgagataattgagcaacaaaggaagatattttctttaatacaggagaaaaatgaactccaacaaatgttagagagtgttatagcagaaaaggaacaattgaagactgacctaaaggaaaatattgaaatgaccattgaaaaccaggaagaattaagacttcttggggatgaacttaaaaagcaacaagagatagttgcacaagaaaagaaccatgccataaagaaagaaggagagctttctaggacctgtgacagactggcagaagttgaagaaaaactaaaggaaaagagccagcaactccaagaaaaacagcaacaacttcttaatgtacaagaagagatgagtgagatgcagaaaaagattaatgaaatagagaatttaaagaatgaattaaagaacaaagaattgacattggaacatatggaaacagagaggcttgagttggctcagaaacttaatgaaaattatgaggaagtgaaatctataaccaaagaaagaaaagttctaaaggaattacagaagtcatttgaaacagagagagaccaccttagaggatatataagagaaattgaagctacaggcctacaaaccaaagaagaactaaaaattgctcatattcacctaaaagaacaccaagaaactattgatgaactaagaagaagcgtatctgagaagacagctcaaataataaatactcaggacttagaaaaatcccataccaaattacaagaagagatcccagtgcttcatgaggaacaagagttactgcctaatgtgaaaaaagtcagtgagactcaggaaacaatgaatgaactggagttattaacagaacagtccacaaccaaggactcaacaacactggcaagaatagaaatggaaaggctcaggttgaatgaaaaatttcaagaaagtcaggaagagataaaatctctaaccaaggaaagagacaaccttaaaacgataaaagaagcccttgaagttaaacatgaccagctgaaagaacatattagagaaactttggctaaaatccaggagtctcaaagcaaacaagaacagtccttaaatatgaaagaaaaagacaatgaaactaccaaaatcgtgagtgagatggagcaattcaaacccaaagattcagcactactaaggatagaaatagaaatgctcggattgtccaaaagacttcaagaaagtcatgatgaaatgaaatctgtagctaaggagaaagatgacctacagaggctgcaagaagttcttcaatctgaaagtgaccagctcaaagaaaacataaaagaaattgtagctaaacacctggaaactgaagaggaacttaaagttgctcattgttgcctgaaagaacaagaggaaactattaatgagttaagagtgaatctttcagagaaggaaactgaaatatcaaccattcaaaagcagttagaagcaatcaatgataaattacagaacaagatccaagagatttatgagaaagaggaacaacttaatataaaacaaattagtgaggttcaggaaaacgtgaatgaactgaaacaattcaaggagcatcgcaaagccaaggattcagcactacaaagtatagaaagtaagatgctcgagttgaccaacagacttcaagaaagtcaagaagaaatacaaattatgattaaggaaaaagaggaaatgaaaagagtacaggaggcccttcagatagagagagaccaactgaaagaaaacactaaagaaattgtagctaaaatgaaagaatctcaagaaaaagaatatcagtttcttaagatgacagctgtcaatgagactcaggagaaaatgtgtgaaatagaacacttgaaggagcaatttgagacccagaagttaaacctggaaaacatagaaacggagaatataaggttgactcagatactacatgaaaaccttgaagaaatgagatctgtaacaaaagaaagagatgaccttaggagtgtggaggagactctcaaagtagagagagaccagctcaaggaaaaccttagagaaactataactagagacctagaaaaacaagaggagctaaaaattgttcacatgcatctgaaggagcaccaagaaactattgataaactaagagggattgtttcagagaaaacaaatgaaatatcaaatatgcaaaaggacttagaacactcaaatgatgccttaaaagcacaggatctgaaaatacaagaggaactaagaattgctcacatgcatctgaaagagcagcaggaaactattgacaaactcagaggaattgtttctgagaagacagataaactatcaaatatgcaaaaagatttagaaaattcaaatgctaaattacaagaaaagattcaagaacttaaggcaaatgaacatcaacttattacgttaaaaaaagatgtcaatgagacacagaaaaaagtgtctgaaatggagcaactaaagaaacaaataaaagaccaaagcttaactctgagtaaattagaaatagagaatttaaatttggctcaagaacttcatgaaaaccttgaagaaatgaaatctgtaatgaaagaaagagataatctaagaagagtagaggagacactcaaactggagagagaccaactcaaggaaagcctgcaagaaaccaaagctagagatctggaaatacaacaggaactaaaaactgctcgtatgctatcaaaagaacacaaagaaactgttgataaacttagagaaaaaatttcagaaaagacaattcaaatttcagacattcaaaaggatttagataaatcaaaagatgaattacagaaaaagatccaagaacttcagaaaaaagaacttcaactgcttagagtgaaagaagatgtcaatatgagtcataaaaaaattaatgaaatggaacagttgaagaagcaatttgagccaaactatctatgcaagtgtgagatggataacttccagttgactaagaaacttcatgaaagccttgaagaaataagaattgtagctaaagaaagagatgagctaaggaggataaaagaatctctcaaaatggaaagggaccaattcatagcaaccttaagggaaatgatagctagagaccgacagaaccaccaagtaaaacctgaaaaaaggttactaagtgatggacaacagcaccttatggaaagcctgagagaaaagtgctctagaataaaagagcttttgaagagatactcagagatggatgatcattatgagtgcttgaatagattgtctcttgacttggagaaggaaattgaattccacagaatcatgaagaaactgaagtatgtgttaagctatgttacaaaaataaaagaagaacaacatgaatgcatcaataaatttgaaatggattttattgatgaagtggaaaagcaaaaggaattgctaattaaaatacagcaccttcaacaagattgtgatgtaccatccagagaattaagggatctcaaattgaaccagaatatggatctacatattgaggaaattctcaaagatttctcagaaagtgagttccctagcataaagactgaatttcaacaagtactaagtaataggaaagaaatgacacagtttttggaagagtggttaaatactcgttttgatatagaaaagcttaaaaatggcatccagaaagaaaatgataggatttgtcaagtgaataacttctttaataacagaataattgccataatgaatgaatcaacagagtttgaggaaagaagtgctaccatatccaaagagtgggaacaggacctgaaatcactgaaagagaaaaatgaaaaactatttaaaaactaccaaacattgaagacttccttggcatctggtgcccaggttaatcctaccacacaagacaataagaatcctcatgttacatcaagagctacacagttaaccacagagaaaattcgagagctggaaaattcactgcatgaagctaaagaaagtgctatgcataaggaaagcaagattataaagatgcagaaagaacttgaggtgactaatgacataatagcaaaacttcaagccaaagttcatgaatcaaataaatgccttgaaaaaacaaaagagacaattcaagtacttcaggacaaagttgctttaggagctaagccatataaagaagaaattgaagatctcaaaatgaagcttgtgaaaatagacctagagaaaatgaaaaatgccaaagaatttgaaaaggaaatcagtgctacaaaagccactgtagaatatcaaaaggaagttataaggctattgagagaaaatctcagaagaagtcaacaggcccaagatacctcagtgatatcagaacatactgatcctcagccttcaaataaacccttaacttgtggaggtggcagcggcattgtacaaaacacaaaagctcttattttgaaaagtgaacatataaggctagaaaaagaaatttctaagttaaagcagcaaaatgaacagctaataaaacaaaagaatgaattgttaagcaataatcagcatctttccaatgaggtcaaaacttggaaggaaagaacccttaaaagagaggctcacaaacaagtaacttgtgagaattctccaaagtctcctaaagtgactggaacagcttctaaaaagaaacaaattacaccctctcaatgcaaggaacggaatttacaagatcctgtgccaaaggaatcaccaaaatcttgtttttttgatagccgatcaaagtctttaccatcacctcatccagttcgctattttgataactcaagtttaggcctttgtccagaggtgcaaaatgcaggagcagagagtgtggattctcagccaggtccttggcacgcctcctcaggcaaggatgtgcctgagtgcaaaactcagtagactcctctttgtcacttctctggagatccagcattccttatttggaaatgactttgtttatgtgtctatccctggtaatgatgttgtagtgcagcttaatttcaattcagtctttactttgccactagagttgaaagataagggaacaggaaatgaatgcattgtggtaatttag

SEQ ID NO: 749 - protein, 2663 aa, Homo sapiens
MAEEGAVAVCVRVRPLNSREESLGETAQVYWKTDNNVIYQVDGSKSFNFDRVFHGNETTKNVYEEIAAPIIDSAIQGYNGTIFAYGQTASGKTYTMMGSEDHLGVIPRAIHDIFQKIKKFPDREFLLRVSYMEIYNETITDLLCGTQKMKPLIIREDVNRNVYVADLTEEVVYTSEMALKWITKGEKSRHYGETKMNQRSSRSHTIFRMILESREKGEPSNCEGSVKVSHLNLVDLAGSERAAQTGAAGVRLKEGCNINRSLFILGQVIKKLSDGQVGGFINYRDSKLTRILQNSLGGNPKTRIICTITPVSFDETLTALQFASTAKYMKNTPYVNEVSTDEALLKRYRKEIMDLKKQLEEVSLETRAQAMEKDQLAQLLEEKDLLQKVQNEKIENLTRMLVTSSSLTLQQELKAKRKRRVTWCLGKINKMKNSNYADQFNIPTNITTKTHKLSINLLREIDESVCSESDVFSNTLDTLSEIEWNPATKLLNQENIESELNSLRADYDNLVLDYEQLRTEKEEMELKLKEKNDLDEFEALERKTKKDQEMQLIHEISNLKNLVKHREVYNQDLENELSSKVELLREKEDQIKKLQEYIDSQKLENIKMDLSYSLESIEDPKQMKQTLFDAETVALDAKRESAFLRSENLELKEKMKELATTYKQMENDIQLYQSQLEAKKKMQVDLEKELQSAFNEITKLTSLIDGKVPKDLLCNLELEGKITDLQKELNKEVEENEALREEVILLSELKSLPSEVERLRKEIQDKSEELHIITSEKDKLFSEVVHKESRVQGLLEEIGKTKDDLATTQSNYKSTDQEFQNFKTLHMDFEQKYKMVLEENERMNQEIVNLSKEAQKFDSSLGALKTELSYKTQELQEKTREVQERLNEMEQLKEQLENRDSPLQTVEREKTLITEKLQQTLEEVKTLTQEKDDLKQLQESLQIERDQLKSDIHDTVNMNIDTQEQLRNALESLKQHQETINTLKSKISEEVSRNLHMEENTGETKDEFQQKMVGIDKKQDLEAKNTQTLTADVKDNEIIEQQRKIFSLIQEKNELQQMLESVIAEKEQLKTDLKENIEMTIENQEELRLLGDELKKQQEIVAQEKNHAIKKEGELSRTCDRLAEVEEKLKEKSQQLQEKQQQLLNVQEEMSEMQKKINEIENLKNELKNKELTLEHMETERLELAQKLNENYEEVKSITKERKVLKELQKSFETERDHLRGYIREIEATGLQTKEELKIAHIHLKEHQETIDELRRSVSEKTAQIINTQDLEKSHTKLQEEIPVLHEEQELLPNVKKVSETQETMNELELLTEQSTTKDSTTLARIEMERLRLNEKFQESQEEIKSLTKERDNLKTIKEALEVKHDQLKEHIRETLAKIQESQSKQEQSLNMKEKDNETTKIVSEMEQFKPKDSALLRIEIEMLGLSKRLQESHDEMKSVAKEKDDLQRLQEVLQSESDQLKENIKEIVAKHLETEEELKVAHCCLKEQEETINELRVNLSEKETEISTIQKQLEAINDKLQNKIQEIYEKEEQLNIKQISEVQENVNELKQFKEHRKAKDSALQSIESKMLELTNRLQESQEEIQIMIKEKEEMKRVQEALQIERDQLKENTKEIVAKMKESQEKEYQFLKMTAVNETQEKMCEIEHLKEQFETQKLNLENIETENIRLTQILHENLEEMRSVTKERDDLRSVEETLKVERDQLKENLRETITRDLEKQEELKIVHMHLKEHQETIDKLRGIVSEKTNEISNMQKDLEHSNDALKAQDLKIQEELRIAHMHLKEQQETIDKLRGIVSEKTDKLSNMQKDLENSNAKLQEKIQELKANEHQLITLKKDVNETQKKVSEMEQLKKQIKDQSLTLSKLEIENLNLAQELHENLEEMKSVMKERDNLRRVEETLKLERDQLKESLQETKARDLEIQQELKTARMLSKEHKETVDKLREKISEKTIQISDIQKDLDKSKDELQKKIQELQKKELQLLRVKEDVNMSHKKINEMEQLKKQFEPNYLCKCEMDNFQLTKKLHESLEEIRIVAKERDELRRIKESLKMERDQFIATLREMIARDRQNHQVKPEKRLLSDGQQHLMESLREKCSRIKELLKRYSEMDDHYECLNRLSLDLEKEIEFHRIMKKLKYVLSYVTKIKEEQHECINKFEMDFIDEVEKQKELLIKIQHLQQDCDVPSRELRDLKLNQNMDLHIEEILKDFSESEFPSIKTEFQQVLSNRKEMTQFLEEWLNTRFDIEKLKNGIQKENDRICQVNNFFNNRIIAIMNESTEFEERSATISKEWEQDLKSLKEKNEKLFKNYQTLKTSLASGAQVNPTTQDNKNPHVTSRATQLTTEKIRELENSLHEAKESAMHKESKIIKMQKELEVTNDIIAKLQAKVHESNKCLEKTKETIQVLQDKVALGAKPYKEEIEDLKMKLVKIDLEKMKNAKEFEKEISATKATVEYQKEVIRLLRENLRRSQQAQDTSVISEHTDPQPSNKPLTCGGGSGIVQNTKALILKSEHIRLEKEISKLKQQNEQLIKQKNELLSNNQHLSNEVKTWKERTLKREAHKQVTCENSPKSPKVTGTASKKKQITPSQCKERNLQDPVPKESPKSCFFDSRSKSLPSPHPVRYFDNSSLGLCPEVQNAGAESVDSQPGPWHASSGKDVPECKTQ

SEQ ID NO: 750 - DNA, 454 bp, Homo sapiens
  misc_feature (452)..(452): n is a, c, g, or t
ctgaaaataatttaaaaagcttaaaagttacataggcatcttcaaaagaacacaatgggattcattttattgttgacttttggacaccagtgtcagactttattgaaaacaaacccatgtaaaaacaaagttaaaatgaaaaatggcacctgaaaaataaattattttatataaaacaaatcaataacttaaaacacactaatatacaaaaggtctaaccatctactgtacaacatgggaatcggttaagagagcctcccctcccccaaagcaagtcactgtaaacggaacatcacatggtcatggtcaaagaggtggccccaaaccaacggaaaaggcttctcttctggtggaagaaaaatccagtcctgtcaaagtctccgttagcctaacctagggtactgggcggtgacttaccagtgagaaaaaaaaaatttggttttttaaatggncc

SEQ ID NO: 751 - DNA, 618 bp, Homo sapiens
tggcgaattcggcacgagggcgaggaaggggcgggagccggggtcccggtagcttctagtaggttccagaaggcggcgcgtgcggttgggaacgcggagcggacggattcgattcaacggggttccggaccgcgctgcgctatggagcaggtcaatgagctgaaggagaaaggcaacaaggccctgagcgtgggtaacatcgatgatgccttacagtgctactccgaagctattaagctggatccccacaaccacgtgctgtacagcaaccgttctgctgcctatgccaagaaaggagactaccagaaggcttatgaggatggctgcaagactgtcgacctaaagcctgactggggcaagggctattcacgaaaagcagcagctctagagttcttaaaccgctttgaagaagccaagcgaacctatgaggagggcttaaaacacgaggcaaataaccctcaactgaaagagggtttacagaatatggaggccaggttggcagagagaaaattcatgaaccctttcaacatgcctaatctgtatcagaagttggagagtgatcccaggacaaggacactactcagtgatcctacctaccgggagctgatagagcagcta

SEQ ID NO: 752 - DNA, 318 bp, Homo sapiens
  misc_feature (107)..(107): n is a, c, g, or t
  misc_feature (194)..(194): n is a, c, g, or t
  misc_feature (299)..(299): n is a, c, g, or t
tcctgcagaataccatttgatcctattaagaattgtccaaatgttggagcatttgattgaaaaatccttcttagccattttaaagatagctttccaatgattagacnaattgattctttctgtgactcatcagttcctatcctgtaaaattcatgtcttgctgttgatttgtgaataagaaccagagcttgtanaaaccactttaatcatatccaggggtttgcaagaaacaggtgcttaacactaattcacctcctgaacaagaaaaatgggctgtgaccggaactgtgggctcatcnctggggctgtcattggtgc

SEQ ID NO: 753 - DNA, 477 bp, Homo sapiens
  misc_feature (75)..(75): n is a, c, g, or t
  misc_feature (447)..(447): n is a, c, g, or t
  misc_feature (462)..(462): n is a, c, g, or t
cggaagtggtgtctcaaccactataaagcctctctgtgcccgtccggtaattggtgaggacagcctgccagagtntgtctctggacactatgggcacacgactcctcccagctctgtttcttgtcctcctggtattgggatttgaggtccaggggaccaacagccccagcaagatgagatgcctagcccgaccttcctcacccaggtgaaggaatctctctccagttactgggagtcagcaaagacagccgcccagaacctgtacgagaagacatacctgcccgctgtagatgagaaactcagggacttgtacagcaaaagcacagcagccatgagcacttacacaggcatttttactgaccaagttctttctgtgctgaagggagaggagtaacagccagaccccccatcagtggacaagggggagagtcccctacttccctgatnccccaggttcagacntgaggatcccccttt

SEQ ID NO: 754 - DNA, 444 bp, Homo sapiens
agcggccgctcgcatctagaactaagccggggtgacaaaggtgccccagggagagcaggcctgtatggcgagattggcgcgactggtgatttcggtgacatcggggacactataaatttaccaggaagaccaggcctgaagggggagcggggcaccactggaataccaggtctgaagggattctttggagagaagggaacagaaggtgacatcggcttccctgggataacaggcgtgactggagtccaaggccctcctggacttaaaggacaaacaggctttccagggctgactgggcctccagggtcgcagggagagctggggcggattggactgcctggtggcaaaggagatgatggctggccgggagctccgggcttaccaagttttccgggactccgtgggatccgcggcttacacggcttgccaggcaccaagggcttt

SEQ ID NO: 755 - DNA, 2571 bp, Homo sapiens
ctttaccattcttccatggaagaagacaaaattcatctgagtgtagaaactaactatgctatggctcaggcccctctgggtatttctcctcaggaactgctcacctgtggggagagtgacttgtggtctgcttacccaaaataattcaatactcaaggctgggtggactctacagggcaatggtgtgactgaccagctctttcattgaagacatagaaagtacaagcagacccttctggcaggagctctaacatcaggcttccaatctagatttcatcagtaataaacattttggtttctatctcaggactcccaaatcgttcaattggacttgaactcagaagggaaactggatgttacttattgaactccaggtacacattatgtttcattaaaaaatatctatacaattatgacatcaagtagatgtcattggctactagaattatgtgggaaaacccttgtttgagtaagaggacttactatgtaaatatttttgaaaaagtggagttctggccgggcgcagtggctcatgcctataatcccagcactttgggaggccgaggtgggtagattacctgaggtcaggagttcgagaccagcctgactaacacggtgaaaccctgtctctaattaaaaaaaaaaaaaaatttgctaggcatggtggtacatgcctgtaatcccagctatttgggaggctgaggcagcagaatcacctgaacccaggaggtggaggctgcagtgagccgagatcatgccactgcactccagcctggactacaagagtgaaagcccgttctcaaaaaaaaaaaaaaaaaaaaaaaagtcctttcttcagtgaactctcatagggagggccaacagataaagtcagtaagagtgacactaacctggttaaggaagtgtgtggtttctcagagcacaccctgttctcatgctcctcccactcactgcccaatctttcctctccttcacttccaggctatctttagagaacttcagaatacaataatgaaaaccatgtctttgatcattaaacaccaaaaagtaactctgctactctcctcagcttcaggcaccaccactgacctgggacagtgaatcgacaatgccgtcttctgtctcgtggggcatcctcctgctggcaggcctgtgctgcctggtccctgtctccctggctgaggatccccagggagatgctgcccagaagacagatacatcccaccatgatcaggatcacccaaccttcaacaagatcacccccaacctggctgagttcgccttcagcccataccgccagctggcacaccagtccaacagcaccaatatcttcttctccccagtgagcatcgctacagcctttgcaatgctctccctggggaccaaggctgacactcacgatgaaatcctggagggcctgaatttcaacctcacggagattccggaggctcagatccatgaaggcttccaggaactcctccgtaccctcaaccagccagacagccagctccagctgaccaccggcaatggcctgttcctcagcgagggcctgaagctagtggataagtttttggaggatgttaaaaagttgtaccactcagaagccttcactgtcaacttcggggacaccgaagaggccaagaaacagatcaacgattacgtggagaagggtactcaagggaaaattgtggatttggtcaaggagcttgacagagacacagtttttgctctggtgaattacatcttctttaaaggcaaatgggagagaccctttgaagtcaaggacaccgaggaagaggacttccacgtggaccaggtgaccaccgtgaaggtgcctatgatgaagcgtttaggcatgtttaacatccagcactgtaagaagctgtccagctgggtgctgctgatgaaatacctgggcaatgccaccgccatcttcttcctgcctgatgaggggaaactacagcacctggaaaatgaactcacccacgatatcatcaccaagttcctggaaaatgaagacagaaggtctgccagcttacatttacccaaactgtccattactggaacctatgatctgaagagcgtcctgggtcaactgggcatcactaaggtcttcagcaatggggctgacctctccggggtcacagaggaggcacccctgaagctctccaaggccgtgcataaggctgtgctgaccatcgacgagaaagggactgaagctgctggggccatgtttttagaggccatacccatgtctatcccccccgaggtcaagttcaacaaaccctttgtcttcttaatgattgaacaaaataccaagtctcccctcttcatgggaaaagtggtgaatcccacccaaaaataactgcctctcgctcctcaacccctcccctccatccctggccccctccctggatgacattaaagaagggttgagctggtccctgcctgcaaaaaaaaaaaaaaaaaaaaaaaaaaaaaaaaaaaaaaaaaaaaaaaaaaaaaaaaaaaaaaaaaaaaaaaaaaaaaaaaaaaaaaaaaaaaaaaaaaaaaaaaaaaaaaaaaaaaaaa

SEQ ID NO: 756 - protein, 418 aa, Homo sapiens [sequence omitted]

SEQ ID NO: 757 - DNA, 271 bp, Homo sapiens
ttttttttttttttcttaaatgaattattttttattgctattttataaagcttatattttcctaaaaatattagaaaaaaaatcagaacaaaaaatcagtttacatgtagtacagttacaagtaaatagctatagataatatagccattaggaaaaagagcagagctaaataataagaaaacaaaagcagtaagcagcaataaaattaatacctacatacaactagcagtgcaataagataagcagaaagcagctttacgttaaaagaaag

SEQ ID NO: 758 - DNA, 1367 bp, Homo sapiens
ccggccggccgaagagttcacaagtgtgaagcctgaagccgccgggtgccgctgtgtagaaagaagctaaagcacttccagagcctgctgagctcagaggttcggaagacttatcgaccatggagcgcgcgtcctgcttgttgctgctgctgctgccgctggtgcacgtctctgcgaccacgccagaaccttgtgagctggacgatgaagatttccgctgcgtctgcaacttctccgaacctcagcccgactggtccgaagccttccagtgtgtgtctgcagtagaggtggagatccatgccggcggtctcaacctagagccgtttctaaagcgcgtcgatgcggacgccgacccgcggcagtatgctgacacggtcaaggctctccgcgtgcggcggctcacagtgggagccgcacaggttcctgctcagctactggtaggcgccctgcgtgtgctagcgtactcccgcctcaaggaactgacgctcgaggacctaaagataaccggcaccatgcctccgctgcctctggaagccacaggacttgcactttccagcttgcgcctacgcaacgtgtcgtgggcgacagggcgttcttggctcgccgagctgcagcagtggctcaagccaggcctcaaggtactgagcattgcccaagcacactcgcctgccttttcctgcgaacaggttcgcgccttcccggcccttaccagcctagacctgtctgacaatcctggactgggcgaacgcggactgatggcggctctctgtccccacaagttcccggccatccagaatctagcgctgcgcaacacaggaatggagacgcccacaggcgtgtgcgccgcactggcggcggcaggtgtgcagccccacagcctagacctcagccacaactcgctgcgcgccaccgtaaaccctagcgctccgagatgcatgtggtccagcgccctgaactccctcaatctgtcgttcgctgggctggaacaggtgcctaaaggactgccagccaagctcagagtgctcgatctcagctgcaacagactgaacagggcgccgcagcctgacgagctgcccgaggtggataacctgacactggacgggaatcccttcctggtccctggaactgccctcccccacgagggctcaatgaactccggcgtggtcccagcctgtgcacgttcgaccctgtcggtgggggtgtcgggaaccctggtgctgctccaaggggcccggggctttgcctaagatccaagacagaataatgaatggactcaaactgccttggcttcaggggagtcccgtcaggacgttgaggacttttcgaccaattcaaccctttgccccacctttattaaaatcttaaac

SEQ ID NO: 759 - protein, 375 aa, Homo sapiens
MERASCLLLLLLPLVHVSATTPEPCELDDEDFRCVCNFSEPQPDWSEAFQCVSAVEVEIHAGGLNLEPFLKRVDADADPRQYADTVKALRVRRLTVGAAQVPAQLLVGALRVLAYSRLKELTLEDLKITGTMPPLPLEATGLALSSLRLRNVSWATGRSWLAELQQWLKPGLKVLSIAQAHSPAFSCEQVRAFPALTSLDLSDNPGLGERGLMAALCPHKFPAIQNLALRNTGMETPTGVCAALAAAGVQPHSLDLSHNSLRATVNPSAPRCMWSSALNSLNLSFAGLEQVPKGLPAKLRVLDLSCNRLNRAPQPDELPEVDNLTLDGNPFLVPGTALPHEGSMNSGVVPACARSTLSVGVSGTLVLLQGARGFA

SEQ ID NO: 760 - DNA, 300 bp, Homo sapiens
gttaagataaatctttttctttttttacctgtccatatttacaaacattctgcgttccgtacatagacgcctggataagaacccctgtgcaagaatgactttggtgctactttaaaaaaagtggttggggaagacctcataggaaatgacatcaataatagattgcatgataacctatactagttcttactgtcaccaatttaaattctaactgcttaaaagctaacacggtcctcccttttttgagcacctgattgagtactttgagtaggcctaagtttcgtatgcaagtactaattt

SEQ ID NO: 761 - DNA, 672 bp, Homo sapiens
ggccgtcgcgcatgcggggctcacacggctgcagccggcgccgctgccactcccgggagcatgaaggaccgaacccaggagctccgcacggccaaggacagcgatgatgatgatgatgtcgctgtcaccgtggaccgagaccgcttcatggatgagttctttgagcaggtggaggagattcgaggcttcattgacaagatcgcagagaatgtggaggaggtgaagcggaagcacagtgccatcctggcatcccccaaccccgatgagaagacgaaggaggagctggaagaactcatgtccgacataaagaagacagcaaacaaagttcgttccaagttaaagagcatcgagcagtccatcgagcaagaggaaggcctgaaccgctcctccgctgacctgaggatccggaagacacagcactccacgctgtccagaaagtttgtggaggtcatgtcggagtacaacgccacgcagtccgactaccgcgagcgctgcaaaggccgcatccagaggcagctggagatcaccggcaggaccacgaccagtgaggagctggaggacatgctggagagtgggaaccccgccatctatgcctctgggatcatcatagactccagcatctcgaagcaggctctgagcgagattgagacgccgcacagtgagatcatcaag

SEQ ID NO: 762 - DNA, 406 bp, Homo sapiens
  misc_feature (308)..(308): n is a, c, g, or t
  misc_feature (310)..(310): n is a, c, g, or t
  misc_feature (312)..(317): n is a, c, g, or t
  misc_feature (319)..(321): n is a, c, g, or t
  misc_feature (324)..(327): n is a, c, g, or t
  misc_feature (329)..(333): n is a, c, g, or t
  misc_feature (335)..(339): n is a, c, g, or t
  misc_feature (343)..(343): n is a, c, g, or t
  misc_feature (346)..(348): n is a, c, g, or t
  misc_feature (350)..(350): n is a, c, g, or t
  misc_feature (353)..(353): n is a, c, g, or t
  misc_feature (362)..(362): n is a, c, g, or t
  misc_feature (369)..(370): n is a, c, g, or t
  misc_feature (374)..(374): n is a, c, g, or t
  misc_feature (389)..(389): n is a, c, g, or t
agcggccgcccttttttttttttttttttagagtaaactattcttaaactcaaacaacccttccttcttttgtcactactatattccctgtgctttccagatgcaaggaaagtaaaatggcagggctgggcctgggacaaagggttctgggtgctagcagggtgtggcctggtctggcctgcggacagatggcttcctttttccctcccacacagacccaagcttctgtgtggaagcgtgaacctcagacacttagacgtctccagttccttcaggattgagcaagtcagggtggggagaggggggangngnnnnnnannntannnngnnnnngnnnnngtcnatnnngnttnaggagcatnttgggtnnttangccactacccatgtncaaggccacgtagaggc

SEQ ID NO: 763 - DNA, 3775 bp, Homo sapiens
cattcataagactcagagctacggccacggcagggacacgcggaaccaagacttggaaacttgattgttgtggttcttcttgggggttatgaaatttcattaatcttttttttttccggggagaaagtttttggaaagattcttccagatatttcttcattttcttttggaggaccgacttactttttttggtcttctttattactcccctccccccgtgggacccgccggacgcgtggaggagaccgtagctgaagctgattctgtacagcgggacagcgctttctgcccctgggggagcaacccctccctcgcccctgggtcctacggagcctgcactttcaagaggtacagcggcatcctgtgggggcctgggcaccgcaggaagactgcacagaaactttgccattgttggaacgggacgttgctccttccccgagcttccccggacagcgtactttgaggactcgctcagctcaccggggactcccacggctcaccccggacttgcaccttacttccccaacccggccatagccttggcttcccggcgacctcagcgtggtcacaggggcccccctgtgcccagggaaatgtttcaggctttccccggagactacgactccggctcccggtgcagctcctcaccctctgccgagtctcaatatctgtcttcggtggactccttcggcagtccacccaccgccgcggcctcccaggagtgcgccggtctcggggaaatgcccggttccttcgtgcccacggtcaccgcgatcacaaccagccaggacctccagtggcttgtgcaacccaccctcatctcttccatggcccagtcccaggggcagccactggcctcccagcccccggtcgtcgacccctacgacatgccgggaaccagctactccacaccaggcatgagtggctacagcagtggcggagcgagtggcagtggtgggccttccaccagcggaactaccagtgggcctgggcctgcccgcccagcccgagcccggcctaggagaccccgagaggagacgctcaccccagaggaagaggagaagcgaagggtgcgccgggaacgaaataaactagcagcagctaaatgcaggaaccggcggagggagctgaccgaccgactccaggcggagacagatcagttggaggaagaaaaagcagagctggagtcggagatcgccgagctccaaaaggagaaggaacgtctggagtttgtgctggtggcccacaaaccgggctgcaagatcccctacgaagaggggcccgggccgggcccgctggcggaggtgagagatttgccgggctcagcaccggctaaggaagatggcttcagctggctgctgccgcccccgccaccaccgcccctgcccttccagaccagccaagacgcaccccccaacctgacggcttctctctttacacacagtgaagttcaagtcctcggcgaccccttccccgttgttaacccttcgtacacttcttcgtttgtcctcacctgcccggaggtctccgcgttcgccggcgcccaacgcaccagcggcagtgaccagccttccgatcccctgaactcgccctccctcctcgctcggtgaactctttagacacacaaaacaaacaaacacatgggggagagagacttggaagaggaggaggaggaggagaaggaggagagagaggggaagagacaaagtgggtgtgtggcctccctggctcctccgtctgaccctctgcggccactgcgccactgccatcggacaggaggattccttgtgttttgtcctgcctcttgtttctgtgccccggcgaggccggagagctggtgactttggggacagggggtgggaaggggatggacacccccagctgactgttggctctctgacgtcaacccaagctctggggatgggtggggaggggggcgggtgacgcccaccttcgggcagtcctgtgtgaggatgaagggacgggggtgggaggtaggctgtggggtgggctggagtcctctccagagaggctcaacaaggaaaaatgccactccctacccaatgtctcccacacccaccctttttttggggtgcccaggttggtttcccctgcactcccgaccttagcttattgatcccacatttccatggtgtgagatcctctttactctgggcagaagtgagcccccccttaaagggaattcgatgcccccctagaataatctcatccccccacccgacttcttttgaaatgtgaacgtccttccttgactgtctagccactccctcccagaaaaactggctctgattggaatttctggcctcctaaggctccccaccccgaaatcagcccccagccttgtttctgatgacagtgttatcccaagaccctgccccctgccagccgaccctcctggccttcctcgttgggccgctctgatttcaggcagcaggggctgctgtgatgccgtcctgctggagtgatttatactgtgaaatgagttggccagattgtggggtgcagctgggtggggcagcacacctctggggggataatgtccccactcccgaaagcctttcctcggtctcccttccgtccatcccccttcttcctcccctcaacagtgagttagactcaagggggtgacagaaccgagaagggggtgacagtcctccatccacgtggcctctctctctctcctcaggaccctcagccctggcctttttctttaaggtcccccgaccaatccccagcctaggacgccaacttctcccaccccttggcccctcacatcctctccaggaaggcagtgaggggctgtgacatttttccggagaagatttcagagctgaggctttggtacccccaaacccccaatatttttggactggcagactcaaggggctggaatctcatgattccatgcccgagtccgcccatccctgaccatggttttggctctcccaccccgccgttccctgcgcttcatctcatgaggatttctttatgaggcaaatttatattttttaatatcggggggtggaccacgccgccctccatccgtgctgcatgaaaaacattccacgtgccccttgtcgcgcgtctcccatcctgatcccagacccattccttagctatttatccctttcctggtttccgaaaggcaattatatctattatgtataagtaaatatattatatatggatgtgtgtgtgtgcgtgcgcgtgagtgtgtgagcgcttctgcagcctcggcctaggtcacgttggccctcaaagcgagccgttgaattggaaactgcttctagaaactctggctcagcctgtctcgggctgacccttttctgatcgtctcggcccctctgattgttcccgatggtctctctccctctgtcttttctcctccgcctgtgtccatctgaccgttttcacttgtctcctttctgactgtccctgccaatgctccagctgtcgtctgactctgggttcgttggggacatgagattttattttttgtgagtgagactgagggatcgtagatttttacaatctgtatctttgacaattctgggtgcgagtgtgagagtgtgagcagggcttgctcctgccaaccacaattcaatgaatccccgacccccctaccccatgctgtacttgtggttctctttttgtattttgcatctgaccccggggggctgggacagattggcaatgggccgtcccctctccccttggttctgcactgttgccaataaaaagctcttaaaaacgc

SEQ ID NO: 764 - protein, 338 aa, Homo sapiens
MFQAFPGDYDSGSRCSSSPSAESQYLSSVDSFGSPPTAAASQECAGLGEMPGSFVPTVTAITTSQDLQWLVQPTLISSMAQSQGQPLASQPPVVDPYDMPGTSYSTPGMSGYSSGGASGSGGPSTSGTTSGPGPARPARARPRRPREETLTPEEEEKRRVRRERNKLAAAKCRNRRRELTDRLQAETDQLEEEKAELESEIAELQKEKERLEFVLVAHKPGCKIPYEEGPGPGPLAEVRDLPGSAPAKEDGFSWLLPPPPPPPLPFQTSQDAPPNLTASLFTHSEVQVLGDPFPVVNPSYTSSFVLTCPEVSAFAGAQRTSGSDQPSDPLNSPSLLAR

SEQ ID NO: 765 - DNA, 408 bp, Homo sapiens
  misc_feature (11)..(12): n is a, c, g, or t
ttttttttttnnttttagaggttttttttttttttttagtaaaccacagcaaagtttattcatgtgccagggacataaagatacattaattgtttgtttttctaggctgccagtataagcttttcaaaatgtttaaagtaaataaaaccaataatacagctagataccacattgcaaagaaccctaatgctatttatcagctttaaaatactttcaactgaaatcaattacattttaatatacacatattatatagaaattacctatagctcttttaaaaatcctatgacattaacatgaaactttattagaatttaagattctatatgcagacctgataaagccttaaatttaattattttggagtaatgtcttcttaagaaatggtagataggataaaataattta

SEQ ID NO: 766 - DNA, 514 bp, Homo sapiens
gtttggaatgcagccaattcgagtgaagaaatatccgtatttgtggctctgttacaatggtgaaatctacaaccataagaagatgcaacagcattttgaatttgaataccagaccaaagtggatggtgagataatccttcatctttatgacaaaggaggaattgagcaaacaatttgtatgttggatggtgtgtttgcatttgttttactggatactgccaataagaaagtgttcctgggtagagatacatatggagtcagacctttgtttaaagcaatgacagaagatggatttttggctgtatgttcagaagctaaaggtcttgttacattgaagcactccgcgactccctttttaaaagtggagccttttcttcctggacactatgaagttttggatttaaagccaaatggcaaagttgcatccgtggaaatggttaaatatcatcactgtcgggatgaacccctgcacggcctctatgacaatgtggagaaactctttccaggttttgag

SEQ ID NO: 767 - DNA, 696 bp, Homo sapiens
ttccccccccccccccccccccccgcccgagcacaggacacagctgggttctgaagcttctgagttctgcagcctcacctctgagaaaacctcttttccaccaataccatgaagctctgcgtgactgtcctgtctctcctcatgctagtagctgccttctgctctccagcgctctcagcaccaatgggctcagaccctcccaccgcctgctgcttttcttacaccgcgaggaagcttcctcgcaactttgtggtagattactatgagaccagcagcctctgctcccagccagctgtggtattccaaaccaaaagaagcaagcaagtctgtgctgatcccagtgaatcctgggtccaggagtacgtgtatgacctggaactgaactgagctgctcagagacaggaagtcttcagggaaggtcacctgagcccggatgcttctccatgagacacatctcctccatactcaggactcctctccgcagttcctgtcccttctcttaatttaatcttttttatgtgccgtgttattgtattaggtgtcatttccattatttatattagtttagccaaaggataagtgtcctatggggatggtccactgtcactgtttctctgctgttgcaaatacatggataacacatttgattctgtgtgttttccataataaaactttaaaataaaatgcagacagtta

SEQ ID NO: 768 - protein, 92 aa, Homo sapiens
MKLCVTVLSLLMLVAAFCSPALSAPMGSDPPTACCFSYTARKLPRNFVVDYYETSSLCSQPAVVFQTKRSKQVCADPSESWVQEYVYDLELN

SEQ ID NO: 769 - DNA, 420 bp, Homo sapiens
  misc_feature (229)..(229): n is a, c, g, or t
  misc_feature (251)..(251): n is a, c, g, or t
  misc_feature (349)..(349): n is a, c, g, or t
  misc_feature (361)..(361): n is a, c, g, or t
  misc_feature (376)..(376): n is a, c, g, or t
agctgagctggtaggaggaccagacggggatgttcggctccgcccccagcgtcccgtggccatgacgaccgctcagagggactccctgttgtggaagctcgcggggttgctgcgggagtccggggatgtggtcctgtctggctgtagcaccctgagcctgctgactcccacactgcaacagctgaaccacgtatttgagctgcacctggggccatggggcatgggccangacaggctttgtggctctgccntcccatcctgccgactcccctgttattcttcagcttcagtttctcttcgatgtgctgcagaaaacactttcactcaagctggtccatgttgctggtcntggccccacagnccaatcaagattttncccttcaaatcccctttcggcacctggaagctccgaggtgttcc

SEQ ID NO: 770 - DNA, 484 bp, Homo sapiens
  misc_feature (3)..(3): n is a, c, g, or t
  misc_feature (5)..(5): n is a, c, g, or t
  misc_feature (7)..(7): n is a, c, g, or t
  misc_feature (18)..(18): n is a, c, g, or t
  misc_feature (31)..(31): n is a, c, g, or t
  misc_feature (157)..(157): n is a, c, g, or t
  misc_feature (163)..(163): n is a, c, g, or t
  misc_feature (306)..(306): n is a, c, g, or t
  misc_feature (356)..(356): n is a, c, g, or t
  misc_feature (383)..(383): n is a, c, g, or t
  misc_feature (467)..(467): n is a, c, g, or t
agngnantatcaccatcnctcatcaacaccnccagagcagatcttatctcgagatcacaccgagcagagtcatcttggttggtggggacagactggtgctcccctgcaaccagagtgtggtggtggggagctgggggctggaggtgtccgtgtctgncaacgncaatgtcaccgtcaccatccagggctccatagcctttgtcatcctcatccacctctacaaaaagccggcgcccttccagcgacaccacctgggtttctacattgccaacagcgagggtctttccagcaactgtcacggactgntgggtcagttcctgaatcaggatgccagactcacagaagacctgcagggnccaggcagaacctcactcaccctctgntccttcaggtgggagagggggctgaggccgtcctaacagtgaaaggcaccaagtcccagtgggtttggaagcaaaggaggtttncaacggggaagagcagc

SEQ ID NO: 771 - DNA, 3147 bp, Homo sapiens
ggcgcccagcccagcctggcgactggggaccccggcacatgaggtggacgccccggggaagacttgggtgcacagccaggcgagaaggtcttgagtcagacagagcaccagccttggggaccctggaccactatcatggagactgagagcgagcagaactccaattccaccaatgggagttctagctcagggggcagctctcggccccagatagctcaaatgtcactttatgaacgacaagcagtgcaggctctgcaagcactgcagcggcagcccaatgcagctcagtatttccaccagttcatgctccagcagcagctcagtaatgcccagctgcatagcctggctgccgtccagcaggccacaattgctgccagtcggcaggccagctccccaaacaccagcactacacagcagcagactaccaccacccaggcctcgatcaatctggccaccacatcggccgcccagctcatcagccgatcccagagtgtgagctctcccagtgctaccaccttgacccaatctgtgctactggggaacaccacctccccacccctcaaccagtctcaggcccagatgtatctacggccacagctgggaaacctattgcaggtaaaccgaacccctgggtcgaatgtgcctctagcctcccaactcatcctgatgcctaatggggcggtggctgcagtccagcaggaggtgccatctgctcagtctcctggagttcatgcagatgcagatcaggttcagaacttggcagtaaggaatcaacaggcctcagctcaaggacctcagatgcaaggctccactcagaaggccattcctccaggagcctcccctgtctctagcctctcccaggcctctagccaggccctagcggtggcacaggcttcctctggggccacaaaccagtccctcaaccttagtcaagctggtggaggcagtgggaatagcatcccagggtccatgggtccaggtggaggtgggcaggcacatggtggtttgggtcagttgccttcctcaggaatgggtggtgggagctgtcccaggaagggtacaggagtggtgcagcccttgcctgcagcccaaacagtaactgtgagccagggcagccagacagaggcagaaagtgcagcagccaagaaggcagaagcagatgggagtggccagcagaatgtgggcatgaacctgacacggacagccacacctgcgcccagccagacacttattagctcagccacctacacacagatccagccccattcactgattcagcaacagcaacagatccacctccagcagaaacaggtggtgatccagcagcagattgccatccaccaccagcagcagttccagcaccggcagtcccagctccttcacacagctacacacctccagttggcgcagcagcagcagcagcaacaacagcaacagcagcaacagcagcagccgcaagccaccaccctcactgcccctcagccaccacaggtcccacctactcagcaggtcccaccttcccagtcccagcagcaagcccaaaccctggtcgttcagcccatgcttcagtcttcacccttgtctcttccacctgatgcagcccctaagccaccaattcccatccaatccaaaccacctgtagcacctatcaagccgcctcagttaggggccgctaagatgtcagctgcccagcaaccaccaccccatatccctgtgcaagttgtaggcactcgacagccaggtacagcccaggcacaggctttggggttggcacagctggcagctgctgtacctacttcccgggggatgccaggtacagtgcagtctggtcaggccctaaaggcttcctcgccaccttcatcccaggctcctggtgcactgcaggagtgccctcccacattggccccggggatgacccttgctcctgtgcaggggacagcacatgtggtaaagggtggggctaccacctccacacctgttgtagcccaggtccctgctgccttctatatgcagtctgtgcacttgccgggaaaaccccagacattggctgtcaaacgcaaggctgactctgaggaggagagagatgatgtctccacattgggttcaatgcttcctgccaaggcatctccagtagcagaaagcccaaaagtcatggacgagaagagcagtcttggagaaaaagctgaatcagtggctaatgtgaatgctaatactccaagcagtgaactagtagccttgacccccgccccttcagtaccgcctcctacactagccatggtgtctagacaaatgggtgactcaaaacccccacaggccatcgtgaagccccagattctcacccacatcattgaaggctttgttatccaggaaggagcagaacctttccccggtggttgttctcagttactgaaggagtctgagaagccactacagactggccttccgacaggcttgactgagaatcagtcaggtggcccctttggagtggacagcccatctgctgagttagataagaaggcgaatctcctgaagtgcgagtactgtgggaagtacgcccccgcagagcagtttcgtggctctaagaggttctgctccatgacctgcgctaagaggtacaatgtgagctgtagccatcagttccggctgaagaggaaaaaaatgaaagagtttcaagaagccaactatgctcgcgttcgcaggcgtggaccccgccgcagctcctctgacattgcccgtgccaagattcagggcaagtgccaccggggtcaagaagactctagccggggttcagataattccagttatgatgaagcactctctccaacatctcctgggcctttatcagtaagagctgggcatggagaacgtgacctggggaatcccaatacagctccacctacaccggaattacatggcatcaaccctgtgttcctgtccagtaatcccagccgttggagtgtagaggaggtgtacgagtttattgcttctctccaaggctgccaagagattgcagaggaatttcgctcacaggagattgatggacaggcctttttattacttaaagaagaacatcttatgagtgccatgaacatcaagctgggccctgccctcaagatctgtgccaagatcaatgtcctcaaggagacc

SEQ ID NO: 772 - protein, 1004 aa, Homo sapiens
METESEQNSNSTNGSSSSGGSSRPQIAQMSLYERQAVQALQALQRQPNAAQYFHQFMLQQQLSNAQLHSLAAVQQATIAASRQASSPNTSTTQQQTTTTQASINLATTSAAQLISRSQSVSSPSATTLTQSVLLGNTTSPPLNQSQAQMYLRPQLGNLLQVNRTPGSNVPLASQLILMPNGAVAAVQQEVPSAQSPGVHADADQVQNLAVRNQQASAQGPQMQGSTQKAIPPGASPVSSLSQASSQALAVAQASSGATNQSLNLSQAGGGSGNSIPGSMGPGGGGQAHGGLGQLPSSGMGGGSCPRKGTGVVQPLPAAQTVTVSQGSQTEAESAAAKKAEADGSGQQNVGMNLTRTATPAPSQTLISSATYTQIQPHSLIQQQQQIHLQQKQVVIQQQIAIHHQQQFQHRQSQLLHTATHLQLAQQQQQQQQQQQQQQQPQATTLTAPQPPQVPPTQQVPPSQSQQQAQTLVVQPMLQSSPLSLPPDAAPKPPIPIQSKPPVAPIKPPQLGAAKMSAAQQPPPHIPVQVVGTRQPGTAQAQALGLAQLAAAVPTSRGMPGTVQSGQALKASSPPSSQAPGALQECPPTLAPGMTLAPVQGTAHVVKGGATTSTPVVAQVPAAFYMQSVHLPGKPQTLAVKRKADSEEERDDVSTLGSMLPAKASPVAESPKVMDEKSSLGEKAESVANVNANTPSSELVALTPAPSVPPPTLAMVSRQMGDSKPPQAIVKPQILTHIIEGFVIQEGAEPFPGGCSQLLKESEKPLQTGLPTGLTENQSGGPFGVDSPSAELDKKANLLKCEYCGKYAPAEQFRGSKRFCSMTCAKRYNVSCSHQFRLKRKKMKEFQEANYARVRRRGPRRSSSDIARAKIQGKCHRGQEDSSRGSDNSSYDEALSPTSPGPLSVRAGHGERDLGNPNTAPPTPELHGINPVFLSSNPSRWSVEEVYEFIASLQGCQEIAEEFRSQEIDGQAFLLLKEEHLMSAMNIKLGPALKICAKINVLKET

SEQ ID NO: 773 - DNA, 416 bp, Homo sapiens
ggcgtttccgagagggtgtccttagaagaccaaagtccggggatggcggcagagggggaccagctcagcctgcctccccaaggtttctcagacggccctgaggacacaccccgggagagcacggagcaaggccaggacacagaggtgaaagccagcgatcctcacagcatgccagagctgcccaggacagccaaacaacccccagtcccgccccccaggaaaaaacggatctctcgacaactggcctcgaccctcccagctcccttagagaacgctgagctctgcacacaggcgatggccttggagacacccacgccgggtccacccagagagggccaaagccctgcttctcaggctgggactcagcaccctcctgcccaggccactgcccattcccagagctctccagagttcaa

SEQ ID NO: 774 - DNA, 705 bp, Homo sapiens
tgatacccaatataggctaggtagcgaggcctgggtggcgcttgagtcagtgcgccgctctccagcccgcttgaacgctccccgcagccaccgccacccattggaatggccaacaggggacctgcatatggcctgagccgggaggtgcagcagaagattgagaaacaatatgatgcagatctggagcagatcctgatccagtgtatcaccacccagtgccgaaaggatgtgggccggccccagcctggacgcgagaacttccagaactggctcaaggatggcacggtgctatgtgagctcattaatgcactgtaccccgaggggcaggccccagtaaagaagatccaggcctccaccatggccttcaagcagatggagcagatctctcagttcctgcaagcagctgagcgctatggcattaacaccactgacatcttccaaactgtggacctctgggaacggaaagaacatggcctgtgtgcagcggacgctgatgaatctgggtgggctggcagtagcccgagatgatgggctcttctctggggatcccaactggttccctaagaacatccaaggagaatcctcggaacttctcggattaccagctgcaagagggccagaacgtgatcgggttacagatgggcaccaaccgcggggcgtctcaggcaggcatgactggctacgggatgccacgccagactcctg

SEQ ID NO: 775 - DNA, 329 bp, Homo sapiens
  misc_feature (44)..(44): n is a, c, g, or t
taacggggccgtggaaaacgggcagccggacaggaagccgccgncctgcgcgcacccatccgcaacctggaggtcaagttcaccaagatatttatcaacaatgaatggcacgaatccaagagtgggaaaaagtttgctacatgtaacccttcaactcgggagcaaatatgtgaagtggaagaaggagataagcccgacgtggacaaggctgtggaggctgcacaggttgccttccagaggggctcgccaatgggccaggctggatgccctgaagtcgtgggcggctgctgcaccagctggctgaccctggtggagagggaccgcgccac

SEQ ID NO: 776 - DNA, 549 bp, Homo sapiens
cagcctcctggtgactctcgcctcctcttttccagcggacgctaccagaggacgaaggtctgactctggccaacggcccagaatttctggcccagttttgcctgaggaagccaactgtgcaggaggtcaggatcccggtagggtgagagtgggaaagttaacattcccaagagactccaagcaacaggatttcctgacctgggactattacctttctcacattacatggccagatttacttcctgctattattaaaagtacgaaaaagatgaagatatgtgtttaatggaaacaagggcaagagtttgcctgactggactttgaggaggctgtaggatcatggcgctaacggcatttggagggctgggaagggactctagccctggctttacctgcctttgtcatcagctggagcaagcaactccgcaacctcggagcctcagtttccttttctgtaaaaggcggggagggtgggtggtaagtgcaatgctgaatcagaactcatagagctgctgggtggacatgtgaagtaaaatgaggagacagctt

SEQ ID NO: 777 - DNA, 425 bp, Homo sapiens
  misc_feature (80)..(80): n is a, c, g, or t
  misc_feature (260)..(260): n is a, c, g, or t
  misc_feature (276)..(276): n is a, c, g, or t
  misc_feature (386)..(386): n is a, c, g, or t
acaaatttattaatatgaagaaatgcaaaatgtattgcttttgatatttctcttccgagatgaacaagtagcatgtaatnaactgtttgacagtttaactcaagtcatgcttcaaactgttttaatgatcaaatcaagacacatttcattttacattttattattgtacagtttttgtttcggatgatgatcacagcaatctttattctatacattttatgtgaacttttttaatgtctttaatttggattttttttttntttagtattttaacanttattttaatcctgaagacacttttttgattgtgtttcgtaagagacaacatggcctcctaaggtgcaatcctgccgctatagtgagctaatgtcctgaatccaaaggcntcagaaaattgcttttgcctttttcatgaatgttaagca

SEQ ID NO: 778 - DNA, 441 bp, Homo sapiens
cctttttttttttttttttttaaattaaaataaatttttattcaaagcatcttttaaaattacagcatgtttattcttatgctgttaactctgccaaactacaacttagccatatgaagcataaaacacttcaaaaatttgaatgtaaaccattttttaaaacaaaaagcagtcttaacacacctcaaattttagataccaatgtatttttccaagtatatagcttatatcaaaaagaacattttaaatgtttctaaatagttgtgataatttcttaaactgttgcaattatacaaataaaaaatgtttatgaaaaaactattagagttgacaaaagctgactggagaaacaaggaaaaacccttacttttgaaggccttaaatgttatcatctgtgaattggcaaatatttgtatttgaaaaattcttactacccttcct

SEQ ID NO: 779 - DNA, 404 bp, Homo sapiens
cactgttttttctgacagactttccctttgtcctttctagttatgacttgggaatggggtaacttctttatgcatagtattaagggttatagtatgaagaaatcataaaattgcaagttttggtttgcattactctaatgtgggttcatttaatctgagatcttaaatatcttgcagccttaaatcactacaaacatttgcatttttattatgccagttatttccaaaatgtattgttatacatgtcacttatgtttttaagctaatattgactgtaggataatctccttgttcccctcaaaatagtcatgaaagtgtacatgaaaatatttttaaagaataaatttctttaaattacaaaaaaaaaaaaaaaaaactcgagggggggccccggtaccccaaat

SEQ ID NO: 780 - DNA, 302 bp, Homo sapiens
tttttttttcacttttcttaaatttattctgtacaataaatacaaatgttcaagctgtcagtgacgtatatatcttaggttctggagactgacaagatttgtccatgggccctgacactcctaactgtattatcaccctgagcaagtttcctaacttttctgctcaactcactcaattcctcgattacaccatgctgacaacaacagtatttacctcactaggttactctgaggattaaatatgacaatacatacaaatgagaacagcagctaatgtaaagaagagcttgttaaatattagt

SEQ ID NO: 781 - DNA, 595 bp, Homo sapiens
tctgatatttatgggaagtatggtctaaaaaagtcccttatttttttatttattacactggagcagttactggggaaatattattctgaacatctaacaccacatatcagtgatggtttacagtagtgtagtacctaagatcattttcctgaaagccaaaccaaacaacgaaaaacaagaacaactaattcagaatcaaatagagtttttgagcatttgactatttttagaatcataaaattagttactaagtattttgatcaaagcttataaaataacttacggagatttttgtaagtattgatacattataataggacttgcctatttttatttttaaggagaaaaacaccactcattttataaaatatagtacagctcctataaggcttgtttgatcccaaatggtgcttatcttgattgaacattcagaacaaggatattattttcagtgattttgtgagatcagctgaaccacttatgataataataataaaaaaaactgctttgccctcccgtcagttgtacatggcctggaaattttaaaatttttaatataaacttttcatccagtgagtttcataacttttacgcg

SEQ ID NO: 782 - DNA, 3365 bp, Homo sapiens
ctggtccgtccaggctccttcccatcctcacacccgcgcctttctccctgcggccccggctcgctgctccagctgcccagctcttcccccgcccggccgcaccataaagcgcccggccgctgccgcggagcccagcagccagctccccagcaccgcgcggcggggacgcgagcgcgcccccgacggcagcccggacgccgagcacgggtcacctgcggcgccggcccgggcgccgaccgaggttcaacgcacggcccggggacccccaggcggggccaacgccgccgtcgcccccggcctcgcggggagcaggaagagccaacatgctggccccgcgcggagccgccgtcctcctgctgcacctggtcctgcagcggtggctagcggcaggcgcccaggccaccccccaggtctttgaccttctcccatcttccagtcagaggctaaacccaggcgctctgctgccagtcctgacagaccccgccctgaatgatctctatgtgatttccaccttcaagctgcagactaaaagttcagccaccatcttcggtctttactcttcaactgacaacagtaaatattttgaatttactgtgatgggacgcttaaacaaagccatcctccgttacctgaagaacgatgggaaggtgcatttggtggttttcaacaacctgcagctggcagacggaaggcggcacaggatcctcctgaggctgagcaatttgcagcgaggggccggctccctagagctctacctggactgcatccaggtggattccgttcacaatctccccagggcctttgctggcccctcccagaaacctgagaccattgaattgaggactttccagaggaagccacaggacttcttggaagagctgaagctggtggtgagaggctcactgttccaggtggccagcctgcaagactgcttcctgcagcagagtgagccactggctgccacaggcacaggggactttaaccggcagttcttgggtcaaatgacacaattaaaccaactcctgggagaggtgaaggaccttctgagacagcaggttaaggaaacatcatttttgcgaaacaccatagctgaatgccaggcttgcggtcctctcaagtttcagtctccgaccccaagcacggtggtgcccccggctccccctgcaccgccaacacgcccacctcgtcggtgtgactccaacccatgtttccgaggtgtccaatgtaccgacagtagagatggcttccagtgtgggccctgccccgagggctacacaggaaacgggatcacctgtattgatgttgatgagtgcaaataccatccctgctacccgggcgtgcactgcataaatttgtctcctggcttcagatgtgacgcctgcccagtgggcttcacagggcccatggtgcagggtgttgggatcagttttgccaagtcaaacaagcaggtctgcactgacattgatgagtgtcgaaatggagcgtgcgttcccaactcgatctgcgttaatactttgggatcttaccgctgtgggccttgtaagccggggtatactggtgatcagataaggggatgcaaagcggaaagaaactgcagaaacccagagctgaacccttgcagtgtgaatgcccagtgcattgaagagaggcagggggatgtgacatgtgtgtgtggagtcggttgggctggagatggctatatctgtggaaaggatgtggacatcgacagttaccccgacgaagaactgccatgctctgccaggaactgtaaaaaggacaactgcaaatatgtgccaaattctggccaagaagatgcagacagagatggcattggcgacgcttgtgacgaggatgctgacggagatgggatcctgaatgagcaggataactgtgtcctgattcataatgtggaccaaaggaacagcgataaagatatctttggggatgcctgtgataactgcctgagtgtcttaaataacgaccagaaagacaccgatggggatggaagaggagatgcctgtgatgatgacatggatggagatggaataaaaaacattctggacaactgcccaaaatttcccaatcgtgaccaacgggacaaggatggtgatggtgtgggggatgcctgtgacagttgtcctgatgtcagcaaccctaaccagtctgatgtggataatgatctggttggggactcctgtgacaccaatcaggacagtgatggagatgggcaccaggacagcacagacaactgccccaccgtcattaacagtgcccagctggacaccgataaggatggaattggtgacgagtgtgatgatgatgatgacaatgatggtatcccagacctggtgccccctggaccagacaactgccggctggtccccaacccagcccaggaggatagcaacagcgacggagtgggagacatctgtgagtctgactttgaccaggaccaggtcatcgatcggatcgacgtctgcccagagaacgcagaggtcaccctgaccgacttcagggcttaccagaccgtggtcctggatcctgaaggggatgcccagatcgatcccaactgggtggtcctgaaccagggcatggagattgtacagaccatgaacagtgatcctggcctggcagtggggtacacagcttttaatggagttgacttcgaagggaccttccatgtgaatacccagacagatgatgactatgcaggctttatctttggctaccaagatagctccagcttctacgtggtcatgtggaagcagacggagcagacatattggcaagccaccccattccgagcagttgcagaacctggcattcagctcaaggctgtgaagtctaagacaggtccaggggagcatctccggaactccctgtggcacacgggggacaccagtgaccaggtcaggctgctgtggaaggactccaggaatgtgggctggaaggacaaggtgtcctaccgctggttcctacagcacaggccccaggtgggctacatcagggtacgattttatgaaggctctgagttggtggctgactctggcgtcaccatagacaccacaatgcgtggaggccgacttggcgttttctgcttctctcaagaaaacatcatctggtccaacctcaagtatcgctgcaatgacaccatccctgaggacttccaagagtttcaaacccagaatttcgaccgcttcgataattaaaccaaggaagcaatctgtaactgcttttcggaacactaaaaccatatatattttaacttcaattttctttagcttttaccaacccaaatatatcaaaacgttttatgtgaatgtggcaataaaggagaagagatcatttttaaaaaaaaaaaaaaa

SEQ ID NO: 783 - protein, 961 aa, Homo sapiens
MLAPRGAAVLLLHLVLQRWLAAGAQATPQVFDLLPSSSQRLNPGALLPVLTDPALNDLYVISTFKLQTKSSATIFGLYSSTDNSKYFEFTVMGRLNKAILRYLKNDGKVHLVVFNNLQLADGRRHRILLRLSNLQRGAGSLELYLDCIQVDSVHNLPRAFAGPSQKPETIELRTFQRKPQDFLEELKLVVRGSLFQVASLQDCFLQQSEPLAATGTGDFNRQFLGQMTQLNQLLGEVKDLLRQQVKETSFLRNTIAECQACGPLKFQSPTPSTVVPPAPPAPPTRPPRRCDSNPCFRGVQCTDSRDGFQCGPCPEGYTGNGITCIDVDECKYHPCYPGVHCINLSPGFRCDACPVGFTGPMVQGVGISFAKSNKQVCTDIDECRNGACVPNSICVNTLGSYRCGPCKPGYTGDQIRGCKAERNCRNPELNPCSVNAQCIEERQGDVTCVCGVGWAGDGYICGKDVDIDSYPDEELPCSARNCKKDNCKYVPNSGQEDADRDGIGDACDEDADGDGILNEQDNCVLIHNVDQRNSDKDIFGDACDNCLSVLNNDQKDTDGDGRGDACDDDMDGDGIKNILDNCPKFPNRDQRDKDGDGVGDACDSCPDVSNPNQSDVDNDLVGDSCDTNQDSDGDGHQDSTDNCPTVINSAQLDTDKDGIGDECDDDDDNDGIPDLVPPGPDNCRLVPNPAQEDSNSDGVGDICESDFDQDQVIDRIDVCPENAEVTLTDFRAYQTVVLDPEGDAQIDPNWVVLNQGMEIVQTMNSDPGLAVGYTAFNGVDFEGTFHVNTQTDDDYAGFIFGYQDSSSFYVVMWKQTEQTYWQATPFRAVAEPGIQLKAVKSKTGPGEHLRNSLWHTGDTSDQVRLLWKDSRNVGWKDKVSYRWFLQHRPQVGYIRVRFYEGSELVADSGVTIDTTMRGGRLGVFCFSQENIIWSNLKYRCNDTIPEDFQEFQTQNFDRFDN

SEQ ID NO: 784 - DNA, 444 bp, Homo sapiens
atcgatctcggcacccgacacctataggggcctggctcccagctggtgctgaagctcgtcagttcaccatccgccctcggcttccgcggggcgctgggccgccagcctcggcaccgtcctttcctttctccctcgcgttaggcaggtgacagcagggacatgtctcgggagatgcaggatgtagacctcgctgaggtgaagcctttggtggagaaaggggagaccatcaccggcctcctgcaagagcttgatgtccaggagcaggacatcgagactttacatggctctgttcacgtcacgctgtgtgggactcccaagggaaaccggcctgtcatcctcacctaccatgacatcggcatgaaccacaaaacctgctacaaccccctcttcaactacgaggacatgcaggagatcacccagcactttgccgtctgccacgtggac

SEQ ID NO: 785 - DNA, 419 bp, Homo sapiens
gaactctcgggaacttggctgtgttgtcctgcctcagagacaaattcatctattgtaggcctagcccctgcctttgaaaacaaggaaaggttggtagaacatcaacacagcatggaatttccagggaggtctcatttcaaaacttcataaagaacaagaaccacctggacttctgtgagggcgatgattaaactggcctgagtttgaatgaaaggataatgtatgctcaacctgtgactaacaccaaggaggtcaagtggcagaaggtcttgtatgagcgacagccctttcctgataactatgtggaccggcgattcctggaagagctccggaaaaacatccatgctcggaaataccaatattgggctgtggtatttgagtacagtgtggagatccagcagctgtgcagtgcttgtgtt

SEQ ID NO: 786 - DNA, 179 bp, Homo sapiens
gcctactactactatacggctgcgagaagacgacagaagggttaaatggctttttatactattgcatcttctgtatttaccatcaattcattgtgttgtaattaaaagaaactgtcaataaataagagaacagaaaaatggttcacaaaaaaaaaaaaaaaaaaaaaaagtcgtatcga

SEQ ID NO: 787 - DNA, 362 bp, Homo sapiens
gagactatggactgcttttaaactaccataattccattttttcccttacataggaaaactgtaagttggaattatcttttgtttagaaagcatgcatgtaatgtatgtatgcagtatgccttacttaaaaagattaaaaggatactaatgttaaatcttctaggaaatagaacctagacttcaaagccagtatttgtttaggtcatgaagcaaacaatgctctaatcacaatattaactgtttaattaaaatgttgtaacaagtataaaacagggaatgtaagtttattaccaaagtgatatgtattccaaaaaagtcatagaagatgaagcactataatattgttcccatatatttaaaat

SEQ ID NO: 788 - DNA, 666 bp, Homo sapiens
  misc_feature (620)..(620): n is a, c, g, or t
tggcacgaggagagattctaactattgcttttaccttcagtgtgaactagtgtggtaacaactttgaaaaggcaggccgggtgcggtggctcacgcctgtaatcccagcactttgggaggccaaggcgggtggatcacttgaggtcagaagtttgagaccagcctggccaacatggcgaaaccccatctctactaaaaatacaaaaaactagccgggtatggtggcacatgcctgtgatcccggctacccaggaggctgaggcaggagaatcgcttgaacctgggaggcggaggttgcagtgagccgagattgcgccactgcactccagcctgggcaacagagtgaaactctgtctcaaaaaaaaaaattgaaaaggcaaatgtgattgaatatctgaaaagctttaaaagtggcctttctgttacgtctgtggcacaaatggctcatgagcgcaggacacttatggtcttgtgtcctatacttcatgtgtgatgccaccagaaatgttatggattccgtattgaacacactgagagtggtatgagccctcaggactgcaccacagagtaaacacaaccttgatatggtggcgaatatgtgtgactttcttggttcattngtggttggggacaaaatcgaagtatttgtctaaatagtcaatattc

SEQ ID NO: 789 - DNA, 475 bp, Homo sapiens
  misc_feature (130)..(130): n is a, c, g, or t
  misc_feature (246)..(246): n is a, c, g, or t
  misc_feature (417)..(417): n is a, c, g, or t
gtggaagaaaggaatactcctcctttccattgtagtctagagttaagatttcaaatccataaattagaggacctaaaattagagggcaattaactgctcattcattgggcccccagtcagcacgggggtntggaagagatcgggaataatagcgcagaccaatgagcctagggagatgctttcatcgtctctccttccctcaagtgttctggaacctatcatttgaattagccgagtcaggcaggngggggcggggaatccttccgcccttcttaggaggggctgcattgcagggggagagtgaactgacagactcagtcactgaagagggaaaaggagtgagaagacaaagcccgtcaaagccccaacagcttttgtatttctcccagcccggcgccagacccccggaactccccnaagcactcccttccatcttttgaacaccgccagttaatttgattgataacaggaagct

SEQ ID NO: 790 - DNA, 339 bp, Homo sapiens
ttttttttttttttttttttttttttttttttttttcttgtttaaaaaaattgttttcattttaatgatctgagttagtaacaaacaaatgtacaaaattgtctttcacatttccatacattgtgttatggaccaaatgaaaacgctggactacaaatgcaggtttctttatatccttaacttcaattattgtcacttataaataaaggtgatttgctaacacatgcatttgtgaacacagatgccaaaaattatacatgtaagttaatgcacaaccaagagtatacactgttcatttgtgcagttatgcgtcaaatgcgactgacacagaagcagtta

SEQ ID NO: 791 - DNA, 555 bp, Homo sapiens
ttcgacggtgttctggcacaaaggttatctcaagagccgctagtgaaaagaaacatcgatcctaggcacttgtgccacacagcactgcctagaggcattaagaatgaactggaatgtgtaaccaatatttccttggcaaatataattagacaactaagtagcctaagtaaatatgctgaagatatatttggagaattattcaatgaagcacatagttttcccttcagagtcaactcattgcaagaacgtgtggaccgtttatctgttagtgttacacagcttgatccaaaggaagaagaattgtctttgcaagatataacaatgaggaaagctttccgaagttctacaattcaagaccagcagcttttcgatcgcaagactttgcctattccattacaggagacgtacgatgtttgtgaacagcctccacctctcaatatactcactccttatagagatgatggtaaagaaggtctgaagttttataccaatccttcgtatttctttgatctatggaacagaacaactgttgcaagatacagaacaccgtcgaag

SEQ ID NO: 792 - DNA, 574 bp, Homo sapiens
  misc_feature (402)..(402): n is a, c, g, or t
  misc_feature (519)..(519): n is a, c, g, or t
  misc_feature (540)..(540): n is a, c, g, or t
  misc_feature (573)..(573): n is a, c, g, or t
caacacgagatacacatttacataaatctcagtcatttacaaaaataaatcttgtcttaatttaaaccaataaacagacttgcaggggaaaaagaaaccagcaagtagggctaattatcagtaacaaatagatgggggtgtttgctctgtgtgtgtgtgtgtgtgtgtgtgtgtgtgtgtatatgtgtgtgtttgtgtgaagtgaagtgttgctgctgtaagtagtgtccataagcccatttgactgtattacaagttagttaattactcatatagttggccacatattatgggatctatgttttctgaaaataattggttaatggaagttatctaatatattttaactgttcctgttaaaaacaataggcttcaagatgacataacaccaaatcaaaaatnaccaaaggaatcattttgtttgttagatttgtaatttagcatcattggcaataaatctactcaaacgttctgctaactttttatttattcaagtagaatcccaatatgaaaaatggnaataagcataaaccaaccagntaaatttccactaaccctttaatcagctaagcng

SEQ ID NO: 793 - DNA, 4689 bp, Homo sapiens
ggcggaggccgggccaggcggggctgtagggctggggcaggcggcgcccgggtctggccctggcctacgggctaagcgcccggccccggggccgcggatccggcagccatgtgtggatcttgaagcgccatgtggtcttctgaagcgctttgacagttctaaagggctttatattgcaaactgatcaaagcgcttcgtagccccggaagcgcttaggcatctccgaagtagcgctgggcaaagtgaaggcttcctgatctcagaagcacgttgtgggcttggaaacctacggcagcctttagtcaattttggatcgctttgacttctccaacacggtttggcatctctgaaaccttgagaactgtgatgggcagtggaaagaagagggaaaggtgcccatggcgtccgagcggggcaaggtcaagcacaactggagcagcacgtcggaagggtgtccccgcaagcgcagctgcctccgggagccctgtgatgtggccccctccagccggccagctcagaggtctgcgtcgcgttctggagggcccagcagccccaagcgcctgaaagcccagaaggaggacgatgtggcttgctcgcggaggttatcctggggctcatcccgccgcagaaataactcctcctcctccttctccccacatttcttgggccctggtgtgggcggggccgcctccaaaggctgcctgattcggaacactcgggggttcctgtcttcagggggatcccctctgcgtcctgccaacgcctctttggaagaaatggcttctctagaggaggaagcctgcagccttaaggttgattccaaagatagttctcataactccacaaactctgaatttgcagctgaagctgagggtcagaatgatacaattgaggaacccaacaaggtccagaaaaggaagagggatagacttcgagaccagggctccacaatgatctacctgaaggctatccagggcatcctggggaaatcgatgccaaaaaggaagggagaggctgccactcgggcaaaaccaagcgcagcagagcatcccagccatggagaaggaccagccaggagtgaaggaccagccaagactgcagaaggagcagccaggagtgtcacagtcactgctgctcagaaggagaaagacgcaaccccagaggtcagcatggaggaggataagacagtgccagagaggagcagcttctatgacaggagagtagttatagaccctcaagagaaacccagtgaggagccccttggggaccgaaggactgtcattgacaaatgctctccacccctagagttcttggatgactctgactctcatttagaaatccaaaagcataaagatagggaggtggtgatggagcacccctcttctggaagtgactggtctgatgttgaggagatctccacagtcagattctctcaggaggaacctgtctccctgaaaccttcagccgttctggagccttcttccttcaccaccgactatgtcatgtaccctcctcatttgtacagtagtccttggtgtgactacgccagctattggaccagcagccccaagccttctagctacccctccacaggcagcagcagcaacgatgcagcccaggttgggaagagcagccggagccgcatgagtgattattcccccaactctacagggagtgtccaaaacacctccagagacatggaggcctcagaggaaggctggtcccagaattctcgttcatttcgcttctccagaagctcagaagaaagagaggtgaaggagaaaagaacattccaagaggagatgcctccgcgtccttgtggaggacacgcatccagctccctgccaaagagccacctggagccaagcctagaggagggcttcattgacactcattgtcacctggacatgctctattccaagctatctttccaagggacctttacaaagttcagaaaaatttacagcagctccttccctaaggaatttcagggctgcatctctgacttctgtgatccccgcaccctgacagattgcctatgggaggagctgttgaaagaggatctggtctggggggcctttggctgtcaccctcattttgcacgttactacagtgagagtcaagaaagaaatcttttgcaagccttaaggcaccctaaggctgtggcatttggagaaatgggcttggattactcttacaagtgcaccacgcctgtcccagaacagcacaaggtatttgagagacagctgcagctggctgtgtctctaaagaagcccttggtgatccactgccgagaagctgatgaagatctgctagaaatcatgaaaaagtttgtgccccctgactacaagatccataggcattgcttcaccggcagctacccggtcattgagcccctgctgaagtactttcccaacatgtctgtgggcttcacggcagtgctgacatactcctctgcctgggaggcccgggaagccttgaggcagatcccactggagagaatcatcgtggaaacggatgctccctatttcctccctcgccaggttcccaaaagcctttgccagtatgcccacccgggcctggccttgcatacggtccgagagattgccagagtcaaagatcagccactctccctcaccttggctgccttgcgtgagaacaccagtcgcctctacagtctttaagcagagaagggcgaccagcagcctgacagaacacaggctggcttgaagtctgtgtctcaggtcgaggatgtgtttagagagctgattggaacacagaaaaccaggacaggatgttttcctccaagcgggtcataaggcttcagcttctgggtggtgggtggggtggggtgggcatggaatgaggggtatggggactgcctgtaatagcactgggattttgcctcccagccaaaatgctccagggtaggcagcaaagaagaaagagtgcgatatgagggtacagtgagtttggcagtccaaattctgttctctgcagcctgtttttgagtagttggtgaataaagtcacccgcctacttgtctaagcacatgtgggtgtgtaactcagttcctggttctcggttctaaaaacagacttccaactgggaaactttttgggggaaattaactggacacctatctcggaggtttattttcttgcaaccagtgaagtcgtcctcctcccttccctggataactcttcagtttgactgtcactgttctggtgtcaactccagcgtcggcacaggcagaaggacttcagctgctggtctcattggttccactgccattgatatgggggggtgcagaggagcactcattgtccatgatggagatccaggacagactgggggactccgggaagaggctttcttggggaagaggaccccaaaggaggtacttcctcctcactgatgccctcagggctgctgtgtgggtgtgttaagctgataaggttcagtttgcggcggaaactacctgctagtcttgtgtcaggggctgccagcctccttttgttttacttttgcccccttcttgggaacatttgaccaaaaataatcctcatttcatcttgtgtacagtcctttgtgtaccccgcccaggttgagaggtgaatcagcgtaattctccgaagctctgctgggcagctcagccatgttacattgtctatgcagaataagcaggcctggtgtctgcaaatgtaccagtccttctcccgcatctcctgggtgcccccttggctttgcctctcctgtgtcctgtctttctgcgttttagaagtgagagcctctccttcaccttttgagcaactgagtcatctcaagtcctgagctctgctctgccgcctgctggtgccttgtaaaggtatactcgttacaggccctagaggttctaatggtccagggttaagtgagaggagactgtactttgtttcaaaggatccttcaccctgatctgcagtgaggtggatagatcacctggagtccctcgtctgtggtcttggaggcttaaattgtaaaatacatcccttatggaatcctaaattcctctaggtgtttttggaaggcgcatttgagccttgtgagctaaaatggaatggatttaatatttcctatctggcatttccatcttgcccctggtacacaagtcactggcctggaactcagccttgattcactgtccgtcttcacggattagctgtgctgttatgttgtctgtgctgcagattggcccatgtgggaagtcgggggggacctgatttcctgcttggaagacttgggggactgccgagcatatcaaagtgtttatagtcaccaagtgaactgcagcacaaccatctcctctccagcaagccctgaagtcagtagtgcctgcaggtgaaaccaaccagccctgtgttagaggaggaaaagcggagatgacatggaagtctccaagcctgtgccatccacctgccaaggaaaagcacaaggtgctatctacttttctctctaggatttagattatcatttatgtgctgttgcacagtgaaacctcacctgtgtgggcgtgaaagctgattggcattgtttttgattcagctttttggatggctaattgttttcactgtgctgtgggaatgcctctgtattttttcccctctttggccatctttttctgaaaataaagtgatggatcctctagcc

SEQ ID NO: 794 - protein, 761 aa, Homo sapiens
MASERGKVKHNWSSTSEGCPRKRSCLREPCDVAPSSRPAQRSASRSGGPSSPKRLKAQKEDDVACSRRLSWGSSRRRNNSSSSFSPHFLGPGVGGAASKGCLIRNTRGFLSSGGSPLRPANASLEEMASLEEEACSLKVDSKDSSHNSTNSEFAAEAEGQNDTIEEPNKVQKRKRDRLRDQGSTMIYLKAIQGILGKSMPKRKGEAATRAKPSAAEHPSHGEGPARSEGPAKTAEGAARSVTVTAAQKEKDATPEVSMEEDKTVPERSSFYDRRVVIDPQEKPSEEPLGDRRTVIDKCSPPLEFLDDSDSHLEIQKHKDREVVMEHPSSGSDWSDVEEISTVRFSQEEPVSLKPSAVLEPSSFTTDYVMYPPHLYSSPWCDYASYWTSSPKPSSYPSTGSSSNDAAQVGKSSRSRMSDYSPNSTGSVQNTSRDMEASEEGWSQNSRSFRFSRSSEEREVKEKRTFQEEMPPRPCGGHASSSLPKSHLEPSLEEGFIDTHCHLDMLYSKLSFQGTFTKFRKIYSSSFPKEFQGCISDFCDPRTLTDCLWEELLKEDLVWGAFGCHPHFARYYSESQERNLLQALRHPKAVAFGEMGLDYSYKCTTPVPEQHKVFERQLQLAVSLKKPLVIHCREADEDLLEIMKKFVPPDYKIHRHCFTGSYPVIEPLLKYFPNMSVGFTAVLTYSSAWEAREALRQIPLERIIVETDAPYFLPRQVPKSLCQYAHPGLALHTVREIARVKDQPLSLTLAALRENTSRLYSL

SEQ ID NO: 795 - DNA, 83946 bp, Homo sapiens
gatcctgaccacaggtaagagtaactcttagttagctccaaatgagaatctgaacccgccccatctctggggagacagctggctggcttcattctctccctcactgatgggtctattcatctctgggtcaccaaatatttactgagcaccaactatgtgtcaaacatcatacttagcactggggatgcagtgacctacttggctcctaactctaggagctcactgtcctctataaaggacatagatgtataatgagacaactactatatggcttggtgcaatctcggctcactgcaacctccgcctcccggattcaagtgatccacctgcctcagcctcccaactaactgagattacaagtgtgcaccaccatggccggctgctttttgcatttttagtagagacagggtttcgccatgttgctaggctggtctcgaactcctgacctcaagtgatccacctgccttggcctcccaaagtgctgagattacaggcatgagccactgtgcctggcctgtattttctttatattggacccaggtatgtgcatttgttcatttgtccatttttgcagttttaaaacatcctgagcacttaccatttcctgtgttagttcttgtgctagataccaggatcttgtgctagaaaaggctgtttctgccctcagcctctactgtctagtgggagagcagcctggcacaagcaaccagaaggtagcgtggccgacaggtgctgctactgccaaatgggagggcaattgcatgtgtgcacttgactgggccatggggtgcccagatacttgattaaggtgattttgtgtgtgtctatgagggtgtttctggttaagatcacctgtgaatgagtggactgaggaaaacagagccctcccactcccagtgtgagtggactttattgtctgttgaaggcctgaatagactgagaggctgagtaaggatggattttctttctctgcctggctgcctttgggctgagacattggtcttcctctgcaatcagatttgaactggaacttacaccatcatctctcctggatctgcagtgtgttgacggcagatctgggacttgtcaacctctataatcccatgagccaattccttatattaagtcatatatattgcatatatagtaattcatatatatgagatatatattttttctattggttctggttctgtttctctggagaactcagagtaatacactaagcaatggtgggagtccgtgggagccctgaaatgtcttgcgaattgaacaagagtgcacttgcaaattctttacgcatttgaagcctagactagggcaatgaggactgagtaagactgcagaagggtctagctggcctcctccccacccctctcctctctcctcctctgtcctctgcttccctcccttcctttctccttccctcctctcccctcacttcccctcgcttcccttcccttgtcctcccctccccattgccgttcctccctttcttctccctttctctccccttgccttccatgcctactgtaggctctcattattcttagattctttcttttcccctgaaacacctgctaccaggtaagggtcagatgaacgtatttcacactaagatataaataactaattagagtgttgctacccatacctcaaccctagagcttggtgatttttttttttccaaaaagggaacaatcccttagctaaagagccgctgctccaggggaggaaacgtaggcttgggcccagagataggtggcagcaggggtttctggccacgaagccttcaggccttcccaggtcccagcgtgtgtggatcttaaaacaccccctgccaagggctttgattccaattttggtttcagctaattggtttcagctgaggtgggagaggccacgcctcaggatctgcctaggccaggactgggaatgggtctcccaggtgactccgcgggcccataggcaggcagatcctgggaagacgccctttactcagtaaggagggcccaggcgtccaaagcccaccagggggcagcggcggcattcttagccccacttctccgcgctcaaaggccggctgagaaaacgcgagtgactacccgagggcgctgttactccacaatttttctgcaaaagctaaggtcggcaaacatggatattcggatttccattgtttttgaggctaaatcaaaagatgcctctggggaaaaggggcaacatgcactgtcggatcggcattcatatggaaaaacagaggtaggaaacattttatacattttgaagatactttgatgtgcagtaattttgaaactttcgtagggcacctgtttttcaatgggcggtgtagagtaatgctgccaaacacagagtttgagccctagtaccacacccactagcggtgtgacttttcctggtgactgagtctctctgggcctcagttttgcataggggacttgttccgcccctccttgtcctaggtgtaaatgctgcgttggtgttgcactcataggctcacctggccaaggaccagcttctgtctatattactctcaaacttgccacttggagcatatttcattctcatcccctttgccttcacactgctattcaccccagttcagaagggcagagcaatggccaaaatgtaagactggggttgggactgtgagaagaaaggaacaattgccagttagcaaattattataatggccacgtgggctccagggctgacataatgaggagcttggtatgtgtggtaattacacacacttgagttgagtcttaggaaaacatataaaagaaacgttattttctttttttctaaaggctatgaaggtaagaagcattccataagcaattattatgcagcactatttcaagggttgggctctgtcaatgagttttaaccactaaagaaaaggaattctaattgggggcgaaggtagttttaggaatggcagcttcggagttttgtactgacaggtgctggtgaaaagctgattaatcccattcaatactataataggctacatttgtatagcactgcatagagtaccaagtacttttatataaatcctctcatttgatgttcccaaccaccctttgagatatgaagaggacaaagagaattattgctgtcattttaaaaaccagctttattgagatataattcatataccaaacacttcacccatttaaaatgtgcaattcaatgattttatgcacgttcacagatatatgcaacgataaccacatcaattttcatcaccacaaaaagaaccctctacccttagttatcactcccttttcctccctctcctccctccttgcaccctcccctccaaagcaatcactattctattttctgtctctacagatttacttatcctggacatttcatataatatgtggtcttttgtgactggcttctttcacttagcataatgttttcaaggtttattcatgttgaagcatgttcagtacttcattcctttttacacctgaataatatcccgttgtatggatatttttgttcatctcttcatcagttggcatccatttcatttatccattcattagttggtatacacgggttgtttgcaccctttggttattttaaataattgctgtaaacattcatgtacaagccttggtgggggcatatgctttcatttctcttaggtatattccagggagtggaattgctggatcatatggtaactcaatgtgtaggtgtttgaggaactgccagagtgttttccacagtggctacatttgacattctcattaggagggtatgatttctccacctccttaccaatgtttgctattacctgactctgattctagccattctagtgggtatgacgtgatatctcattgtgattttgatgtgcacatccccgatgactgatgatgtcaaacatctttctcatgtggctgttggccatttgtatatcttctttggaaaaatgtctctgatcctttgcctgttttcaaactgtcttttctattatcaagctgtaagagttcattatgtattttagatagaagtcccttatcagatatataatttgcaaatgttttctctggttcagtgggttatcttttcagttgtttgttttttaagagatgggatctcactttgtcacccaggctggagtgcaatggtgagatcatagcttactgcagcctcgaactcctgggctcaagggatcctcctgcctcaccctcccgagaagctgagactataggtgtgcactaccgtgcctgtctttccttttcttgacagtgtcttttgaagcacaagttttaaattttgatgttgttcaatttagtttttcttttgttgcttgtgcttttggtgtcatatgtaagtggcaattctgaggttatgaaaatttatcactaagttttcttctgagttttatattttagctcttatatttaggtctttgattcattttgagttactttttgtatatggtgtgaagaaaggatccaacttcattcattcttttgctggatatgtgggtatccagttgtcccagcagcagttgagaagactgtcctttcccctctgaatagtcgtggtacccttgttgaaaatcagttgaccatagagacatggacttatttctggactttcaattctattccattcatctatatgtttatctttacgccagtactgcatggtcttgattactgttgcttttaaagttttgaaattgggagtgcgagtcccccaagcttattcttcttttcaatattgttttggctatttgaggccccttgtaattccatgtgaaatttagaatcagcctgtcagtttctacaaagcagccagctgggattctaattgggcttgcatttaatcggtttatcaacttgaggagtgttgtcatcctaacaatattaagtcttctaatacatgaacataagcagtttttccatctatttagatatttaacttctttcaacaatgttttgtaattatcggagaataagttttggacttttactaaatttattgctaagtgttttattctttcggatgcaattataaatggaattgttttcttaatcttatttttggatttgttcactgcaaatgtgtagaaacacaatttttaatatattgatcttttatcttaaaatcttgctgaattctttttttttttttttgagatgaggtctcactctgtcacccagattggagtgcagtggtgtgatctcggctcactgcaacctctgcctcttgggctgaagccatcctcccacctcagccccccaaatagcttggaccacaggcgtgcgccatcatgccaggctaattttttgtatttttagtagagatggggtttcactatgttgcccaggctggtctcgaaacctgagctcagatgatccgctcacctcggcctcccaaagtgctgggattataggcgtgagccaccgtgcccagcctcatttattaattttaatatatttttagtggatttcttaggattttccatatagacaagcatgttaaatagagatagttttacctcttcctctctgatctggatgcctacaatttagcctttacctccaaggaatctaccaatttcctctctattgcctttcaccacaaccacaactgtttttgagagcacacttagacttgaacttcacactctgttgcaaatgaagtcagttctctagggagggattcagagctcttccttccacggcctgattgtgcccctggggaaaatctctgagccatcctctgcgggattgagggcagggaaaatatggttcacttctctctgaatgacaaccttgtttttgtttctcagtgccaggtagagaggaggcaacagactcaggtctttttggtttgcttctctgggttagaactcctgccccatgagccaaggcaaggacattcaggctccctgtatcatattggtaccatgctctcagagtggagcctctgtcccctgagagttcgggcttggaggaagaaaagagaccctcctggcaacactcacccagaacttagtctcagcattaggtcatgagtgggaatggcaggataagcaatgctgacatcctgtctctccccaggaagactgactttcaattaggatctgtggagaaaaggagccttgtgttcttagctctaccctaaggtgtggagcttctgcctcactgagctgtgagcggggaggaagggtgtgggtcttgggtcaaaatcactgattcactgatcttaccaagttttaatagattttcttgaataaatgtttcttcatttgctatgtacatttatgaccatttccagagactttaaatatttatttatttttattattatactttaagttctggggtacatgtgcagaatgtgcaggtttgttacataggtatacgtgtgccatggtggtttgctgcacccatcaacctgtcatctacattgggtctttctcctaatgctgtccttcccccaccccccgacccaacaggccctggtatgtgatgttcccctccctgtgtccatgtgttttcattgttcaacttccacttatgtgtgagaacatgtggtgtttggttttctgtttttgtgttagtttgttgagaatgatggtttccagcttcatccatgtccctgcaaaggacatgaattcatcctgttttatggccacatagtattccatggtgtgtatgtgccacattttctttatctagtctatcattgatgggcatttgggttggttccaagtctttgctattgtgaatagtgccgcgataagcatatgtgtgcatgtgtctttatagtagaatgatttataattctttgggtatatacccagtaatgggatggctgggtcaaatggtatttctagttctagatccttgaggaattgccagtttcacttgggagtgaatccatagacctcttcatgctaccatattgaagctgtaacccttactactgtcatttagtagatgctgtgatttgaatgtgttccccaaaggtttaagcattggaaacttaatcattaaaacaacagtgtttggaagtgaggcctaagaagaagtgattgggtcatgagggtggtgccttcacaaatgcattaatgtcattgtcatgggagtgggttagttatcatgggaatgggtagttataaggtaagcctgatccctagtgcctctgtcttgtgcacttgcttccgccttccaccatgggatgaaccttgttagatgctggtaccatgctctaggacttcccagatccagaatcatgagccaaataaacttctattgtttatcatttacccagtgtgtggtattctgttataagccacagaaaatgaactaaaacactagatgagggcaatgttcatctatttgggagactaggggtagtagaggggaaacgaaagtcacccagaatcagaatatagtacaaaggcctactaaaagattccagggtgggaaaggaataccttggtatggatgttaagtatatcagatgttagtggatagaaggaccactcctgcacatggtccttcaaatgctacttgaacaccccaggaaaggggaattcactactattagtttagactgactattatccccataagcaatatgaccaagtaaaaccaaaacagctgtgcctgccaagatgagcaggatgtacaaacaaaaggaaacagaaaagaggtacttcaggatcctaaacaactttatgttaccagaaggtcatgggcatgctacaaaaaggcaactagctgttttgggataccaggtgcccaagagactgctctaattttagaaataacacagtgcttactaaagaggtccaggactcatgggtctggaatgcaacgttcttccaccctcaggccgtgcatactcatgttctggtgttgattctgctccaattattttctgatgttgagggagggaggaccagaccacagaactggcatgtgcctaaggaatctgccaagagttattaaatgataactgaaataataaattatttaaatttacagagacttgtaaatttacagagttggttatgaccactgtctgataggctaagagctcattttcacagtggccttgtgctgatatcctctgactctccagatccatcctctgcccttctctgccagttctctgccctagaacgctgacctcctaggctggaggcatcccctgagcccccaactgcatcttgtggttgtgttcagccaatggggagcaccagcagatcagagttaggagagaaagaggttaaggtacttcttctctgctctctggctgggtctgtggccctgccttctctgtcttatattttgcagcacaattttctgtccttgtcctgctgggcctaggagtgctgctgacatctgttttccgggtgtcttaccaccccttgtttttacccttaacacccatacttctgaaacagaccttcattaaggtcatctctttatttgaaccaagtgggaatgaattatatttcctaacagactccttgatactattatatcttgccctgctaacaacattccttctgtctctcccaattattatcaagcctggaaagaagcaaaccccatgttactgtcttagcattaactctaggggacctcataccctcatctgggtcccctgtaaacaaaatgatgactttgctcacatccttccctggaattttaagcctctgtggccctgtgaatcagtatttattccactagctccttttacacagctagactgttgcttgaaatcagaacttgtttggttcctgagcttttcctccatcaatgtgaaatatgcagtctttgtaccctggtgggatagaggcacattcaacctatagcatatagggtcctagtttaattttgaatggtcatcctctgagttcttacctcaaagccttagctaataaataagctttcttgtccatgagcaggaatttaaagttcctgcttttaaagtgcttttaaagtgagaaatggggagatgccaaagggcagaaagtttcagttttcaagatagaaaaatgctggagatcaaatgtattgcaatgtgattatagttaacaatattctattacatacttgaaatttgctaaaaggaaagattttaaatatttatcaccaaaaaaaaagaaaaaaaaagaaagtgataactctgttaggtgaaggctatgttaattgacttgactgtgattatttcacaatgtctttctaagcatcaagttgtacaccttaaatatataccatttttatttgtcaattagacttcaataaagttggggcagcaagctacctccttaggcctgtgttaattcactcaagctctttctcagtattcatagccaaaatgactaaactttccatttataaatagagggggcctcccaagacctagagacccatcattgcttttaggcattcatgtcacacgccagctcaggcaatattttaccaagttcatacttgtttgaatcttttatttatttatagtgacagtaatatatttggcacttacccgtcctcctaaaagcctgataaccccagttatcttgtgctataagtggcctagctttcactaacttagaaatgagggtttggagggggaagggagacagggaacattccgattagccaacagtttcctaatgcaagtatgtctgtggcacagccatgtcagctaccagggaaacctgtgaattcaccacggaagccgtcaggccagcttagaggcatccgtgatgaaaatcccgagttatttctggagtaggtgattgacgtttcaaatagaagatgacattttaatgggatctaagcttgctgtgatcggagttaataagtataatgatgatgataatgatatttacattatctctttcatccaaagaacccttcagttcttttatcgcatttgccttgaaaatgtcccttcggagttgggaggggaaggtgttattaatctgttcttcaggaaagaaaatataaagagacttaattgccaggctttcaggctccattttggtggtaagaagagatatttaaataacaaattaaacttggagaaattaagcttggcgaaacaccagtctttctcagttcccagtcatcctatataatgctgccagatcaagctccaataatatcacttcttgactgaaaagtcttcaggggatcctggcagactgccaatttcagtccaaatatcctaactcagcaggcaaggccctcaatgttccaaccaatgttgtctcaccatgctcttacacttaccctgtgtttcagccaaataaatccgcttgcttgaccctatggtctgctctaagcaccccattctcctttaataatgttcattccccttgccctaacttgttcaatgtcagtcttccctgttgcatgtacattccaggagggtagggactgtcaccactgtatcctcagggcctagcaaagttaactggcatgtaacaggggctcaaatacttgcttctgaagtgaacacgatgctctcccacctccatgcctttgcttctgcggctccctcagcctagacaacctgtagtcccatctcaacctattgaagccagagctgtccttccaagcccagattaaaccccaattcctatgtctggtctccctgacttgggaacagacacggcattgttcttttgtagttcgtacattctgctgtatcataatcatttgtgtaattgtgtagtcgtccttccctgcctctcccaaaccatcagttctggaaagatcggagctgtactccagagcctggcagagtacgggcacttgttaaacacgtgctcactcgtctaaaatcgttgatgaccagcattcttcagtgagcagaattcccacttccagaatctatagcttgctacggagggtatttttctgtttcctctccccttattctttcagaggtggggaggaaggtcagtcagggaacccctgccaactcttcctttaagaagtatctccctttctcctctggaggagcagtatatctggcactgaggtggagggctccatttccgactgggacccacagtaggtttgcaaggtggcatttggcattttttagcatcattgccagtgacaatctaaataatgcagagataatcaatgcaacaccaactgagaaggtgtgattaaatcaatgacatccccaaggaattttagaactggtctttgcatctgatgagcattcacacagctcattcagttatgataaaaatatgccacatgaactagctctggggctgggtgaaagcttagaagcggtgcatttttgatagactgaagacccctggctaatagcaatgtgggcatattgactatctgtgacataacactatgtataatttagaacgagctgcttgaataaccgtgttgtagaatattcagggctgttaaaactgatgatgtagatctacatttgttgagatggaaagcggccaacaatattgctaagtcgaaggaagcagactacagaacagcatgattatgtaaaattattgcatatttatactgctatctatttacagatctgtgattattctctgaaatgttaataatagttatctctgggtgataaaattgtggggtagtttttaaatttacttagttttttgtgttgcttggattttaacagtaagcagttatttttacaatcattgaaagaaaacaatacagattgaaaaaacttgttgaaaaaagcctcatttaaaaaaaccttcaaatttgctaaaagatgcttactatataacaaaaacaaactcttgtatgaatgagcaaataaaaaaatcatttacctgcctccataactgaaccacataactgactatgtgctgaatatggttaacagtgaaagggatgaagggacgccgttttgaggagaggcacaggggaactcaagctctcctgacctggtgtacatactatgcacactttttaagtgcctgaagtatgaagtatcacttcaaatattattttaacccaagctttgatggcaattgatttacaggtatggtatttttctaagttcatagcctaagggacaagagagaaaatatcccatgactgacagcaaagaaatgatgacttcattccccatggcagtttctgttgcaaagaaaagagacatacactgttgatcacagtacaactcaacactttattccattgtgattggtatacatgtaagattgagacatcaagagactaaaaatcagtgcagaacttctctgaactaaagggccgtgaaaggcatgattggttttggcacacagagtggataaccatacattggctggaatgaggtggtcaggaaaataaaatgcacaaatctaacaccatgttgaaatcatgtctgagttctggagaaagttaaagtgtaaataattacaaagactgacatgcaactctttaccttacattattcatctacagactatttttctcccttagagatgaggagatggccttagtaatctgttcagagtagctgaaaagaccaatcaatacacattagaaagatctgcctgatttctatagcaattcattatagctgaagaaataatgctaaataatgtattttctctatatcatcctttaactaaattgaatcacatcacccaagtaattctgacttaacttttacttagttaaatataatttctcctgtcttttaatgtcaaaaagcagtttccgttagtttatccattggtgtatatcacaacagatgaggaaaacttatgtgatagtatctttccttttcaaaaataacattatgctaatgagaacatcaaagaagtaatactatgctgcaagtaatttaggttttcacatcatcaatcatatagggagtccaaagaagccagcctagcaggtaacatagcagagcagaatgcaatgtagaagaggcacacagagtctaagtgatttctccagacaaaagagaaggaaagacagaaagaagcaaaagaaaggaaaagtgaaaaacagccttctgcagaacaaattgttacaaagaaaaatctatttgcttgcaattgattaaacataatagagaagagttctttgatttgggatgatagaagtaaagatattaaaaattatatgctggtaagcctaaactggcagattgggccatttttcctgtggttgtatttgagatgttgagctctcacagggagaatttttgcttttgccaaggaagggccagatttaacccaaaaggacaaccttgagaacattttttctttgttaacttgggcatgtggctaacattcgttctctctctggtaaaaagatattattcatctctgatgagatggttcaaaatatgacagtgaccaagacgtggtttattcacaggatgcacataattggatatctgcatatggcatgaattaaaaagttaagcaacaaggaagagaaggaggagaaaaaaacttttgcaaatttctgacataaaataatcaaataaaagggaaagatagtggttaaggatgttttcattttctcagaggtttctccttccatctgctacgggggaaatgaaatgaatgaaagtaattctctttaggtcaccaacataaggaataatttgactgcaaacatagaagtgagcagagcaagatttgaagtgatacttcttaatctctttgattcttaatcttaaacaacaagccacaggcaatacaggaaaggtggagatgactaggaagtgtgataatgtgcctggatcagttaccattcattggaaagtaccgtttcccctgcctgttaataggctgattcctgcaggtttgagtaaaggaatcatctcttccttcagtgccgcattgttctttgtaagagatccgtgtcagttcaaagttgtgtaatttaaaggctagagaagaaagaagtttaaattggatcccacagtaaatattcacggatatttcaaagtagaattgtccactgtctggggttgggttcaagcatcaaggtgatcgcttcctgaacatgttcattgaccatgaggagctgtttactctggctcatattagactaccagtaattattttcagacatgatgtctcttttgaaagaaatgactttgctggactaggataactgcaggggtagaagactggaaatacggtgagtcagggtaggtggaaacagaaatgagtagaaggaaaaaaaaaaaagagttcctccaaggtcatatatggtcagtaatgaagcaaaaattcatggtatgtgacttaaagactttctaagacattgtacccatgggatgtttccaagcttcttgatctttaatcttttagcaaccttctgatactggatttaccttcctaggtgtggtgccctccttctggaatttagatctctggggcaaaccctgtcaggatgtgcctctgtgtagttaacactgccccagacagcagctctgatttcagtcacagttctgctgagaagcctgtctgcccctggcaggggtgaggggagggttgttggtggcagatgtagtcagaggcagaggagaccaatggcagacagggtggacctgcaggaaggtagccagaaggaaagaccttgggttttacccaaggtcaaggtggctgtgatagaagagcgaaaggcaaaagtaactaactgaatttcagaattcagaagtaaaagagaaaggaggaggatccctggaccagggactttcacaggaaccaaacatgattcatgaaaaaaaaaaaaaaaaaaagcaagcttatctgactgatcaagaagacattcttcagaatatactggcaactaaataattttcacaccaaaaatacagacactaaatgagtgtttccttactgggattaatcacattttgataattcattagctctgtatcttctaggttgcttaattcatttagcaaatccacagcttaggtaccacctcgaggggagggagggtgggggtgttgaatgaagcaattcaacttagaatcaaattttgtaaacaagagttagtagcacagtggcacagtagattgtcaaggaaaacaacaggagtgggcacagagtcatcggccttgcctgtgcggtcttgccggcaaccgggggggactctgcagctcaggagtctactttcttgttaattaaaactgagcagcaggtgagcagcccatccaccttttccagttcagacatgctcacggggatcagcatatggtccttcagtttctcataaacctacagtgggaatcaaggaaaaggaagaaaagaaggattatgttttaccatcctcagaagtggagaatcaatttgatttgtacatctaggcttttcattcatttaatcccaagacacacaggcagtctcaaccacacacatgcccacagtcatccctatagagctggtgggaactggttaaccactagccctgtgctttaacctcaaggccaaagatgtgtcagaaatgtggttttgctagagatgcctttactctgccattgtcattgctagattaagtggtacatggaagttggtgaccatgtgtcagtctgaatattactttctcttcacactttatttttatttatttatatatttttggagacagggtcttgctctgtcgtccaggttggtgtacagtggcgcgaccatggctcactgcagcctcaacttcccaggctcaagtgatcctcccacctcagcctcctaagtacctgggacaaacaacagatacacaccactatccctggctaatttttattttttattttctgtggagacagggtctcactattttgccagggctggtcttgggttcctgggctcaagtgatcatcctgccttggccttccaaagtgctggtattaaacaggcataagccaccacactaggccttctcttcacagtttaaaaccctctcaactatactttaggtttattttcttaccaacactgctggaaaaatttgacaagatataacttaagtatttcaggttaaactgcttttaaattacaggtatgaattttattagcatcttttgacactaatagaaagcatatgtcaaaacttcaattaacagttcatagattgttctgtgatgatcaaacaaagcatatttttaaaaacagaatcacttgaaagtgtactgcctaataacaatctcctgtgcttctttaggaagcactgcgtttcttaaaattcagcacagtggttaattaagagtgttggagccagagtagggtcccaaacccagttctgtcaacctactacttaaagaattatttcagtgaagtgacattccctctgagcctcggtttacttctctgtaatattggaatagtaatgttgcccccatagggctgttacaaggactgaataagataatacacctgggatgcctggcaccctgcctggcaccggggaagccctcagtaaacagggatattattaatactattgttatttttgagagacaaacggctgaatcaggggggcagtgaataatcatctggtaggtcagatgatcaatgtggctaaagagggatgaatgattcagacctgtatttctcaaagtgagttctgtgactgggtgcttgttgatattgcagattctagggtgggggtccaggaacttgcatttttagcaaccctgatgtgcattaaagtatgagatccattactcatctaagagctgggtaagccccagttctgggtcaggagtactctattttcctcaggttcacactttcagccatggaaatagaaaaaattatctatgtattccctcacctttttctttttatctgctcagaaagaggctgtgattagagagtgaacctagtaattatatcatattgcatatttaaaaggtagtataaaatattttctaatatttgcgaagcttaagacaaaaaaaaaagatcaatgattactaaaggctcttctgtaatgcatagtataaatatcttgttcctccgggcagagatgagatgctgagtgcctagaagatatggacacttgaagaatctatggacgagcactgttatgtttgcttggtagggtaaaatcgaaattactaaagtatatagatgagactggcagagtatgctgaaaaacaagggagattttcttagaccaggaaaagcattccagatccagagagagctcccttattggaacacaaacacagagactcctggagcgaccagttggctgatttcgagtgtaccatattactacctgctctatcttttcaatgaagagctttttgctacctagcacgggcagtttcttctttctgcagccctgacaatgaacacccaccactctgggtcattcatactcctctacctaaagaaacaaatggccaggtgtggtggctcatgcctgtgcactttgggaggctgaagtgggaggatcctttaagcccaggagtttgagactagcttgggcaacataaggagaccccgtctctacaaaaaataaaaaattagccaggtataatggtgcatgcttgtagtcccagctactcgggaggctgaggtaggaggattgctcagcccaggaatttgaggctgcagtgagacatgattatgccactgcactccagacttggcaacagagcaagatcctgtctcaaaaaaaaaaaaaaaaaaggactgggcatggtggctcatgcctgtcattccagcactttaggaggcccaggcgggcagactgcttgagctcacgaatttgataccggcctgggcaatataatgaaaccccatctctattaaaaatacaaaaattagccaggttgtggtggtatatgcatgtagtcccagctactcaggaggctgaggtgggaggatctcttgagcccgggaggtggggttgcagtgagccaagatcgtgccgcagcactccagcctgggtaacagagtgagaccctgtctcaaaaataataataataataataataataataaataaaaaaataaaaagaaataaaaagaaaagctgcccttttctgagggacagctcagatctgtcagaaaacagcgataccgttgaccatctaattgtaggtctttatgcttaatgagtatctgagggtgggaaagtacatttaatcagagctggggcatagacttgggtgactacttatttgaaaatctgagtatttatttgaaaagccttgaatacccggcatgatcatctcaattactatgcatgcattagtgagcaatgacatgaatgagaaaagtgaaacacattttccttgtgccctaaattgtattatcctttcttttcttaattgtttgatatgtatacaggaaaaggaggctcctattggtcactcctttatgaaaaaatccccagggaggctgacccagctgcagtggtcagaagggatatttttttacctttgcactttctggatactcttccggggttcggtgcagcaagacgtgccctttgttggggatatttagatatatacagtttgctgctatgtcatcaggcacagtgagtttgtcgtagcggtggtcactcatctgttgcatgatctataaagagaaacaaagcaggcctaagaagagtaactccccacactttcaaacagaaggaaggcagtgtggtaggatacaagcttggaactgacactttaggctgttcctctgttcaaattcccatctattacctccagtcacttagaaccagaaaaggaaaacttgattaagctatgagtctttggaagaattgcaagggtttttgttgctctttaaaagtatgtgtttgtctctcttttcttttaaggttttaaaaccgtctattatttttctagtctttgttcgtaagacttatcagtaagatgcaaaatggccacatgtaaggcccagcaggggttttgatatctttggctgagtaagcagggctgcctcctctataggaaagaagggccataccagtaatcagaatagtcaataatgtgaatctgattaatcagtaacaccacacgtgtgtgcatgcacgtgcgtgcgcgcgcgcgcgcacacacacacgctttgctcttccacatacttttaaactgaattcacctgttcattggcaggtgatggccttaatacaatgagcataaaagccacctggggagaataagaaaatcatattcccaggcctcacccttagggaaagctggtttggcagattttgggtgaggcataggaattttgcattttgaagccctacagataattttgaggcagaggttccctggaccacaactggagagaaaaaaaaaaaaacctacttggcaggtctgttcttcaaatgatgaacttattagtatcctagcataaaataactttaaaaacaacacaaaaatgaactctgcacaaaatttaaaatattgatacctcatccttacctcctcaacataatcaaaactatcaaaaaacaacactcctccccctaacaacaagaatatccaaattaaaaacccacaaaaacaaatattatttggggtttagtcatgtagactctttctactctttatcaatatccatacagttttaaggaatctgctgaaatatcatgctaggaaggtataacatgatcttttccacaatctggttctaatctacctttatggtcccatttacttttacttttcagtgtttgtatggaaatgtgcttcatattactaggcagacatgcccactcagtcatgggggcactggatagtaagatttatggtatgaaaagcagaagagagacagcatgcttcctgtagaaaattcattcctaagagtggcacatagtaagcccttcctgactcaccagtcaggtaaatcattcacttctagtgtggaatatgtcaagggtggagagaggccaagagcaatcccataatggaatacccttcacatggaatgaaacatcaggaatggggatgagcttatgcactgtatgaaaggctgagacatacagatgaacaggtcacagacccagttttccaagattacagtttagtggaggaaactgacagaaaaatagataattatattacaataagaactagcagggcaccatgccaaacattttacatttattatctaatctcaaacttctattttacagatgaagaaactgcactgagagaggtcaaataacttgctttaggtcacataggtagattcaaacccagatctgtgcaactcaaaacgtttcttaatcatctcactttgctctttctcaacttctgcagcaggaaactacctcctacaaactacataacacctactttttcacattcacttgatacttattattcattctctggcagtaccattaattcttttcttgtatgtaatcctgttatgacctgctaccgtctggtataggtaaaggacttaactggacatctctcttgcacttttgaatttaaattgttcttgaagggataggcccatagaggggctcacctatggagtgggtctttctttacagccctgattagaaaccttagatctaatccaacatgtgggcaattaagaagttaaagacactcctaaagattaacttttctaagaaaattaacaacatattcaatttagccctctttataaaatggatatgcccagaaataatatgaagacgcttgagagaataaaaaaacagacccaagtagctcttttgttacgaattgcaatttagttcttcttatgcagattttctttttggctgcttccaaaacacaataatagcagcttccatttattattgtgtgcaagggaacaaatgaagaccgcctgagcccgggagtttgagaccagcctgggcaacatggcgaaaccctgtctctacaaaaaaattagctgggtgtggtggcacacacctgtagtcacctcctcaggaggctgaggtgggaagatcatagaggttgccaccagccgagatagtgccactgcactccagcctgagccacagataatctgtcttggagtctaatccttagtcttaaaaaccataaaagactagacctaccatattctcacaattacttcttcagcttccttctttctaaggcctacgttaacatgtaatctagtagtgttgcaggcttagcatcccttctacctagatcccctagagagataattgctacaaagttcccaaagtttttggaataaggacaaattttactatgagtttttgtgcagttttgctctcttcaaccagactgctacctccttgaatgcaggtccaggcataatgaggtggacagagcatgggcttcagagtcagaaaggtctgggtctgaagccttgctcagccacacactaattgtgtgactttgggaaagtcacatatgccctgtgagcctcaattccctcagcagtaaaatgggatgggaatgctatacctatcctccacagggtaactctgaagattatttaaaaaaaaccccaaaacagataatgtacataaaatgcttagcacaagcttctagcagatattaaatgtgtaataaaagtcggttcacttccctctttgtttcttgcaagtcacttgacatatagcaggtgaccaaaatatgtttgcactaactggttcatttcttcattcctttcacctttttaaacgctacagagaacctcaggagggcactgtgatgaactgtgtggtcaatcacatgggtaaacaattgaattccctcagagaaacaaggtatggtctatgtccagaaacagaaatacaactcattatttttaatgtgaaaaaacatggctaaaatcaacaaggccaaggtttgtctgtttttcaaagccatacagaagggcactatactctgtggtcctaactcaaatgactctggatgacaaagtaagacaacagggggttggatctggaattacctgcagagtatgtggcacctaagggcattcacagaaagaaagaaaagaaaaacttttgtgtatatcaaaccgaacacataagcctctgtcaggttgtgaccccaatttagtaaaatagtccataaacccaatgggcagattgacttcttcatagtagagtggggctgcctcgatatgcaaggtggcagttaggatttgtgaaacttctagacaatagcttttggtcagtctcacaaacgtgcttttttccaggtgcagggaatgggattccactatgtctaaatctctgtttattatgtgctgttgagggtggaccaagatggccagtctgctcatgtttgcagtcagaactggacggtcatcctgtcacatgaattggacctagtttacccaagaagttcagaatttcttccagacaactggggaggcagttctctgagccagaggtttactaagtaggaccccagtggtttgaggacctcagagagatccttagaacatgtatacacaaccactgctacctggtcaacctagacacaaacaaaacaaaatctagaaaatctattactcacattgacttacttttctaagcaattgggaaaactgtgtgtggcatattttggcccacacattcaggctaagtgctcccaccactcataatcaccagataactgccagttggctttccattttaatttgtgatctgcagaagcttcattgtactctttacccacagataaataaatcacccatgtctcttagtaccagatgaattgaaagagaaagaaacatggcaagactacatctcttaggcctgactttattcactggatctagcggtctgggcaaattccccacctctcagtgtgactcatgcatgtccggaggtgactacaaagcaaaagcatggaatgtcatacattccagaggaagtgttctcagggattgttatcagtgctgacttcttgtttaccagtgaggaaacaaactaaaatctccaaggttgtgcccatctcagaaagtaccacgtgtcactgaagtgacagggcctgtccagttgacttcagctgtttccatgctctgccctatcccccaacctcacctccttgagtgaacaatcctctcccctacttggttcctatttgaattgttcttcagttactggcatgtatttgaaattgtaatcactcttcattctttaatgcttcttccttttctgagccttattttttatcatttaaagcttctggtggggacattcctatacttactaacataaaggccagtacctactttagaattatttgaggacagtttcaatttttcattactgggaggaaaggaattataatatctttagtggggaaataatttaatgctgagaatatatgaagtaattcattgataaattctactgagagttactcttaaaataaatgtcttaacaaaaccccaacaaagctaccttaggagaagcttttcaattaatttatcaagactccacggttatcattttaagacagatttaagaatatgcccaaagaaatgacttttaataatgaacaggccccatttggagcagtgagtagttctgcttaactgaaaaaaattacaaaagttatgtcaggtgtagcctttctaaataaaagggatgtatgaagtggtaactgtagataacaaacaagaaatatgcttttcccccttgaaaatgctaaaggtgcttattataaacacaaagagattttgtctttcgaggcaaagaacagatttctcctttcctgttggagtaattattttcctttctcttgtatgttgttattgtctgaataagcttaccatttatttgtagctgggtttaggagacacatgtatgtacacaagacagggtgctggccattcagcagggaacatgcagagaaagatgcaggaaggctgtgttgctcttgaacatctttccctttttacaccctaatgggcactgtgaggatgtgttaacacatcctgtctggtagggtatcacctcaaagagctcaggctcctgaggactgagcaacagtgaggccaaggaacaggttctgtttcccctttgtggatgcacagaggctttgttaaaagatgagcaccatttcaaatatcccgagaatgcagctgttgggccgtttagttctgttccaacattttttcctaaaaaagcatggaggaggtggtactgctccagtgctgtatgtagtgtttttccaaccccagggactgtacttcctgcttctcactgtgtctcaagccagaatggaaaggagacacacctaaaccctccacacgtcaccacaaattcctttccctaagagcagattacttgatatcctgagaggccccagactcaactctgaatgatacaaatgagttctacaggatttgggggaaagatctgagaagtcaagttgctgttccgaatgccctttctgaattttgccaaaggaatgattccactttatggaaactaatttgagtgattattatggggattagatcaattggtggtcagctctgttcaacaatcttttatggtacgcccccttcgggctcagcacaatggcagtgtgaggtgggaaagggaaagagatgccttcaggagatgaaaagctatcatttaaggcaggacaagcacatgaagagtatgctagcagtaaaaagacagtcaacctcacttttatcataggcaactccttaacgaagaaggcacgcagctgtagggaggaaatagctctgagaatcattgtggccacactgtcatggtctgttatgcagctgctggttggaggaattggccttgttccccagggtggagctgtcacaaaatagagtgggaactgtctggctttcagcccaagagaatctgcatggcaagttgcattaacaaccaggcatttccggcagttcccaacatttctgggaattttctcatccaaacgactgaaagcccactccattctcttgcttcttactcatgctttctttgtataatggtaattatgttttaaaaaatcctgggctatgttgtttcatggaacaatttagaacttattggtcaaactctgaagcaaaggtatataaaaggtagttagagatgtttagggaatattcaaagcacatttttgggtcactcataattgatctttatattcatatatgtatatatatatatataacataatgtacccatcttaacatatcaaagctaaaccagtattaaaaacaactgactatggtctattgatacaatatatgatgcccaagtacactcttcattgctactgcatatctaaaatcatttatttatttatccatccatcaagagtgtattgagagcctgacaacataccagcatcaagccctggaggtctttttaaggctgagccaatatagctatggataacattctaaaactgatagcatattttcatgttttatagtctttccacagactagttcaaaatgaacactgcctgagaggggctttaagatgactgactagaggtactggacacctgtttccccagcaaagaagagccaaaatagcaagtagataatcatactttgaatagacatctaagagagaatgctggaattcagcagagaagtgacagaaaacacctgagatactgaaggagagggaggcaaggtagacagcctggctggaatcagctgggagcccagagagggtccctagtgagaggaaagggtaagtgagagattcccagtggtacatgttcccatgttgactgctgaaatcctagtcataagagtctctcaaaccccaaggaccctgaaactggtattcccggggtccgtgtggcagcattgctccagagatggagcccactcgggtcccatgtacccacttagttctggacagatagagagccagttagaaagcccatttcccaccagactgcattgtgccctgggacccagcaacccctgtatcttcacatccctggagccccactaacagagggctgcagggtgcaatgcaggttggacacagtagagtggcagggtctccagaactctagcccacacattgtactgcacactggggagggtgatcctgggacaaagggagctgaagcatgtgtttcccagagcatgaaacctgatttcctggggccactgtcaatgaaataaaaccctgttcccacagtagaagggctgcttcacactagcatgtgtcctgaggtcaggctgccaccattgtcatagccacctgagcaaaccgtctggggcttggaaattgctctgccttgttcaccacagcctgggcccatgggccccatggggggcctgagaataggcctgcctggcctggcaccacccctgtcctccatcagtgcccaagcacattgcctgggggcctagggattgcccctccccattggttgacccaggtgcatatgcatgccatcagggggcctaacaggaccagaaaacctactgctgaaacccaagcatgctgtctggaggctgggggattgcctcaccttgtctacaacagctggcatctgggcaatactcctggaacttgagaataggcctgcccagcctgccaccaccaccactgctggcaatcttctgcatgcactacctggaggattggggactgggctgcccagcccattgcagccaccgctaatatcagtgagtgcccatggggagcctgaggactcatccagtcatctggcacactgctgccataaccagcacccaagaaagctgcctggaggccccaaaatcagccctctggacttgctaacactggcgcccacatatgccaccccgggacccaagaacaggcatgcttggtctgccgctgccaacagcagggcctgaggactggcccacctggcgtcctatccccaggaaaacctcagcataatctctactaacaacggcagcctacgccactgaggaaatcacagacaccactgatggtgtatagccaaagaaatcctatggagactgcaccaccatatatgcccagaataaaagaaaagtaccctaaccaaccaacaccatagatctatctacaggaaaatgtcttcccctatgaaaaccaatctaaaaaattggaggaagtgactgttacaccagatgcacagatatcaatgaaaggacacagaaatacaaaaaagcaaggaaatatgacacttccaaaggaacataataattctccagagacagattccaataaaaactaaatttatgaagtgcctgaaaaagaattcaaaataacaacattaaggaagttccatgatatagaagagaacacagataaacaataaaaagaaattaaaaaaacaactcagggtatgaatgagaaattcaccaaggagatagacatataaaaaagaaccaaagagaaatcctgaaactgaagaattcaatgaatgaaataaaaaatgcaatgagaacttcaacaggatactaaatcaagaagaatttcagaactttaaaaagaagaaaaaaaaacaagaaagaagaaagccaatgtgacctatgggccaccataaagcaacaaaatatttgaattttgggtgttccaaagggtgagagaagtttaatggcatagaaaaacaatttaacaaaataataccttaaaactccctaagtctagcaagagatttagaaacaggaagctcaaagattccaaaatagatacaaccccaaaaaaatcttttccccagcatattataatcaaacagtctaatatagtctttatgtccccacccaattctcatcgtgaattataatccccataacccccaggtgtctagggagagaccagagggaagtaattggatcacggggacggttccgcacatgctgttctcatgatagtgagtgagttctcatgagatctgatggtttgataagtgtttggtagttcctcctgcattcattctccttcctgctgccttgtgaagaaggtgctttgcttcccctttgccttccaccatgattctaagtttcctgaggcctccccagcctttcaggactgtaagtcaattaaacctctttcctttataaattacccagtcttagacagttctttaaagcagtatgaaaacggactaatacagtgtaaaaagtcaaagacaaataattctaaaaacagcaagagaaaaacatctgatatggtttggctctgtgtccccacccaaatctcatgttgaattgtaattcccaatgttgggggagggacccggagggagatgattggtcatgggggcagatttcccccttactgttctcatgatagtgatttctcacaagatctgatggtttaaaagtgtgtggcatttcccccttcactctcttttcctcttgctccttgtgaagcaaggtgcttccttacccttccaccatgattaggtttcctgaggcctcccagccatgcctcttgtacaacctgcagaattgtgagtcaattaaacctcttttctttataaactacctactctcaggtagttctttatagcaaagtgagaatggattactatagcatctagacacaaagaagtctccatcagactaacagcacatttctaatctgaaactttacagtccagaagaaaatgggatgatatattcaaagtgctgaaagaaaaaaactgccaattaagggtactatatccatccagtaaaattatccttcataaatgaaggacaaattcagagtttcccaaacaaccaaaaactgagggaattcatcaccaagagaccagccctccaagaaatgcttgaggaagtcctacgcctggaagtgaaagaacaataccttccatcatgaaaacacacaaaagtataaaacttactggaagagcaaacacacgaatgaggaagagaaagcattcagatgttaccactacagaaaaccaccaaaccacaatgataaacagtaagagagaaagaaaagaacaaaggatatataaaacatccagaaaaccactaaataacaggaataagtcctcacatatcaataataaccttgaatgtaaatggcttaaatttttaacttaaagatatagagtggctgagtggattaaaaaacctgtgacctatccaaagtaatgaaggttattaaaaaatatttttttaaaacccatgacctaactatatgctgcctagtgaaactcacttcacctataaaaagacaaatatgggctgaaagtaaagggacagaaaaaatattccacacaaaccaaaagcaagcaggagtagatatatttatatcagataaaacagatttttaatgaaaaacagtaaaaagaaacaaagaaggttattatgtaatgataaatggatcaattaagcaagagaatataacagttctaaatacatatgcacccaacactgaagcacccagatataaaaagcaaatgttggctgggcatggtggctcacatctgtaatcccagccagcactttgggaggttgaggtgggtggatcacttgagctcagtagttcaagaccagcctaggcaacatggtgaaaccctgtctctataaaaaatacaaaaattagctgggcatggtggtgcatgcttgtagtttcagctgcttggaaggctgaggtgggaggatggcttaagcctgggaggcagaggttgcagtgcaccaagattgtatcactgtactccagcctgggtgacaaagtgagaccctgtctctaaaatgaaataaaataaaataaaataaaataaaataaaataaaataaaataaaaaacaaatgtcattagatctaaagggagagacagactccaatacaataatagctagggacttcaacactccactctcagcaaaagacagaaagtgaacaaagacacgttagatttaaactgcactttagaccaaatgtaccaaaaatatatggaacatttcatccaatagctgcagaatacacattcttcttattagcacatcaagaacattcttcaggatagatattaggccccaaacaagtatcaacaaatgttaaaaaatcaaaattaggccccaaacaagtatcaacaaatattaaaaaatcaaaatcatgacaattctcttcatagaccataatggaataaaacaagaaatcagcaataagagaaatgttgaaaactacaaatacatggaaattaaacaacatgctcctgaatgactacaaggtcaatgaagaaattaagaaagaaagaaaaaaaaattccagaaacaagtgaaaatggaaacaacttaccaaaacctgtgggataaagaaaaagcattgttacaagggaaatttataccaacaaatgccaacattaaaaaagtagaaagatttcaaaaaaacaacctaatgttgcacctcaaggaactagaaaagcaagaaccaaacacaaaactagtagaaggaaagaaataataaagatcaaaacagaattaaatgaaatagagttaaaaaataatactaaggatcaatgaaactaaaagtttttttttgaaaaaataaagaaaattgataaactgctagactaaccaagaagaaaagagaatggatccaaataagaggagggaattcttcctaactcatttcatgaggccgggattaccctgataccaaaactagacaaggacacaacaaaaaaaactacaggtcaatatccctgatgaatatagacacaaaactcctcaacaaaatactagcaaacaaaatccaacagcaaatcaaaaagatattacaccatgatcaagtgggatttatcccaaaggtgcaaggatgcaagggatggttcaacatacataaattaataaacatgatatattgcatcaacagaatgaaggacaaaaaccatatgattaatagatggtgtgtattctctaactcagctccaattaaaatcctcattcttgtttcttgttttatatcatctttcccttctatttttagttatgttattttgctgtacttaggtgtctttgtaagctgcttttatgaggtgaggtgtgattatacaatgtcaaacagttcttctaaaaacatgtttttaaattatcacactattacaagtgcatctcgtaaaaaattcaaatatgaaaagttaaagttctgttggacttaactgcatacacttgtcaaaactcattgaattatccatttaaaactgtaattttattgtaaggaaattatgtcacaataaaactaatttttttttttttttgagatgtagtctcactctgtcacccaggctggagtgcagtggcactatcttggctcactgcaacttctgcctcctgggttcaagcaattctcctgcctcagcctcccgagtagctgggactacaggcacacaccaccatgaccagctaatttttgtatttttagtaaagatggggtttcaccatattggccaggctggtctcaaactcctgacctcgtgatccacccgccttggcctcccaaagtcctggcatgagccaccacacccggccaataaaattaattttttcaaaaagttaaagtcccctttcctccatagtctatccattttaataactctgaaaaccctcctaaagtctcctgatgcaatttcctttaaaagacacactcactcagagcctgccttcaatgaagagaaaagagctgccagtccacacttttgcattatccttctgtgcaatccacaccagtcaccgaacttccatctttcatcagctttggttgctctccagagatctttctcaaattctctctaacaagcttcagggatgggaccagacaaacttctcccccaaacagagatctgggtttccttcctcttgccactattccttcttgtagaatttagtatcatgtatttagtatcataccacaggacttcttagctgggaaggaaggcagacttttctctatgtctgagggactgtgtgcctaatgagaatgagcataataaaaactcactgcagatacattgtattttaatatacatatgttatcaacagagaaaggcactatatggaaaatgtgataaatgaaaatctttcattctgtaggcatttctttctaaaaagacagcattttagagaaaagttagcatttcataagcacttgtatttcagtaatctaggggagttatgcttgattttccttcatatgagagctatttctctaaagtgccaggtattttactcaatatgacattattctgaatgattttaggtgacattttctgttcaaggacataacaatttactttaggaatagattttctctccctgccttcatgtaggaactgacatctggtgaactccagacgcagccagtgttctcacagcgtatggattacctgcatcagaatcacgccatggttcccagtcttgctgaatcagaatttctagcggtgaaccccaggaatgggatgtacattttaagtgtgtactgtgtgtgattcttgggtacattaaagtttgaggaccactaacttacactattcaaattaatatgatctggctgggtgtgatggctcatgcctgtaattccagcactttgggaggcagagatgggggatcatttgaggtcaggagttcaagaacagcctggccaacatggtaaaccccatctctactaaaaaaaaaaaaatacaaaaattagctgggcgtggttgtatatgtctgtaatcccagctactcaggaggctgaagaaggagaattgcttgaacctgggaggcggaggttgccgtgagctaagatcgtgccattgtactccagcctgggagacagagcaagactccgtctcaaaaaaaaaaaaaaaaatatatatatatatgatcttcacacctaacaggtattgttactgctactgataatatgactggtagtagccgaactttatggagttcttatcgtttgccagggtgtgggtaaaaaagaaataagtgattagaaaacatacaaaaactctaatagattcagcgcttttcatttagctcctaattgtttttcattgttgttgtttttggaaccctataacgatgagtcacctctcagtatgtggtcacaggtttaaacttggtcccacttcgggaagagataaagggaatggctgttgtaatctatctccaaagctacctttaacatttgcaaacagatagtgtgatgagtaatatggggacccaacagcagcaacagaaccatagctgagaaaatgagatttagaaatattcttaaagattattggacaaatacaacattttgaaagatgaaaacaaggaaaaatagtaagtgattaagagcagggcaatggtagtgggatggttttgcaggagggtggtagaaaatttaatgtgtttcttttgcatgtcagtatttctaaggatgatccaaattctagtattgtgtcatgtagtggggaagttttccccggaggctgcagaataattcatggtcaaaatgtcacttctaatttagtgtctatgtttcaccctatgctttattaaccttcagccaagcaataggatacttatcaacacctacggcatttaatacatgtgatttccacagagaaacagtaacccaaaactcaaaaccctcctccttccagctcaactgacaacgtttcctaatcccttcaagaccgaaggtactggtgttggcatggctgagactatcacataggtcatgctgtgatgtacgatctcagcccatgagacagaaatcatcctttttttttaaatcttttgccaaatcaattcagccaataaacaatctaacactgctagagatggaaggcatgcaaatgtttttaagatgatttttttggtgggccttgagagagagtaacagatgaaaataaatggaaaagggtaaaggacagagactccagacttgagtgagcactgattccactgctgccaatggaaactgaaatggaagccaaccccgttagtgtcttgcaagcttaggcatcggatgcctaccagagctgctgtcatatctgagtactgctctattcctaaaatgtgaatctaggtcagtgaaatccagcaacatttgcccaccaatttttgatggtctgttcctttgtggatgaggaatgctgaattcatggtgacagggagagtttaaactcttttccaaaaattctaccaaaggcacgccattgtggtagttatttctgaagtcattttgttcatcattgtccccaggggcacagaacaggagttctgtaattatcttccaaagtgttgatctggtccctttttctccctttaaagtccatcagtcacgatgttctgttacttctctaagtgggcctcactttctgcactgccctttccactttcacagctactttcctagtccagatcctccactcatttattcatagactgtgctgtgcaatggcatcagctagttttattactcctaatccttatccctgttaaatcattatgggaaccgtgccagacagatctttctgaaaaaacaccttcagcttctactcctctgctaaaaaaaaaaatctgtgttgtcccccacagcccacagataaggaaaccccgatttcattggccaagataatttgaagcagccccaacttgtatctttcacctctctctctgtttccctgcatccagcccccattccagccattgtctcttgatggtactactgacacttccccaggctgtcctgtttgtaataaccaccactcttctgtgccagctatgcctgacgttcattcaggtgcactcagactttgagtcctgcttctggttgatcaatccctctccagaactcctaccacctttcctaggaccctgaaccatttattagccacttatgttgtgttgcacggtgacagtttttatcttttaatgttctctcttgtttctccagctaaatgggagcagccttgaaggcagagatcatgcagagatcatttctcatccgactcagtatccctgtgcttgggatagtatctttcatatattaatagttgctgctcagtaaatcttaccactgtgatgtcttttcaattgctgttttaaaagtctttttgcagaagagacagtaataagaggttttgaaaatcttagctgcttttcctatcagagttttatgtatgaattagaaaatcatgtttgttagatatccaactgaatagttatatatgtaattaaagcttcttctaagaaaatggaatgaagttggaatctttctgtggttttcctcaaacaggcataaaaacattgctaagcacaaacagatataaagatgttccggctgggcgaggtggctcacgcctgtaatcccagcactttgggaggccgaggcggtggatcacgaggtcaggagattgagaccatcctggctaacacggtaaaaccccgtctctactaaaaatacaaaaaatcagccggggaggtggcgggtgcctgtagtcccagctactcgggaggctgaggcagaagaatggcgtgaacccgggaggtggagcttgcagagagccgagatcacgccactgcactccagcctgggtgacagagcgagactctgtctcaaaaacaaaaacaaagagaaaaacaaaaacaaaaaaaaaccccagatgttccatcacttacaggcactgaaaggacaatatcacattaagattctacagtgagcccactctgaagtgatccttaccactagtgctttataattatatggttgctactttttgccaagtagttgtttgctccatcctaggtttaagacacagcatttcaccttgactggctgttataaaatttccaatgggaaggaacaacactctcgattcctactgaggctaattcaactttgttttttcaagaagagaacgagtataggagataggggtcacatagggagagctggaggcagagcaagaatgacaatccatgaaatggattctaagttctctgctttgtcctcatgggcattttggccctgtaggcaattatgcttctttagtagaatcaacatatgattattattttaaaaagtaaggtattctctaatatcagtaatagtgtgaagtttaacttttttccccctttttggcatatatcttcacacagtaagatcaggtcctgttgttaggtttttctatgagtgtgtgtgtgtgtgtgtgtgtgtgttggaggaggaggtatgggaatatgagtcaaatgcaagcttcctgttctcagaaaatgataacattagtgattttggtaacttggaatattttaatgaggaattttagcatgtcaaatggattaaatcatggcatccaaattattacccagttaggtattatatttcaagtttatacaatgtttaattctgggcaggaaaaacctaagaagtttctagttttctatggctttaatttgaatactttctttacttttactgctaatgtaatcgggatatgttattttgcacctgtatgacaaaaacgttggcttcttcaggtgcacattattcgggattgtaagctgggcacttttggaagttgcagatatccttgaaagcagtggctctcaaccttggcctgtgcattagaatcacctgcagagcttttaaaaaatgcagatgcctgggttccattccagacccagaatatcagaattttctgagataaacccagggtagtatgttttcagaaagctactcagatgcctttaaaccactctcactaggaaccactaatttaaggtcacttatagactttttctttcagaagttagagtcttgggttgaaaggccccttataaggctatgtggccaaccatccaacagatgattacccctacaatatcctatagagtcagtttaatactttttgatggtctagtatatactggacaggatgaacagcacttttaaatataatttattcctttttccctttgacattttcttgaaagcccaaaaggaaaaaaaagcacattattccctttctcctacttggccaattttgacttcttcctgccttgggactaatgctaaaattcagcatggctgttttggtgtcatagcttcaaattatttattggcttattatgccaaaacattttattttggccaccctagccttgttggcatacagctctgggaatattgtcagatgaggcaactgctgccaggaaaaggagcataaacagttgttacaaattcagaagctatttggttttgtgttttaatttcttaatacacgcatggcagatttaaaaaaatcattgttttgtggagctggtgaatacaacagccagatagtaagacaaaattaaacctacaatgggattgtcagtatgcctttcatagcagagactcaaagtggaaaatcttgtggctacacactataattccctgtgacaacaataactaaaaatgcaaagtctttattttttccatttcaatcaccctgttgatatgagctagttagttctcattctgtcttttgggttttgctagttgtcattaaaggaaattccaggcaataaaaagcatataaaatccaaacacattaagggtttttccatcttcattttttatatgaccatctataaaataacatggacatttttggacataaaagcaatgctgcagctgagtcaaaacaagaggaaatacagtctgagtgatctctattatatagttagtcattcaaaagaaaaacaggctgtgtgctatgcaatttaaatgaggtacaaagcagctcttgtgttcattcaaggaatgttagaaattcagttagttatttcaggaagtagataagaaacctaaaagacatttccattgagatgcattgtgagcattttaatttaaaattacaagtctattgaaaaaccacatactgtatttaagctccatttacatgacaaaggcacaaaaaatggagtggtgatctcataattcttttcttaccacgtccttgtagtatttttattaaaagtatttttaggtaataatttattgtgatacaaaagaacagaattactaattttaaaaaagtccaccaaagaaaactatagctgtatcccataaatatacacaaatgtaatatatgaaaaaaatgaaaacaaaaacaaaacaagacaaaacaacaaaaaattcctctcccacggggttaggaaggtgaggatgctcctcctgctgcccggccagcagatggcacagtcctgtagccggtcagtgctgcagtccctcccaggtggggtcagcagcttcctcctctgaatagtttcaggaaagttttagctaaaggtaccacctcccctgacctccctccctctctcccttccctcccttcatccttccctcccttccctccctcccttcatctttccttccttaagaaaatttttttttctccaattgactggaagagtgaatgctaccaatgaggtcaagttaaaaatcattactgagaattactgtgagtccctcctgaggcagatattactatctgtcctcctgtgacgatagcatgtaattaatccaggtttttggaaaagaaggcaatttcagggatggatctagaaaaagaacaaggtgagatgtggtatagatttactctttcttatgtctttttcccccttaattaaaaaaattaaaaacagggtagtctgtggaaaagacagtcatcatgtagaatggtaaagcagggggttaggagttaggcacacttagttattggagaattatttctgtaagtcaatcatagcctacttccaacaatgtaacatatatatttttcctaaactttaaaaaattaaagtatacaaagtgtaatatataaagtataacacacaaagtggccctctggaccatgactgcctcccttcatcttaaaataactattattctgacaggtaacagtagagagtagctttgcctcttgtttaactatgtgcatgaaagaatagaatatttattctttgggggggttggcttcttttgttcaaactttggagtaactggagtactcatctttttagagaaggcaaacattccttctggaagagtacaaacaggtctaatgcctgtgtgctaattaatttgtcttacattatttttttttttttttacaggtagaggggtatgaaggtgagatgcaaagttgggagaaaaactataggaaatgcaggttgctctaaaaactaatttggcctaaataatagtatttctaggatcagacttgctgttaaatatctagcatttgttcaaaccaacctaacttctagtacctttgccatatggatggtaaaatgcagtaataatgtcttcctttcttctttccctagattggtaccctgtattaaatgtgttgtggtggccaggcctgtaatcccagcactttgggaggccgaggcaggcagatcacttgaggtcaggagttcgagaccagcctggccaacacggtgaaaccccatctctactaaaaattcaaaaattagctgggcgtggtggcgggtgcctataatcccagttactcaggaggctgaggcaggagaatctcttgaaagtgggaggcagagattgcagtgagccaagatcaagccactgctctccagcctgggcaacagagtgagactccatcttaaatgaatcaatgaatgagtggatgaatgaatttatgtgttctgggctttttagctgagaattgctaaactcttcctagatggatgatttcatttaaatatacaatgcacacactattaactctactataatctcaaatggcaagatgatgatctccataagaatccacttcattaaccaagagtagattgcaacccattacaaagtatttcaaatgcaataaaactacccagaaacccttggggctctcagctttacctaaacatgtaagaagtagattctgaaggaaccaagtactcagagagcagtgacagaggtgagaagtaatcaagctttcggtgtgtagcacaggaaggcacaattcacctctgtttaagtaatatgccctttaaagagatgcccaagtgaccagggacttctctacagaggaaagaactgagacatcaaggtttacaagggaaaaaataaatatctggtaccaaactcacacctatcctgagactgctcagatcctggataccagtaaaaaatggaaagtcaggagataggtggaaagacacggaaggagcagacaagctcggctagaaccaatctatggcaaaataattagaaaaggttttctaattaaaaaagaagattcagtatggagtaggttgggcaactggggccaggggaatcagggcccaggaaacttgtttctggaactgtaagatcccactcaaaatgattatttcatcaggtctcagtattttgaactgtaaaatgggaaaaacaaagccaataccacttttatcacttataagtgatatatttgtctctattcatctgtcttcctgcctgtctataataacatggagtatttatatttctatgttagttagcaattaataattgccccattagatctaattaaatgaaggagcttctgcacagcaaaagaaactatcatcggagtgaacaggcaacctacagaatgggagaaaatttttgcaatctactcatctgacaaagggttaatatccagaatctacaaagaactcaaacaaacttacaagaaaaaaacaaacaaccccatcaaaaagtgggcaaaggatatgaacagacacttctcaaaagaagacatttatgcagccaacagacacatgaaaaaatgctcatcatcactggccatcagagaaatgcaaatcaaaaccacaatgagataccatctcacaccagttagaatggcaatcattaaaaagtcaggaaacaacaggtgctggagaggatgtggagaaataggaacacttttacactgttggtgggactgtcaactagttcaaccattgtggaagacagtgtggcgattcctcaaggatctagaactagaaataccatttgacccagccatcccgttactgagtatatacccaaaggattataaatcatgctgctataaagacacatgcacacgtatgtttactgtggcactattcacaatagcaaagacttggaaccaacccaaatgtccatcaatgatagactggattaagaaaatgtggcacatatacaccatggaatactatgcagccataaaaaaggatgagttcatgtcctttgtagggacatggatgaagctggaaaccatcattctcaacaaactatcacaagagcaaaaaaccaaacactgcatgttctcactcacaggtgggaattgaacaatgagaacacttggacacaggatggggaacatcacacaccggggcctgtcgtgggatgggggagggtggagggatagcattgggagatatacctaatgtaaataacgagttaataggtgcagcataccaacatggcacatgtatacatatataacaaacctgcatactgtgcacatgtaccctagaacttaaagtataataaaaaaagaaaaaataattgccccattattaattttattgatggttgtaacatagaaaccaaactgctctcaaataaataaagcagctgagttcatgcaaacctgagtttcaccaacccatttcgaacctgtgactatttccttaggagagctcattattccccagatcagtttgtcctcttattttcactacaaggtaacatgacatttttgatgctagaaacatggcaggtgggcattcaccaaatccacaggcctgtggtttaggcagtacatttgctgatggaaaatgcaatctccaacgaatgcctttctagctagtgaggattatttataggttctgacaagtagaaaaggaacatcattattaacactaactcgaatgaactctacagggaggaggactataaagtcttcataggatgcccttaacagatgtggtctgagagaatttgaccatgggaagggaaagatgaagagagaaataggggtgagttgccaagccatgcaataggacttagggcttggggtttttttcctaggtcatcagtggtcctcttttctgactgcagggtcttccttttccaatgttggtccaacatctctgaaacaatgcagggctttctcctcaaagacccagattgctccctcacggtgataatcttgtcttcctcactgttaagttcctacttcttcagatctcacctgccccttccacctgtacccctggaaacccactagaaactctacgagttgagctggtttgctcacatctcatcaatgtactttgctcagtctttgcttatgccatgtccccacctgtaattttctctcattgaattctaccctgtcaaatgccatccatccttcaagactcacatctagtctcatttttctctacaaagctttctctgaatatctaggcctcagggaacgcccccttttcctctgaactttgaagagcagttagggcctatatcatataacgtagtgctaattagtcatatttgattaccttttattttgttatgtgttagtctctctagactatttgagttacagacctattgaggtagggaccaaatgatttgagttagggacctgatctacccagaatggcagaaggggccactttttctagttggtccacccagaagaagttctttctgctaatacacacaaatgcatggtatagaccagcttaaaccctctcatcttataatcgatctcagacatatgcagaccagcctaggtaccacggatagataccacagtccctaaggagaaaaataatcttcctagacctcctgagtgacaccatttatcaaatgttttctttcaagacaccagctttttttatatgcaagaagttgacatgaacttccagatggagcagaacaaaagacattctctaaagtaaacgaacaaaagccaccatgatacaaatcaaattctgagacagattgttcagcaacaattaataaaagccttagaaacagaatcaaagataccgtttgggaagaggtggaagaaaggccaggtgagctagctcaaagagtggcagataatacagagaggaaatttagctcaaggaaacgattgcttcccagccaaaccaccacacttggcactgaggtagaagagaagagacctgaaagagcctcagggcccacagatttgctgtctatgactaagaggaacttctggctttggccctttaataagtcatgcatgctcgtgtgcaggaccagctaagaggaaggggctgcagtcctgacccaccatttattattagcactatgacctggggtgagtcacttgatctagttttctcatctgcaaaatggagataataccacctctctcattcatttatccatcccttcatcagacatttatgaagggcccactgtgggccaagtgcaaaggagcataatgatgagcaaaacagacacagtctttatccttattgggtgtccagatcatctcacggggttgaagttacagagaaggaaagggaaagcactgcattgtaacaacagaaggtcatcttctttatcaatgacttccactcttgatttagccgtgtgacctgggcaagtctaattttcttctggcaagtctactatctataaaatgaggaaatttccggtcttaaaatgttattattccaaatgcaaatgaagaagttaagctttttaggtacttctgaaccatggctttctaaaagattattatgaaatagtccagacgcaacaaaaggataagaataatataacaaaccctgtgtaccaactctccaacttaagtgagaaaacattacaaggagctcaatctggtggcatgccctcctttcccctgagggataatgttgatgagtttggtgtttattattttgaatcatggccttttttttaggaaatctggtgtgtaactaaaaacagttcaccagtgaagagttcttcctacacttaggtgttcctggcttctaatgaatgtgaggtcacaacagtgcacatcacagaagctcaaatacctgcctgttctctccctgccaaccctgcttgttactcccccagcagagagaatgtgaaaaaccctgtggcaggcacccccactacatttagaaggagcacagttttgtatttaccttaagggccttctgtgcagattcactagacccaattgcgatcaggttaggcccagccatgctgcagaaactcttcaaatgcaacccatctgccactggcactgtggagactgcatagtcctacgtggacaatagaaaaacaagcagtttagtattgcagaataattctaaaactgattaaaaacctccctgaaatacacctacttcttgaaggctgacagggaccttgaatatttggaagaaaaactgggacccacagatttggatattgctagttaaacgaagactgcttctaagaagacagtagagtcaccagatgtgtgactgctgcaacatctttgctggctgtttgatctatggagtgggctactctgggagggtgtatttgaatatcctgtgtaaacagtggctcagctggagactcacatcctcatggggaacggagcatcttgagagttatatcccttcctatgcagtgtagagagccaatctattaataatcaatagagtaaagggaccttaagaggatgtacgtgcaacacctagcacagtttacagcacacagaaggcactcaagcacaggtgacccctgattccaatctaaaaaaaatctgtatttcataacagagtcaattgggtttccaagttttttttttttttttttagaaacagggtctcaccatgttgcccaggctcatttggaactcctgggctcatgcaatcctcctgccttggcctcccaaagtgctgggattataggtgtgagccatcacgcccggccttccagatttttttttaagttgttgattgttccaggaacatctgccaggtggttgtataattatacactgggagaagacagaagatgcccatgctaacttagttgttcttgtggtagcccagtgaagctgaattattgaggaatttgaattttatagcttctaaaacttctagtaaatgtacaaacattacgaattattgtacaaagccagtgaagcgtaaacaccattactcatgacattgattcaatggttctatgattatttattaagtaattgctttgtgccaggcataaactaccttttacctaccttaaaagtatcagccaagatttcagcacctcgttgatttgtccttttggaaaggcccacaaaaaattctctgcctgtaatagatgtcatggaacatagtgagcaggtggcaccagtgactgtacatcatttcttttatctataaataatgaccttaaagcatcacacagttctctcttaccacagagaacagcttcactaaagagactacaaaaaatgatttcaaactactgcccttaagaataaactttttcaaattcaaaagggcagaaagcaggatggtggtttccaggagccatggggaagggtaaatggggagttattgtttaatggataggaagtttcagtttgggaagatgaaaaagttctggagatgcctggtggtgatggttgcctaacactgtgaatgttcatgcctctgaactgtacacttaaaaatggttaaaatggtaaattttatgttatgtatattttactacaataggaatgaaatttttatttaggcaataataaacacattgataatctctgatcagaaattaagtaatagcaatgacaatttaacagtaaaacagttcctcaaataacatcattttgctcaactttgatgaggaaaaagaaaaaattgattctgagctggggccatggtctgtagggagtttgtacattctctctaggcctgcgtgggtttcctcccacatcccagagctgtgcacagcaggtgaattttcatgtttacagggtcccagtctgagcaagtgtgggtgtgtgtgggtgagtgtgctgtgatgggacggtgtcctgtccagggtgggttgccgccttgcaccccgagcttccaggatagcctccagccacccttgatgaccctgaactggaagaagtgccttagaaaatgaatggatacaaatgattgtaataaagcatccaataatcatacaaatgtacaacaataaatgatgtcgtaggaaagtgctcaatgagcccaccatatttgtgattgttttgagctgtatggtgggaggaggggctccttacagttttatctttgcaaatatttattccctgatttaacccaccaccacaactgctgttactcagtaattggccaaaaattgggcaattatcttgtttttattaatttaaaaaaatgtgcatatggctgacatttatttcaatgcttaatattataagtgttttgggttttgatttagaagctgggtgatatttttgtgactagaaatatgccagaggaacttaactcttgtttatattagcctatggtaaaaatggttttgttatatgtcacttcgcttaaaagtcacagtttccatgaacctatcaacattgttaagtgagaatttattatactacctttttttttttcactaaaagaacagtactagacattgttgataaattcggattcttttcttataaaatgatcacgtgaggcctgaggaaacaatctggggaaagtgagttaagtgctgactggtcttcaggtctgacctctaaaagccgtgtctttgaaactacacattccatatatttgaaatcaaaacatcaaaagatacctatgtacaaagtacaaaatttctgcaggatgaaacttcattcttatttgacttttctgaaattcagcagtttttctactcagaaggcaaaacactagataaaaatggtctcttagttataggcaaataattatagtatggagttaggcaatacataaatgtgggaactctcatcttccctttatttattgaaattccacataatatgtggaaaagatattcaaagagaaattagtatctttttgcctcagagtattatggtgaagtataagaagagtagccatgcagaagtgcttgatagattttataaatattataactttaatcttcataatgtccttattaaacgggcaaatgacataggtcaggtgatgttacgacaatatccaagggcttatgttgttggcagacacaggaatcttttgtggcacactgacagttttttgggtaatggcatgattgtgttgtcctttaagaaaactcattatataaagatcaaaatttaactcaaggagaggtattttacttgaaaaaagtattatgcactttattaaatagtcagctacaatgaaaaaataccaagtttctttaattctttcaagataaaaataggtttataaattaatttatttataacttttaagaaaatcttttaagaaaaacataatactctgaggcaaaaaaaatactgatttctctctgaatatgttttctcacatttcatgtggaattcttttccaagaaacaaagggaggaagaaaatttccacatttatgtatataacaaatttatagggtggcatgcataccatttccattttaaaagactaaggtgttcggagcgtgatgtgggctgattgaaaaaaagtaaaaaaaggctaagatgtgatgggaaagtacaaagagaaggatgctgcttatctcttcaaagtaggttggacttctgtctctggcagtacgttggatgagatctcctaaataatcttcctgatggaaacaactaaaatactgaaatggacatctaaatttttttgatgtcttttgtgtcattttcttctatgccaattcacaatttttgtttttccccttcctgtctcagtcatttataggagaaaccaggccatttttcctactgactgtcctacattcttgctttgactggttgcttcctcttataacttaacatttaaattttttcctttatcctttgtattttcagtaagcaggcagtttcatgtagatggttaattagatgctcattcatatatttttttaataggactactgtgtgttcaagtggcatcagcctgattccctcattataaagtttcctgtcaagctttcatatagcagttttaatatcatttgttgatcattgcacagatccattatttttttattaggaatctgcatttactcgctgcaaccctaaaaagaaaatctctcctcaagtatttggtctacttgaaatgaaattcataaaggaaagaaaagctaaatacttgagtctttcttttacatataaattattacagttatgagttagtgttccaccaacttgcaataataaccaataagtttttttaaaaaaaacctcattacctttgaatgaatcaaagattaaatcacagtggaaattacaaaacatttaaaaaaactaaatgataacaaaaatatccacataaaaataagaaggagtctgctaaagtagtacttggaggccaagttacatagcattaaaagcttacattagagaagatgaaaggctaaaattaatgagataaaattccaacttgagatgtagaaaaaaagagaacagagtaaaaagaaagaaatgtgaaggaaggaaatacagaaacagaaaagaaacattcaagagaaagagttcaaccaagccaatagttggtccttaggaaagattaataaaattaacaaacctctggcaaacaaagaaagaaggcataaattaacattaccaatgaaaagataatatagctatagttgctgtgaagcttaaacagatattaggaaatataagtaactttatacccaacatattgaaaacttaaaacagataaaatcttagaaaatggaacgcatcaaaactgactcaggaaaatctaaattgtcacataatcattaatcaactaaatcagttttaaatttctccataaagaaggcacaagagcctgtttccaaagtttaaggaatatataattcaaatagtattgattctagagaatagaaaaagaggaaatattccctaatacattctacgaggctaatgtaactcttttatcaaaaccagacaaggataacaagaaatataaattataggccacaaaaataatagtcataacaaaatgttatcgaactaaattcaacactgtgttaaaaagagaatacatcatgatcaaatttgatttcatgctggggttgcaagactggtcaaatatcagaaaatgaattaatgaaattaactacatcaacagattaaagaaaatcatataatcatttcagtgacaagaaaaagagtttactctatcacctgaaattcatttccaggtgtttactttagagaaactcttgtatatgttcccaggagacacacacaagaatgtacatagaaacacagaagataatccacaaaaactggaaaacatccaaaaacacatcagtagtaaaattaatacatacattatggtgtattcttatcacagagaactacacaacattgaaaatgaactacagctacacacatcaacttagatcaaaagtagaaaaatcacctaagagttcatataatgtgactctaataaaggtatcttgtagctttataaaactacaagacaaacaaaactaaaacaacatacactttaggaatacatgcatggaggcaaaactcaaagaacaacaaagcaataattaacacaaaattcaagacagtggttacttgaggtcaggggagaggctggttttgactggggaccccacaggggtgtctatggtcctggcaatgttctacttcttaagtcaggaggtggacacccaggtgttcattttattattgatctttaaactgtacataaacattttataactcttttttaatgtactctatatttcacaaaaataaataaaagtagaggtaagttgctgtctatttaagagaaatggtattgaaacaatttttgccagtagctgcttgcctgactgacagatttcccagcaggaactggatttggaaagcagctttccttctgtccatttcctgataaattattaatgaggctttgaattacagagaaaagaggacatagagcacatagaaaatgttacagaccttatttcttatctaactcttcctaatccaaaaattgagtggtaatagttgtataacattatgaatgtaattaatgtcacttgaattgtacacttaataatggttaaaattgcaaatgttatgtgtgtttaaccgcaataaaataaaagagatgaagaaaagtgacaagtagaaaatagaaggcaggaacacacattaggtgtgaatggagtgccaaggaggtaaagatatcccaacatcatctcagttttgaacaaagtaactattaacacattaacttaagtattgaatataacaaataaaaaaagtctacaggtagtatcaaaggcaagcctaaatgcttagtacctactttgaagataggtcaaaactactgggcttgagatgctagggaaagacctttgaccaaaagaagagactcctagtgtaagttgcactttcacactgaggagattttagggggtctttctggctcagctgctaaaataaatggttgtgaacatagcttggttaagccatatttcaaatgttaacagtacctgcttacaataagttattcattgcatggctatgttctgataaaaaagagttatattgtaaggaagtgtgatttacacatctaacttttcacaaaagcctattttgttagataaacagactgttgttctgtactgtcaaaaagaatgaaagtgccatcaacgggagacacaaagaatattctaaggggaacttactaggcagattcaaagaatgcctgagtctgcttgggcacacccagagataagaatgcagcgtaggccttcttgactccttgttctgtgttcttagggttcaatgggcatgcaaaccaaaccccagagatggaccactgcatgagacagtggcagcacaggtgcagtacacaactccagggcatactattcacacaatccctaagaagaatggcgcccccagagctggcaacgtggtggccccacccatagcgacagtatgtgacacttagcaaagaactgcttaaatgtcacagaataaacactattccttcttcaggaacattaattatgtccaaagtaagtaatgcaaaacattattttgatattaaaacaaaaatggctatatcttgactatacatatatatgagattcaatataaaattcacatcagccaaaatattagacttccaagaagcttcacgctttcagtgggccacttggggccacattcccaagtccctgaggaccagcctttgctgtcagggctacattggtgaaatgtattctctgacatgtctgggaaaataaattctcactataaattaaaattactattgattatcttgctcatcagtataaccagaatgaatttggggacccagattttacacatgattttatacaacactaattatacgataaatgagttgaaaaggttaaatgctaaaattactgtttctttagtagccacattacacactgtaaaaactgactccagtaagatcaataataatattagctgttcatattttgttgagttctgctattatccatctggcattaagccaagtcaatttgcatagaaattatttaaatccaccttgccatctggaaagaaagttatttgtaaatgacactaatcttgaattatgaatcctttaaatacaaaccagatatacagtaacaatggaaaacgatgcaacttataaattcatgctgtagaagaataaagtagaagcaagatacaaagtggtgatgtacataccaataatgttcttgtaaaaatatgcaaatgtatatatacgaagtactaaaaggacatatatactaaatactaaagtgattatatttgaatagaaggtcattttttttccttcttgtgttttcctgtattttccaatttccctccatttagcatctgttactttggtaattaaaactactacaataggctgggcatggtggcttatgatagtaatcccagtattttgggaggccgaggtgtgcagatcacctgaggtcaggagtttgagaccagcctggccaacatagtgaaatcccatctctactgaaatacaaaaattagctgggcatggtggcacacacctgtaatcccaactactcaggaggctgaggcaggagaatcgcttgaacccaggaggcggaggttgcagcaagccaagatggcgccactgcactccggcctaggtgacagcgagactctgtctcaaaaacaaaaacaaaaaaacacaaaaaactataataaaacaagtaaatacaagccaagtattaaaaatattcttggatagaaaaaataaatacaactatacctgtgaataaaacatctccgccatctaaagttgcattttcatctttcatctctactatattgagctgaagtttttctaatgcttctttcatcatgtcaacctgttgaaaataaaatgattcagattactatgctacaatttcctaacaagaaaaaaacatccaaaacatctaaacactaaatcaagctctcgtgcacacacccacacacatccacactcatatacacacccatccttgtgaatatataatgtatgaccagtcatgatcatttgtaagagaagaaatgatctgttaaaaattgtttattttgttcccttctagtgtaagattgagtcaatacagtgtcatttttttctgtagaaagctgagtagttacaatactgttggaggccgactagttaagacactgttggagtacgaccagttaatgcaccattggaagctgaccagttcggccactgttggaggctgacaagttagggcatttgttagaggttgactagttaggatattgctggagtctgaccagttagcacactattggaggctaaccagttagggcattgttggaggctgactagttagggcacatgagtaaaggaaggtgggaggcaaggcacccaattctgaccagttagcacactattggaggctgactagttagggcacatgagtaaaggaaggtgggaggcaaagcacccaattatcctacccttgccaggaaatacaagattccattttaaatcttatgtcagtcatttagtcagaattgcacacacacacacagtataatacatggaaggaatatcaataactcgtaatttgaaatctcaacccataggacaatcactgttttctattcaaatattttgtaaaatgtcaaaacatcctttgcttctctgtaaatgtaaactgtgttagttatattcaaacagttaatatgattacccatcttttaaaacctagttccttagaggtgattaacaagttcaacaattacaatcaaaccaatgaatatttgaaaataaatttcaggaatttgtatgattccagggcatgtctaaagcacagagatattctgggttgaattaaggaacacttctattgaggcttactttaatataagaaatgaatgtgaagcataacaaattgaagctcacaatttaattcaagtccttccagtagctcaacaaaacaatttaaatattttcaaaggtctgcaaaacctttaggatagtaaagacatacaatgagatgactcgaataggggacaagggaacaagagatcacatcacactgggcaaagcaggtagttcttccaaaaatacaacatgctgagtacacagtgtgaattgtcagtgaagagtttaagagacacaaatagagcagagttacttctaaagtaataaaaatatggaaatactttgacaacaagcctgacattcatgcattcaaaaaacatttaaagaggatacaaagtaaaataaatatatcatctcatccttgtcctggaactcatgtaaaaattccacaaaccagagtgactcagaacaataaaaaatatttccatggacaaaatggtcttaatgttgtagtaaatacattcagtgacctcttttaacagcagaataggttttcctatgtaataggaagtggaattgttgctacagcataaaataaggagcaaacacaatatttaccatgacttgttgggctactatgaacccaggaaaacacaactgtttccttttgacatctctgcttctttgtccatggaaaattcactgagcttagggagagatcatgagaacagatatacagttactttttgtttctattactaatgctactgcttctattataacttaacatttcaaagattaggaggagttgagcaataacataaattttggtttgaaaagtttgtatgtaactatgcaacatttcaactcaggaactgtattcaattcttaaaagttagaggagaatagaagtagggagtctactatataccagtttcagaaacattacatctctttaaatgtcctatgtctttgaaaattaaaaagttttagaggataaaatgtttgtgcttttcttttcttttcaagttaaaacagctgcactgacattaaaaaaactagctcttgtgcaggggcagtacttaaaaaaattcaatcacatctatacaaacagtcatcaggataggtccataccacacatgttgatgatactacattactttcagagttaagcacatggacaagatttttaaaaaattgtaaatatcaagtaaacagttttgagaactgcagggccatatggcatcaaatcggcaatgctaaactgagggagatttctggagaagaaatgagaggctgaactcggcaggctgtccattgggaaccacacactcttggcattgaggttccgttgaagcagacaaactcagctgcaaacaggcctgacacatgggtccatagcaagccagctattcaggcagttagaacactaaatataactatagaagtgggagtttttgcaggaaaagatccaaaccatgagcctttaagaaactgcccattctgtggttacatggccatggttaatgttgactttattaacttccaagaggaaaaaaaatgaccaaataacacacccacctttcattgagacagtaaccctgcagtgtggaacttagcattactcagagaaaccatcaggacaaacagtattaattccaacggctgagctgaatgggtcattttagcccacaaaattagaaataaaaagggaaaattagaaaaacaacctacttaatttaagccttagagtataaagtatatacagtaattttcattctttactcaaaagatttacaagacctttcttccctcccttttcatgctacatgcactttgcatttcattttaaaacaatgttatacttgcattttttgccccatttttctcctcatactatttatcacagcatagatttcttctctggtcacagctgctgcagatcacctctgctgcttccagttctgctacttattagccagtgtcctcaggttatttagtattctgagcctcagttttctcacctttaaagtgggtatttattcattatagtatcaactttttaggctccttctggtcattaaatacatacaagtcacacagtatttgctgaataaatattgtattttttatgaataacagcttgtgtatacacagtgacagatacttgtactataaaattagtgcacaagaaaacaactgttgttttttcttatatttggacatgtttcttgtgttttatccctccatgacagatcccatctgctttcctgtgaattaaaattatagattttttttttgcaaagccagtatacagttagagaacatacattgaggatacatttaaatttaaatttagataatccaaatctgatttccttccagctcctggaagctgtcaagacatgtggcaaatttcttgtgtaacctctgctttgaaatagcccttggaaagtactacataaggtgggaagtgggcctgtctggtaagatgttccacaggactcaaaagagcatcagctaagatgatatggaatgatcatggtcactgagaatattaccactctaagggacccaatcagtctaaagaattctttctctttctcaatgcctggtctccttccttacccttcccttttctactctcttctttccttcttttacggctctcatttccatcctatcatgttttcatgattatcctgtcttctcttttcactccctttagaccttcatggtgagtggcaagaaccagggattagaataaagtctttatcacttattagcaatgtgacttggataaattcacctctctgagtctcagtttcttgacctgcaaatgggaatagtgctttctctctaacagggattatgtgagtaacaaataagataatacatgtaaaacacctagctcagtgcctggcatattgtgctcaaaactagtagttgatgatattattattttgccctaaattaactcagtcctttgtttggattttggctacctttcaaaaacaagtaaaagataaaaaatacaattttctgtattaaataaaacatcttttaagttcagttttccttttgttcttgcaaaatctccctcaaacctaaaatactaaaagaactcccaaaaaacccaaaactctccctaatataaaacaaaacaaaaataaagccttatatagttttactaggaagctatattcataataacttgttatagcactgttagtttaatactctttatttcagggcaatattttccagttgaccctttccaaaattgacttttgctgtttattttcagtaatgccccttttgaatgtttcacatcttcgttctaaatgttgtgaatgtgcttgtggggcctggtgaacagttctgagctatggctccttaaagaatatgcaccaatctgttagccaagctgctttccttcagctgtttctgctgctagatactatgaaataaatgtggccctcaaagttggcctgtctgtggctgacatgtctcagtcaaccacagttctgccatgtgctagaagctgtgctatcaccaatgtcaccactatgttttcaatgcctgcttaagttgtcctggtttctttgtaactcatcacattacaggagctttaaaattatagaatcattctacccctacacttgtctagctccagagagttgaacagtagcaacatagctttgttggtagtgagatggtttcatctcccaactttttgctgattttgttttgccttttaatgttgagtgtgacatgtagataatgctgaggaagctgttcaagaagctgtcttggcacatcaaggcacagatggcttggaacttgctgatgcatcaaaatcactatattgtctgaggtcatattcaaaagaccacattttatttctttatgctactttaaacttctttgttaatcagcacatctttggtcactgtggccacttgctagtacacttggctgattttatgacattgcttaatgttgtatcacattttcacacatattttgtcatgtgaataacatctcagttcaacaaatatttggtggatgtcaacttttttttttttttttttcaaatcaggctacaattcttttttttaagccacagcccttgcttgcctctgtgaaattaatctagtggaacagatacaccttctgaatatatagtgacaataaaatggaatatttgttgtgatgctcacaataactccaaaaagaagaaagggtagatattagtatacccattttatatatgagtaaactgaggctaagggaggttgactgacttgccgagtcaagcctccggagcccatcctcattttcacttcactgtatgattaagattctcctgaggtctcatcatagagtgcagcccacatcagaattggagcccatgccttctgccttccaattctgtacatttaagtccactggatattgtaagatcctgtgccaaggtgactttgtattccatgatctcttcatatcagagataaatgaaatttctgtatattagggccttaggatgttaagttatagagtgattaagaacactaagtaatatgaacagaatatataaaccacaccaacctgtttcaccaagaaaaacctgcatattcattactaccctttgatttggagatgccttaggtttgttcagtggttcattcctaaatttgtccatatgtgctgattactttcttttttttttttgagacagagtttcactctttttgcccaggctggagtgcaatggcatgattttggctcactgcaaccttcgcctcccaggttcaagcaattctgcctcagcctcccgaatagcttggattacaggcttgtgccaccacacccggctaattttgtatttttagtagagacggggtttcaccctgttggccaggctggtctcgaactcctgaccttaggtgttccgcctgtctcagcctcccaaagtgctgggattacaggcatgagccaccatgcctggctgtatgtgttgactactaaaactagccaaaactaccaacaaaaagggatcgaacagacattttgtgtactcaatgatccggtcttaaaaatttctaaataaaaacatattgggatcctcttctatattctaattttaggacaaagctctcagaaggaatttagttagcaatggtaacagcaaacatttatatagtcttcctatgtgccaggcactctactatgaactcatattaaccttatttaacttttacaacctgatgaagcaagtacaagaatgatttgttttacagatgagaaaactggggcagagtaagtaaatttgatcaaagtctcatagcaagtaagcagagagctgagatttcaacttagctttgctcttaagtttgtgttattctttcctacacaatattgttactaaccaacaaatttaggtatctacaatgaaatcgagtgactgtgaggagctacagtactctccaaaacagattatgttcactattatttatttattgaacaaaaatgtggactcagacattctggagaaatggaaggatagaggctacaaattgcagcagtctgaacttgcatttggtttctaaacagtctaaattttgcttttctaagcatacacaaactaaggctaataaattttgggagccactactttctcatcagagtatgaggaggagttagttatttgtgtaaaaatctttaggtagtcaacagtgtattttaaatagtgaggttaccaaagcatatggatatgcagacacactccaaaccaagacattatatacactccaaacaaaagtgatgaatttagagagatgagaagggtttctaccacactaggaagtatagtaggtagaattctaaaatggtgcccatgattgctgcccccttgatgtacatgtcctgtataaatctctccccctttgagtgtgagtaggacctgtaaatatgatgaagatatcatatctgtgattggttactttacatagcacaagtaaagaaattttgcaggtgtaaagtatctacttagatgacttgagttaatcaaagggagattaccctgggtgggcttgacctaaggagaacccttaaacgtgggtttaaaggttagagacaaagaagtcagagagatgttctgatcttctgttttgaagaatgtaaacatccatgttgtgaattgcctgaagagggcctacagggtggcctctgggaactgagagcaattctcggctgatagctggtaaaaaaaaaaaaaacaaaacaaccaacaaatcaaatgggagccttagtcctacaaaaatggtcaacagaactggaaattatttaatcacgataatctttaaaagttatcaaagtcaaataaatattaaccctgtgattattcagagaactcatgattttatcaaatggtcaatacgtgttaaagttttataaccatttagctcattttccctcttattgaacttttgttataacttttacatgaataagatctcttgaaacatttcccacagactgttacatacccatttcattttttcccattgatttcttggatttccaaacatatgggtttatttctagtggaaactgctaaaaattaaccaagatatttagcattttggtttccatattagtaaacggagggcacaaagcttaaaaatgaggtcatttccggctctagacttctaaaagttgcagtctcagaaaaaattttggcattcataaatatgactctaactgtaatcctattttcctcccatagaatttactgaaaataccccagatggttactcatgagtaaagtattctggtgtttaaccaaatccaatcagaggcaagaggctggatatatgaatgcagacaagatagggcaaacctaaaagtggattaaaaaaactccagaaagatgggaatcctcagaggcaaacagaagattccaatgcagtgggaaacaaagagtgtgtcaactcaacactaacttatgatacttatattttatttttttggaagaacccatcacacagtttctccaaggatgctaattacttgccagtagtgagataagtatatgacacagagaatctacaatgcttttcctataagagagacgtcaggctctgcttatttgccaacctttgtgtgttttcttatttatattcacatgcagtatagtagatttcatcaactttgggttcattccctaagttggactgagctgttaaatccaaccctagagccctggagttcttgatatatgagatttttcatttcccaaaccaatctgagttgagttttctgttagctgcacctaaaaataactcatttattcccatgatcgatcttaacctgaaaaagaaggatctaacaagctccaggccgatgctctgagacacagggtcaagtcattctttctgctttgtcctactcctgaccatatacctgggtgctgctttggttcttttccctgaagtcctgttctagttacctatcccattcccttcctatgagtagggtcctgctatgcgctctgaggatttgagtagatgggcttccccaggtgatccctgttatctttatctcctcaacacacaatcagtatcaacaaggtttgaggaacctcttaaccactcataacactatcattaataataaatacaatttattaagctctttctaagtgccaagcattgtgctaagtgattttgcatggattatgtcatttaattatcaccatattccttaaggtacctcccagtctaaatcaggcatggcagttctgtctcttatgccagggtctggtgcaagtgacccaatattggccactgagggggtgtctgttgagaggttcctggagccatagaaagaaacataattcctcttcttcccttggacattgttctgtatagatgttgtacctggaactggtgagaacacatccatcatcaaatatggcagggcagagagagggaagcaatttgagcctttgatgacattttgagctgccaaatccaaccctagagccctggagttcttaatatataagatttttcattttattaaccaatttgagttttctgttagctgcagctaaaagtaactcatttaggtatacaacaaaattgacaagtagtatccaaagagtcagtaataacaggccactttatcaaactgattaaattctgatacagaaacaactattaatggaggatttttttctgtttataggaatgcaccatgctatttataaccacttacaacactaagaccatcctgcctatagaagacagtagattgtcaaactaaaagcatcccaggattatgttagtttataaagcacaattgttgcagctctgtatatcagagctggaattaatatttcaacactcttcatctctgaaccagtgctcagatccaaagggcatatagcatctaggaagattagacagaaatgtggaaggcaaacccacggagccaggagaaataaaaagcactctggacaaaactaggaaagacccttttcattatctggagaatacactgagaaagttccagaggttcaaaggtccctccataacgatgtcactacaagacagtttcccggaagaaggctggaagtgacatttagctttctaaatgaaaaacaaggcaggagctctgctggtcttgtcagctctcttgatatataatgtactaattcaagcggttcaattccttgttgacgataatgatacaatacatgtattgagtacttaaaagccactgacgttctgtctgcagggggcaaataaaaatatgatttatcaccaaataccaaattaaaataagtgtcagctgccaaaagacctgcaaaatttagtaggctaaaaaccagggaactgacaagtttataaaattctaaactaattttcctgaatgttgagaagcataaaaatttgctgtgcacatgatccaaaataagcaccagaaatagtactcgaagtgttcataattttctgtgaattcagaggaatcgcatgctgccagacacaaacagattaatgtatgggaaatattttgtatgttcagtatacaatttatacattgcaggcattaagctgccctaaaagccatccagcatatccctgctcccagcccaaatgtaggtcctggctgggtcagagattccttctgtgtgctcccatggctcccaggggattctttttttttttttttttttttttgagacagggtctcactctgtcctccaggctggagtgcagtggtgccatcatggctcactgcagcctcaacctccctggctcaaacaatcctcccacctcagcctcctgagtagctgggactacaggtgtgtgcccaatggccaattttttttttttttttttgtagagatggggtctacttatgctgcccaggctcggggcattctattaacaagttctggcccctagttgactctctgtatatgtttactgaatgaacagctgaacaactttgtaagtcagacagaatttctggaaatgttataaacaagtatacggcaaaaatatccaccttgtttagacagggcatagccacggcaagagccatacaacctctgtgacctcttttaaacaactcttacgacatttcaagggtgggaagattcatctttatttctaaaaacccgcaggtgagaaaactaccgttggcctatttgtcccaataatcactaaccgccactcatctccagtaattctgttcatttgcttagtcattcaacaaacatttattcagcattttcaatatacctggcactattctaggttccaagaatacatcagcgaagagagaagagccctgtgtatattctggtgaggatatggagagataggcaataaataataaacattaaaaatattagtggtaagtgctatgcagttatttaattcaggagatgtgatataaaatggctagggtagttactgtagtttggaaggtcaggaacagcctttctgaaagtgtgacatttgtgctgatatctgagtgaccaaaaggaccaactctgttgcccataggaagaatgttccaacaagagccagtgcaaaggccctaaggtgggaacaagcttaacttgttcaaggaacaggaagacagctagcacagtgctaaaatgaagagggcaagtgttatgggctatgtgtctcctcaagattcatatgttgaaaactcccagggcttaagaatgtgactgcctttagagatggggtctttagagagataatcaggttaaaatgaggtcattaggatgggccctaatccattatgactggtgtccttataagaagagcagactaggataaagagacatagatgaaaggccatgtgaagacacagatggccatctgcaagccaggcagaggcctcagaagaaaccaacccttccaataccttgatatcagactgctagcctccagcattgtgagaaaatatatctctgttatttaagatgtccagtcagtggtactagcaaactaatatggcattttaccagataaagctggggttgccagatggggttagctgaacttggtaaactcacataaagaattggaattttaagtattattggaagtcactggagagtctgcaggaagggagtgatataatttaatttacaaattctggatagctgctttgtggaaaatggattggaaggcacaaatggaaacagggaacttagttaaaaagcaactgcagtagtccaggtgaaagaaatggtggtgagcacaagtgtggtgacagtggagacaaagaaagtgctgaatttggaatgtgttctggagggtggacggaagttggtggattggatgtgggggtgaaggaaaggaagggcccagggtgacttttagatttttgtcttgagcaattgagtggataggtgtactgatttctaatatgaaaaattccagggagaggagcaaggctggagagaaaaaattgaagaactgtgtggccatgctgagtttgaaatgacttctagatattcagatggagagatcaaggggagtagtcagaaccagaaataaaaattgggagtcaatgatacaaaaagttacttaaatctaagagatatcagaagagctaactcaaaccatgatctgcaggaagtgatgtgaggaaacttgccttgtccattaatattaacaatactattctaacaaaaagactccaggagacattgctcattcattactgttgcgaagtttggtagctgtttgcagcaatggatgcaaaaatccccctttggcaggaagagctacttaacgtacattcattatgattgcaccaatgccatctagatcaaaggtctggaaacaaataaatggattgtaatgaactttccagaggtaacaggtagtgaagtcatcaagtgctacttcttgccacttgcttgtacattttcttgttaaattcagttttgtagatgctataaaacatagcagtaaagctgggcacagcagcacatgtctgaagcctcactacttgggaggctgaggtagggagatcctttgaggccaggagtttgaggctgcagtgcactatgttcacacctgtgaatagccactgcactccagcctgggcaacacagtaatactctacctcaaacaacaacaaaaaacaaccataccagtagcataagattttattatttcagaaatcaattttgaaattatgatcacttgaattggagacaagctgaagtgcattaagcaaatcaatagtgtaggcaaggctatatagcaagaacaactttcaaacacatttcagatcagtcagtccaaaatacattcacactgtatagcaccataggactaaatgaaagtttgctgtgctaattaaaacacattcatattcacttattcaagtaggtcccctaaatatctgaactgagaaacacttcattagtatatcctcaatgattgctgcataagtaaggctgcatttcttttaaaaatattgtatttgctaatttttcaccaattgtggagctttctcaacagctggtacaagttggtgcttttttgactgttctacattgccctgggtttgagcatgatatgcaagatggtttttggaacactgggatgatttctgggggggaattttgctgctttttttttccttcctagtccttagcttttttgtgtgttattaaagccttcattagagatggttgtgaaaggccctagtcaggataagcagagtgcatagtaattaattctgagaagctgccttctgattccaggctgaagcatggcaaatgattttgtaaatattcaccctttgtcatatgttcatacatttgcttctctgggaacttgtttaaaatatgttagtgaaaaaacaccagctgagtatttggatgcttataaatattaagtaaaggctcatttccaaccatagttgtacaaaatggctagtttcaagaaattgtcctaggttttgataactgtccgtgttctaacattgtgttaaaaaatagtgaatttttcttcactattatcaaatctgggcatcctcagctggaaaagactggaacagttcaatagtattttcctaatagaaacattccggtcaatattctaccaaggaaaactaattatcatctagctaatgagttttgcctttcctaaattactttaaaaaatatggtaagccatatttttcttgccattatagtttttttctccttttaaaaaagttattttttacttctaatttatcactaaatattaactaatttttaagtaaaacactcattggaggaataaccattaggaatataacacagaaggtacttcatatctggttttgagtaatactcaaagtacgataacctcaacaccatctagattctcttcctatgaggcagagtataatgaaattagattctcataaatgtcattgccccctatttactgtctttttccttgaaccaaggcagagctggctaggatccattgtctctcaagcagatttattatagatcgggtgcattccatttcagaacaggaatgtgcgtgttatgaaatgtacaaagcctacagttgaacaaagcacacaatctgtcggcaaaaaaccactattagtttaatagtgggtatagttagtaaaatttttctgatgtatcttaactaaatttaatattacataagttgatattcaaatcttgaaataagtccctagtgaacacagttctgtttatgctgtcaaaactaaatgcatttcagtattatgcaaatatataagtgaagtatttcttattgacgttatatagttagctagatttttcttgttgcttcacttcctcctggatagtaccacaggaactttgaaaagtaaattaactctttcaggtcttcagggcacaatgtaacatactttagtgctcaatgtcatttagaatctgtgcagtgaactaaagagtatctgatatggtttggctctgtgttcccaaccaaatctcatctcaaattgtaatctccatgtcccacatatcaaaggagggacctgttatctccaagcattgagggagggagatgattggatcatgggggtggtttcccccatgcttttctcgtgacaatgagtgagttctcacgagatctgatggttttataagtgtttaacagttcctccttcacacactctctctctttcctgttaccttgtgaagaagatacttgcttctccttagccttctgccatgatttcaaattgcctgagacctccccagtcatgcggaactgtgaatcaaataaatctctttcctgtataaattacccagtcttgggtagtatctttatagcagtgtgaaaatagactaatacagtatccttataaatacccagggagaaactaagagacagctctaagaacaaaaagaatgtgggtaaatttagcagttaaaagacacaaaaaactaggattgcaactatttttttttaagtatgcctgttaagtatacctcttaagacttaaaggaaatatgcaaaaatgcaaagagctgtggttggttggtggaaaatggttgatgtgacactggtggaagaagttaagagatacttgggaccccaaagcctgaatatttaaaacttcatctactacctacaattccagtaaccattgctcattctggttcacaaggcagggggcacagcttgtcagtgcgtactttccattactctaaacatccaaatactaacgtgactctagataggggagactggaccactggaagctgtattaccagagtcttttttgcttgggttatccacccctggttcacctgtggtctactccatccaggctctcactgttggagtccccatacttccctgggctattattttagactgaactcaaaacagccccagaccaactttttctcctacatgacccatttctagtccatgcaaacacttgcacatcctttgtttacaaactctggcagtgcagctatgaccaacacagtagcactttcttggcttcctacctaacctgttagtcaccagctgctaatcctctgtatctcccagacacctatccttggtgtttccaaactgcaaaaatatatttaatctctctgagaggtttatttaaagcccactctccctggacttgaagtgaaaaaggtaacatatcccatcccacaaatttaatgtagagaaattagaaagtatagataagtcaaatagaaccattaaaaatctttgtaatcccaacacccatgcatagataacacttactgttaataatctatcacacaaacttcaacacattcctattaagtatttttatgagaattttttttttgctcatactgttataaaattatactataagcacaaacatagttaaatagaacacagggtactattataaaccaatttaaaaataaattcatactatttaaattgagattgctttaaattagattttctgaaaaaaattatcttctgaaaacagtcttttgttgttaggtaactgcaaataaaataagtaaagctccttgtattgaattttagagtacttcaagacctaacccaaagcagagatacagacttttatggtggtaatataatttgagaactttataaaacatttaaatatttaaagaaatactcaaggatcaattaggataggtgttaaaatttgaggataaaaagctacatcacaattcacagtgtttcttctctaaatatgcatgaatcaaccagagatagaacaaaataaaaatatttagctgccaaaaagaagttgttctgagacatcagtacaggttttcttctgtgatgatatcaagttggtcttgcagcaaatgttgagaaagtaactttacaactgcaaaataatcattggatgttgcacagagagaggtccctctgttctctgtggatatacagagcaaacccagaatgcacctggtcaactcgagccctcattatcttgaagacacctgatattccataagactagatgaggctgccagctccttgtccacactgactacatgccatgtaccccattttataactaaaaaggatttaaaattcatgaagcttgttgaaagctcaactgtcacattctactcattccaaagtgtatgggaaaaagagcagaacagacatttcaactgaagccattattgtgcttgaatagccatattccattaaattgctaataaacctactagacggtgttgatcacatcagccatacagttgcattcctttcctttataccaacttgcccagtttcattctatgcagtattactctttctgtgccctttattccaaggttgcccagaattcaaagcacttattcagtaagtttgtaatccagtttagtatgctattaacagaattctttagaggagatcatggaaaaagaaactcaaactcatttttgggtcaatgaccaaccttaagggaaacacgtattaaaccagtttaaagaaaaaggtcaggatccatgaggtattaaggaaaaaagggaagaaaaaacattcatttccacaattttccaacattccttaaaaataaaaacaagcccaagcatggaatggcaaggccctggtgcccctgtactaatggtggtggacaatactgctattcataggaagtgagaaagcaaaggtttttcctcaacaccagggaagttttggcttcccttaccttcatttattctggggttcaaattggaaccttataaatcttaagtttgcctctcaaagcaaacaataatgtacaatggattaaatgctttaaagtttgctttttaatagcataactaattaactgcctctattgtaaatggcttattaagccactcctattagggtgttaactactgaaaatatgtaaagctgaatagataccgtatggaattaggcatttaaaaataactagtgcactatttacactacctgcctgatgagtagtttatcccccatttagatattaactgaaaatatgtaatggaaaacaaataaaggaaacagatgtcttaactttaaaattctttcatcaaacagcagttattttcttataatttttaaattctatatccatcttagagctttagaagaaagtctaggtctctccaaattcagggtactaaacgcttgcctccatccaggcagttttccagtgagcagagttggagaagcttttcttttcacagggtaacttgtttggaataagctgtctgtgtatccagaatggtctttttttttttagcaaaatcaagctggagaaaagtgaaattcactccctggattaccttatgattatgaaaatatttgtgtctattttttgagttcccaagattaggcaaaataaagtgtttttttttttttcctgcagcttccctgctgaaataccttagtgagaatgcataaaaaccaactctaaatgatgcacaaagccaccgagagtaagtgttaaagcaacaataatgtgattcaacacaaataagtaatagccccaatacaaaaagctgcaaaattacagtaattttacaatccatctgaagtagcaaaacacattgttactttaccaaatattaagtgatcacctaatgtatgtcaaagctacatgcagatatatgtgtggtaaatttctggactggagaattaaatgaaaagaaactagcacaggatatttagttcacagaatcatgaaatgtaaaactcacaagagacatttgtggtcatacagctcaggtgaccaactcccagtaggttggcatgactctcccctgccacagaggcagaagcaggattagaacccaagtccccttgtttacggtttaacaagattcctgataaactaaaaatggttttgatatgaaaagccaatgttaagactatgaatagaaagctgtttctacttttaaagttttagaatcattaatacattattaattatatatacatatatatttaaattgtcttctagactccaagcataaattaacagatttcatttaaagttttcatattggctgggatttcatcatttcatggcatcaaatgaggagccatctgccatctaaccaaacccaaaggccacagaataaatgtggcctggcactgaaaaacaagagtgaagaccatggtactctgatattaggcaggcaggtacatttttagacgtttccatacaattcaaagttaatggtctaggtgtttttcaattggtattgatgaggaaaatgtaaaaatcaaagtgatttacaatgtctgccagattttccttcacagattcttttaggaagcaaaacatctttctctttccttctccccctcatccccccacccccatacaagtagacacacacacacattcagtaaaatttttgagtaatccatttgatgactgaagatttggcttcccaactaaattgataacctctcttcttcttcattaatatttgaaggctgcccacctaaagaattggaaaatatatagtacaaactgtaacaaaatttttgtatttgatctctaatttctgacagctgaacacttggcaaatgtatatataacgtgagcataaaacatgtcatatgaataaagttttcagcatgaatattttataagtgacttattggacttcattccttatttcaatcatattttgcatattgccattttatgaaggacataagtaaaagactattctgttcaacacaaatggtatcaaatttggaaaaccaaaaagggctaaaagaagttaatgagggtgaatggaatcacccctattaaaggtaaagtgatagagcaggtgtaagctattatgaggaggccattttgtatctcctcctcctcatagtttctccctaaatatgccaaaacgaaaatcttagctttggttatgtgcttagcatgtcttcattaataaaaatctctagtaatgtaatggaaagaggattgtgctctgctgtagaaggcagaaaaagtaatagtaaaggagtaccctctctatggaacctgggatttttaatttttatttttattgtttttttgagacagggtcttgctttgccacccaggctggagtgcaatggcacaatcacagcacactgcagccttgacctctgggattcaagagatcttcccacctcagcctccctagtagctgggaccataagcatgtgccaccacatccagctaatttttgtattttttgtagagacaggttttcaccatgttgcccaggctggtctagaattcctgagctcaagtgatctatccacctcggcctcccaatgtgctgggattatagggatgagccaccatggctggccctctgggattctttttaacaagtggaaatcctagcaaacgaaatgccctattctattcttgcaaatgaagtaagcatccagacagctgttttgtgacatcactaagcaagtataacaggaaaaggcagagaagacactgtacatttatctgaaactctacagaaaacttatagtgacaggtagagataatgaggcacagctaaaattctaaattaaaaatatttcaaaaggcaaatttcaaaaagctttttacctttaccatttctaaatttcctaatgtgctttaaatgcaaaaatatgtcttaggccaggcccacagatactaaaatagcacttaatctattgctccattacaagtgaatacattatttccattatggtttatctgtagcaaattttgtttttaacctcaagggaaccgtataatattaagggatgtaagtggccttatagagaattatccagtcccttgttttcacagatgaacaaactgaggcccaactgaacctcttgttaaaagccaccagctagttatatttcagagctgtgtcttctgtctcccagggcagggagcagtgctctttccatcacatccacagcatcggcctcccactaaatggttgcaatagctatagtcaataatggtgcccaactatgctctcttcctggatgacctaatatttaagcttcataacaagtccatgaattacgtaatatttgaaccactattctacagaaaatttatagtgacaggtagagataatgaggcacagctaaaattctaaattaaaaatatttccaaaggcaaatttcaaaaagctttttacctttaccatttctacagaaaggaaactgaggcacggaacacttacataacttgtgaaagagtcagcctgcagagccacaccacacaccactcttcaccattatactactgttcactgttctcttcttttccaaggcatttgttgaccttatattcactgtactctgaactgaacttatctatttcccaaacctgctggcatccttactttccaactcagttaatgtcatcactgtcctctttaatcaccaaccttggaatcttaggtcatctttgactccttctgagttcctcactcttttccacgtttctaccactggaaaggatcttgaacccatgtacactgcaatttcctaacaaaaggcctcattccctgttgcctgaatgattgcaaagcctcctaactggtctccttctaacagctgtcccttctcaaattcatctcacacactggagccagagtaattctgccaaaacaacagagagctcattggtttaaaaacccaagcttacctaacattgtctgttacatttttcttttaagtgtatgaagttttctttttctttctcaatcttctccttgaagccttatacaattttgtgaagttggtattattcttcctatttaacagatgatgaaccaggccgtatgacattaagtaatgtttagtagataatttaaaaacttataaattctgttatgtaaaaatgtaacttcattttcttataagtagataatccgggtaaacacagtcaagtccagtaatttctcaattatttgaaattccaactcagttaaattcaggtccatcccctcctttccactgctttcttcctaggtgacattcacaatgagcatttacccagcattttgtgctggcatcttccaggatgtacaagcatcccaacatagtctcagattcttggtccctggcactggcagagctgaaatggtcatattcccactggcctctggttacatgatccatgctgccttctgtagtcacatattatttgtgataacaaacaaggtaaggatttgtaaggatcagaggtaaggcaggcataacgtagaaaactgactagcacaaggtctcttatttacaattctgaaagcccaaagttctgaaaaccaagggtattcttttttaatttagtgcctgaacttatttggtagtaaaacctgatttgatatgaaagttttagactttatatcatctagaatgaacattcctaggttttgctgcacatatattaatgtggttgattaaagggtgctatcttagacttatgtgtgtgtgttatgaaatatggttgacatactccgtttactttcaaaatatgaaaaattataaattttaaaacacatctggcactctgggtttcagagaagaaactatagacctgaaagatatattctagccgggcgtggtggctcacacctgtaatcccagcactttgggaggccaagacaggtggattacctgaggtcaggagttcaggaccagcctggccaatatggtgaaacctcatctctactaaaaaatacaaaaattagccgggcgtggtggtgggcgcctgtaatcccagctactcgggtgagacaggagaactgcttgaacctgggaggtggaggttgcagtgagccgagatcactgcactccagcctgtgtgacaagagcaaaactccatccaaaaaaaaaaaaaaagatatattctttggatacagaattctaggttggcaagtgtttttttgttttttgtttttttgcacttacaaagattgtcattacaatgttttcagcctgcattgtttcttttatttcaatagttttgggggagcaggtgatttttggttatatggataagttcttcagtggttatttctgagattttggtgcacctgtcaccgagaagtatacacgttacccaatgtgtagtcttttatccttcacccccctcccaaccttcccccagagtccccaagtccattatatcattcttatgcctttacgcctgcattgtttctaatgggaattccgctgtcatcctagtctttgttcctttatatacaatgagtatttttcctctgactgcttttcagattatctcttcactactggttttcagttacaagcataccttgttttattgcactttgctttattgtgatttgcagatactgtttttttttttacaaattgaaggtttgtagcaaacccgcatcaagcaagtctattgatgccattcttccaacagcatgtgcttgcttatatctctgtgtcacatttttgttaattcctgcagtatttcaaacttactacgtccacataagacagcaaacttaatcaataaatgtgtgtgtgttctgactactccattgactggtttgtttccgtcactccctctcctgggggtctacctattcctggagacatagcaatattgaaattaggccaattaatatcctaccatggcctccaagtgttcaagtgaaaggaggaattgtacatttctcactttaaatcagaagctagaaattatgaagcttagtgaggaaggtatgttaaaagctgagacaggccaaaagctaggcctctcatgccagttagccaagttgtgattgtaaaggaagttgagttgttgaaggaaattaaaagtgccactctagtgaacacacgactaataagaaagtaaaacagccttattgatgatatggagaaagttttagtggtctggatggaagatcaaaccagccccaatattctcttaagccaaagcctaatccagagcaaggccccaactctcttaaattctacgagatctgagaagaggtgaggtgaggaagctgcagaagtttaaaggtagcagaggctggaagtttaaaggtagcagaggctggcttatgaggaaagaagccatctttataacataaaagtacaaggtgaagcgataagtgctgatgtagaagctgcaagaagttattcagaagatctattacagctaacacacagcattgtatgttatgaatatggttgatgaagatggttatactaaacaaaagttttcaaattaaatccagtagccttatattggaagaaaatgtcatctaggacttctctagctgttaaggagaagttaatcctggcttcaaagcttcaaaacacaggctgactctcttgttagaggttaatggagctggttaccttaaattaaagccaatgctcatttaccattctgaaaatccttgggctcttaagaataatgctaaattgactctgactgtgctctacaaatggaacaacaaaacttgcataacagcacatctgtttacagcatggtttgctgaatattttaagcccactgttgagacctactgctcagaaaaaaagattgctttcaaaatattactgctcattgacaatgcacctggtcacccaagagttctgatagaaatgctcaaggggattaatgctttttttacacctgctgacacaagattcattctgccacccataaatcaaggagtaatttcaactttcaagtcttattattgaagaaatacatttcatagggctattgctgccaaaactgtgattcctctgatgaatctgggcaaaataagtgggaaaccttttggaaaggattaatcattctagatgtcattaagaacatttgtgattcatgggaggaggtcaaagtatctacattaacagaagtttggaagaacctgattccaactttgaatggtttaagacttcagtagacaaagtaactgcagatgtggtagaaatagcaagagaactagaattagaagtgcagcctgaagatatgactgaattgctgcaatctcatgataaaacttgaatggatgaggagttgcttcttatggatgggcaaagaaagtggtttctcaagatggaaactgctcctggtgaagatgctgtgaaacattgttgaaatgataataaaatatttagaatagtccaaaaacttggttgattgacagagcaatggtagtttgagaggactacaatcttgaaagaagatctactgtgagtaaaatgctatcaaacagcattgcttcttacagagaaatgtttcatgaaaggaagagtcaatcaacacagcaaacttcactgttgtcttattttttaaaattgccacagtcacctcaaccttcaacaaccacaaccctgataggtcggcagccatcgacattgagacgagaccctccccaagaaaaagattatgacttgctaaaggctcaggtgattgtcagcattttttagccataaaatattctttaactgagatacatatatatttttaagacatgatgccattccacaattaatagactacattaaaatgtaaacataacttttatatggactgggaagcaaaaaaaattgtgactccctttattgtggtatttgcttttattgtaataatctgaatggaacctgtactatctctgaggtattcctgtatttgatcatgatgtgtaaagtttctggtattaagtagtgatttcccctcactgctaaggcaaggctcttctgaggctctactcaaagccctgtgtattgtgaggtctctcctttctggcttttaggaatataatctcatttctgcgtgagttctgggaattgtctggtttattttctgctggttctttctctagctttgggtagttcctcttatgcgtgcacagacaaatacatacctacccaaagactcaagtaacaatcctgcatatctctggaatgctgtatttgagcagcccctcatctccagtactctgccctgcaaattctaccattttagttctcccaaactgattttttgtcccctcaatttgataagaccagtaggttctgttctgcatcccctcctccacctctgtggcctgaaaactgcctccagacaataagctgggaaaattgtaatctcaattcatttgtttcccttccctcagggatcagtcctacacttcctgtgtgcactgtctgaaaagctgtttcatatagttggtccagttttctaattacttacagcaaaagaaaaattcctgtagcagttaatctttcatgatggaagtcaaagcttcaagactatacacctaaacattgttacttttctttcctgaccacctctgtgacaacattatataatgtcccataactcaaatgaaaattttttctcatttaaacaatgaggaacaacatttctccccttaacaaatgaacagaagggaggtctagaaattgcttctttaagaacaaatttagtgattcttgatgatcttggtgacattggcatgaaagggagcagacagtgagtgtgataaaacttctttaggatttatttacatgttacttaaaatgctaagctctgatacaaccttaactctaatggaacttggaagctaattaaggagaccttttataactgtatagcagtctgtctctggactgtatttggaagatgagtctgaatcaaagtggttaataagcaaatttaaccatgacattacaattaacagagtctcagaagtacaagtaataatcactgctgattcttttcctcttctcctctgcaatatctatttaagcttttgagtaagacagacttggtctgccagagtacctttgctgaagaactcaaagccactggcacagagtaaagcagctggaaacacagaaccatagctatagccagggagcttttctaacttgaatcaaaaacagattcagaatggcttggagaaaaacaatccactgaaggctggtgaagaagaccaggatcatcttagaaataaataaagcattagtaaaatacatactaaattatagcttactgactgtattctttaacagtttgcttttaagaaagcaacctcattttaacacatatttcaaaagaagaaaagttggaaaatgtgaaatcttttcctcaaataattttgcccactggaaaacccataagtttggaccacaaggccttaatcaaggcataacctcttatctgatgcaagtttactctgcagttagagcggcctggcaggaagatggtataggagagcagctgagctcatggatattggaacaaatgaggcctcattttgaatataggatctaccacttacttactagttgtgtgaccttgggctattactccatgccttagtgcatttgcattgttataaaggaatacctgaagctgggtaatttataaagaaaagatgtgtatttggctcaaggttccacaggttgcacaagaagaatggtgccagcatatccatctgggaagggcttcaaatcacttctactcatggtggaagccaatgggagcaggtataagcagagatcacatggtgagagagatgaaggaggagagagagggaaggaagatgccaggctctttttaacaagcagctcttgcaggaactaatagagtgagaactcacccattaccaggaggatggcaccaagcatgagggatctacccccatgacacaaacacttcccactaggcccacctcttaacattgggaataaaatttcaacatgatatccaaagtatgtaatcctttccctggttccccaaatctcatgtccttttcatattgcaaaatgcaatcattctatcccaacagtcacctaaaattttagcttgttccagcatcaactcagaagtccaaagtccaaagtctcatctgatactcaagggaagttacttacagctgggagcctgtaccatcaaagacaaattatttatttccaagatacaatgtttgtacaggcactgggttaacagtccgattccaaaagggaggaattggacaaaagaatggggtaacaagccccatgcaagtccaaaactcagtagggcagacgttaaaccttaaagctccaaacaatccttgactctatgtcccacatccagagcacaccggtgcaaggggtgggctcctaaggccttaggcagtgctgtccccacagctttgctgggcagcacacatggttgatctcatgagttggagtccaatgcctgcagcttttccaagctgagggtacatgctgctggtgggtctataattctgggatcttgaggatggcagccccattcccacagcttcattaagcaataccccagtggggactctgtgtagggggcttttaccctacatttccctgccacactgccctagtagaggttctctgtgggggctccaccctgcagcaagcttctgcctgggcactcaagctttctgatatatcctctgaaatctaggtggaagctgccaagcctccatcacccttgcattctgcatgcctgaagacttaacaccatatggaaattaccaaggcttattaaggcttataccctccagacagacaattggagaaataactggccggagctaaaagcagcagggactggggggtagtgtcctgaggtggtatagggcagtggtgccctgggccattcccctgaaaccactctgacctcctaggtctctgggtctgtgatgggaaaggtggtcttgaaggtttctgaaacaccttcaggacctttttcccattgtcttgactattagcacctggctcccttttatccatgttaatctctctagcaagcaatagatcagccacatccttggatttcatctaaaagtgctttttccttcctactacataggcaggctgagaactttccaaaattttctgctctgtttcccttttaaatataaattccaacttaagctcattcctttgctcccatatctgattataggctgttagaagcagctacaccacttcttgagtgctttgctgcttagaaatttcttctaccagataaccttcatcatcatcactattaaattcagccttccacaaatccctaggacatggacacaatgctgccgagatatttgttaaggcataacaaaagtgatctttgctccagttcccactaagttcctcactttcatttgagaccttgtcagctgggcttcactatccttatttctatcaggagtctggtcacaaccaattagccagtctctaagaagttccaaactttcccttgtctttttgtcttttgagccctccaaactcttccaaactctgtccattatccagttctaaggctgcttccccattttcaggtatttttattgcaatgctccactcctcagtaccaattttctgtctatgatgctataaaggatactggaggctgggtaatttataaagaaaaaaggtttatttggctcacagttctgcaggctgtacaagaagcgttgcaccagcatctacttctgacaagggcctcaggctgcttccactcatggcagaagggaaagaggagtcattgtgtgcagacatcacatggtgagagagaggaagcaacggaacttggggaggtgccaagttctttttaacaatcagttccaggggaactaatagagtgagcactcactcattactctgaggatggcaccaagcctttcatgaaagatctgcccccatgacccaaacacctcccactaggcttcacctccaacactgggggtcaaatttcaacatgagatctggagagacaaacatccaaactatatcactcaacttctacaacttctggttccttgtctgtaaattggagatcacaattgtgactatctcatagggttgatatgatgattaaatgaaataatacatataaacagccttaatgaaaagcctgacacaaagtgatccctcaatcttagttatgtgccattactactattgttaagaaaaaataaactttctcttgaacaccagtcttataaatacaagtcatataaatagacagtaattgtcattaaactatgagattacagaaataatgtgaatgaaaaagtcattatataaaaataattgtaagccttgttcacagtgacccatgaaaaaatgcaattggaatcataaaaggaaacaacacactaaatttgcctcatttttctgagtaccatttcaaaatctgttgtccagaatcattagaatacttaataaagtgtaaaatgacatgttacatgaaaaaatcatgaaaatgtcattataacaacccagagccatctcctctttggcttatctggatgtagcacccagtaaatcctagtagatagtaatactctaggaccaccaatggctctctgaaaaatgtcacaaaggagaaagtgtcaccttcactgtgctcctgatgaagctatttctatctactttcagtgtggagtatttggcatcctgactgacagtctgtttaaagttcaccggcccaggattcacttaaaggaattcaaatagacgacccctaagaggctatgtagcaaaatgattacattcacaggttttgaaattaaacaacttggttcaaatcctttttctgatagttgctagttgattgggaaagatattacactctgagcctcagtttcctcacccataaaatgatcattaacagttgtttttaggccaggtgtggtggctcacacctgtaatcccagcactttgggaggctgaggcaggaggataccttgagcccaggagttcgagatcagcctggacaataaagtgagaccctgtctctactaaaaatgaaaattaaatgcactccagcctgggcaacagagtgagatcctgtctcaaaacaaacaaacaaacaaacaaaaacaaactggaaaaaataaaaataaaagttgtttttatctcaaagcgttgtgatgaataaaatgatgtttataaagctcttagcatggtgacctactcagtaaatgttcaataaatattatttactaactattaaattttagtctgggagtctagactatcccatacagaagtctcagaataccaactctgtgctacttccagcactgctgagttatccattcactgaacagatgtgtgttgagtggctgatgctgtctcagaccctgtgctcaatgctttactcacttagttgaaatcctctcatcatgatgggctttataagagattgtgagctctgtgaggctagagtctctactctgatgttgatggctatataaccatgtaatgtacggggactggcacagtgcctaccaaacaggagatgctaacaagttttatggaatgaataaatgagcaaaggatgaatgaatacgacacaaggaagattaactccttgacctaggggaactcatgttctagttgggagttggaattagctccctaaaagacaatggaagcaaaaagtgttagagagggaattttagagcccaccatgctagtgggctcaccattagtaaaatatcaacaatttctgttacagttatgctaatgtaattcagtgataagagcaaaagaatgcataatccaagttgacgattctagaagacctcaacttctaacgaaaaacagaagcatcttttttactacttatcataggaaaataaattctagtcgtttttatatctgaagtcaaaagatagaaagaaatatgtggtcgcatatctttctatgttaagtcaagcccagtcctgcctcagtgtcctcaccctatttgctggtggttaggggtgtcaatcaccacctcccacctcttctctaccttatggctaattaggaagagacaaatgacaaatagggatc

SEQ ID NO: 796 - DNA, 429 bp, Homo sapiens
tccgtgttagatttagtggcctcgttgtcgtgacagtgacgcagagtctgcggacccggcgccgaggcggccacccgagacgcggcgcgcacgctccggcctgcgcagcccggcccggccatggcggccccccgcccgtctcccgcgatctccgtttcggtctcggctccggctttttacgccccgcagaagaagttcggccctgtggtggccccaaagcccaaagtgaatcccttccggcccggggacagcgagcctcccccggcacccggggcccagcgcgcacagatgggccgggtgggcgagattcccccgacgaaccccggaagacatttcccactgacctccaccatcccacttgactgagagatggcgacagatgcatagggtgctctgggaggtgccttcccgcaggggctagagaaaaaa

SEQ ID NO: 797 - DNA, 662 bp, Homo sapiens
  misc_feature (550)..(550): n is a, c, g, or t
  misc_feature (555)..(555): n is a, c, g, or t
gatcatgtcctgtgcagcaacgtggatggagctggaagccattatcctaaatgaactcactcagaaacagaaaaccaaataccacatgttctcacttataagtagaagctaaacattgagtacacatggatacaaagaagggaaccgcagacactggggcctacctgaggtcggagcatggaaggagggtgaggatcaaaaaactacctatctggtactatgctttttatctggatgatgaaataatctgtacaacaaaccctggtgacatgcaatttacctatatagcaagcctacacatgtgcccctgaacctaaaaaaaaagttaaaagaaaaacgtttggattattttccctctttcgaacaaagacattggtttgcccaaggactacaaataaaccaacgggaaaaaagaaaggttccagttttgtctgaaaattctgattaagcctctgggccctacagcctggagaacctggagaatcctacacccacagaacccggctttgtccccaaagaataaaaacacctctctaaaaaaaaaaaaaanaaaanaaaaaattaataaaaataaaaaaaaataaaaaaaaaaaaaaaaaaaactctcgggggggcccgacccaaaatgccccttgtggggggtttttaaatatcatggcccc

SEQ ID NO: 798 - DNA, 396 bp, Homo sapiens
  misc_feature (319)..(319): n is a, c, g, or t
  misc_feature (379)..(379): n is a, c, g, or t
ctaaagattcagtgttcactaaaactttaattttaaatgttgcacttcagaaatgtaaaaggatgtccagccaatgtaattttccttcatcacttgtgatattgaccagttttaaagtctttggcctatttttaaaaagtgaggatagctgcatcttttctacttcatatacaacttttctacatgtaaccctcaacttacacattgcctagtaaaacagagccaaaaaatgcagtatcacctgtaccttttaattttattaaacttttttcaatcatgaatttttcaccgtcttccctttataaataaattctagtgncaaatcaagatttggttttattttgatgtaattcacctctcacttttgtcttcaattccntttaacctctctgtacg

SEQ ID NO: 799 - DNA, 487 bp, Homo sapiens
  misc_feature (482)..(482): n is a, c, g, or t
ttgaaattaaagggtgtctggatgccatgttaattttattgagcatgagaaagtatttgaagaaactgttgcacaacatatgatgaaattttgatttctctgaatctcagagtaatttaaatgggcaaatccaatgagttgatgtaacccatctacattttgtggctatttcatgtataaaatgaaaggctttagttatttctagaggagtcccatccaacactatttggcgactgttaatatgttataattattagacagtggaaaagcctttattgactaattgatttaacctcagtccaaagaacagtctctatacttgccctcatttactgataggctgctactagttaccatttgattgtcttgactttcgtcttcagttgaattggtgaaaacatcaacaaaaacaaaacccactgtgtcttaaaataaaatgttctgcattgtagtcaataaagggctaagatgtaaaccatgcnaaaaa

SEQ ID NO: 800 - DNA, 595 bp, Homo sapiens
  misc_feature (542)..(542): n is a, c, g, or t
  misc_feature (589)..(589): n is a, c, g, or t
tgaatccaataatatgtattaaacaacaattcttaaacaagtgggattgctcttaggaatgcaaagatgatccaatatcagaaactttatccatgtaattcacattaagaggctacaggagaaaaaccatatggttccctcaatagaggcagaaaaaaatgatgtgataaagtttaaccgcctatgtgtgattttggggtagtggagtacaccacttagcaagccaggactagagaggaacttcttcaacttgatacaagttataaaccaaaacttaacttttcagtaaacttgatagagaaattaaaagtgtatcattctctttaagataaggagtaggccaaggatgtcatcctggccataccctaatacaagaaaaagaaatggggatgtgaggatcaggtaggaagtgataaaacttagtgtagctcatagggttgatggtctccataaagggtctcaacattttggtgttacgacttgttgtatccttaaaagttattgaaaccccccaaggcttttccttgatagagattccatcnggttgatagttaccatcttagaagttaaactaagaatggtttaagcngacttt

SEQ ID NO: 801 - DNA, 5064 bp, Homo sapiens
gagaaggggaccttcaggtccaggcaaagggggaacttctgtcgtgggaacgaaaaagaaagaggatttacagggtggggggacagaggggcagcaggaaccagaagggagacagtggcggtcgcaccggggccgatccgagagttccccttagagaacggagctcacgggcggggaggcctcacctgctagtaggacgcagaaagacagaaggcgaaggagaccccctgccgtagccatcttgcctctctgctgagcggaagcccccgttcggctcctgtctgttagcggcctctctaggctaccactgacaccgtctctgtggcccggagcctaagagaccggaagttcgtgtttccaggcgcttccggaaaccgcgggagagggtcgctgacgtggaggcgtccgaagggcagcagggtgtgtcggggctcggattaagacatcggagtcggagacctgagagatgttaaccaaattcgagaccaagagcgcgcgggtcaaagggctcagctttcaccccaaaagaccttggatcctgactagtttacataatggggtcatccagttatgggactatcggatgtgcactctcattgacaagtttgatgaacatgatggtccagtgcgaggcattgacttccataagcagcagccactgttcgtctctggaggagatgactataagattaaggtttggaattacaagcttcggcgctgtcttttcacattgcttgggcacttagattatattcgcaccacgttttttcatcatgaatatccctggattctgagtgcctccgatgatcagaccatccgagtgtggaattggcaatctagaacctgtgtttgtgtgttaacagggcacaaccattatgtgatgtgtgctcagttccaccccacagaagacttggtagtatcagccagcctggaccagactgtgcgcgtttgggatatttctggtctgaggaaaaaaaacctgtcccctggtgcggtggaatcggatgtgagaggaataactggggttgatctatttggaactacagatgcagtggtgaagcatgtactagagggtcacgatcgtggagtaaactgggctgccttccaccccactatgccccttattgtatctggggcagatgatcgtcaagtgaagatctggcgcatgaatgaatcaaaggcatgggaggttgatacctgccggggccattacaacaatgtatcttgtgccgtcttccaccctcgccaagagttgatcctcagcaattctgaggacaagagtattcgagtctgggatatgtctaagcggactggggttcagactttccgcagagaccatgatcgtttctgggtcctagctgctcaccctaaccttaacctctttgcagcaggccatgatggtggtatgattgtgtttaagctggaacgggaacggccagcctatgctgttcatggcaatatgctacactatgtcaaggaccgattcttacgacagctggatttcaacagctccaaagatgtagctgtgatgcagttgcggagtggttccaagtttccagtattcaatatgtcatacaatccagcagaaaatgcagtcctgctttgtacaagagctagcaatctagagaatagtacctatgacctgtacaccatccctaaagatgctgactcccagaatcctgatgcgcctgaagggaaacgatcctcaggcctgacagccgtttgggtcgctcgaaatcggtttgctgtcctagatcggatgcattcgcttctgatcaagaatctgaagaatgagatcaccaaaaaggtacaggtgcccaactgtgatgagatcttctatgctggcacaggcaatctcctgcttcgagatgcggactctatcacactctttgacgtacagcagaagcggactctggcatctgtgaagatttctaaagtgaaatacgttatctggtcagcagacatgtcacatgtagcactactagccaaacacgccattgtgatctgtaaccgcaaactggatgctttatgtaacattcatgagaacattcgtgtcaagagtggggcctgggatgagagtggggtatttatctataccacaagcaaccacatcaaatatgctgtcaccactggggaccacgggatcattcgaactctggatttacccatctatgtcacacgggtgaagggcaacaatgtatactgcctagacagggagtgtcgtccccgggtactcaccattgatcccactgagttcaaattcaagctggccctgatcaacagaaaatatgatgaggtactgcacatggtgaggaatgccaaactagttggccagtctattattgcttatctccagaagaagggctatcctgaagtggcactgcattttgtcaaggatgagaaaactcgctttagtctggcactggagtgtggaaacattgagattgctctggaagcagccaaagcactggatgacaagaactgctgggaaaagctgggagaagtggccctgctgcaggggaaccaccagattgtggaaatgtgctatcagcgtaccaaaaactttgacaaagtttccttcctgtatcttatcactggcaacttagaaaaacttcgcaagatgatgaagattgctgagatcagaaaggacatgagtggccactatcagaatgccctatacctgggtgatgtgtcagagcgtgtgcggatcctgaagaactgtggacagaagtccctggcctatctcacagctgctacccatggcttagatgaagaagctgagagcctaaaggagacatttgacccagagaaggagacaatcccagacattgaccctaatgccaagctgctccagccacctgcacctatcatgccattggataccaattggcctttattgactgtatccaaaggattttttgaaggcaccattgccagcaaagggaagggaggagcactggctgctgacattgacattgacactgttggtacagagggctggggagaggatgcagagctgcagttggatgaagatgggtttgtggaggctacagaaggtttgggggatgatgctcttggcaagggacaggaagaaggaggtggctgggatgtagaagaagatctggagctccctcctgagctggatatatcccctggggcagctggtggggctgaagatggtttctttgtgcccccaaccaagggaacaagtccaactcagatctggtgtaataactctcagcttccagttgatcacatcctggcaggctctttcgaaacagccatgcggctccttcatgaccaagtaggggtaatccagtttggcccctacaagcaactgttcctacagacatacgcccgaggccgcacaacctatcaggctctgccctgcctaccctccatgtatggctatcctaatcgcaactggaaggatgcagggctgaagaatggtgtaccagctgtgggcctgaagcttaatgacctcatccaacggttgcagctgtgctaccagctcaccacagttggcaaatttgaggaggctgtggaaaaattccgttccatccttctcagtgtgccacttcttgttgtggacaataaacaagagattgcagaggcccagcagctcatcaccatttgccgtgagtacattgtgggtttgtccgtggagacagaaaggaagaagctgcccaaagagactctagaacagcagaagcgcatctgtgagatggcagcctatttcacccactcaaacctgcagcctgtgcacatgatcctggtgctgcgtacagccctcaatctgttcttcaagctcaagaacttcaagacagctgccacctttgctcggcgcctactagaactcgggcccaagcctgaggtggcccaacagacccgaaaaatcctgtctgcctgtgagaagaatcccacagatgcctaccagctcaattatgacatgcacaacccctttgacatttgtgctgcatcatatcggcccatctaccgtggaaagccagtagaaaagtgtccactcagtggggcctgctattcccctgagttcaaaggtcaaatctgcagggtcaccacagtgacagagattggcaaagatgtgattggtttaaggatcagtcctctgcagtttcgctaaggccccctttgtgtgcatgggtcagtcaccatatgttccccccagagaatgtgtctatatcctccttctaacagcaccttccccctgcagctactcttcagatctggctctctgtaccctaaaacctagtatctttttctcttctatggaaaatccgaaggtctaaacttgacttttttgaggtcttctcaacttgactacagttgtgctcataattgtccttgcctttccagcttaattattttaaggaacaaatgaaaactctgggctgggtggagtggctcatacctgtaatcccagcactttgggaggctacggtgggcagatcatctgaggccaggagttcgagacctgcctggccaacatggcaacaccccgtctctaataaaaatataaaaattagcctggcatggtagcatgcgcctatagtcccagctgctcaggaggctgaggcatgagaatcgcttgaacctaggaggtggaggttgcattcaactgagatcataccacttcattccagcctgggtgacagagcaagactctgtctcaaaaaaaaaaaaaaaaaaaaaaaaaaaaaaaaaaggaaaactctgtgatggacatttgtttagtaaatcccttcagtatttatccctcctttccccacagcagctttctttcctgtcaactagaaaggagcaggatgtaataaatacattttggtgtgactaggccacaccaactcttaatcatctcccattttccttagacatttaaatttcaaggcaggtaccctctgtgtactcagaaatttgaagaagttatttggttttccaaaatgcacactgcgggttattgatttgttctttacaactattgttctcatatttctcacactaaataaatctctatgagagcttcttgaaaaaaaaaaaaaaaaagcg

SEQ ID NO: 802 - protein, 1224 aa, Homo sapiens
MLTKFETKSARVKGLSFHPKRPWILTSLHNGVIQLWDYRMCTLIDKFDEHDGPVRGIDFHKQQPLFVSGGDDYKIKVWNYKLRRCLFTLLGHLDYIRTTFFHHEYPWILSASDDQTIRVWNWQSRTCVCVLTGHNHYVMCAQFHPTEDLVVSASLDQTVRVWDISGLRKKNLSPGAVESDVRGITGVDLFGTTDAVVKHVLEGHDRGVNWAAFHPTMPLIVSGADDRQVKIWRMNESKAWEVDTCRGHYNNVSCAVFHPRQELILSNSEDKSIRVWDMSKRTGVQTFRRDHDRFWVLAAHPNLNLFAAGHDGGMIVFKLERERPAYAVHGNMLHYVKDRFLRQLDFNSSKDVAVMQLRSGSKFPVFNMSYNPAENAVLLCTRASNLENSTYDLYTIPKDADSQNPDAPEGKRSSGLTAVWVARNRFAVLDRMHSLLIKNLKNEITKKVQVPNCDEIFYAGTGNLLLRDADSITLFDVQQKRTLASVKISKVKYVIWSADMSHVALLAKHAIVICNRKLDALCNIHENIRVKSGAWDESGVFIYTTSNHIKYAVTTGDHGIIRTLDLPIYVTRVKGNNVYCLDRECRPRVLTIDPTEFKFKLALINRKYDEVLHMVRNAKLVGQSIIAYLQKKGYPEVALHFVKDEKTRFSLALECGNIEIALEAAKALDDKNCWEKLGEVALLQGNHQIVEMCYQRTKNFDKVSFLYLITGNLEKLRKMMKIAEIRKDMSGHYQNALYLGDVSERVRILKNCGQKSLAYLTAATHGLDEEAESLKETFDPEKETIPDIDPNAKLLQPPAPIMPLDTNWPLLTVSKGFFEGTIASKGKGGALAADIDIDTVGTEGWGEDAELQLDEDGFVEATEGLGDDALGKGQEEGGGWDVEEDLELPPELDISPGAAGGAEDGFFVPPTKGTSPTQIWCNNSQLPVDHILAGSFETAMRLLHDQVGVIQFGPYKQLFLQTYARGRTTYQALPCLPSMYGYPNRNWKDAGLKNGVPAVGLKLNDLIQRLQLCYQLTTVGKFEEAVEKFRSILLSVPLLVVDNKQEIAEAQQLITICREYIVGLSVETERKKLPKETLEQQKRICEMAAYFTHSNLQPVHMILVLRTALNLFFKLKNFKTAATFARRLLELGPKPEVAQQTRKILSACEKNPTDAYQLNYDMHNPFDICAASYRPIYRGKPVEKCPLSGACYSPEFKGQICRVTTVTEIGKDVIGLRISPLQFR

SEQ ID NO: 803 - DNA, 340 bp, Homo sapiens
  misc_feature (129)..(129): n is a, c, g, or t
  misc_feature (244)..(244): n is a, c, g, or t
  misc_feature (292)..(292): n is a, c, g, or t
  misc_feature (323)..(323): n is a, c, g, or t
  misc_feature (325)..(325): n is a, c, g, or t
  misc_feature (335)..(335): n is a, c, g, or t
ctgaaaacccaatctgtacattgtttagatcacataccaaaatatcaagtggcctattcaccatttttgtacgatctatagtgactcttgaaatggacttcagctggtaaaagaatatgagtacatttncagttgtagtgcagtttagtcaggttcatgtggatttaacctgagtgtaatgaagcttatgaaatcagtttagggatttgaaacacagagttaaatcctgggaggcttcggcctnccagtaatgaacctactcaacaagcatttataactactctcaccctantgtgtgccagacatagtgcccgtactgggtngntaaacaatgntcaat

SEQ ID NO: 804 - DNA, 7133 bp, Homo sapiens
ccagcatgtatcagccgaggtggagctgcggggccctggcatgaaagggtcctcactgagcagcgagtcgtcccccgtgtcctctccggccaccaaccacagctcccccgccagcacacccaagcgcgtgcccatgggccctatcatcgtcccccctgggggccacagcgtgcccagcaccccccccgtggtgaccatcgctccaaccaaaaccgtgaatggtgtctggaggagtgagagccggcaggatgccggtcccaggagcagcagtggaggtcgggaacgcctcattgtggagcccccgctccctcaggagaaggcagggggaccagccatcccctcgcacctgctcagcaccccctaccccttcggcctctcccccagctcagttgtgcaggattcccgcttcccgccactcaacctccagcggcccgtgcaccacgtggtgccccccagtaccgtgaccgaggactacctgagaagcttccggccctaccacaccaccgacgacctccgcatgtcctcactgcctcccctcggcctggacccggccactgctgcagcctactaccaccccagctacctggccccacaccccttcccccacccggccttcaggatggacgactcctactgcctgtctgccctgaggtccccgttctaccccatccccacccccggctccctgcccccactgcacccatcagcgatgcacctgcacctctctggggtccgctaccctcccgagctctcccactcatccctggcagcgctgcactcggagcgcatgtctggcctcagcgcggagaggctgcagatggacgaggagctaaggcgggagagggagcgcgagcgcgagcgcgagcgtgagcgtgaggctgaccgcgagcgggagaaggaacgtgagcgcgaacgcgagaaggagcgcgagcaagagaaggagcgtgagcgtgagaaggagcgcgagcgcgagctggagcgccagcgggagcagcgggcccgggagaaggagctgctggccgccaaggccctggagcccagcttcctgcccgtggccgagctgcatgggctgcgtggccatgccactgaggagcggggcaagccctcggagcagctgaccccaacccgagcagagaagctgaaggatgccagcctgcaggcgcccaagcccgtccaacaccccttgcatccggtgcccaccccacaccacacggtgcccagcctcatctccaaccatggcatcttctctctgcctagcagcagtgctgccacagccctgctgatccagcgcaccaatgaggaggagaagtggctggcgcggcagcggcggctgcggcaggagaaggaggaccggcagtctcaggtgtccgagttccggcagcaggtgctggagcagcacctggatatgggccggcccccggtgccggcggaggcagagcacaggccggagagcaccaccaggccaggaccaaaccgtcacgagccaggtggccgtgaccctccgcagcactttggggggccaccacctctgatttcgcccaagccccagctccatgctgcacccacggccctctggaaccccgtgtccctgatggacaacaccttggagacgcggcgggccgaaagccactctctgcacagccacccggctgcatttgagcccagccgccaggcagccgtgccgctggtgaaggtggagcgggtcttctgcccggagaaagcagaggaggggccacggaagcgtgagcctgcccctctggacaagtaccagccacctccgccgccaccacgagagggagggagcctggagcaccagcccttcctgcccgggcccgggcccttcctggctgagctcgagaagtccacccagaccatcctgggccagcagcgggcctccctcccacaggcggccaccttcggggagctcagcggacccctgaagcctggctcgccctaccggcccccagtgccacgggcccccgaccctgcctacatctatgatgagtttctgcagcagcgccggaggctggtcagcaagctggacctggaggagcgcaggcggcgggaggcccaggagaaagggtactactacgacctcgatgactcttacgacgagagcgatgaggaggaggtcagggcccacctccgttgcgtggccgagcagccgcccctcaaactggacacgtcctctgagaagctagagtttttgcaactttttggcttgaccacccaacagcagaaggaggaattggtggcccagaagcggaggaagcggcggaggatgctgcgagagagaagcccgtcgcccccaacaattcagagcaagcggcagacgccttcaccgagactggcgctgtctacccgctacagccctgatgagatgaacaacagtcccaacttcgaagaaaagaagaagttcctgaccatcttcaacctgacccacatcagcgctgagaagaggaaagacaaagagagacttgttgaaatgctccgtgccatgaagcagaaggcactgtcagcagcagtggccgactccttgacaaactctccgagggacagtcctgccgtctccctgagtgaaccagccacgcagcaagcctctctggatgtggagaagccggttggtgttgctgcttccttgtctgacatcccaaaggccgcggagcctgggaagctggaacaggtccggccccaggagctgtcgagagtccaggagctagctcctgccagcggggagaaggccaggctgagcgaggcccctggaggcaaaaagagtctgagcatgcttcactatatccggggcgctgcacccaaggacattcctgtgccgctgtcccacagcaccaatgggaagagcaagccgtgggagccctttgtggcagaagagtttgcacatcagttccacgagtcagtgctgcagtccacccagaaggccctgcagaagcataaagggagcgtggctgtgctgtctgcagagcagaaccacaaggttgacacgtccgtccactacaacattcctgagctgcagtcctccagccgcgcccctccaccccagcacaatgggcagcaggagccccccactgcaaggaagggccccccaacccaggagttggaccgggactcggaggaggaggaagaggaggatgatgaagatggagaagatgaggaggaagtccccaagcgcaagtggcaagggatcgaggccgtttttgaagcttaccaggaacacatagaagagcaaaatctggagcggcaggtgttacagacacaatgtagacgactggaggcccggcactacagcctcagcctgacggcagagcagctctcccacagcgtggcggagttgaggagccagaaacagaagatggtctcagaacgggagcggctccaggcagaactggaccacttacgaaagtgccttgccttgcctgcaatgcactggcctaggggctacctgaagggatatcccaggtgacggtttcccttgcactaggccgaacctatagtatagaaatattatctattttattaccttgaatatttaatatttttcactgggaggtttgaagcttacaaaatgagaatgtgccatgcatgaagcaaaggattccaggctccagaaaaaatgaatgaactcaccttgacgtcaatgcaattgaatcaccgttgtcattcagcgagcaaccaatgtaggattgcccacagtttttctttttaaaggtggttttcgcccttcctctcccacattatttcttaatctgaacatgaaggctccattagcaacactaaaacttgatcattaacagccccctgtgcatatgagtggatcaaaccggttctgttctttcttgtgttgccatgttactatgcctcaagcccagtttgcttttgccgcagcgatggggccagtctcattcctccccaggagtgaaacttgcttcagctgaaaaggttgggtgcattgtcagtaaaaagggcttatttgtttcattttactttcctgcaaaattttcttcaaagcaacaagtcctaggagcacacaaagcaacccaaaggcttttccctggaaaagctctttcttacctaaagataaaaccaattcacaaactgaaggtagctttttattactccgtggggagcatgtacagagctctgtgtatacacagcttcacacccaccagattgttactacagtgggttgggttttcatacagacgtaaattttgagagaaaagtcaaaggtgcttcagccttgtactgtgtatatatattaaaaaaaaaaacaaagttttgtatgtttttattactttaactattgttataaaaagcctgccatttttaatatgtggtttgggggatttttgtttgttgggggttttgtttgttgttttggttttttttgggcaaaaaaaaaaaaaaccttgcttttagtgtttgtactgctgctggtcaggacattaaaatattgaagtgtttttaaaaattaaagaagaagaaaagtaaaagagcttaccactggcgcctatgcgatcacttcatttttagtttgagttgcaccagaagctgccgtagaaagccatgcgctactgcttacctcctccactccccctgcctgcccccagcatctggacaagctaatagcaaatattacccattgctatcaagggaggagggggtagtctgtagaacccatgtgtgacagtcatgtgcacacatgggcgggggcttttaaaaacctttcaggaagtcaatgatttctgtgattgatataattctaaggtgtctgagagcaggtacagaataggaacttcagaggctttgtttaaacgcaaagctttgtaaaagccacaaggtctgagctgaacccctcctttttgaacttactgtgacaagcacaggaacggtcagaaactgggctcatcacaccaaggcaaagcaacgggcgagtcttcctccttgtcctagttactgcctatggaggcagtgtttagatcaggaaggcctctcttgctcccaagggccctcaccagaggccagggctgccagtcactggtctggggggtggaggcctgagctgagggcagggtgcctgacctgtgtgccggctgctcactgctgtgaccagcagccgagcccttggccctagcccttgctgcgcagaacagcttgctggcagctggcatcgtgtcgctttatctgcccccgcacagtttgctttgtacgtctgccaagaatcttccagttattagcaaactcagacgaatgtaccgccagtattatcagcagtcaacaagcaccttcctctccacagaagcagctggaagagaactcgaggggctgtgctgcaggcctcccctcgaaagacactgggaggtcaacatgttccacaggtgttcagagggagtctgctacaaactatcagggcaaaatctcactggatttctccactgaaaacctacttgaggtttctggtctgaaggcttaagagtcccatcttagcacttccgctctcaggcctcctcctccatcacagatgtctggatgcttttggaaatggccttggctaaagtaaaagggaaaagtagatccgataacttaaaaacgtagctcatcccttaccatccaaggggcactcccttggttggattttctatgacagcacaggggacaggtggcacaccatgagaggtctgcccagggtgggagcagtgtcactgtgctagcaatagttggcttctcccctgtcagtggaaaccccacttctgcccggcccttgagcttcttgcccactgtctccccatccttccacctacttgtggcgatctgagtactctactcttgctcaagaagtaatacgacaatcagaatacaaaccagtaaggcaacacgaataaactaagaaaaaggtaagaactgtctcaaaaacgaaagcacaccacccaagacacagtacccagtcatggtttccccatccaactattagtttcatactttgaaaacttactttcagattattctcaaagaacacagtagcacctaaatctgttttcaattgggcttaaaaattgacatgcaatctcttaagtaagttttttgttcagctacttcacactgagtacctcaaatctgctctggagtcaattatgccacctgtgtgtcaggatgcacgtgaaagccctcggctcggtccttagaccatcttcctacattacctggaagggagctgccatctgtccctctgcagagggataccttccaatagtaaattatctggttcctcactgaaacaagttatttttgcttcatatagtcagagtcagactgacatgataaaatatcatgttcctaatctgttgtctcagataagtgaccaagacgggactttccacattttagtctacattctaatcttaaaggaataaagcactgaattgggactaacattctgataggttgcacccttaagagtattcagagagcatcaaaaggagcccacaccttcagcagtgaaggattctaacacagggaatctgcagtttgtagcagaatggtattttcctcaagtagctcataatactgccaaatctcaaaagttaagctgaatttcacaccagatcctacccctttccctgagccacgtgtttcacacaagtgtagaaaatgccagggatccaccacaagatggagatggtcagcacaaaccgattctgttcctctttaaagtgtatattagccacttagcaatctctatattctttcaagtaaccaagctgttgactttcttactacttgcagtagcctgtccccaacttttccatccagtgcttaacctaaaaaactccttaactctgccttgacctgaggaagaccatgctaactggtgttattttgtatgtaccctgtgcttaattctataacagtaaaccccatacacaggtgggagggaggaacaccggtgcctcggtcactctgggggcagtttagatgctgtgaaattaaacctgttctaagtgtacttgtttgaattaattgtattgtaatattatttgttgaatgtagtaattaggtatttatgaatatattgctgtaatttctgacaacatccaaaaaataaaatcttcctaaattatgtt

SEQ ID NO: 805 - protein, 1157 aa, Homo sapiens
QHVSAEVELRGPGMKGSSLSSESSPVSSPATNHSSPASTPKRVPMGPIIVPPGGHSVPSTPPVVTIAPTKTVNGVWRSESRQDAGPRSSSGGRERLIVEPPLPQEKAGGPAIPSHLLSTPYPFGLSPSSVVQDSRFPPLNLQRPVHHVVPPSTVTEDYLRSFRPYHTTDDLRMSSLPPLGLDPATAAAYYHPSYLAPHPFPHPAFRMDDSYCLSALRSPFYPIPTPGSLPPLHPSAMHLHLSGVRYPPELSHSSLAALHSERMSGLSAERLQMDEELRREREREREREREREADREREKEREREREKEREQEKEREREKERERELERQREQRAREKELLAAKALEPSFLPVAELHGLRGHATEERGKPSEQLTPTRAEKLKDASLQAPKPVQHPLHPVPTPHHTVPSLISNHGIFSLPSSSAATALLIQRTNEEEKWLARQRRLRQEKEDRQSQVSEFRQQVLEQHLDMGRPPVPAEAEHRPESTTRPGPNRHEPGGRDPPQHFGGPPPLISPKPQLHAAPTALWNPVSLMDNTLETRRAESHSLHSHPAAFEPSRQAAVPLVKVERVFCPEKAEEGPRKREPAPLDKYQPPPPPPREGGSLEHQPFLPGPGPFLAELEKSTQTILGQQRASLPQAATFGELSGPLKPGSPYRPPVPRAPDPAYIYDEFLQQRRRLVSKLDLEERRRREAQEKGYYYDLDDSYDESDEEEVRAHLRCVAEQPPLKLDTSSEKLEFLQLFGLTTQQQKEELVAQKRRKRRRMLRERSPSPPTIQSKRQTPSPRLALSTRYSPDEMNNSPNFEEKKKFLTIFNLTHISAEKRKDKERLVEMLRAMKQKALSAAVADSLTNSPRDSPAVSLSEPATQQASLDVEKPVGVAASLSDIPKAAEPGKLEQVRPQELSRVQELAPASGEKARLSEAPGGKKSLSMLHYIRGAAPKDIPVPLSHSTNGKSKPWEPFVAEEFAHQFHESVLQSTQKALQKHKGSVAVLSAEQNHKVDTSVHYNIPELQSSSRAPPPQHNGQQEPPTARKGPPTQELDRDSEEEEEEDDEDGEDEEEVPKRKWQGIEAVFEAYQEHIEEQNLERQVLQTQCRRLEARHYSLSLTAEQLSHSVAELRSQKQKMVSERERLQAELDHLRKCLALPAMHWPRGYLKGYPR

SEQ ID NO: 806 - DNA, 521 bp, Homo sapiens
  misc_feature (2)..(2): n is a, c, g, or t
  misc_feature (13)..(14): n is a, c, g, or t
tnatacgtcgctnntatatatgctgcgagaagacgacagaagggggcggctaagatggcgacggagcatcccgagcctcccaaagcagaattgcagctgccgccgccgccacctccaggccactatggcgcctgggctgcccaggagcttcaggccaagttggcagagatcggagctccgatccagggtaatcgcgaggagctggtggagcggctgcagagctacacccgccagactggcatcgtgctgaatcggccggttttgagaggggaagatggggacaaagccgctccacctcccatgtcggcacagctccctggaattcccatgccaccaccacctttgggactcccccctctgcagcctcctccgccacccccaccacctccaccaggccttggccttggctttcctatggcccacccaccaaatttggggcccccgcctcctctccgtgtgggtgagccagtggcactgtcagaggaggaacggctgaagttggctcagcagcaggcggcatt

SEQ ID NO: 807 - DNA, 511 bp, Homo sapiens
gctgggaccatctgctgggtccctcaggtgctatgccatgccgggcatgtgatgccgtttatctcactcagtcttcacaaacccatgagagatgcagtattattccctttatgcagatgaagaaactggggttaattgaggttgagtaccttgcccagggtcacacagtaagcgatagaacctggattcaaccccagtctggagccccatggtgcgtcacacgtatgatcatcctctgtcttgtatgtcttgtttggaaagggttggaaactcttgacatgaggaatggttgttattaatagcaggttttgaggaaaaccttctagaagagtcccagtatgggaagtggcagaggagacccctgcctccaacaaccagaatgccaggatgctcgagggaagacagacacctgcctccaccctggagcaagatgccactgactaccgcctccgaagcctgcggaaactcctggctcagcccgggaggcctgctggccccttctccaagcgga

SEQ ID NO: 808 - DNA, 269 bp, Homo sapiens
gagctggaaccatttttvtrattgatgacaaatcagggaacattcatgccaccaagacgttggatcgagaagagagagcccagtacacgttgatggctcaggcggtggacagggacaccaatcggccactggagccaccgtcggaattcattktcaaggkccaggacattaatgacagtcctccggaggtttcctgcacgagacctatcatgccaactgtgccstgtaraggtccaatkttgggtgstgtacggtagtggggaggcctg

SEQ ID NO: 809 - DNA, 426 bp, Homo sapiens
ctttgaagggatcctggccttctactcccaggaggtacgagacctgttccagatgaagctttttgtggatacagatgcggacacccggctctcacgcagagtattaagggacatcagcgagagaggcagggatcttgagcagattttatctcagtacattacgttcgtcaagcctgcctttgaggaattctgcttgccaacaaagaagtatgctgatgtgatcatccctagaggtgcagataatctggtggccatcaacctcatcgtgcagcacatccaggacatcctgaatggagggccctccaaacggcagaccaatggctgtctcaacggctacaccccttcacgcaagaggcaggcatcggagtccagcagcaggccgcattgacccgtctccatcggaccccagcccctatctccaagaga

SEQ ID NO: 810 - DNA, 1412 bp, Homo sapiens
ctcttccagaggcaagaccaaccaagatgagtgccttgggagctgtcattgccctcctgctctggggacagctttttgcagtggactcaggcaatgatgtcacggatatcgcagatgacggctgcccgaagccccccgagattgcacatggctatgtggagcactcggttcgctaccagtgtaagaactactacaaactgcgcacagaaggagatggagtatacaccttaaatgataagaagcagtggataaataaggctgttggagataaacttcctgaatgtgaagcagatgacggctgcccgaagccccccgagattgcacatggctatgtggagcactcggttcgctaccagtgtaagaactactacaaactgcgcacagaaggagatggagtgtacaccttaaacaatgagaagcagtggataaataaggctgttggagataaacttcctgaatgtgaagcagtatgtgggaagcccaagaatccggcaaacccagtgcagcggatcctgggtggacacctggatgccaaaggcagctttccctggcaggctaagatggtttcccaccataatctcaccacaggtgccacgctgatcaatgaacaatggctgctgaccacggctaaaaatctcttcctgaaccattcagaaaatgcaacagcgaaagacattgcccccactttaacactctatgtggggaaaaagcagcttgtagagattgagaaggttgttctacaccctaactactcccaagtagatattgggctcatcaaactcaaacagaaggtgtctgttaatgagagagtgatgcccatctgcctaccatccaaggattatgcagaagtagggcgtgtgggttatgtttctggctgggggcgaaatgccaattttaaatttactgaccatctgaagtatgtcatgctgcctgtggctgaccaagaccaatgcataaggcattatgaaggcagcacagtccccgaaaagaagacaccgaagagccctgtaggggtgcagcccatactgaatgaacacaccttctgtgctggcatgtctaagtaccaagaagacacctgctatggcgatgcgggcagtgcctttgccgttcacgacctggaggaggacacctggtatgcgactgggatcttaagctttgataagagctgtgctgtggctgagtatggtgtgtatgtgaaggtgacttccatccaggactgggttcagaagaccatagctgagaactaatgcaaggctggccggaagcccttgcctgaaagcaagatttcagcctggaagagggcaaagtggacgggagtggacaggagtggatgcgataagatgtggtttgaagctgatgggtgccagccctgcattgctgagtcaatcaataaagagctttcttttgaccca

SEQ ID NO: 811 - protein, 406 aa, Homo sapiens
MSALGAVIALLLWGQLFAVDSGNDVTDIADDGCPKPPEIAHGYVEHSVRYQCKNYYKLRTEGDGVYTLNDKKQWINKAVGDKLPECEADDGCPKPPEIAHGYVEHSVRYQCKNYYKLRTEGDGVYTLNNEKQWINKAVGDKLPECEAVCGKPKNPANPVQRILGGHLDAKGSFPWQAKMVSHHNLTTGATLINEQWLLTTAKNLFLNHSENATAKDIAPTLTLYVGKKQLVEIEKVVLHPNYSQVDIGLIKLKQKVSVNERVMPICLPSKDYAEVGRVGYVSGWGRNANFKFTDHLKYVMLPVADQDQCIRHYEGSTVPEKKTPKSPVGVQPILNEHTFCAGMSKYQEDTCYGDAGSAFAVHDLEEDTWYATGILSFDKSCAVAEYGVYVKVTSIQDWVQKTIAEN

SEQ ID NO: 812 - DNA, 577 bp, Homo sapiens
gctacccagtgctgagtgacagtggctacaacaggcttcagagtggcaccacttcagccactcagccctctgaaaccttcatgcctcagaggactccatccctgatctcaggaataccaactcctccctcgttgcctggcaacagcaagatggaagcctacggtggccagctggggtcctttcccacttcccagtttcagtatgtcatgcaggcaggcaatgctgcctccagctcctcatcaccacacatgttcgggggcagccacatgcagcagagctcctacaatgccttctcccttcacaacccttacaacctgtatggatacaatttccccacttcccctaggctagctgcaagcccggaaaaactgagcgcctctcaaagcactttactctgttcttctccttccaacggggcctttggagagaggcagtacctgccgtcagggatggagcacagcaggcacatgattagcccttcaaccaataaccaacaggcaacaacacttgtgatggccggcagtatggggcagtccagggtcctcctcccagatgtccgtgcacatggtttcaaggc

SEQ ID NO: 813 - DNA, 457 bp, Homo sapiens
gcctggtggcgaattcggcacgaggatgagcccgccgagcccgggccgtcgacgggagcagcgcacttcgcgagccgccgacacacatggccacgccgctgcccggacgcgcggacgggcccgccacgccgctgtcgcccacgcgcctgtcgcgggtgcaggagaaggaggagctgcgcgagctcaacgaccgcctggcgcactacatcgaccgcagtacgcgcgctggagctggagaacgaccggctcctgctcaagatctcagagaaggaggaggtgaccacgcgcgaggtgagtggcgtcaacgcgctgtacgagtcgaagctggccgatgcccggagagtcctggatgagacggctcgagagcgtgcccggctgcagatagagattgggaagctgagggcagagttggacgaggacaacaagagcgccaagaagagggagggcgagcttacgg

SEQ ID NO: 814 - DNA, 207 bp, Homo sapiens
  misc_feature (154)..(154): n is a, c, g, or t
cgcactgccacccgaccatgaccatcctgcaggccccgaccccggccccctccaccatcccgggaccccggcgggcttccggtcctgagatcttcaccttcgaccctctcccggagcccgcagcggccccatgccgggcgccccagcgtcatcngcgggcaccgaaagcgcagcgcagggttctctaccctcgagtggtccggcgcc

SEQ ID NO: 815 - DNA, 765 bp, Homo sapiens
tattcctttcgaggacaaacaattaaaccacatccaaggtcttaacttacagacagaaaccaaagttgccatttaaagcgtgagatattgtatacaagacatacactggggagaatgcttcaccatctgaagctcacaccactatggcccaatggacagctgtgcactctgcttgtgcttaagagcctggttgcggctgatgggaatgcgagtctgcataacaaaagaacagttgggttgcacatgcactgaagcattttatactgcatgggggggtatatattcttatgttgaagggaataggggaaatcatcaaagtccctcccacagagcattatgtctgcttgcatagaaacaccggagagaaagcggactcctctttgctcacgctcggtgaattctctgcagaccttggcagcgtgcttcagcacggtgtcctctgaactggcgccatggctcaccggaaaaggcattcgttcatcaagctcatagaggtggccatccacgttgctaaacagaataaaatggaaattcaccttgtcatctaccagacattggccttactgtgccacggcatcatggggctgtctgtatggcctcatttccttcaaagcatcttgctctgtctttaggaggacatttctttggtttaagaaagaaaactggtgcagacttatcccttgttaaaatcccagttggtctttgatatttggcccctgccggaattagggcccaatgggcccaaggaattccccaatggctgct

SEQ ID NO: 816 - DNA, 436 bp, Homo sapiens
atccttaattaaattaattcctccccccccccccccggcaggctccaggggcggggcgtggccggggcgcaacgacgggcgcggaggtccggccgggcgcgcgcgcccccgccacacgcacgccgggcgtgccagtttataaagggagagagcaagcagcgagtcttgaagctctgtttggtgctttggatccatttccatcggtccttacagccgctcgtcagactccagcagccaagatggtgaagcagatcgagagcaagactgcttttcaggaagccttggacgctgcaggtgataaacttgtagtagttgacttctcagccacgtggtgtgggccttgcaaaatgatcaagcctttctttcattccctctctgaaaagtattccaacgtgatattccttgaagtagatgtggatgactgtcaggatgttgc

SEQ ID NO: 817 - DNA, 500 bp, Homo sapiens
  misc_feature (403)..(403): n is a, c, g, or t
  misc_feature (475)..(475): n is a, c, g, or t
  misc_feature (490)..(490): n is a, c, g, or t
aaaaaaatgactgcccgccctatctgggacccaggatcgctctgtgagcaacttggagccagagaggagatcaacaaggaggaggagagggccggcccctcagccctgctgcccagcagcagcctgtgctcgccctgcccaacgcagacagccagacccagggcggcccctctggcggctctgctcctcccgaaggatgcttggggagtgaggcgaagctgggccgctcctctcccctacagcagcccccttcctccatccctctgttctcctgagccttcaggagcctgcaccagtcctgcctgtccttctactcagctgttacccactctgggaccagcagtctttctgataactgggagagggcagtaaggaggacttcctggagggggtgactgtccanagcctggaactgtgcccacaccagaagccatcagcagcaaggacaccatgcggcttccgggtgcgatgccanctctggccctcaaangcgaactgct

SEQ ID NO: 818 - DNA, 2526 bp, Homo sapiens
tataaaagctgggccggcgcgggccgggccattcgcgacccggaggtgcgcgggcgcgggcgagcagggtctccgggtgggcggcgcgacgccccgcgcaggctggaggccgccgaggctcgccatgccgggagaactctaactcccccatggagtcggccgacttctacgaggcggagccgcggcccccgatgagcagccacctgcagagccccccgcacgcgcccagcagcgccgccttcggctttccccggggcgcgggccccgcgcagcctcccgccccacctgccgccccggagccgctgggcggcatctgcgagcacgagacgtccatcgacatcagcgcctacatcgacccggccgccttcaacgacgagttcctggccgacctgttccagcacagccggcagcaggagaaggccaaggcggcgtgggcccacggcggcggcggcggcggcgactttgactacccgggcgcgcccgcgggccccggcggcgccgtcatgcccgggggagcgcacgggcccccgcccggctacggctgcgcggccgccggctacctggacggcaggctggagcccctgtacgagcgcgtcggggcgccggcgctgcggccgctggtgatcaagcaggagccccgcgaggaggatgaagccaagcagctggcgctggccggcctcttcccttaccagccgccgccgccgccgccgccctcgcacccgcacccgcacccgccgcccgcgcacctggccgccccgcacctgcagttccagatcgcgcactgcggccagaccaccatgcacctgcagcccggtcaccccacgccgccgcccactcccgtgcccagcccgcaccccgcgcccgccgtcggtgccgccggcctgccggccctggcgagcgcgctcaaggggctgggcgccgcgcaccccgacctccgcgcgagtggcggcagcggcgcgggcaaggccaagaagtcggtggacaagaacagcaacgagtaccgggtgcggcgcgagcgcaacaacatcgcggtgcgcaagagccgcgacaaggccaagcagcgcaacgtggagacgcagcagaaggtgctggagctgaccagtgacaatgaccgcctgcgcaagcgggtggaacagctgagccgcgaactggacacgctgcggggcatcttccgccagctgccagagagctccttggtcaaggccatgggcaactgcgcgtgaggcgcgcggctgtgggaccgccctgggccagcctccggcggggacccagggagtggtttggggtcgccggatctcgaggcttgcccagaccgtgcgagccaggactaggagattccggtgcctcctgaaagcctggcctgctccgcgtgtcccctcccttcctctgcgccggacttggtgcgtctaagatgagggggccaggcggtggcttctccctgcgaggaggggagaattcttggggctgagctgggagcccggcaactctagtatttaggataacttgtgccttggaaatgcaaactcaccgctccaatgcctactgagtagggggagcaaatcgtgccttgtcattttatttggaggtttcctgcctccttcccgaggctacagcagacccccatgagagaaggaggggagcaggcccgtggaggaggggggctcagggagctgagatcccgacaagcccgccagccccagccgctcctccacgcctgtccttagaaaggggtggaaacatagggacttggggcttggaacctaaggttgttccctagttctacatgaaggtggaggtctctagttccacgcctctcccacctccctccgcacacaccccacccagcctgctataggctggctttcccttggggctggaactcactgcgatggggtcaccaggtgaccagtggagcccccaccccgagtcagaccagaaagctaggtcgtgggtcagctctgaggatgtatacccctggtgggagagggagacctagagatctggctgtggggcgggcatggggggtgaagggccactgggaccctcagccttgtttgtactgtatgccttcagcattgcctaggaacacgaagcacgatcagtccatccagagggaccggagttatgacaagcttcccaaatattttgctttatcagccgatatcaacacttgtatctggcctctgtgcccagcagtgccttgtgcaatgtgaatgtaccgtctctgctaaaccaccattttatttggttttgttttgtttggttttctcggatacttgccaaaatgagactctccgtcggcagctgggggaagggtctgagactctctttccttttggttttgggattacttttgatcctgggggaccaatgaggtgaggggggttctcctttgccctcagctttcccagccctccggcctgggctgcccacaaggcttctcccccagaggccctggctcctggtcgggaagggaggtgcctcccgccaacgcatcactggggctgggagcagggaagggaattc

SEQ ID NO: 819 - protein, 357 aa, Homo sapiens
MESADFYEAEPRPPMSSHLQSPPHAPSSAAFGFPRGAGPAQPPAPPAAPEPLGGICEHETSIDISAYIDPAAFNDEFLADLFQHSRQQEKAKAAWAHGGGGGGDFDYPGAPAGPGGAVMPGGAHGPPPGYGCAAAGYLDGRLEPLYERVGAPALRPLVIKQEPREEDEAKQLALAGLFPYQPPPPPPPSHPHPHPPPAHLAAPHLQFQIAHCGQTTMHLQPGHPTPPPTPVPSPHPAPAVGAAGLPALASALKGLGAAHPDLRASGGSGAGKAKKSVDKNSNEYRVRRERNNIAVRKSRDKAKQRNVETQQKVLELTSDNDRLRKRVEQLSRELDTLRGIFRQLPESSLVKAMGNCA

SEQ ID NO: 820 - DNA, 533 bp, Homo sapiens
gcctactactactaccactaaattcgcggccgcgtcgaccagggcggcgcgtggtctacgccgagtgacagagacgctcaggctgtgttctcaggatgaccgagtgggagacagcagcaccagcggtggcagagaccccagacatcaagctctttgggaagtggagcaccgatgatgtgcagatcaatgacatttccctgcaggattacattgcagtgaaggagaagtatgccaagtacctgcctcacagtgcaggacggtatgccgccaaacgcttccgcaaagctcagtgtcccattgtggagcgcctcactaactccatgatgatgcacggccgcaacaacggcaagaagctcatgactgtgcgcatcgtcaagcatgccttcgagatcatacacctgctcacaggcgagaaccctctgcaggtcctggtgaacgccatcatcaacagtggtccccgggaggacttcacacgcattgggcgcgccgggactgtgagacgacaagctgttgatgtgtgccccctgcgccgt

SEQ ID NO: 821 - DNA, 342 bp, Homo sapiens
cactagtgtgtgaggctcgagacaacgtcccgctggagttcgagtgcatcaaccccaagaagcagaggaagaagaagaactataaaactcgggcatcatcatcctgcgatcctgcaagataaaccgagactactccttccttgactacatcctgggaggctgccagctcatgttcaccgttggaatagactttacagcctccaacgggaatcccctcgacccttcctctttgcactatatcaaccctatgggcaccaacgaatatctgtcggccatctgggctgttgggcagatcattcaggactacgacagtggtaagatgtttccagctctgggattcgg

SEQ ID NO: 822 - DNA, 2736 bp, Homo sapiens
ttgcactctcccacacccttttcttttcgtccgctcttcgcttatttctcccgccgtctcctctgcataagaaggggaacgaaagatggcggcggaaacgctgctgtccagtttgttaggactgctgcttctgggactcctgttacccgcaagtctgaccggcggtgtcgggagcctgaacctggaggagctgagtgagatgcgttatgggatcgagatcctgccgttgcctgtcatgggagggcagagccaatcttcggacgtggtgattgtctcctctaagtacaaacagcgctatgagtgtcgcctgccagctggagctattcacttccagcgtgaaagggaggaggaaacacctgcttaccaagggcctgggatccctgagttgttgagcccaatgagagatgctccctgcttgctgaagacaaaggactggtggacatatgaattctgttatggacgccacatccagcaataccacatggaagattcagagatcaaaggtgaagtcctctatctcggctactaccaatcagccttcgactgggatgatgaaacagccaaggcctccaagcagcatcgtcttaaacgctaccacagccagacctatggcaatgggtccaagtgcgaccttaatgggaggccccgggaggccgaggttcggttcctctgtgacgagggtgcaggtatctctggggactacatcgatcgcgtggacgagcccttgtcctgctcttatgtgctgaccattcgcactcctcggctctgcccccaccctctcctccggcccccacccagtgctgcaccacaggccatcctctgtcacccttccctacagcctgaggagtacatggcctacgttcagaggcaagccgactcaaagcagtatggagataaaatcatagaggagctgcaagatctaggcccccaagtgtggagtgagaccaagtctggggtggcaccccaaaagatggcaggtgcgagcccgaccaaggatgacagtaaggactcagatttctggaagatgcttaatgagccagaggaccaggccccaggaggggaggaggtgccggctgaggagcaggacccaagccctgaggcagcagattcagcttctggtgctcccaatgattttcagaacaacgtgcaggtcaaagtcattcgaagccctgcggatttgattcgattcatagaggagctgaaaggtggaacaaaaaaggggaagccaaatataggccaagagcagcctgtggatgatgctgcagaagtccctcagagggaaccagagaaggaaaggggtgatccagaacggcagagagagatggaagaagaggaggatgaggatgaggatgaggatgaagatgaggatgaacggcagttactgggagaatttgagaaggaactggaagggatcctgcttccgtcagaccgagaccggctccgttcggaggtgaaggctggcatggagcgggaactggagaacatcatccaggagacagagaaagagctggacccagatgggctgaagaaggagtcagagcgggatcgggcaatgctggctctcacatccactctcaacaaactcatcaaaagactggaggaaaaacagagtccagagctggtgaagaagcacaagaaaaagagggttgtccccaaaaagcctcccccatcaccccaacctacagaggaggatcctgagcacagagtccgggtccgggtcaccaagctccgtctcggaggccctaatcaggatctgactgtcctcgagatgaaacgggaaaacccacagctgaaacaaatcgaggggctggtgaaggagctgctggagagggagggactcacagctgcagggaaaattgagatcaaaattgtccgcccatgggctgaagggactgaagagggtgcacgttggctgactgatgaggacacgagaaacctcaaggagatcttcttcaatatcttggtgccgggagctgaagaggcccagaaggaacgccagcggcagaaagagctggagagcaattaccgccgggtgtggggctctccaggtggggagggcacaggggacctggacgaatttgacttctgagaccaacactacacttgacccttcacggaatccagactcttcctggactggcttgcctcctccccacctccccaccctggaacccctgagggccaaacagcagagtggagctgagctgtggacctctcgggcaactctgtgggtgtgggggccctgggtgaatgctgctgcccctgctggcagccaccttgagacctcaccgggcctgtgatatttgctctcctgaactctcactcaatcctcttcctctcctctgtggcttttcctgttattgtcccctaatgataggatattccctgctgcctacctggagattcagtaggatcttttgagtggaggtgggtagagagagcaaggagggcaggacacttagcaggcactgagcaagcaggcccccacctgcccttagtgatgtttggagtcgttttaccctcttctattgaattgccttgggatttccttctccctttccctgcccaccctgtcccctacaatttgtgcttctgagttgaggagccttcacctctgttgctgaggaaatggtagaatgctgcctatcacctccagcacaatcccagcgaaaaaggtgtgaagcacccaccatgttcttgaacaatcaggtttctaaataaacaactggaccatca

SEQ ID NO: 823 - protein, 667 aa, Homo sapiens
MAAETLLSSLLGLLLLGLLLPASLTGGVGSLNLEELSEMRYGIEILPLPVMGGQSQSSDVVIVSSKYKQRYECRLPAGAIHFQREREEETPAYQGPGIPELLSPMRDAPCLLKTKDWWTYEFCYGRHIQQYHMEDSEIKGEVLYLGYYQSAFDWDDETAKASKQHRLKRYHSQTYGNGSKCDLNGRPREAEVRFLCDEGAGISGDYIDRVDEPLSCSYVLTIRTPRLCPHPLLRPPPSAAPQAILCHPSLQPEEYMAYVQRQADSKQYGDKIIEELQDLGPQVWSETKSGVAPQKMAGASPTKDDSKDSDFWKMLNEPEDQAPGGEEVPAEEQDPSPEAADSASGAPNDFQNNVQVKVIRSPADLIRFIEELKGGTKKGKPNIGQEQPVDDAAEVPQREPEKERGDPERQREMEEEEDEDEDEDEDEDERQLLGEFEKELEGILLPSDRDRLRSEVKAGMERELENIIQETEKELDPDGLKKESERDRAMLALTSTLNKLIKRLEEKQSPELVKKHKKKRVVPKKPPPSPQPTEEDPEHRVRVRVTKLRLGGPNQDLTVLEMKRENPQLKQIEGLVKELLEREGLTAAGKIEIKIVRPWAEGTEEGARWLTDEDTRNLKEIFFNILVPGAEEAQKERQRQKELESNYRRVWGSPGGEGTGDLDEFDF

SEQ ID NO: 824 - DNA, 4105 bp, Homo sapiens
  misc_feature (1341)..(1342): n is a, c, g, or t
gaattcgcggccgcctcttgcggtcccagagtggagtggaaggtctggagctttgggaggagacggggaggacagactggaggcgtgttcctccggagttttctttttcgtgcgagccctcgcgcgcgcgtacagtcatcccgctggtctgacgattgtggagaggcggtggagaggcttcatccatcccacccggtcgtcgccggggattggggtcccagcgacacctccccgggagaagcagtgcccaggaagttttctgaagccggggaagctgtgcagccgaagccgccgccgcgccggagcccgggacaccggccaccctccgcgccacccaccctcgctttctccggcttcctctggcccaggcgccgcgcggacccggcagctgtctgcgcacgccgagctccacggtgaaaaaaaaagtgaaggtgtaaaagcagcacaagtgcaataagagatatttcctcaaatttgcctcaagatggaaaccctttgcctcagggcatccttttggctggcactggttggatgtgtaatcagtgataatcctgagagatacagcacaaatctaagcaatcatgtggatgatttcaccacttttcgtggcacagagctcagcttcctggttaccactcatcaacccactaatttggtcctacccagcaatggctcaatgcacaactattgcccacagcagactaaaattacttcagctttcaaatacattaacactgtgatatcttgtactattttcatcgtgggaatggtggggaatgcaactctgctcaggatcatttaccagaacaaatgtatgaggaatggccccaacgcgctgatagccagtcttgcccttggagaccttatctatgtggtcattgatctccctatcaatgtatttaagctgctggctgggcgctggccttttgatcacaatgactttggcgtatttctttgcaagctgttcccctttttgcagaagtcctcggtggggatcaccgtcctcaacctctgcgctcttagtgttgacaggtacagagcagttgcctcctggagtcgtgttcagggaattgggattcctttggtaactgccattgaaattgtctccatctggatcctgtcctttatcctggccattcctgaagcgattggcttcgtcatggtaccctttgaatataggggtgaacagcataaaacctgtatgctcaatgccacatcaaaattcatggagttctaccaagatgtaaaggactggtggctcttcgggttctatttctgtatgcccttggtgtgcactgcgatcttctacaccctcatgacttgtgagatgttgaacagaannaatggcagcttgagaattgccctcagtgaacatcttaagcagcgtcgagaagtggcaaaaacagttttctgcttggttgtaatttttgctctttgctggttccctcttcacttaagccgtatattgaagaaaactgtgtataacgaaatggacaagaaccgatgtgaattacttagtttcttactgctcatggattacatcggtattaacttggcaaccatgaattcatgtataaaccccatagctctgtattttgtgagcaagaaatttaaaaattgtttccagtcatgcctctgctgctgctgttaccagtccaaaagtctgatgacctcggtccccatgaacggaacaagcatccagtggaagaaccacgatcaaaacaaccacaacacagaccggagcagccataaggacagcatgaactgaccacccttagaagcactcctcggtactcccataatcctctcggagaaaaaaatcacaaggcaactgtgactccgggaatctcttctctgatccttcttccttaattcactcccacacccaagaagaaatgctttccaaaaccgcaaggtagactggtttatccacccacaacatctacgaatcgtacttctttaattgatctaatttacatattctgcgtgttgtattcagcactaaaaaatggtgggagctgggggagaatgaagactgttaaatgaaaccagaaggatatttactacttttgcatgaaaatagagctttcaagtacatggctagcttttatggcagttctggtgaatgttcaatgggaactggtcaccatgaaactttagagattaacgacaagattttctactttttttaagtgattttttgtccttcagccaaacacaatatgggctcaggtcacttttatttgaaatgtcatttggtgccagtattttttaactgcataatagcctaacatgattatttgaacttatttacacatagtttgaaaaaaaaaagacaaaaatagtattcaggtgagcaattagattagtattttccacgtcactatttatttttttaaaacacaaattctaaagctacaacaaatactacaggcccttaaagcacagtctgatgacacatttggcagtttaatagatgttactcaaagaattttttaagaactgtattttattttttaaatggtgttttattacaagggaccttgaacatgttttgtatgttaaattcaaaagtaatgcttcaatcagatagttctttttcacaagttcaatactgtttttcatgtaaattttgtatgaaaaatcaatgtcaagtaccaaaatgttaatgtatgtgtcatttaactctgcctgagactttcagtgcactgtatatagaagtctaaaacacacctaagagaaaaagatcgaatttttcagatgattcggaaattttcattcaggtatttgtaatagtgacatatatatgtatatacatatcacctcctattctcttaatttttgttaaaatgttaactggcagtaagtcttttttgatcattcccttttccatataggaaacataattttgaagtggccagatgagtttatcatgtcagtgaaaaataattacccacaaatgccaccagtaacttaacgattcttcacttcttggggttttcagtatgaacctaactccccaccccaacatctccctcccacattgtcaccatttcaaagggcccacagtgacttttgctgggcattttcccagatgtttacagactgtgagtacagcagaaaatcttttactagtgtgtgtgtgtatatatataaacaattgtaaatttcttttagcccatttttctagactgtctctgtggaatatatttgtgtgtgtgatatatgcatgtgtgtgatggtatgtatggatttaatctaatctaataattgtgccccgcagttgtgccaaagtgcatagtctgagctaaaatctaggtgattgttcatcatgacaacctgcctcagtccattttaacctgtagcaaccttctgcattcataaatcttgtaatcatgttaccattacaaatgggatataagaggcagcgtgaaagcagatgagctgtggactagcaatatagggttttgtttggttggttggtttgataaagcagtatttggggtcatattgtttcctgtgctggagcaaaagtcattacactttgaagtattatattgttcttatcctcaattcaatgtggtgatgaaattgccaggttgtctgatatttctttcagacttcgccagacagattgctgataataaattaggtaagataatttgttgggccatattttaggacaggtaaaataacatcaggttccagttgcttgaattgcaaggctaagaagtactgcccttttgtgtgttagcagtcaaatctattattccactggcgcatcatatgcagtgatatatgcctataatataagccataggttcacaccattttgtttagacaattgtctttttttcaagatgctttgtttctttcatatgaaaaaaatgcattttataaattcagaaagtcatagatttctgaaggcgtcaacgtgcattttatttatggactggtaagtaactgtggtttactagcaggaatatttccaatttctacctttactacatcttttcaacaagtaactttgtagaaatgagccagaagccaaggccctgagttggcagtggcccataagtgtaaaataaaagtttacagaaacctt

SEQ ID NO: 825 - protein, 427 aa, Homo sapiens
  misc_feature (286)..(286): Xaa can be any naturally occurring amino acid
METLCLRASFWLALVGCVISDNPERYSTNLSNHVDDFTTFRGTELSFLVTTHQPTNLVLPSNGSMHNYCPQQTKITSAFKYINTVISCTIFIVGMVGNATLLRIIYQNKCMRNGPNALIASLALGDLIYVVIDLPINVFKLLAGRWPFDHNDFGVFLCKLFPFLQKSSVGITVLNLCALSVDRYRAVASWSRVQGIGIPLVTAIEIVSIWILSFILAIPEAIGFVMVPFEYRGEQHKTCMLNATSKFMEFYQDVKDWWLFGFYFCMPLVCTAIFYTLMTCEMLNRXNGSLRIALSEHLKQRREVAKTVFCLVVIFALCWFPLHLSRILKKTVYNEMDKNRCELLSFLLLMDYIGINLATMNSCINPIALYFVSKKFKNCFQSCLCCCCYQSKSLMTSVPMNGTSIQWKNHDQNNHNTDRSSHKDSMN

SEQ ID NO: 826 - DNA, 497 bp, Homo sapiens
ctagtaaagaagagcttgtgcccctccccgaccccttaccaagggcgagctgcgtggagtcgttggactgggcagaactttggcgggcaaggagacaaacagccacactgtgctgccggggaagagaagaagaaggaaaggccagacacacaggcgtcgtgcagctgcggaaggattccgtttcctgcagggggcggagggatttgacagcacggtaacttccggaaaagtcctgaacctcagtggaaaagccttgcaagaaacaataacaaacgggaggaggaagcgattctggggtttctgtgttgaacggttcttgtccgcgaagatgcgcttcggcctctgtcaggggacttgaacgggcttagtgggcttcagccagcttttctccaccggttccccacgggaaccccccccccccccggccgttgcaatggcgggcgttggggccggggggctacgcggcggagttcgtgccaccgccagagtgcccggtc

SEQ ID NO: 827 - DNA, 635 bp, Homo sapiens
tttttttttctaatggagacatataattgacctatgtttatgcatatatgttctctacacagtgaaactttttttaaaaagaatagtaaagaaaatgcggaagctctggctctccaaggcaaagtcaaaaaaaaaaaaaaaagcgggggggaatgcgaggaacattttattacacctcctgattttcactccttgagttttattttctccccttgtttatttgtttaatgctagaaactgtattcctaagagagcatacctctttcaggtgagcatgataattggaagattttgatacttagagtatgaacatataattaagaagtgattacctaataaagataacaatgtgactattttaattattttggtggcagggagttggttttacatcacccaaaaaaaaaaaaaagccctggtttcaaattcattggtaataaatatgctaactttctgaatcaaaatggagagcctctcaagaaaaagagctatgcagtcagcaatgacttaaattagtcaggatagcaggcatctggggttaaaggtgtttccaccattgtggtctcaccaccatatacgagtgggaccacagctggtgagcacttggttttgtcataggggtgcaaggtctctga

SEQ ID NO: 828 - DNA, 477 bp, Homo sapiens
  misc_feature (92)..(92): n is a, c, g, or t
  misc_feature (207)..(207): n is a, c, g, or t
  misc_feature (270)..(270): n is a, c, g, or t
  misc_feature (360)..(360): n is a, c, g, or t
  misc_feature (392)..(392): n is a, c, g, or t
  misc_feature (458)..(458): n is a, c, g, or t
  misc_feature (463)..(463): n is a, c, g, or t
gattacgttggagcccagactcagggaggcaccgtattgactcatgtgacagggaaagggacactgatgaacagcagttcactgttaacacntgtcacatgggtacttctcattcaaaaggggtgagaaagtacattcctactatgtgcctgggaggagaggagaattggagtgtttgtaaacgagtcctagagagacccacaaacngtcttctgatggatgagataccggatgacagcgtatctttttcttctcaacataaacctgtanttgtaaggaaggtagaatcttatcattgcaccttctcagataggaagttgagaatcagaatgcctggacagcgtcactatacacccacangctagtgagtagagggatcaggtttattatgnctttacagcataattatgtctccatatatttcattgatatgaaacctgttactgtgttctgctacnttacnttctatgatcctta

SEQ ID NO: 829 - DNA, 325 bp, Homo sapiens
  misc_feature (52)..(52): n is a, c, g, or t
  misc_feature (182)..(182): n is a, c, g, or t
  misc_feature (253)..(253): n is a, c, g, or t
  misc_feature (289)..(289): n is a, c, g, or t
  misc_feature (322)..(322): n is a, c, g, or t
ggcacgagagaaggagagcctgcagacagaggcctccagcttggtctgtctncccacctctaccagcatctgctgagctatgagccaaaccagggatttacagggaggaaaagctttcggactgctgaaggcccagcaggaagagaggctggatgagatcaacaagcaattcctagacgatnccaaatatagcagtgatgaggatcttcccttccaaacttggaaggcttcaaagagaaatacatggagtttnaccttaattggaaattgccgtaattgatatcatgtncctgaaacgaattcttggagaaactttggagtnccc

SEQ ID NO: 830 - DNA, 355 bp, Homo sapiens
  misc_feature (2)..(2): n is a, c, g, or t
  misc_feature (15)..(15): n is a, c, g, or t
  misc_feature (29)..(29): n is a, c, g, or t
  misc_feature (86)..(86): n is a, c, g, or t
  misc_feature (301)..(301): n is a, c, g, or t
anttcggcacagcgnggggatacaactcnggagtcctctgagagagccaccaaggaggagcaggggagcgacggccggggcagaanttgagaccacccagcagaggagctaggccagtccatctgcatttgtcacccaagaactcttaccatgaagaccctcctactgttggcagtgatcatgatctttggcctactgcaggcccatgggaatttggtgaatttccacagaatgatcaagttgacgacaggaaaggaagccgcactcagttatggcttctatggctgccactgtggcgtgngtggcagaggatcccccaaggatgcaacggatcgctgctgtgtcactcatgact

SEQ ID NO: 831 - DNA, 620 bp, Homo sapiens
ggcagcacctcagggtggcagacaaaagcaaaagccataatgggcactgtgtaggacatctgtgagtcaactgtgaacatctgggcctcacagctgctgttgagtccttggctggggagtcccacgagagcttcactctccattgctgtttcattgtggcctatagcacagccaagttggaacttcttgtagatgaccgaaacaaggaaaaacagcatgcaggtcagagagagaccactggtgtaccccaggtagcccaagtgtttcatgagggcgaggggcaggatgattaacacactgacgatgatgatgaggaggtttcccttcaagaaccagtccccctcggggtccatgtacaggaaggtgccgataaccagggggagctcagatttgatgatgaacaggtaactggacatggccccaacattgtgcagacagatgactgtggccaccactaccttccccgcaggcccgaatgccctctgtcccagctgctcataggctcggatgcctgcaataccagcacaggtcagcaggaggtggatggagtaggacgacagaagcgcaatgcacagcagcagggccaggaagaagatgacccccgtgtgggccatggcata

SEQ ID NO: 832 - DNA, 434 bp, Homo sapiens
ttattggtagttggttgttgtctatagtgacagccacgtgattttcttgatgatgaaaaggatgagaaggtcctttattccactttgaacaagtttgtgaatgtccaaataaggctccttgaaaatttctccttcaggggtaagtatcttcacataaccttctttttccagaatgaagagacgttgcgagccatccccactatgcagggcaccaacgggctgccgcagcccactcacaacctcctgaatacagaagcagttgtgtttgtgctttctgctgatctcttccactttgtcatattcttccatctggtccaagtagttagatgctggtcctctgacttgttttcttggaaaatctggaaagcacaacccaccatcttttcttgcatagtaaaagcaaaactcatccgcagttgtttgaaggaaacctg

SEQ ID NO: 833 - DNA, 326 bp, Homo sapiens
  misc_feature (6)..(6): n is a, c, g, or t
  misc_feature (23)..(23): n is a, c, g, or t
  misc_feature (242)..(242): n is a, c, g, or t
  misc_feature (286)..(286): n is a, c, g, or t
ggagangccggctccacgcgcantgctattcctccggcctcagatgaccaggcaccactagatacagaacactgtgctttccttctccaagtcacttcctgccttgtgaccacacacccaggcttgacaaagctgttctgcagatcagaaagaaggggttcctggtcatacaccagtactaccaaggacagcttttttcctgcaagatctgttacctaaagcaataaaaaatggccagaggntcagtgtccgatgaggaaatgatggagctcagagaagcttttgncaaagttgatactgatggcaatggatacatcagcttcaat

SEQ ID NO: 834 - DNA, 486 bp, Homo sapiens
tttttttttttttttttttttttttttttttgggggtttccacaaaggcttttggttttattattattatttttaacaaacatacattggaaatagtaaaggtttctaattgaaaagagacctaatgcatagtttctctgcagcataaaaaaccacctgtttccaaacttcaaggttaggggctttgaaacattccctggtaaattatctccagctggctagctagttaggcatattggggcacattggtatcaaaggggattattttttgcatttagcaaatgagcgctattacttttttgatgtatttttaattcaaattgctcaaaagtcttgttatttcaagggagccttatgtcataccacaaatattgatacctcctagtggaaatggtggctgtgggctccctagtagagttaatggatgaaggctgagatacttagatactgcggacatcagggttatggagcaaagtgttatgaaca

SEQ ID NO: 835 - DNA, 5886 bp, Homo sapiens
gtgaggagggccggcggcggggcggacccctggcggtcctcctggctggggtccgcgcgctcgcggcagctccccgtggaggtcactgtccgtgccagtccctcccgctgtcccgccctctcccgctgccgccgccgccgccgccgcgcccgcctcagcgcccccactccgcgcttgggagcgaggagccgccagcgcccccgccccgccgccgccgcagcgccctcaggccgccattcgccaccgaaactttccagcgcccgcgctctctccgggactcggcggcggcggggcgggggcggcccgggggcggcgcgcggctgctccggggcgccgggccctcttcggccgccgcacggccgggactcggaggctgccggctggagggaggttcggagcgcggccgggcgcgcggcgccgccacaagttgcgctgctcgcgacgagatttccgtgagggtggaagaaaatcataccatatcagatgcctcgcagagcaccaggcccaccgtgaaaggctggtccctgcagacggcttcccatttttatgaccggatgctgggaagcctgctggtccacaggtccatacatgaagtcaccataaggagccctggcctccttgcagaaacatcgaggtgacatgtagcatgaccgagctcgctggcgcctcttcatcgtgctgccaccgccctgcaggaagaggggccatgcagtcagtcttgcaccactttcaacgtttgcgagggagagagggtggttcccacttcatcaacacctcatcgccgcgaggtgaggctaagatgagcataaccagtgacgaggtgaactttctggtgtatcggtatctccaggagtcaggtttttcccactcggctttcacgtttgggattgagagccacatcagccagtccaacatcaatgggacgctagtgccaccggccgccctcatctccattctccagaagggcctgcagtatgtagaggccgagatcagtatcaacgaggatggcacagtgttcgacggccgccccatagagtccctgtcactgatagacgccgtgatgcccgacgtggtgcagacgcggcagcaggcattccgagagaagctcgctcagcagcaagccagtgcggcggcggcggcggctgcggccacggcagcagcgacagcagccaccacgacctcagccggcgtttcccaccaaaatccatcgaagaacagagaggccacggtgaatggggaagagaacagagcacattcagtcaataatcacgcgaagccaatggaaatagatggagaggttgagattccatccagcaaagccacagtccttcggggccatgagtctgaggtgttcatttgtgcctggaatcctgtcagtgatttgctagcctccggatctggagactcaactgcaaggatatggaacctgaatgagaatagcaacgggggctccacccagctcgtgttgaggcactgtatacgagaggggggccatgacgtcccgagtaacaaagacgtcacctcactggactggaataccaatggaacactcttggctacgggttcatatgacggttttgcaagaatatggacggaagatggtaacctggccagcaccttaggccaacataaaggccccatctttgccttgaaatggaaccgaaaggggaattacattttgagtgctggtgtagacaaaacaacaataatttgggatgcccacacaggagaagccaaacagcagtttccttttcattcagcccctgcccttgatgtggactggcagaacaacacgacctttgcctcctgtagcacagacatgtgtatccatgtgtgcaggctcggctgtgaccgcccagtcaaaaccttccagggacacacaaacgaggtcaacgccatcaaatgggatccgtctggaatgttgctggcatcctgctcggatgacatgacattgaagatctggagcatgaaacaggaggtgtgcatccatgatcttcaggctcacaataaagagatctacaccatcaagtggagccccactgggcccgccaccagcaacccaaactccaacatcatgttggcaagtgcttcgtttgattctacggtgcgactgtgggacatagaacgaggcgtctgcacccacacgctcacgaagcatcaggagcctgtctatagcgtagctttcagccctgatgggaagtacttggccagtggatccttcgacaagtgcgtccatatctggaatactcagagtggaaatcttgtccacagctaccgaggcactggcggcatcttcgaggtgtgctggaacgcccgaggagacaaagtgggtgccagcgcgtccgacggctctgtgtgtgttttggatctgcggaagtaaccacaaaatattatcgaaaaaagaaaagaattctaatgaccagccgtgaatgtgtagggttgcagctctattctccaaaactgtaggaacttgacttgcgttagagtgtactctgaaaccaactcgtctctggccgcaggagtctatatgttttcgtaatcttcatcaagaagtttttaaaaggcaagcaaaaacagaagcaaatcatatcaaacggggatagaatggtttccactgaggacattcagcctgggaaggaggaagtcaccagctcgaggcgtgtggattggtttccacccggaacaggctctgtgatggctgaatggaaagaaacgtaaaaagctgtgccaaaaaaaaagcaaaatgctgtgataaaccaaacagggaagggggaaaaaccctcctccttgggatttttttttttttgttttccctaacaatttggacactacaattgctctcacaaaggaggttcaaagaccagtttgtaccgatgaaacgcgcaactttgtaatcccaacactttctattttctagaatcttctttgttcattgggtggtttttcagtcggctggaattctatcttctgggggccttccgtctgagatggaagctgtcttgggcttgttgtctcttccttctgttgctccctgcccctccccctgtctttccactctgtctggtgagctctgctttttcagtgcaccatcaagagatgcagccccgtggacatgaagacacaatctcccacggacagctttcccccttccgccctctcccaccctctcctccccttgcgctcgcgctcgcgctcgctttctcactggcgtgctctctttctctctctctctccctctgtacctttctcatagttgcttcagatcttaggtctcaagggcactttggcgcgtagtaagtgctttatgtaagaaggcagggcaggggggcctttttacaggagaaaaaaaaatgacttataagagaaagagcctggagtatttttggaaaaaaaaataatatttttatgttaaaacaattttaaaatcttaaaatggccatcagacatagagagctttgtgtgattcatgttttaaaaagaaccgaagaagccacaggcagggcctgagggagcccctggctttcccctcagcctcaggaaaggtggtcaggaaaactctggctggacaagggtcagtcttcggggtcagcagcgagattgctctgcagccagtgagggaggtccccgccatgccggctggaagaagaacctcgcatcttttggtgtgtatgcaccttggcagccagcaggaaagcagcgaagagccgcgcgccctctggcctcaagggagcattggcagaaccataaggtactgcagaagccgtcgaaaccgactgctcggctggattaggcgtgttggctacatctttcccacaaccgtataacgaccgatggtcatttctccaagagcaggcttggcgagtccttgcagagctgacatagaggcgcccgcatgtcacttagtctaacgctgacagaaatgaatgcagaaggaagattttcagtcctgaacgtgaattatagaggtagaacgtcgctaataatttctgccatcttcataatttctttgtctcacagaagactaggagaaagatcttttttaaataatctttttgctgtttttaaaaaattaaacaaggctttgtgttcctagaagagcttcatttcagtgaatctggtgacctccatctgcttgctgtcataacccgacacggacttatttttgtcattagcaagggggaaaaggccaaaggacaagggcctcttctcccattggttttcctgtgggcagaagggctgaggaagatggcccagcccgtgggggctgctgggtcaccagcagcgggtagggtgcaatctggtgtgtgttccagcagtgagacggtgttattgtgaaggtggcattcatctgcggagccaaaacccagccatcggggaagggtcagggcttctgtggaacttggaacgtgccaggaccacctgcaaaagccagggtgcgttgatcattctcagatcattgattggcctccacttgggtatgtgaattattcatgtcccagaagaccaaaaagtgctctggttctgagatgagtattttattcgtgttctgtttccgaaacacttagcaaagaaggtcacagtgatgtggagtcgccgcacccatctttgaagatagccagtgtccctggatgaggtgatgatttcccgtcccaaggactctgtgaagtttagagtacagtttgttggggtccaaaagacaccatctctaccccacccaaataaaaatgcactcatctctgtagaacatctgctgtcaaaggccagcctgtcgttagggcatggcttatgcttgacaaaccagtaacaactgtgggatggcgatggtgggatgtgtcgcaagcaattcactagacaatcttcacatgaatgtcggtagccagggtctctcccgagggatggctttagtcttgatgaatgtgaaccatgtcggaattgttaggtagaaacctgggctgggaggcctcggaccccaggctccatccctggcttccccagcctgcggccgcaagcaaaaccaagcgcgagatgcagctagcacccttcatatccatccccgttctcagcgggacaacaccatggacagccgttttcagagcctccagcatttgcacaccactactcaccctctctgctgctggcatgttggtagagtcatccctgtaatcaagaaatggcctgtggaatgttattgttcaacgttgtttacagctcttaaaacatggtgaggaatgcctaagtcttagtgaccaaacgtgaccttgaaagcagacatagcatgacagaccttcctagagtgtttggtcgggttcacagtgaccgagagtcaggtccagcacacacctgggaaagggatgctgccccaagggggaccaaaagggccggacgttacagggtgaaaccctctgacccctcgcgacaccgtaggacttgacttttgtttagtctttctaagaaatagatcatggagccaagtgaagtgcactttgtcaaatgtaagggtctgctttgttcttgttgcttttctgttttttaaccttttgttccgccatttaaaaaaagaaaaaaaaaaagcttatgtttcttgtcaaatgcagaaatgttccttccgccactcactgaagttttgcattctggcttgtgcagtttttattgtctgtgtcagacgtacagccagacatgttctctattggcatttttccgattctgttcagatgacagcgaccgccttttcattccccccgccacctgtactcaccctcacgctctttgaagaaaaaaaaaaaaaatcaccttgtgtgttgtagctcatttgtttcaagagagaatcaacagatcatattcagtgtcttgaataaattgctctattttgatattaaaaaaaaaaaa

SEQ ID NO: 836 - protein, 577 aa, Homo sapiens
MTELAGASSSCCHRPAGRGAMQSVLHHFQRLRGREGGSHFINTSSPRGEAKMSITSDEVNFLVYRYLQESGFSHSAFTFGIESHISQSNINGTLVPPAALISILQKGLQYVEAEISINEDGTVFDGRPIESLSLIDAVMPDVVQTRQQAFREKLAQQQASAAAAAAAATAAATAATTTSAGVSHQNPSKNREATVNGEENRAHSVNNHAKPMEIDGEVEIPSSKATVLRGHESEVFICAWNPVSDLLASGSGDSTARIWNLNENSNGGSTQLVLRHCIREGGHDVPSNKDVTSLDWNTNGTLLATGSYDGFARIWTEDGNLASTLGQHKGPIFALKWNRKGNYILSAGVDKTTIIWDAHTGEAKQQFPFHSAPALDVDWQNNTTFASCSTDMCIHVCRLGCDRPVKTFQGHTNEVNAIKWDPSGMLLASCSDDMTLKIWSMKQEVCIHDLQAHNKEIYTIKWSPTGPATSNPNSNIMLASASFDSTVRLWDIERGVCTHTLTKHQEPVYSVAFSPDGKYLASGSFDKCVHIWNTQSGNLVHSYRGTGGIFEVCWNARGDKVGASASDGSVCVLDLRK

SEQ ID NO: 837 - DNA, 461 bp, Homo sapiens
ttttttttttttaagctaatcagctatcattagtgttagtgtactttatgcgtggcctgagacaattcttattcttccagtatggcccagggaagccaaaagattggacatccctgatttatgcagtctccagaggaaaaattcctgactcacctaaatcacactgaagaatatatcaatacaatggtcttattaccttaaaattaacctgttaaattttctttccatgttctctaacctttcctagtcaaactggaaaatatccaataaaattagtgtagagaaaccatactcaattctataacgaataatctctcatcttctcacgaatttcctggaagtaatgagtgtggactgaaggaagcagacatatagcacacagactgggtcccaagttacaagcacactgacgttatctagcttcaaaggcatactgcctttcagagtctaaaacagagcgg

SEQ ID NO: 838 - DNA, 644 bp, Homo sapiens
gcctgagctccggctccggctggggcgcctgcgatgtctcaagatggcggagctgggcgaattaaagcacatggtgatgagtttcctgggtgtctgagctccagtgtgcttcttggctttgctggccggaacaatgagtggactggaagcactgagctcctgtgccaatggctctgcacctcctgaagtccagctgtgcccctagtgtccaggatgaacgatcaaatgatgctttacctgactgactgctttccccgtgaagaccctggggccctctgatctctcccttctctctttgccccctggcacctctcctgtaggctcccctggtcctctagctcccattcccccaacgctgttggcccctgtgcaccctgctgggccccaagcgtgaggtggacatgcacccccctctgccccagcctgtgcaccctgatgtcaccatgaaaccatatgcccttctatgaagtctatggggagctcatccggcccaccaaccttgcatccacttctagccagcggtttgaggaagcgcactttacctttgccctacacaccccagcaagtgcagcagattcttacatccagagaggttctgccaggagcaaatgtgatataccatacaggtgcagctagtgtcttgc

SEQ ID NO: 839 - DNA, 554 bp, Homo sapiens
  misc_feature (499)..(499): n is a, c, g, or t
  misc_feature (551)..(551): n is a, c, g, or t
ttttaagtctttattttcatcacttttaaaaattacccattgaccaaagcaagcccagttctaaagactgagaaatagattctaccttatgataagaggaatggcagttacatttcaaagaggcatgtgtgcagggaagagagggagggattgcagctgcctcgtaagccactacactacaatagtatgacaagctcactcagggaagagcgcaaacatgtaagggcagagctctgaggagtttctatcattaaacaacaacttgaggaagaggggtggctgagtaggtgaggagcagagagtaggattgagggaaatccaggagcgatggcttgtgcacactgaattgaagacagtatttcaaggagggaatagtcaacagaatggcaggaggtaaagttgggtcaagttggatgaggacagcaaaccctggggcatggctgatggggataggatttctgaggaggaaggccaatcaaagaccaacaggctgtgttcncagaattagtgactccagctgcttctagctcccctaagccccattttcctgnccc

SEQ ID NO: 840 - DNA, 403 bp, Homo sapiens
  misc_feature (6)..(6): n is a, c, g, or t
  misc_feature (115)..(115): n is a, c, g, or t
  misc_feature (118)..(118): n is a, c, g, or t
  misc_feature (194)..(194): n is a, c, g, or t
  misc_feature (217)..(217): n is a, c, g, or t
  misc_feature (220)..(221): n is a, c, g, or t
  misc_feature (293)..(293): n is a, c, g, or t
  misc_feature (349)..(349): n is a, c, g, or t
  misc_feature (395)..(395): n is a, c, g, or t
gccaancccaaagtagatcgaggcggcgggctgcacattcccgttgttgcgttgcgtttccttcctctttcactccgcgctcacggcggcggccaaagcggcggcgacggcggcngangaacgacccggcggccagttctcttcctcctgcgcacctgccctgctcggtcagtcagtcggcggccggcgcccgnttgtgctcagacctcgcgcttgngcnnccaggcccagcggcgtagctagcgtctggcctgagaacctcggcgctccggggcgcgggcaccacgagcggngctcgcagcggctccagaggaggcaggcgagtgacgagtccgaggggtggccgggncaggtggtggcgccgcgaagatggtcgcaagcaaaggatcgtatgncaagagaa

SEQ ID NO: 841 - DNA, 2722 bp, Homo sapiens
gagcgggctgagggtaggaagtagccgctccgagtggaggcgactgggggctgaagagcgcgccgccctctcgtcccactttccaggtgtgtgatcctgtaaaattaaatcttccaagatgatctggtatatattaattataggaattctgcttccccagtctttggctcatccaggcttttttacttcaattggtcagatgactgatttgatccatactgagaaagatctggtgacttctctgaaagattatattaaggcagaagaggacaagttagaacaaataaaaaaatgggcagagaagttagatcggctaactagtacagcgacaaaagatccagaaggatttgttgggcatccagtaaatgcattcaaattaatgaaacgtctgaatactgagtggagtgagttggagaatctggtccttaaggatatgtcagatggctttatctctaacctaaccattcagagaccagtactttctaatgatgaagatcaggttggggcagccaaagctctgttacgtctccaggatacctacaatttggatacagataccatctcaaagggtaatcttccaggagtgaaacacaaatcttttctaacggctgaggactgctttgagttgggcaaagtggcctatacagaagcagattattaccatacggaactgtggatggaacaagccctaaggcaactggatgaaggcgagatttctaccatagataaagtctctgttctagattatttgagctatgcggtatatcagcagggagacctggataaggcacttttgctcacaaagaagcttcttgaactagatcctgaacatcagagagctaatggtaacttaaaatattttgagtatataatggctaaagaaaaagatgtcaataagtctgcttcagatgaccaatctgatcagaaaactacaccaaagaaaaaaggggttgctgtggattacctgccagagagacagaagtacgaaatgctgtgccgtggggagggtatcaaaatgacccctcggagacagaaaaaactcttttgccgctaccatgatggaaaccgtaatcctaaatttattctggctccagctaaacaggaggatgaatgggacaagcctcgtattattcgcttccatgatattatttctgatgcagaaattgaaatcgtcaaagacctagcaaaaccaaggctgagccgagctacagtacatgaccctgagactggaaaattgaccacagcacagtacagagtatctaagagtgcctggctctctggctatgaaaatcctgtggtgtctcgaattaatatgagaatacaagatctaacaggactagatgtttccacagcagaggaattacaggtagcaaattatggagttggaggacagtatgaaccccattttgactttgcacggaaagatgagccagatgctttcaaagagctggggacaggaaatagaattgctacatggctgttttatatgagtgatgtgtctgcaggaggagccactgtttttcctgaagttggagctagtgtttggcccaaaaaaggaactgctgttttctggtataatctgtttgccagtggagaaggagattatagtacacggcatgcagcctgtccagtgctagttggcaacaaatgggtatccaataaatggctccatgaacgtggacaagaatttcgaagaccttgtacgttgtcagaattggaatgacaaacaggcttccctttttctcctattgttgtactcttatgtgtctgatatacacatttccatagtcttaactttcaggagtttacaattgactaacactccatgattgattcagtcatgaacctcatcccatgtttcatctgtggacaattgcttactttgtgggttcttttaaaagtaacacgaaatcatcatattgcataaaaccttaaagttctgttggtatcacagaagacaaggcagagtttaaagtgaggaattttatatttaaagaactttttggttggataaaaacataatttgagcatccagttttagtatttcactacatctcagttggtgggtgttaagctagaatgggctgtgtgataggaaacaaatgccttacagatgtgcctaggtgttctgtttacctagtgtcttactctgttttctggatctgaagactagtaataaactaggacactaactgggttccatgtgattgccctttcatatgatcttctaagttgatttttttcctcccaagtcttttttaaagaaagtatactgtattttaccaaccccctctcttttcttttagctcctctgtggtgaattaaacgtacttgagttaaaatatttcgattttttttttttttttaatggaaagtcctgcataacaacactgggccttcttaactaaaatgctcaccacttagcctgtttttttatcccttttttaaaatgacagatgattttgttcaggaattttgctgtttttcttagtgctaataccttgcctcttattcctgctacagcagggtggtaatattggcattctgattaaatactgtgccttaggagactggaagtttaaaaatgtacaagtcctttcagtgatgagggaattgattttttttaaaagtctttttcttagaaagccaaaatgtttgtttttttaagattctgaaatgtgttgtgacaacaatgacctatttatgatcttaaatctttttt

SEQ ID NO: 842 - protein, 534 aa, Homo sapiens
MIWYILIIGILLPQSLAHPGFFTSIGQMTDLIHTEKDLVTSLKDYIKAEEDKLEQIKKWAEKLDRLTSTATKDPEGFVGHPVNAFKLMKRLNTEWSELENLVLKDMSDGFISNLTIQRPVLSNDEDQVGAAKALLRLQDTYNLDTDTISKGNLPGVKHKSFLTAEDCFELGKVAYTEADYYHTELWMEQALRQLDEGEISTIDKVSVLDYLSYAVYQQGDLDKALLLTKKLLELDPEHQRANGNLKYFEYIMAKEKDVNKSASDDQSDQKTTPKKKGVAVDYLPERQKYEMLCRGEGIKMTPRRQKKLFCRYHDGNRNPKFILAPAKQEDEWDKPRIIRFHDIISDAEIEIVKDLAKPRLSRATVHDPETGKLTTAQYRVSKSAWLSGYENPVVSRINMRIQDLTGLDVSTAEELQVANYGVGGQYEPHFDFARKDEPDAFKELGTGNRIATWLFYMSDVSAGGATVFPEVGASVWPKKGTAVFWYNLFASGEGDYSTRHAACPVLVGNKWVSNKWLHERGQEFRRPCTLSELE

SEQ ID NO: 843 - DNA, 271 bp, Homo sapiens
  misc_feature (67)..(67): n is a, c, g, or t
gcggcggatgagggagcgcgcccgcccagccccgagtcccgccgcctgtcctcccgccgcagccgcnctcaccggccgccgccccagccatgtgagcaagacaacagcccccgaaagatccagttcacggtcccgctgctggagccgcaccttgaccccgaggcggcggacgagattcggaggcgccgcccacccctgccaccctcgtgctgaccagtgaccagtcatccccagagatagatgaagaccggatcccaacccacatctcaag

SEQ ID NO: 844 - DNA, 129722 bp, Homo sapiens
gatcctgcaaaaataattatgagtagggacaaatatttaaatccaaggatgcttctccaatgacaggaacagattaaatacataatggcttatgcaggttttggcacacccgtttgattgatgtggaagaatatgtaatggtgtacaaagatggccacaatgtattttttgaatgaaaaaagcagattacaaaacagtatgttgttatgatctcatttttataaaaacatttcttcatacatagaaaaataaatgttaaaatgttaatattttaggcttgaaaattaagaatttttctcctatttttgggtagtttctccccatccaaccttttttttttaatgatgaaaactgcaatgttacccagaccttgtaaaaaaaaaaattcaaacaacagagagtattatccgcctgccataaccctaagcctctgctaaggatgattaattttttttcttcttttacttctccatattttcaaaattattcataataagcataaattgctttggcaaaatgcaagagaaaacaaaattttacaaaaaagcacaaacaatgctctacagtatgggcctggctgggcagagggcaaaggctgggatctggacagactcctcataagacagagcccaaggagtctctgcccaggaggaattggccactggttgactgaggctccttctttccccatgatgtcccagtagctggtgagagatctggagtatcgtgtggtgtgcacaggacacagaaagccatttccttctctagatataccaactgacactgaggaacgaggagcaaggggcataaaccccagttctgcctctgccaagctgtggggccttgggcaagtgacttaacctctctgagtcctcctgtggtaattgtgatactaatacctctctcacacatgacagggtgactgtgaagattaaatggccagcacgcggaggtgtttggtcagtgctagctccttcccatccctgcccatgtctggcaccactgagcagatgggactctgagagcagcatcctgaggtcccttcacaatagctcctttggtggtctcgtggcccagtccccagaatccagtcaggtctgggtataaacaatctgctgtaaatgcctctacagagccagatgtcacccaattctggatgacatgtctcggcagcatttaggttcttccctatccagcctaagtgctactctcccagacaaacgaccctggctgtggccacttacattttggcttcatagtccttccatgccttctccagctgttttttggaatcctgtgggttaaaaaaggacaatttgcccagagggaagctggagcactggaataaacagtatgctctgctgcctgtaggaggacctgctagtgtgctcccctgagctgctcagagcccttctctaaccagcccctgcccccacagtcctgctgcaaacctgcccccaccaaacaggctcagctgaccccatttctcagagctaaggccctcctcccagcagaccttctcctccccagagatgccaagaatcagtcaggtttggtgggccatggcttggggtgtgaagagatctttgggctctaccctgagtcctcttgctcagaagagagatcagtcatgaccatgaggatgggaggatgaaggccaaattccccctgcctaactttagcccagcattttctcctgcctggtgctagatcatcctcttagagcaagggtacaggtcaaggaacatgcacagagaggttgagaagtctaccccaggccatacagcaaaccagggagacctgactaccccctgcctagcttgcctaagcctcatccagccaggctgctcacacccttctgaacaaccccgagactcccaaggtgaaaaagctgcctgtctggtttgtgtggttagcaggctggtgccacgctggcagcctagggcagggagggaaccctcttgggggagcacggctcctcccctgggccgtctggggcagattgcccagagagattattctgtcaccttctttgagctccactctgcatccagccaagggctgccaggcacagagaaagcagctcgagtatgggattcaggatccctggattcccacatgggctctctacttcctagttatgtaaaccatcagcaggttacctaactcccttggcctcgaatttcaactgcaaaatggggatgagtgtacccacaaagcctacctcataggatggttgtaagatttacatgacatgtttcacacaaggggcctggcagacagcaggtcagccatcctaggctgacccgagccaggtcctccagacctccccaggctcatcactcccgctaagacagccccttcacctggcctccaccctcagtccagccctgccccccaacagtctcctgcccacccctcttttactctgtcccaccaccactcccagcatggagactcacctgtcgaccgtccctcagctgccccttcatcagactgtccagggggaaagagacaatgttgttcaagttctgaatctggaaaaaacagagacgctcattcccgcctcaggtgaccggcatccagcccctagggattcggtgtacagtgaagcatcacttggcaaagagagcagcggggaagggaagtaggggagaggaaaagatgttatcaaagagatgacagccaagtaagggggaccgtcatggcaggagtgctgagcctgcggggggggactagaggatccagctctggggtctgcttaggatggctgacctgctgcccgccaggcttcctgtgtgaaagggggcaggaggggaggccgaggtgtgtcagagtgagccccttccctgatggctccagcctcatcgctgcactgctccagcagcatcccacagtcaatctctcccctgttcctcgccaggagcagcctcccttctcctctctgactctctcaagttgacctgtagtgcacgtctgttgttctgggctggctaacgcttcagagcctcccctattaatggtcatagaaccccctttcctgtggggaactcctcctctgtggtcagatggggtaaacgcagaagtcagatctgagcagggcaccccagccccaggatagagggactggatagggaacaggcacgcacccaagccagccaatcacaatcctcgctgggatttttctgcctaagttgtgggagaaagaccatctttattttggtaagatgggcatctgggcctgctgggctatcctgtccactgagcagagacagagaaactaccttaagaggaaaggatagagcctaagccagctgcgcccctggacttctcattacaggggctaatgaattcccttttaaaaatttaacctagtttgagttgggtttctgtgatttcgcaacctaaagaggcctaatatttcaaccagcttccaaggtacagcttgggtctctcctcctccaggaagtctctcctggctactcctcccgcctggtctatgctgatctccccttttctgaaccatggcagcactaggcctctgacaccagctgctgggtccttgagtttgtgccatgctgctggtatttcttgacactagtccacaccctagtttttctctcccccactagactgtggctctctgaggcagtctgacactttcctgtgtcaccaacccctggtacaatgtccactagacagcagacccccaggaaacactagtttgactgaaacagggagagaagaggtgaagacaaagaaggacactaattcaattgaactcaaacactatttttttttttgagacagggtcttgctttgtcacccaggctggagcacagtggtgtgatcacactcactacagcctcaacttcccccaggctaaactgatcttcctacttcagcatcccgagtagctgggaccacaggcatacgcccccacacctggcatttttttttttttttttttgagatggaatctcgctctgtcacccaggctggagtgcagtggcatgatctcagctcactgccacctccgcctcccgggttcaagtgattctcctgcctcagcctcctgagtagctgggattacaggcacctgataccacacccaactaatttttgtattttttcgcaaagacagtttcaccatgttggccaggctggtctcgaatctctgacctcaagtgatccgcccaccttggcctcccaaagtgctgggattacaggcgtgagccaccgcacccggcaattttcatacttttgtagagtcagggtctcactacattgcccaggctggtctagagcttctgggctcaagcgatccacacacctcaggctcctaaaccactgggattaaggtttgaaatgttgcacccagcctcaaacactgttaaaggctttttacatgcaggacagtgtacgaggcacagctatgccaagagctataacaatgatagattttattaggttggtgcaaaagtaattgctgttttgccattaatataatattagccaacatttactgagcgcttaccataaagtaggcactaacttgcttaatcctcattaccgctctgtgaggtaggcagcattattatcccagtttcacagatgagagacctggggcttgggcagactgagtgacttgacctagtaagcagcagagtgaagattccaagctggagtctaggtccaaggttgggtgcttaaccactgagcacactgcctctcaaggatgatgtggcccctgccaaccagggaggatgctgggtaggactggagccacaagagctggtccagtgccatggagcctggagggagatgagaggctttcctgggaggcagtgtagccaggcttatgcttggactctggagccagacaacctgggttcaaaccgaaccgtgtgacctcgggcaagctgcttaaccttgaggtcctagtttcctagcctgtaaggtggagacaacagtcacaccagccccacagagctgtgcatccggatcgaatgagtgaacacatgaactagtgagaactgtgcctgcacatgggaagagctgctgtcacagggtggccttgaggaaaggacttgaaggaccagagaggaggcagtcaccaaggaggccatcgggaagcaacccgaggccactgggccatgtacaggggctgagacgcttgtggaggcagggacaggtcctgggatttaagtacgaagcagatgtggattgggaaagcagaggacaaagagggagtgaggagaggaggaggcggtggcagcggtggtggtggcagtggcagcagtagtggtataaaggtaggaacccccgagcctgtctctcctttatcccaaagctcctccagggaaccctcccttgcacggggctcttccctgctgtgagaccccctctgctcctgggtgaagagaaggaggagaacagagagaagagttagttgggtaagaagccagagagaaaggaggattatccaaaagaagggtcagggctggaaagggacctcaggtctgaactcaggtcagagatcaagggcaaattgggagaaggaaggaaacggaccctttcccagtcaggttcttaagaccactagatttaccctgagtctgggcaaggaagagacaggggcctcaccaggttcttgaagagcgcagcaacctcgcgggtgaacacggccaagtttaggaagcctgtggacagctcatggctgttctgggacaggtggctgttgcctaaggattccacggcctctcggtactgctcttcattctccacatggcctgtggaggtacagacgggagcttggagttagctccaggctggggctgggagaggggcttcctgaccaggcggggcacccaggaggctcacttaccaaggccggagctatggattgcccgcacagccttctttattctctgcaggatggcttggtctccttccaagatctggaagcaaatgtggacagaggttcagggatgccaagctggaatagggtgcttccttcaggaacgctgtatctatgatttccaccccccaaccgccctccaaacaaatacattgagttttgctgtcctctggaacttatccctagggtcttcctgtttaccccaccaaacaaaaaaccacacagaaaccacagaccagtcacaccactccaagaagaccacagacttttctccctgaatccaatgcagcgtaaatgtagtgagtcaaaggtacgtggcatgacagggtgtgccaggcctgggtttgaatcttgcctctggcagtagctggtgtgtccgttagacaaatctgttaacttctctgagccttgagtgccttgtctacaaaatggggatgatactaggggacttgtggagttgctgagaagatgaatgatttgtaaatatgtacaaaatgctgagcaaaaggccagaggggagaacacacacatctctatcttcccttaagatacaaagcagggtacacttgttcaccaaaccccaggctcaataaacagttatgtcaggacaaggaggaagaggccaggatgctatgggtgagcagagaggggttggaggcattcagttacctgagtctggggagatggcagagggtggcgggagcacactccatcaccactggggagaactggagagacaacaccagataaccccaaagcccagaggctgcagaacaaacatcagaatgtgggaaaggccagagatgtgatggcaagaagcaagtctcacatgccccaagcaggctcagcctagatgggaaacactccccctttcagtggggcatggaagttgacaacctcatgaaatccttgcgaaatgcacagttaacttggaaaacacagaatgtcgagctggaaggggcccacagatgagaaaactgaagccaagagatgggaggcccttaccgagagacacatggtggggaagccacagagctggacttcccgggtgcaacagaacagtgttccatccatgtaccacagccccaccctgaccccagcccagctgttcttcccagtgacaaaaataaaatgggatcagagtctgatttccagagttacatgacaagagttagtaaacacattggaaatggtactgccaaagattcaaaatgatacccacaggagaacatgcatagggcagaactcagaggcaatgtggagtgttctcagaggccggtggcatgtgggaagcctctggaggaaggggggtctagttacgaagctcagctccactactcgggggctatgtgaccttgaacaagttgcctattttttttgagaccaagttttgctcttgttgctcaggctggagtgcagttgcacaatcttggctcactgcaacctctgcctgccaggttcaagcaattctcctgcctcagccttctgactagctgggattacaggtgcccaccacctggctaattttttgtatttttagtagagacggggtttcattgtgttggccaggttggtctcaaactcctgacctcaagtgatccacccgcttcggcctcccaaggtgctgcgattacaggcatgagccaccgtgcccgggcacaagttgcctattctttctgagcttcctgattagccatgtgtaaaatggggaaatcgatgcctacctctcagggttggtatgagggctatatgtatgagaggatgcaaatacaggatttagcttggtgctaggcatggagtatgttcaaaatgaacagcacctgtgatcgttatcatcagctgctgctgatgctaggaaggtctgccaagttccaggtgcttttcctacaggggctagaaatctaacattctcctcctcgggtgtgaacttgagacactttcatatttgagatccgtggaggcccatcccagggctgaagaaagaaaacaaaagaatcaggaagattaaggagacggcatcatatttgagttggttaaaacatgaggctgggcatggtggctcatgcctataatcccagcactttgggaggcagaaacaggaggatcacttgaggccaggagttcaagaccagcctaggcaatatagtgagaccttgtctctaccgaaaagaaaaaataaataaattagctgggtgtggtggggtgcacctgtaattccagcacttggggaggccaaagcaggaggatcacttgagccaaggagttcaagaccagcctggacagcttggcgaaaccccatctccatgtggtggcatgcacctatagtcccagctacttgggaggctgaggtgggaggatcacctgagcctggggaggtcaaaactgcagtgagccctgattgcgccactgcactccagcatgggtgacagagagagccctgtctcaaaaagcaaagcaaacaaacaaaaaacaaccaaaatgtttcttactaaagagacaaagaggtggaggggagaacgtttctttctaaactggccaacagaaaaagaaaaaaaaaaagaggcaagaacatggccacttctatggttccccaaaatccagatggggaaacagaagcatgtgtttaccaaatcccttgatccccatcttgaaacctggaaagctaaaaggtgagtaatttaaggagctatgatttcgctctaaaagacaattcaggttaaagatatgaacaactgggccagcacagtggctcacgcctgtaatcctagcactctgggaggccaaggcagtggatcacctgaggtcaggagttcaagaccagcctgaccaacatggcgaaacactgtctctactaaaaatacaaaaattagctgggcgtggtggtgcacacctgtaatcccagctactcaggaggctgaggaaggagaatctcttgaacccgagaggtggaggttgcagtgagctgagatggtaccactgcactccagcctgcacaatgggagcgagactccatctcaaaaaaaaaaaaaaaaaaaaaagatatgaacaatttccaaaaaaatttccaaaatccctagagggcagatccatgtacctagcacacagaaggtgcccaataaatgtttacctaaatgaatgatggtttgcaaagtcctgggacatggacctgagaggagtatgttcatgctctagatacattctgaggagtcttcccatcccatgacacccattttctgaaaactgccctcccttcctctggaggtgggcccctgcagccttgtttgttctagccagagtcgacagacacctggttcaagctaaaccaatcagattctctctcccacctgacccaagctggaccaatcagattctctctccaaggactttggaattgggctctggaaagctagttgactgactgaaatgctaaagctgggatgtccttcctgccacatgcagagagaaaagaacagagcagatgtgtagaaagacatgaacaagccccacaccgccacagcaaggcagaagaggaagagtggtgctggtttctggcaactttccagatgctacctcttcagaggcaacctccacacattatgtctttggtgaaattccatgaaatacccctgaatccacccaacgaagttcctttaagcaagtttgagaagatttcccttccctgcagtgtggcagagatcactgggtggctcccagtgtccattctctcttcttccttcacaagaaacctgacttttcagatggccacttggcgacctagaataaagactacatttcctaccttgcagctaactgtggtcatgggactaagtcctggccatggaatataatattttaattgttaacttccaaaaagtatcttacaaagaagggagataacccccaaactcatcaagttgtatacactgactatgtatagctttttacatgtcaatcctacctcaataaagtggctttaaaaaattgaaaaataaaaaggaagggagggactacacacctgttagaatggccaaaatccaaaacactgacaacaccaaatactggcaaagggaggccgggcacggtggttcacgcctataatcccagcactttgggaggctgaggctggtggatcacttgaggccaggagttcaagaccagcctggcaaacatggtgaaaccctgtctctactaaaaatacaaaaattagccaggcgtggtggcacaccgctgtagtcccagctactcgggaggctaaggcaggagaatcatttgaacctaggaggcggaggttgcagtgagctgagacagtgccactgcactccagcccaggtgacagagtgagactccatctcaaaaaaaaaaaaaaaaaaaaccaaacaaaaacacacacacacacaaataaataaataaataaccccaaaacacaaatactgacaaagatgtggagcaacagaaactcccattgttggtgggaatgcaaaatggtacagccacttcggaagacagtttgacagtttcttaactaaacgtactcttgccaaatgagtcagcaatcatactccttcatattttctcaatgagttgaaaacgtatacatacctgcacacggatgtttacatcagctttattcataattaccaaaatttggaaacaaccaagatgtccttcagtaggtgaatggataaagaaattgtcatgcatccagagagtgaaatattattcatcactgaaaagaaatgagctatcaaaccatgaaaagatgcagaggaaagttacatgcacatcactaagtgaaagaagccaatttgaaaaggctactacatgatttcaactatacgatattctggaaaaggcaaaactatggagacagtaaaaagatcagtggtggccagggatgggggtagtgaggaggaacaggtgaagcacagagggtttttagggcagggaaacatttctgtatgatgctataatggtggatacatggaattatacacttgtccaatcccacagaatgtacaacactaagagtgaaccctaatgtaaactatggacttttggtgatgatgtgtcaatgtatggtcattgaaacaaatgtaccactctggtaagagctgttgacagagggggaggctgtgtgtatatggtaactctatgtacttcctgcccaattttgctgtgaacctaaaactgctctaaaaaataaagtcgattttttttaatttagaaaaaaagggcctggggtggggtggctcacggctgtaatctcacactttgggaagctggggcgggaggattgcttgagcctagttcgaggccagcctgggcaacatagtgagagtctgtctctacaaaaaattaaaaaccaggcatggggcatgggcctataattccagctactcaggaggctgaggtgggaggactgtttgaccccagggagttgaggctatagtgagctgtgatcgtgccactgcactccagcctgggcaacagagcaagaccctgtctcaaacgcacccccccacaaaaaaaaaaaacaaaagaaaaaaggggaatgcaagggtaccctctgtcacccctttcttctggctacaatgtgctggcgatgtctagagctcaggcagcaatcctggaccatgaagtagaagccatttgttatggatggcggagcaacaagatatcagccttgtccctagtgattaggaaactaccctagcagccccagtctacttatctgtggaattctttaatatgaaagagaaatctcttatttgagccactgttatactgggtattctgccacttgtggctgaaactagctctaactggtaaagggagacaagtcacccgaatcactcacagactgtttttcttttctttttttttttttgagatggagtctcgctttgtagcccaggctggagtgcagtggcacaatctcggctcactgcaagctctgcctcccgggttcacgccattctcctgactcagcctcccgagtagctgggactataggcgcccgccaccacgcccggctaattttttgtattttttagtagagacggggtttcaccgtgttagccaggatggtctcgatctcctgacctcatgatccgcctgcctcggcctcccaaagtgctgggattacaggcgtgagccaccgcgcccggccacaaactgtttttcgatgcccttgtcagacatctatcaggaaacagcttcccagccagataccattcccgtccctactgctcttggcagccaagttcacatggctgtttattcattcaattagttattgagtgcccactacaccctgtgtaaaaaagacacaatctcagccgggcacagtggctcacacctgtaatcccagcactttgggaggctgaggctggcagatcacgaagtcaagatcgagaccatcctggctaacacgtctctactaaaaatacaaaaaattagccgggcatggtggcatgtgcctgtagtcccagctactagggaggcggaggcaggagaatcgcttgaacctgggaggcggaggctgcagtgagctgagatcacgccattgcaccccagccaggagggcagtgtgagactccgtctcaaaaaacaaacaaaaaagacacaatctcagctctcaaggacatcatcattgaagggaagaaaaagccattataagcagacacttatcatgcaatgtgatgagggctatgatggaaggttcctgggagtccagggaaaacagagccatgtctgctttgaaggaatggggaaggcgtcccttaagctgtgttgcttaactctggcccctggacaggcagaaaagagactaaagagactacactatgaggtagaggggagggaatgcttggtaaaaaatggtaggactgccaggaagggaggcgtgctctgggaagaatggacaaggacaggaacatagttcctccattcattcattcatttcaacaagcatttcttggtgactgtttcagccaggcatggtgccagatggtggggacacataagacatggccccttccttcaagagaaccacagacttaagaacatgcaagtgcccatagggagcatgaaaagggaaaagttctaattactcctttctcaagaaaatatctgaaaatcatttacactggttgataacacctatcctgtggtataatagggctcaaagatttaagctaaagaaatgcaggtttttttttttaatccactcatccacacactcataaaaaaatttagttttaaggagacgattctgatagtagcctggggaaaggaaggtattttgaggaaaggcagaggtttccagagtgctatgatgagtcagtaactaagattctagccccagcatctccaaaattatctccttgggtgatactagcccagctagttttctaaacttcctctcctttaaaatagatttttatttttttatttttttatttttgagatggaatctcgccctgttgcccagcctggagtgcaatggcacaatctcggctcactgcaacctccgtctcccaggttcaaatgattctcctgcctcagcctcccgagtagctaggattacaggtgcccgccaccatgcctggctaatttttatctttagtagagacggggtttcaccatgttggccaggctggtctcaaactcctgacctcgtgatccgcctgcctcggcctcccaaagtgctgggattacaggcagaaaaatccattctctgcttaactcacagaattactgtgaggcttaatgagatcacaaacatggcaaggcttgaggcatttggaaaacatgagtatggttcttactgtggtttgttttctgcctctgtgtgagatcagccctcgtttcccatgaaactggatagatgaaggaaaagccaggtgtggcggctccctcctatcatcccagcactttgggaggccaaggtgagaggatcgcttgagcccaggagttcaagaccagcctcggcaacaaagtgagacccccaccccgatctataccaaaaaaaaaaaaaatttttttttttgagacacagtctctctctgttgcccaggttggagtgcagtggtgtgatctcggctcactgcaacctccacttcccaggttcaatcgattctcctgcctcaggctcctaagtagttgggactacaggtgcccgccaccatgcccggctaatttttgtatttttagtagagatggggtttcgccatgttggccaagctggtttcaaactcctgacctcaactgatcctcctgtcttggcctcccaaagtgctgggattacaggcatgaggcactgcacccgaccattacaaaaaattttttaaaaaagttagccaagtgctgtgacacacacctgtagtcccagctatttgggaggctgggatgagaggagcccttgagcccaggagttcgaggttgcagtaagctataatcatgccactgcactccagcctgagtgacagaatgagacactgtcttaaaaaaaaaaaaaaaaaaaaaaaaaaaaaaaaaaatcagcttctgggttcaggtgggcccatttaatccctgatagtcagagattctcaaggtgggggccctcaaccagcagcaggcatcatccaggaacttgttagaaaagcaaattctccagctgaatcagaaaatctgggggtgaggtccagcaatctgtggtttaacaagccctccaggtgattctaatgcatgctaaagtttgggaattactgttctaattctcttcagagatgcagtacatcatcattgctaaaagtatggggctgtccccaaactacctggatttgaattccagctccaccaggtacctgatgtgatctctcagtccctcaatttccccattcataaaatgaagatgataatattgcgtaccacataaggttactggggagattaagtaaattctataggtaaagtgcttagaatactgtccactatttgataactaaaaatgttatctacttcaaaattaaattgaatttggtttaggaatttctcaactttcattgaattaattaaacatatctccccacacccccaactccatgttgatcctcgtcagcaagctgtggggaagcacaggtggagagggaccacagcagacctctgccgccgggcagggagagtgcaagcagcatgtcccaagtgcctgctctgtgcagcctcattacttgtcactatcctggccactctttgaggaaggcattgccattcccattttaaagatgaagctgtcaggaggaggaacatgtccaagtcacacagtgatgaacagtggcagagctgtaactttttttcttttttttctttctttttttttgggggggggatagactctcactctcgcccaggctagagtgcagacacacaatctcagctcactgccacctctgcctcctgggttcaagcgatcctcctgcctcagcctcctgagtagctgggtttacaggcgtgtgccaccatgcccagctaatttttgtatttttagtagagacagggtttcgccatcttgaccaggctggtctcgaactcccgacctcagatgatctgcccacctcggcctcccaaagtgctgggattacagacatgagccactgcacctggcccagagttacaatttaaatccaggactagccaaatccagggccaatgttctttccccatctctaagctgccccacaaagttagggggcacagcttatttgatcttgggactggatctgcctccaaacctaaatcccaattctaccacctctaccatattccctcaccatcccctcaggcttaggaaagggagaaggcagggcacagagggagatctgtccaaggaaaacaaggttgacagcaatggtgaggccccgaatacaaacactgtaaaggatgtcctactgaaaagaaaacggatttgttcaggctggcctcagagaggattcccaggactgagaggtggaagttagggaggcagaaacagacttcagctcaaacaggggacatttctaaggaagaacaggccacccctgaaggcagtgagctccctgtcacttgaagtattcaaatactttaggtgctagagagtgattcagacactggattttggattagaatggacagctatttagatttcattcaaagctaagagtcaatggatccatgcaagagcctggcaggcactgggcaaaggtggctgaaacacatcttagtgtaagagacacgtctgagcttggaaagcccactggagtcctttgggcagcctaccctggctggccctaaacaaggcctaaattccagctgctggcactgccctttgtgtcccctaccctgatcccaacatacacacacaccatgctctggctctctggtttgtgttctctgcaggcaaaagaccacagatggcagcactaggccatgcccagctgccctgcctagaagggccttctgcatgcccccttctgggtcaggattcatcaataggacccattcttcattcccatggtttctcagagccagctgtggttaccaaggcaactcaagccaagggggcagagctgctagagctaaggccttgggagatacagattacatttcaccattagacattcattcctttggaccattataatatagtacatagttatcacttctgtgtcatcccatgaccattacagccattattattattattattattttgagatgaaatctcgctctgtagcccaggctggagtgcagtggtgtgatctcagttcaccgcaacctccgcctcccaggttcaagcaattatcctgcctcagcctccagagtagctgggattacaggcatgcgccactgcacctggctaattttctgtagtagagacaggggtttcaccatgttggccaggctggtcttgaactcctgacctcaggtaatccgcccgcctcagcctcccaaagtgctaggactacaggcgtgagccacctcacccggcccattacagccattattattattattattattattattattactatttttgaaatggagtcttgctctgttgcctaggctgaagtgctgaagtgcagtggcgtgatctcggctcactgcaagctccacctcctgggttcatgccattctcctgcctcagcctcccaagtagctgggactacaggcgtgagccaccacgcctggcccattatagccattattaatcgatcacagtgttttccccactgactgtggatttggttcatcattctgttaagatatgatggtagcctctaccaattaaactagagttggcagaggagatgaaaaacattttctatctttgctttggactatggtgttgttccttaagagacgaagtcacagaatattagagattatctaacattacctcctcattttacagactgcaaaataaaggctcaggtgagtttcttgccccaggtttcactggaaatgcaaacaaactaagaaacaaatacaaactaggtcggcgtggtggctcacgcctgtaatcccagcactttgggaggcagagggaggtggatcacgaggtcaggagttcaagaccaccctggtcaagagggtgaaactccgtctctactaaaaatacaaaaaaaattagctgggtgtggtggcaggtgcctgtagtcccggctactcaggaggctgaggcagagaactgcttgaacccgggaggcagaggttgcagtgagccgagatcacgccactgcactctagcctgggtgacagagtgagactccgtctcaaaaaaaaaaaaaaaaagaaaaagaaaaaaaaaatacaacctaaaacttgtatagagctttacagtttgtaagggagtttgacacccaccatttcagacacacagcatcttaatggggcagtcatcatttttgttcccatctggctgatgagtcagcgaggcacagaacagtgaagatcattgcctgagctcacacagccaaaatgtggacctgggaactaaaccgttaagactctaactcccttgttcatttccaggcaatggacccagaccctgaaggtccatggtgttactagcaggacactgtgaagccacactcatcatgagcactactgacgagtataaaaatgtttcacaaattagtctgaccacattccaaatatgtgcaactctatgatcaataagacacagaaccctttaaaagcattcttgaattcatttgttctttcccatatttttcaatcaatcaatactaacagtatacgtgatgtgggaagatcaatgaaactccaacgctaaaaaggagttttcctgtgggatggctgaatcctggctctttggtctctgacgccagtgtccacaaagatgattaaattatatgtactacatattaaacatgatgctaaaaatacaacgtttggcagggtgcggtggctcacgcctgtaatcccagcactttgggaggctgaggtgggaggatcacgaggtcaggagtttgagaccatcctttagttgagatagggtgaaaccctatctctactaaaaatacaaaaattagccgggtgtggtggctaatttttgtagtcccagctacttgggaggctgaggcgaatcacttgaatccaggaggtgggggttgtagtgagccgagatcacaccactgcactccagcctgggtgacagagtgagactccatctcaaaaaaaaaaaaaaaaaaaaagtacaatacctgaatgagcaaaccaagttacacttaaaatatttaacaaaatgataaagtacaaaaaaaaaaacaaaaaaaacccagggcttctcacttctagatccaattaccaatttacagaaaatgcaggtcaggtgttgtggctcctgcctgtaatcccagcactttgggaggcccaagtgggtggattgcttgagcccagaagtttgagaccagcctgggcaacatggcgaaaccctgtctctacaaaaaatacaaaacaattttccaggcatggtggcacacacctgtagtcccagccacttgggaagctaaggtagggtatcacttgagcccaggagtccaaggctgcagtgagctctgattgcaccactgcactccagcctgagcaacagagcgagaccctatctcaaaaataataataacaataataataaataaaataaactcaaacccaggcagttgggctccagagtccatgcttttaaccaaacctctaggttttattctataagtgatggggtgctcctgaagggttctgaacagggcagttacttggtaattctcaacatagaaagtttaactccagggctgggctgcagatccatgttcaagcgggacaaagagggttcagccttgtcccccaggcatgacagggtgataggaacacagccaggccctggcccggagcagatcacccaacaggaaggactcccattccaagctcccagcttgagtctattattagcatgaattcaactacctatcgccccactaactgactgctcactttggggcaggcattttatgtttgttacctggcctattcctcccaacaactctgtgaggtagttattatcctccccatcttacagatgaagaaactgaggctggggtaggttaggcagtttgctcaaggtcatgtaggaagttctaagaaacgcagagacctctgcctccagagccctttcttgctatcacactaaagcaaactacgagctaaatcttctctctctgagccccagttatctctgtaaggattgctgtgaaaagaaattgaggtaatgttttttctaatggtggaagccaggcatcttcagaggtgctgcagaaacattctgagagaatggccttctactgcatatagaacaaggccatgagaccaagagccctgaactggaaagtgctgaattttagggctgtctctgccattaagccctcagtgtgcctctgagcgagttccttcctccttctatgcctcagtttcctcatctgtccaattttgagctaacagacacgagctctaaatccccttccaggccaaagcgctaggacacagttgaggttagtcataccctacaaggctgctccaacctcagccaccagcaagagtgagccaaagactccaaatggttttcctctggatcagcccccacccccagcacctgagagtccaggctggggcagaagggggtgccagaggagggcagtgctcttcccagctacccctctgcctcatccataccaaggtggcccttggccctgcttgccaccccacagcccctacggtggctacactgcaaggcctgggagccaggacccagggccagccccagccctgcccctgtctcgcggtgtgacctggccagtctccttcccaccctgagcctctgactcctcttctggaatgaagggtttgggtggtgacagggaaggctcctgtatgctctgacatttattatttcaggatcccctggcctcttgctgttttccttcctgcactgctggggcctgtgactggccgtgcgccccttggtcaggcctctgcagacgtcttcccagcctgggcacttgtccagcctcaccagctcagccttaccggctgtcccttgtggggtggtgggaagcagggaggaagaggggttgcaagaagggagccacaccctcgatgtatgctgaggcctctgcaaaccccaagtttcctggctgggattttcctcaggagattgcttggcggtgatgagctaagagaacaagaactttgctggactaaccgcggaaggttcctcctacccgacccctggcctcaagccctgaattccacccaatcctggggaagaacctggcctgccctcttggacagagcagcaaacagtacttcccaccttctgggttcccttgttggccaggatgaatccctccctgccccccacttgggcttgctatccatcactggtcccttaaaaccatccctattgaactcttggcaatttcctaaatatgccaaactgtttccagccatcagacctttgctcatgctgctccctctgcctggagggcccttgccccattctgtctagtaaacacttcatctttcccgactcaacttacaggtcaccccctccccaccacaacagaactgatcctgcctacctttattccatcctatgcccactacaggctttcattagagtatcctggcccttatttgccatacatgtctgatctctacggggctgaaaactccagaaaggcagggaatggctcatttacctttgtatctgcagcactcaacacaaaactcaggatgtgggtgttaataagcatgtgtggaatgaatgaatgattaaatgtatgaatacatactagcaaggcccagtggcaatatagaaaagacagcaagggttaaggactccggctttcaagtcatactgtcctaaagtccaaattctggttccagtcctcttagctgtgtgacctgaggcaagtgacacagcttctctgatagatgttccccatctgtcaaatggcataataacagcatctatctaatcagactgaactcagtcaggcatttaagcacgtggcccagcataatacacacagaaagggcttcatggtagctattcctgcccagcagacaccttctctgtatccaaataactggacaggccctgtgttatgatgtgctaatatctgaaaagtgcttacaacactgcctggtgtgtttgtttttcctatttttattgctttttaacacaacccagacaacacggatgaaccttgaaaacactgtgcaactgaaagagatcagacaaaaaaggccacatatagtaggatttcattcacatgaactgtccagaataggtaaagccatagagatggaaagttgtcgggggccggggaaaaggagtggagagtaactactaatcaatacagggtttctttttgggatgatggaaatgttctggaattacatagtggtgatgactacacaacactgtgaatatacttaaggccactgaattgtacattttaaaatggtgagttttatgttatgtgaattttacctgaatgagaggaaatctacctaaaagcaacctaagggattgtagggtgcagccaggactgagaactgctaggtagcctctcagcaaatgttttgttttgttttcgtagagacagggtcttgctttgttgtttgagaccagggtggtctcaaactcctggcttcaagtgatcctcccaccttggcgtcccacagtgctgggattacgggtatgagccaccacactggcctcagcaaatgtttgacaaagaaatgaacaggaggcagagagcaaagggcagagctgagggaagaccctgccttgtccaaaatcaggcttagctgttcattccccaaaacctccaaggtacataaggtttctctttttgctctggtgccaggaccgcacagataatctcaacactcactcatggtaattacctcatccctattgcaattactttcctcttttctctgtatgtttcctgatctttttaactaccctatgtgcaggtgtacttgtgtttacagtaagagggaattttaaaaaattactaagtacctgttacgtgctaggttcatgcttgctagattttctatgtgttatcccctcaaacaaacccataagacaattatcttcatccctaattcacagatcagaaaactgagattcagaaaggttaagtcatttgcccaaagtcacacagccaataggaattcaaacccaagtctgtctgactttagttactggactctcgccacagacctcagccacatccctgtatgctacaggttgtcaatcaacttttcactggcagagtcctcccacccagaaggagaccttgtctagttctctccgtgccctcagagcctgcctttgtacaccacaggcattcagtaaatatggcttaatggattactaaccttcagtgggcatgcaatagcttaccacaatagttttcaccccaactgctcatcagttacctgggaacttctgaactgcacacttgcccaggcctcgcccctgggagattctgattcagtgggtctgggtgtagcccgcagcagctgagattcttaaaagctctttcaaggtctaaaaccagtcaagttagagaaccttcagcagctgttcccagctcagcctcccatgccctccaaagcacctcctgtgacgttggtgaggtggaatcagtttttccagggccctgacctagagtcacagaagccactcactgttcccctgtgggtctcactccctcatctgccctgggcccaagttctaggcccatcgaagggaccttctagcagcatcttgtctgagaatgatatgatcaaattgccttcagggaaagcatgttccttctgctctgacctaaagttacagtttctgcctccaaatctgcctgagtcatctgtctccttgtacctcagtggccagaaacagctgaacactaggcaaggaagtgagcacaaaaaaagacaaatttggggagagaaggagactttgagagacaggctcaaggttgacaactctgggaagaccctcggccccctgtgcagaggctgttggtagggaggaggctggttcagtggagttgggtccccagtccatcctagaaaaccctgctgatcccagggccctagccacaccctatgtctctgctccccttctagggagaacttctcatctgccccctcctcaaatcagtccaggatggtgtggaggcgaaaatggcattaaatctgctcttttttttttttttttttttttttgagatggagccttgctgtgtctgcagtggcacaatctcggctcactgaaacatccacctcccgggttcaagcaattctcctgcctcagcctcctgagtagctgggattacaggtgcctgccaccatggctggctaatttttgtatttttagtagagatggggttttgccatgttggccaggctggtctcgaactcctgacctcaggtgatccacccgccttagtcccccaaactgctgggattacaggcgtgagccataaatctgctcttaaggttcccaatgacctccgtgttgccaaagccagaggctgtgtctctgtcattgtcttattttacctctgggcatctgggcagcatctaacagagccgagcaccccttctcctcggaacacttctctcctggcttctgaggcacaacactgtcttatttccttccttccccactgacagcccgttcttggtctcctttattaattcctcttcctatcccaatctcttgataccgagggtccccagggcttgggtctgggccttcttcgttcctctctctaggtgatcttgtccattccacagctttatttatttatttatttttatttttttgagacatagtcttgccctttcacccaggctggagtgcagtggcgcaatctcggctcactgcaacctccacctcccgggttcaagcgattctcctgcctcagcctccgaatagctgggactacaggtgcgtgccaccacgcccggctaattttttgcatttttagtgagacggggtttcgccatgttggccaggctggtctcaaactcctgacctcaagtggtccccctgcctcagcctcccaaagtgctgggattacgggtgtgggccaccgcgcccagcccccacagctttaagtaccagttcaagcaatggatgcaaatgtggttcaggcagcacctgcatgggaatttccagggtgctggtttaaatgcagattcccagacaatcccacaagctggcaaacttgctgtcaagtacatctgtcattgtgtgccagtctggcatctgacctccttcctatgtctggggacttcctcactgcacaggtcttggcagagttcacctcctgtgaaagctgaaaacaacaaattcttgcttttccagcctcccttacacctaagctcaaccaatcagaagccctcactacagactttgaatcaggagcacagtggaagatccattccaatgctggtggcaaccacagcaatggtgtctagtgttcagggaacagtgacacagcgatggcatttagtgtgtggcagcagtgtcctgccaaactggctcggtggcatgattttggctgagatcctgcctgctgcccagccccagttttccaacttcccagaaattctgtgaactactgaacattccctttcagtgcagcccttttctgcttaaatcagctcaggatggtttctcttgcttgccataaaaagcctaagataccaccactgaatcatactctctgggaatgacgccaagtgattctgacacagatgcaggtttgaaacccacggtctcgatgctaacagctctcaaatgtgtatctccagcccgctcctttgaattccaaactcacatactgccttcttgacatctccacttggatgtctcaagacctataaagatatacagatagaattcttggccaggcacaagtggctcatgcttgtaaccctaacattttgggaggccaaggcaagaggatcacttaagcccaagagtttgaaaccagcctaggcaacacagcgagacctcatctttaccaagagaagaaacaaattagcatggatgtggtggcatgtgcctgtggaagcacgaggattgcttaagcccaggaattcaaggctgtggtgagctatgactgcaccactgcattccagcctgggcaaaagaaggagaccctgtctctaaaaaacaaaaaattaaaaaaaaaaatagaattcttgatttctccccaaacctgttcccctgccagatttccccttctcggtatatggcacccttccatcagaaatttaaggccgggcacagtggctcacacttgtaatctcagcactttgggaggctgaggcgggcagatcatttgaggtcaggagtttgagaacagcctggccaacatggtgaaacctcatgtctattaaaaatacaaaaattagctgggtgtggtagcgggcgcctgtagccccaggtacttgggaggctgaggcaggagaatcgcttgaacccgggaggtggaggttgcagtaagccgagatggtgccactgaactccagcctgggcaatacagtgagactccatcccaatcaaacaaaaaaaaaaaagaaaaaaagaaatgtgggacacaatcttgagcactgcccacatgtactccatcgacaaatcttgactgcttataaaacacttctacaatctgtgcacttctctcctcctccaccaaccacaacccgatccacaccaccatcatctcttccctaaataacagaatggcctccttgggtcctctcctggcccttccaatctagtttccatacagcaactgatatgatctttctaaaatacaaactggattatgctgcttgcctgtgtactaaataaaacttaaactcactaccagggccatcaaacttgaatatggccttgccaccaccacccaaactcagcaggtgccactcttccctttgcccatctcagtgcttttgccccttgggccccctttcagggtcacatatatttcagcttctttactgcctcaggacctttgcctaagaggtcccctccatctggagcacccccataccattattctctatgaatgctcctttttagtttttttttttctttcatttatttgttattcaaccaacattttctgaaaacacactatggttctatggtaaatactagggacacaacagtgagattagtttctattctcatagaagtcaaaatctattgacaaattagatcttaataaaataatattttgtcgggggacagagtcttgctctgtcgcccaggctggagtacaatggcgtgacctgggctcactgcaacctccacctcccgggttcaagcaattctcgtgcctcagcctcccaagtagctgggattacaggcacgtgccaccatacccagctaatttttgtatttttaggagagacagggtttcgccacgttggccaggctggtctcgaactcctgacctccagtgatccatctgccttggggaggctgaggcaggagaatcacttgaacccaggagacagaggttgcagtgagccgagatcacgccactgcactccagcctgagcaacagagtgagactccatctcaaaaaaaaaaaaaaaaaaaaaagaagatgttccttggtgatgaggggcacacgtggaggtgagaggtcgcaccactcattgtgaaaacagctctggaagggagcctgagggaagttaggagtgtggtcaagtatgcactgggacatgaggatctaggctacaggtacaaatgtgtgagtcacctggagatgggaggtaactaaggccacacgtgtggacaagattccctgaagagatgaggacccagaacaaacctcaaagaaggccttgacgaggaggatgagtcttcgtgccacttagtacaatgagcaacttctgacttatttgttctttctgtttgttttgttttgttttggagacagggtcttgctctatcacctaggctagcatgcagtggcaccatcggagttcactgcagcctcaatctcctgggctcaagtgatcctctcacctcggcctcccaaagtgctggcattcaggcataagccactgcacccggctgtgacttatttgtttacctgcttactgttgggctttgccagaagactgtaaggtccacagggcagggactgcatctctaactgagcgatgcatctgcccagtgcctcatacagggcctggcatggagcagtcccccaggcactatgctggcagggccaaccccatccattccttgagcaacatgattgggtccactggtccacaccgcccaacaaaaagtcagaatgctcaattggcattcaaaaccctccaagtcttgctgcacccccttagcattctaatctcatcttttaaatcttttaaactgctgggcacagtggctcacgcctgtaatcccagcactttgggaagccgaggtgggtggatcacctgaggtcaggagtttgagacaagcctggccaacatggcaaaaccccatctctactgaaaatacaaaaattagccaggcatggtggcgggcgcctgtaatcccagctactcgggaggctgaggcaggagaatcgcttgaacctgggaagtggaggttgcagtgagcccagatcgtgccgttgcactccagcctgggtgacaagagtgaaactctatcttaaaaaaaaactccagccaggtgcagtggctcatgcctgtaatgccagcactttgagaggacgaggcgggtggatcacgaggtcaggagaacaagaccatcctggctaacacggtgaaaccctgtctctactagaaatacaaaaaattatccgggcgtggtggtgggcacctgtagtcccagctactcgggaagttgaggcagaagaatggcgtgaacctgggaggtggaggtcacagtgagctgagatcgtgccactgcactccagcctgcatgacagagtgagactctgtctcaaaaaaaaaataaaaaataaaaaatgaaaaaactcctatacctgagttttctaaaggggttcttctatacctgagagtatgcataaatgatctaaaccagggaggtacagaacaggatggacacagcacctctccctggaacctggactgtgtgaaataaagaggaatcgccatagatacttctgaggggattttccaggccctgcccctcttctctgagaagcgccccctcccacaccataggtctcaatggccatgtttaccctgccggtcactttccctccatgacctctgctgatgaaaccaggggtggagacccagccactggacccaatccagaaactgggccgggctgtcaacctctgccaggaacttggaagtgggacatgagactggctcaatctagtgtccggttacctttagacactggcccagtgaggtcatgtgagcatgggggctgtgctttggggcctatgtgatgatgaatgagcgaaagcactgatcagatgtgcagagggaagcagaggcaggagagaacaagaatgacgaagcagctgccttagttcctgacaacttcccagcctccagttccaggccctggagaggtgtacttttacctccggctcttcagtctcatgaggcacctctaattctttaaagccaatttccctcaatattcttctctgacgatcaaaaaacaaacaaacaaatttccctccaacagaaacaagcttgacagggtttatgtttcttgcaaacaatctctaagattacacaatttttacactaaaatacattttacaaagcaaactgtaaaattcacaagaatattaaaaattaagaaggaaatcctttctaaaacaagattcaaaaaagcaaaagtcacaaaggaaaagaaaaatgtaactccaaaacaatttaaactgtgcattataagacctgataccaatttaggtaaacattcccccagccactcccattcccccactgataatatattttccatgaggagatacattgggaagcatgtacatttccatagcaattacctctggggagaatacagggattgagatagttgttcataggccttttctgttatgttttaaattacttattacaaattatgccctggccgagcatagtggctcacgcctgtaatcctaacatttttggaggctgaggtgggcagatcacttgagcccaggagttcaagaccagccgggcaacatagtgaaaccccaaccctacaaaaaatacaaaaattaagccggcgccagtaatcctagctactcaggaggctgaggtgggaaaatcacctgagcccaggaggttgaggctgtggtgagccatgattgtgccactgtactctagcctgggtgacagagtgagaccctgtctcaaaaaataaaataataataaattatgccacttgtccaattaaaactttcttttaaaatttcaaaaatatatacaaaacaagcctttgaagatctcctatttgtggcagactgcttcatctgagacctactggagggggtgtgtccactagcagtttgaggcacacaatatagtatgaattcttagctctggtcaaaatggcttacttggttcccaatatgctctcttcccaccagtctctgaattcactcccttgtcctctccgataaatggggttcatctatccttccacctggaagtgtcacctcctccaggaacttctccctcattgcaccagtccttactgctctctccctctcctgctccacttgcctcttatggcattgactgtacctttctctggggactcaggacaaactcctggggttcttactgatctccctgtaacaggctacttctccctagtcagtcagcaaatcaaagtagcatctttatgtccttagtgtcctttatgtccatagagatggcacagagagctggacagagcccaggcagagcacagcagagtcagagagacccactgtgtgacacagggcagctgcctccactgccctaggcccggtttcacctgttgttgtgaatatcaatgagatgatgggcataaaggggcccaagacaggaagaggctggttgacgtaatgactatcttaatatactccctcacatttgcatggtgcttcataattgaacacaaaaaactttaacaacccagtaaggtaagcagggagtgattaagagatccattttaaggataaaataacaaggttcagagaagttacgtagggaggacagacagatggactttaaaaggaaagagaacaggaccgggggtagaacacgtgggtagaaatgctaactttcccactatccagccgcaggagcttggccaagtctcttggcctctctggacatcagttactccatcttatctgagagagtttctagctggtctctatcttaaaagggtccctcagccctgacattctagtttcctgtgatctgcccagggtccttcccagcaggactgtacaaaagggctgcgagtcccaggacagggtccctagttactcccaggaaaccagtcagaactggaagacttgacttaagaatcagttgcattttgattcagtcaaatagagctacaagcctgggggtgggttagtcaagcccagaactgggggaaaaaattgcagcatcaaactatatgtaaacacaatataatcgcaaaatataaatgcaaatgcaaaaccaaacaggaaacctcagggaagtctaatccaaagttcagactctaactttttgggccctgagatgctgaagagaaaagctgtgtttgggtgccgcaagcctttctgttgtaacaatgaacctctacgtgcaccaaaccaaaaatctgaaggcaaaggaggatgggttttgtcttgcctgaactggggcaaagctgagccctgaacagagcctgctgtggcctccagacccattctaagggtccctcccccaacacacagtgcttacacttacacagccaggcaaggccagatgtatgggcataaatgggcatttctgtccatggataaggttcatattggagccccttctcctgctctaagattctaatgaacaacctggggaggaggatgaaccatgaaatccctaagaatgtggatggcactgagctattctgggtcatgaaatgtgaggctatgaagacaaatctcaggaagctctccaaaggatgggctggacagcagtgtttccctgtgagccccacagtaaaatataacccacatccacaggcagtggactctgcccaaggaaggaagccaaatctgaccggctgcttcttattttaataaaacatgtacccctactatgtgcaaagtagtaggctaggctccgtgagacaaatgagacaaggtgaggctctgtgagacaaatgaagacaaaagagacccaatcactgtctaaagagatctgccgattaatctgacgataatcattccatttatcaagaggcatgggccagtgcagcggctcacacctataatcctagtactttgagaggccaaggcggatagactgcctgagctcaggagttcaagaacagcctgaccaacatggtgaaaccctgtctctactaaaaatacaaatattagccgggtgtggtggagcatgcctgtaattccagctgcttgggaggctgaggaatgagaattgcttgaacccgggaggcagagattgcagtcagctgagatcgcaccactgtactccagcctgggagacagagcaagactctgtctccaaaaaaaagatgcatgctttatatgcattgtctcatgtgaggtacacattattacccccattccacagatgacaggacaggtcacatgcccacgttcacccaaatggcaaactgcagagccagcgtttgaaaaaaggtctgccttggccggcgcggtggctcacgcctgtaatcccagcactttgggaggccgagacgggcggatcatgaggtcaggagatcgagaccatcctggctaacacggtgaaaccccgtctctactaaaaatacaaaaaaaaaattagccaggcgtagtggcgggagcctgtagtcccagctactcgggaggctgaggcaggagaatggtgtgaacctgggaggcggagtttgcattgagccaagatcgcgtcactgcactccagcctgggcgacacagcgagactccgtctcaaaaaaaaaaaaggaaagaaaaaaggtctgccttccccaaagtcgatgctccttccacaatcctctatcacccttacaaagtgatacaaacagactccgagatggagggtcaccctgacaagagagaagaggacagatttcctgacactggcgcagggtgttatgaactactgagctttgtatctgccacgcagtgggtgcctagtacacttaaggtgaagggtggaaggctagagccgttgctgaggtccaaaatgccacccaaattgagggcatcctttggatggggagctgcaaaaacacattattctccgttggaccaaggccacggggtgtctgtcctagaatattctttgcagaggagctgcggaaagctgcagcaggttcagagaagaggaatggaaggaactccgaagagcatgggaatggggtggggcagcctgcaagaccgaaagaaaaggcctgggacgctttgctgggaaagacaaagaggagaggggaggggagaggagacgataaacttgccaacagcccggccaaggtgaaccccggctcctggcgccttcccatccgcattcattccacaaacgcgggccaaatctccgaaccagccgcaagcgggagggggcctctctgcagccggggggaagaaagttcaggactgaggcgggaagcctgcctctcagaaggggagtgactcggggggcacacttgtggggctccgaagatgaaaacgcaaactgaggctggaaggcgctaggcaaacacatatgtgatgaggcggtcacgcggggcacttggggtacgtcccccgacctgtggagtttgtcatcgaagagacctcgaggccccccaaaacggtccctcgggccttcccccgcctcgacggtgaggacgcagctgttggagatgcgctcggtcctcccagacctagggagggggcaggtttcggggcgcggtgaagggccatcgcagctcgggtgcgacacgcctgtggaggtcaaggccaggcccggcgccgacccccgacccctcccgcctcggccccctcacctcctcccgcgccagcgccgcccctcggtaccggggcatcttggcggcgaaggcggcggccccagccggggagctgaggtcctccgcggtgacggccaggaactcggcgacgctgaactgctccggcatggcgggcgcgagcgtggagctgccggagcggggcgcggggggcactgagctgctccgcgctgagccggcctcaccgccggccgggggcgccgtcccggcctccacacgccccgcccctccgcacgccccgcccccgaccctccagccgctctccgctcctcagctgggacggccccgcccccggctcctcgccttcctccaccgccaaggtccaggctccggccccggtcccggccccgcaccgcgtcaggccgcttccccggcccctcgccggccccctaggccacgcccccagcccctcaccgcctcagaccccgccccctggcgcgatgccccacccctggcctcagtagaaactcctccgccttcccccatccctgccccttcagggctctgtcccgtttcatcccgctctgggtcttccaaatcctcctcccttgcacggcccaggctgttccatctccgcgtcgagtcttagagccccctccctcttcctccctcctctgctgattcgttccgagttccccatgacctcgccccttctgccctaccacccccccgccacccttccctcctctctccccagtcccgcccaatctccttgcctcgctccgccccgaatcgccccacccctcctttgctgcgtacgcccagctctcagcctcagctttgcaggcatccggagactccctcctgataacccccgccgccccggggatgtgtggatcggggcccctggctagctgtgtgacttggggaaaattacttctcttctggaacctcagtttccttatctgtacaatgggaagcctgatgcccgcttgattgtgatgttgcgaagaaccgaacacgtgcgtgtactagttccctcttacccgaccatagatcgcacccacgcctttactcttcctgctcctgcctttcaccccttaatctggctcaccatcctttggggcggatgagggatggggttcaggatagaaatccacttaggtttagttctgaagcctgaggtcctctggggaaaagttctccaagtaaaaagctaggaaagcaccgcagcaaggaacattggttttggagtcagaggaacctagattccaatcttggttactttggataaattgcttgcttctctaagcctgcatttccccctcttaaaatggcctcatggtattttaccccacagggcggcgattgagagaatcttttcttttctcgcacagaaaagaaaagaaaagaaaaaatccggaaagatatgcactaaaatgttgcaccagcaacattttatgcactagctgaagacagatatgcactagctgaagacattatgagtaactttcttttcttttggtgaatctgtatatcctaacttttatacaatgaccatatactactgtgtaatagaattaaaagttgacgggagcgatggctcatgcctgtaatcttagcactttgggaagccgaggtgagcggattgttcaggagttcaaggccaacctgagcaacatggcgaaaccttgtctctacaaaatatacaaaaattagcccggcgtggtggctcttgcctgtagtcccagctacttggtgggctgaggcaggaaaatggcttaaacctgggaggtcaagtttgcagtgagctgagatcctgccattgcactccagcctgggtgacaaagtgagaccctgtctcaaaaaaaaaaaaaaagaaaaagaaaaagaaaagaaagaaaaaagaattaaaagttgaaaaaaatgtgtaccatctgatagagacgacaactattccaagagttctttcaaggtcaacttctcctgttgaaaccaaataggcacttttcttgttatttatttttagagacaaggtctcactctgtcgcccaggctgaagtgcagtgcaatgatcatagctcaaggcagcctcaaactcctgagcttaggcacttttcttgcttgacttttaggagcatctgacaatgttaaccactcccttctccttgaaacacccttgcccctgaatcctaggagaactattttctttggtggccctctccctctggctgttccaagagccctttctgagatgcacttcctccgcagggatcttaaatgctggagttgttgggagctctctgctaaatcctctgcatgtctcactctatcagccttcctggatttcttcatccaatcccaacggtaatgttgatgtcttctgtactagtttcctgttgctactataacaaatcaccaataacttccctcagcctcccgagtagctgggattacaggcacgtgccaccacacccagctaatttttgtattttttagtagagacggggtttcgccgtgttggccaggctggtcttgaacttctgacctcaggtgatccgcccacctcggcctcccagagtgctgggattacaggcatgagccactgcgcctggccacatttattcttttacatgtctggaggtcacaagtctgcaataactttcactgggctaaaatcaaggtatcagtggggctgtacttcctctggatgctataagggagcatctgttttcttgcttttgcagcttcgagagctgtagtttttgcattctttggcttatggcaccttccaccttcaagggcagcagcatcttcaagcatcttacttgccttcttccctgtgatcaaatttctcccagcctccccacccctcttctttttgttttttttttgttttttttgagacggagtttcactcttgttgcccaggctgaagtgcaatggtgcgatctcagctcaccacaacctccgcctcccgggttccagcgattctcctgcctcagcctccagagtagctgggattacaggcatgcgccactatgcccggctaattttgtatgtttagtagagatggggtttctcaatgttggtcctcgaactcctgaccttaggagatccacccgcgtcggcctccgaaagttctgggattacaggcatgagccacggcgcccggccccctctttttttttttttttttttttttttttgaggcagggtctcattctgtcactccaagcagtggagtgatcacagctccctgaagtctcaacctcctgggcttttgcgatcctcccacctcagcctcccaagtagctgggactgcaggtgcatgacaccacgcccagctagttcaacctctctcttttttttttttttttttttgagacgtgatgcctctctgtcgcccaggctggagtgcagtggtgtgatctcagctcactgcaacctctgcttcacaggttcaagggatttttgtgcctcagcctcctgagtagctagaattacaggcccatgccaccacacccagctaattttttatttttattttttatttacttatatttttattttttgtatttttagtacagacagggtttcatcatgttggccagactggtctccaactcctgacctcaagtggtccacccacctggacctctcaaagtgctcagcctccctcttataaggacatttgtgattacatttagggcctatccagataatccaggataatctccccatctcaaaatccttaatttaatcacacctgcaaaatctcttttgctatataagtgccatttacaggttccatggattaggacctggatatctttgggagccattactgagccaatcacatcttccaaggctgtatttccagcctggactcttctctagttcaagatctatgtatccagccacctatgagacagtttcatttcactggctcacagacagacaccttaaactctacaggtccaaaactgaactcaccatctcgtacgcccactccttgcaccagattgttttctgtccctgtcttgatggaaggcattaccatgcaccccctcggagtcatcctctcctcccttcttctaccaacctcccctcaaacaagtcttgtcactagtctcaccagtgagaccaccttctccatctgcaggccaaccccagtccagaccactgccacctctcacttcctcgctggtctccctgcccctaatcttgcatatctgttctgttgctcctctacttagaactcttcagtgccccccgcattgctctctgaataaaagccaaacttgttttcatggatgtctagccctgcatggtcttgctgctcctgccattcacaggctgatctcttgcctctctgtccccactgtgattgagccccttcactgttctcccctccgtctgtaatgctctcccacgtcctttcagcaggccaacttagatgtcaattcctccaagaacccttccttgatgtacttactctggactcctacgggatccagtatctcccaccacagcaattaccactgtggactgtaataatcagttttctggtctggggctctggcccacctatttatttatttatttatttactacgtactagtcacagggccaagggctatacaagcaatagctcactcaatacccactcaatactcacagcaaccctatgaggtaggtgacgttatgcttcccatctcactgaaattaaagcttagagagattaatttgtataaagtcagaatgaacaagtaatataaccaggattccaacccaggtctgcaagactttaaagccttctttgttttgttttattgttattattttgagacagggtctcactttgtcacccgggctggagtgcagtggcatgatcatggctcactatagtctaaacctcctgggctcaagggatcctcccatctcatcctcccaagtacctgggaccacagatgtgtgccaccacactgggctaacttttaatttttatttatttatttatttatttttgagatggagtcttgctctgtcacccaggctggagtgcagtggctcaatctcggctcactgcaagctccgcctcccgggttcacagcattctcctgcctcagcctcccaagttgctgggactacaggtgcccaccaccatgcccagctaattttttgtatttttagtagagatggggtttcaccctgttagccaggatggtctcgatctccctcccgatctcgtgatccgcccgccttggcctcccaaagtgctgggattacaggcgtgagccaccgcgcctgccacttttaatttttatatggaggtcggggggcaggggtctcactttgcccaggctggtctcgaactcttgagctcaagtgatcctccctcctcagcctcccaaagtgctggaattataggtctaagccactgagcctggccattctctctctctctctttttaagtaaaataactttttgtttttacttaaatatgtgaacaattcaattacagtgaaattttttctgaacctccaggtttagggtaatctttaagtaatctataggtatttgatattatgtcatgcccgactatgtttatattggatcaaaatagagaaggagagaaaactgtaaggattccaagtgtttgatatacctaatgcaaatactgtactttcagtgccataatttttaaaatagaacctctcaagatagcttatcctcatttctgcatacaatcaataaatagagactcaggagcaactgcttgaacagtcctctgctggtaccgttaccggaaaggggtccagaccccaagagagggttcttggatctcacacaaagtccataaagcgaaagcaagtttattaggaaagtgaaggaatacagaatggataacctacaggcaaagctgcccccaggggctgctggttgcgcatttttatggtcatttattgattatatgctaaacaaggggtggattattcatgagttttcccggaaaggggtgctcagaactgagggttcctcccctttttagaccctatagggtgacttcctgacgttgccatggcatttgtaagctgtcggggcactggtgggagtgtctcttagcatgctactgtattataattagcatataatgagcagtgaggatgaccagaggtcactttgcagcaatcttggttttggtggattttggctggcttctttaccacagcctgttttatcagcaacgtctttgtgacctgtatctcatcctgtgacttagaatgtcctgctttctgggagtgcaggccagtaggtctcagccttattttacccagaccctattcaagatggagtcactctagtttaaacacctctgatggtattattagattcttgtgcttgattttggttcactggcaaactgccatgtgccaagaggagagtcctctggggtgaagcagttgggagggtaagaaatgagctcagagaggtcctgggatgcttgctctctggagcaagtttttttccagataaaatcaaaccatcaaggggttgggcacaatgggcaacatagtgagacttcacttctacaaaaaatttaaaaattagtcaggtgtgatggcacgtgtctgtagtcctgctacgttctgctacttgggaggctgaggtgggaggattgcttgagcccaggagtgtgaggctatacacagctttgatcacgccactggttagagacagggtctcgctctgtcacccaggctggagcacagtggcatgatcatggctctgtaaccttgaccaatcctcctgcctcaacctccagattcattgcgactacaggtgcatgccaccatgcctggccttgctatattctcttaaactctgcctgatcagaattttgctcccaccagccactgaactgctctcatcaaggccaccatgacccccccacctgctgaacccagaggtcagtgctcagtcctcatcctgcagcccctccagcagctgcctaatgtctcccccatttctttacttggcctcaagacaccacactgctttgattttcttcctctcgtactggtggctccttcttgaactccttggtttgttcctcctcttctttctgatttctcagcactgaggactcctctccactctccatgctcactcccttgggattccacccagtcccatggctttaaatatcatctagatcctggtgattcccaacttgtaactccagcctggaccctctcccttgacctgcagattactatatccaactgcctccagacacgtctgcctggaagtctaaggggccatcttgaacttaacctatgcaaagctgaattcctggcttccctacccaaagtacctatgcatacacacatgcacacacgcacgcacatgcacatgcacacacctcttcctcatctaaactggtggcaacttccattttcttcttcttcttttttttttttttttgagacagagtctcactgtgctgcccaggctggagtgcaatggcataatctcggctcactgcaacctccgcctcccgggttcaagcaattctcctgccttagcctcccgaatatctgggattacaggtgtgcgccaccatgcccggctaatttttgtattttttagtagagacagtgtttcaccatgttggtcatgctggtcttgaactcctgacctcgtgatccgccagcctcagcctcccaaagtgctgggattacaggtatgagccactgcgcccagcccacaacttccattttctagcgttcaggatgaacattcttgactcttctctttctctcacaccccacatcatgaaatccattggctctatccctaaaatatatctagaacgccactcctcatcactgcaccgctagtggcctggtccaagccattgtgatctcttgcccggatcactgcaggagccttcattgtgctctctgcttccaccctggctgctctacagcctattcttttttcttttttcttttttttttttttttttgagagagagggtctcgctctgttgcccaagttgtagtgcagtggcaaaatcttggctcactgcaacctcccaacttcaagcaattctcatgcctcatccttccaagtagctggaattacaggcatgtgccaccatgcccagctaatttttctatttttagtagagatggggcttcgccatgttggccaggctggtcttgaactcctgacctcaagtgatccacccatcttggcctttcagagtgctaggattacaggtgtgagccaccatgcccggcctacagcctattctcaactgagcagcaagtgactctgataccagatcatgtcattgcactctgcaaaaccctctaatgcctctcactcaagccaaaagccaagccttgcatggcctgaaggtcttacctaatctgccttcctctgacctcatcccttctcactctccctctcctcccctgctccagtcacattgacttccttagtgttccttgaatatacttggcacacttgtgccccaggacctttgcactggctgctcctcctgcctggcatggtcttcccacagatatccacatggccagtgttctcacttctttctgccaagtcttagcccaaatgctaccatctcagggaggcttatcctgaccacccaatttaaactgctattggccaggtgtggtagctcacgcttgtaatcccagaactttgggatactgaggtaggcaaatcacctgagcccaggagttcaagatcagcctgggcaacatggcaaaactccatctctacaaaaaatttgctgggtgtggtggcacacacctgtagtcccaactactcgggaggctgaggcaggaggatcacctgggccaagggaggttgaggctgcaatgaactgtgactgcaccactgcactccagcctgggcgacagaatgagatcctgtctcaaaaaacaaaaagactatgatgatgatgatgatgatgatgatgatgatgatgattatttgagacagagtctcaaattgtcacccaggctggagtgcagtggtgtgatcttggctcactgcaacctccacctcccaggctgaagcaattctcgtgcctcagcctcctgagtcgctgggattacaagcgcacaccaccatgctcggctaaatttttttgtatttttagtagggaccaggtttcaccatgttggtcaggctggtctcgaactcctagcctcagatgatccacctgcctcagcctcccaaaatgctaagattacaggcatgagccactgtgaccagtcaggatgatgattatgttaggtctacctagataatccaagataatcacccatttcagggtcagctgattagctatcttatcacctgtaatcttaattttcccttgccatgtaatatcacatattcacaggttcgggggattaggacattggatatcttttgggagtggggcattattctgcctactgtgatgggtaagtaagaaaacactgttggccaggtgcagtggctcatgcctgtaatcccagcactttgggaggctgaggcgggtggatcatgaggtcaggagttcaagaccagcctggccaagatggtgaagacccgtctctattaaaaatacaaaaaaattagccgagcgtgatggcagctcggctgagtagctgtaattccagctactcaggaggctgaggcagagaattgtttgaaccaaggaggcagaagttgcagtgagctgagatcgtgccactgcactccagcctggacgacagaacgagactccatctcaaaaaaacacaaaacccaaaaaaacgacaacaaaaaaaacactgttgttgggcaatgacatatagggactttgagctatgagtatacctgtgctcaaaaagctaccagggggccgggcgcagtggcttacacctgtaatcccagcactttgggaggccgaggcgggcagatcacgaggtcaggagatcaagaccatcctggctaacatggtgaaaccccatctctactaaaaataaaaaaaaaattagccgggcctgatggcgggagcctgtagtcccagctactcgggaggctgaggcaggagaatggcgtgaacccgggaggtggagcttgcagtgagccaagatcgcgccactgcactccagcctgggagacagagcgagactctgtctcaaaaaaaaaaaaaaaaaaaaaagctaccagggatcagggatccccactgcttccaggataagggcaagatctctcagcctagcaggcaaagcatgtcatgaattgacctatattcccattttatgaacaggtactttctggcttccttgcttccactctacctgaaagcccttttcttccatttatgatcttgaaagtccttccattgattatggtcaagttcaaatgttgcctcttccatgaaaccttttcagaacccccagaatgagtctccctccactgttgctactgtggaatttgtcttgatgggagtcatttgtgtatgtaccagttgggggtcgttcccatctaagcgtgggcacctggaccatggagtccacctcagcataggtcagcagttctcacacttgagtgtgcatctgaatcacctggaggacttattaaaatgcagactcctggggccaacatccagaatttcagattcagttgatgtgggatgggacctggtcatctgcatttcttttttttttttttaagacagagcctagctctgtcgcccaggctggggtgcaatggtgcgatctcggctcactgcaacctccacctcccgagttcaagtgattctctcctgtctcagcctcctgagtagctgggattacaggtgcccgccactgcacctggctaatttttggtatttttagtagagacagggtttcaccatgttggccaggcttgtctcgaattcctgacctcaggtgatccgcccatctcggcctcctgaattgctgggattacaggcgtgagccaccatgcctggccagtcatctgcatttctaacaactacccaggtaattctgatgctgctggtctggggagtacactttgagaaccacaggcacagaagctgagatgttgtcatcaggctagacctggcttcaaatctcagctctgcctcttactctgtgattctggatatgtccctatccctctccgagctgctttctcatctataaaaggattcatcttcccctccccactggggtgatgtgaagagtaacaggcttaggacaattccaattaggacaattgcaggttcttaataaaaggcctgaagctctacctctaaaattttcctccccctgtgttttggcttcctagtaggtgctcaataaaaacttgtgaattggttttaggggaaactactgccttggacacttggaaaaaaggtgctggcagccgggcgcggtggctcacgcctataatcccagcactttgggaggcagaggacagcggttcacttgaggtcaggagttcaagaccagcctggtgaaaccccatctctacttaaaaaaaaaaaaaaaattagctgggcttggtggcgtgtgcctatagtcctggctactcgagaggctgaggcatgagaatcgcttgaacccaggaggtggaggttgcagtgagccaagattgtgccactgcactccagtctgggcaacagagcaagactctgtctcaaaaaaaaagctggcaacatgagaagtggtgggtatgtctgggtcaaaggaatgaatgaacttcacactggtgagcattttcctgacaataacaatcacgtcagaagtgacagcagatcaactgtattgcaagttcatggttatttatccacaaaagcttccctagtacctccaaggaacctggtggctggtggccctgccagggttacagagctcaagggaaggtggtggtcctcaaagggctcagaccatgaggaagatttgtgtaagtagagaaataatgaggccaggctcatacctgtaatcccaaaactttgggaagctgaggcaggaggatggcttgagcccaggagtttgagagcagcctgggcaacttagcgagaccccatctcttaaaaaaaatacaaaaattagccaggcatggtggtgtgcatctatagtcccagctacttgagaggctgagataggaggatgacctggacccgggaagtcgatgctgcagtgagctgtgattgtgccactgcacttcagtctgggcaacagaggtagaccctatctcaaaaaaaagaaaaagaaaagaaaaaaaaaaggggccaggagcagtagctcacgcctgtaatcccagcactttgggaggctgaggcggacagatcacaaggtcaggagttcgagaccagcctggccaatatggtgaaaccctgtctctactaaaaatacaaaacttagctgggcgtgtggcgggcacctgtagtcccagctacttgggaggctgaggcaggagaatcgcttgaacccgggaggcagaggttgcagtgagcccaggtcgtgccattgcactccagcctgggcgacagaacgagtctccatctcaaaaaaaagaagaagaaaagaaagaaataacaggatcaggcttgtcccagggacctgaaagtacagcctagtagtggtggtgggataggggattgctggccttagggcacgcattgtctgggaagaggattccctgtggctgggacactgcctacaggcttccccaagggcctgtttccttagaataccaaatacacacacatgcaaatcgtgctttctttgctgctcctgaagccaggtgtcttctcacagtttatatttgagggaccactagtcaaactgtttgtgggcaaaagactgtgtctttgtttccccagaatctggcagtgtacacacacagaaaatcttaaaggtcagaatggagcccccataatgccagttaggaggctggaccacatggaagtcacaagcatggcccttggagcttagatggccacgttgcagtctggttgtatcaccaggaccgggactagggtgaggcaggtgaagtgcctctcttgctcacccttactagctgtgtgacctcacataagtaaattcacctctttgagcctcactggcaataataatgcctattctataaggtttttgaaaagattgcatagaataaaacctggtcactaaagagatctcaataaaaggtagcttttcccaatttctgcatttggcagagtggccagcagagggcagtggtccccatgctgggaaaataacctgcctgggcagaggcctagctagcgctgacggggcaaacagttcgagtggtcagggatccctttaattgagggactacacgctccaggaaggggtgtgtggccataactgggtcaacacaaccactagccaacagatacactgggcatcctgctggtcaccctttgctgtggtcacttgtttcaagcgattctcttgcctcagcctcctgagtagctgggactacaggcacacgccgccacgcctggctaattttttgtattttagtagagacggggtttcaccgtgttgcccaggctggtggtgaactcctgagctcaggcaatcctcccgcctcagcctcccaaagtgctgggattgtaggcgtgagccaccacacttggccctgttctacatattttaaccatggagccacctggccttttcccaaacagctccttctgcctgctgtgcagccttctccccttctttccttaggcaagcatctccttcaggccccatccccaaccctctctgagtccatctttccatagatgagcccatccgagctcccagagcattctattcttccttgatggtggcatttataacactttattaaacgacatatttataagacatgaagtttggctagaggttaagagtagggtttcctggggctgcatggcctgggctctatcacatgttgtgtgactttgtacacattgcccaacctctctgagtctcaatttcctcatttgtaaacatggggctaataacaatacctactttatagggttttgccagaaaccatttagccataacttttaatggcaaaaaccgcaattacttttgcaccaacctaataaatgattttgttgttgttgtttgtttgtttgtggttttttttttttggttgtttgagatggggtctcactctgttgcccaggctggagtacagtggcatgcttatgactcactgcaccctagaccttctgggctcaggtgatccttccagctcagcctctcaaagggctgggactacaggccaccaccatgcctggctaattttttgtattttttgtagagatggggtttcactatgttgtccaggctggtctcaaacacatgggcttaagtgatccatctgcctcccaaagtgctgggattacaggtgtgagctaccacgcttggccggaagctaaatgatgttatgcacacgaggccctaatttgttgaataaatgaatgagcaagtgagtgaatccactgggctgtgagctcctcaagaataaggattgttttctttcttttttacattttgcaatgtctgaatcccagtgtgggcattgcatgttatctggtgcggtggtcctcctgaccagtattctcaacatcaccttggagcttgttagagatgccctttttttttttttttttttttttttttttttttcagatggagtttcactcttgttgcccaggctggagtgcaatgacacaatctcagctcaccgcaaccgccgcctcccaggttcaagcaattctctggcctcagcctctcaagtagctgggattacaggcatacgccaccacacccggctaattttgtatttttagtagagacagggtttctccatgttggtcagactggtctcgaactccccacttcaggtgagctgcctgccttggcctcccaaagtgctgggattacaggcatgagccaccacgcccagcccagaaatgtccatttttaggtcccacctgtgacctactgaatcagaaattctagggatggagcccagcaagctgtactctaacaagccctctgattctgatgagcgctaaagtttgggatctacccagccagcacatagaggctcaaaggtgtttgtctaaatatatgttcaaatccataagctttatgtggtttgaattagaattggctgtaagctccataaaatgagggggcatggtttccctagcaccaggtagaggcaggcgcatagtagatgctcaaaaaaggtttgtgggccgggctcagtggctcatgcctgtaatccctcctgcttgggaggcagaggcaagcagatcacttgaggtcaggagtttgagaccaacctgtccaacatggcaaaaccccacctctactaaaaatacaaaaattagccgggtgtggtggtgggcgcctgtagtcccagctactcaggaggctgaggcacgagaatttcttgaaccctggaggtggaggttgcagtgagccaagatcgtgccactgcactctagcctgagcaacatagcaagactctgtctcaaaaaaaaaaaaaaaaaaaaaaggaaaagttttgtgaaacaaatgaacaaatgagtgaagagcccttttggttctttttatggttctcagtatcttagattttccaaagttcagtttcattacctgttctctcttccaggatctgtggaaggatctacaagcaaagtaaacagcttaatatacaaaacaaaaaagtattgtcacactgttgagcactttgaaactctcagttagaacccccgaaaggtctggttttctatccctgctgcaactcagagcttgaggcacctcaagaatcctgctgcggccgggcacagtggctcacacctgtaatcccagcactttgggaggccaaggcaggcggatcacaaggtcaggagttcgagaccatcctgactaacacggtgaaaccccgtctctactaaaaatacaaaaaattagccaggcgtggtggtgggcgcctgtagtcccagctactcgggaggctgaggcagtagctgaggctgaggcaggagaatggcgtgaacctgggaggcagagtttgcagtgagccgagattgtgccactgcactccagcctgggtgacagagtgagaccttgtctcaaaaaaaaaaaaaaaaaaaaagaatcctgctgcagacgcacacctgccaggccttggccacccagggaaagaggaagcaatttcttaaggcaggtaaacacccttgacaaggagggagcagtagttatgaccccaccttggaacagggtagatgcccaataaatgtctgataaataaatggcacttgttcaggacagcattgtagttaattgcataagttcgaaacagactggcaggggcttttttcttattccttgttttattgctttgtccgggatcactaatacgatgttgatttgtaggaatgatactggatgtccttctctcatttctaaagtttcaccattaagtttgatatttgctgtggaaagtaattcctgtgtattcttatttagctatcaggtttctaaaaaccgtgaatgagtgttgaatttttcaagtgtttttcctgtatctatggagatggtcacatgggtttttcctttaacttgttaatgtgaagggttgaactgattgctaaataagaatacccgggaaccatcaccatatcacttttagaatattttaatcacacccccataagactctgtgtccattagcagtcttctcccctccccaacaaccttaaataaccatgaatctctataaatttgcctattctggatattttatgtaagtgagatcatataggttgggcatggtggctcacacttataatctcagtactttgggaggccaagccaggaggatcacttgaacccaggagtttaagatcaacctggggaacatagtgagacttcgtctctataaaaaaaatcaaacaattagctgtaggttggttttttactttcttgatgatgtcctttgcaacaaagaagtttttaattttaggctgggtgtggtggctcacgcctgtaatcccagcactttgggaggctgaggcgggtggattatgaggtcaagagatcgagaccatcctggccaacatggtgaaactccaaatacaaaaagtagcctggcgtggtggcaagcgcctgtagtcccagctacttgggaggctgaggcagcagaaccacttgaacctgggaagtggaggttgcagtgagccgagattgtgccaccgcactccagcctggcagcagagagagactccatctcaaaaaaaaaaaaaaaaaaagcttttgattttaatgaagtccaatttatctattttcttccttttgttacttgtgcttctggtgtcatatttaagaaattattactttgagaggtgaggcaggaggatcacttgaggccaggagttcaagaccagcctgagcaacacaggaagaacctgtctctataagaaatttaaaaattaactaagcatggtggcaggcaagtgcctgtagtcccagctacacaggaggctgaggcaggaggattgcttgatcccaggaggtcgaggctgccgtgagttttgttcacaccactgcactccagcctgggcgacagatgagaccttgtctcaaaaaaaaaaaaaaaaaaaaagtaagaaattgttgcctaatataaggtcacaaagacttatgtctatgctttttcctaaaagttgtatagttttagctcatatatttagatctttgattcatttctgagtcaaattttgtatatgttgtgagttaggggtccaacttcattcctttttttttttttttttgagatggagtctcgctctgtcacccaggctggagtgcagtggcgccatctctgctcactgcaacctccacctcccgggttcaagcaattctcctgcctcagcctcccgagtagctgggattacaggcatgcaccaccatgcctggctgatttttgtatttttagtagagatggggtttcaccatgttggccaggcttgtcttgaactcctgacctcaggtctcctccttcttctttcttcttcttctctctctttctgaggcagggtgtcactctgtcactcaggctggagtgcagctccatcttagctcattgcaacctctgcttcctgggttcaagtgattctcctgcctcagcggccaaagtagctggaaccacaggcatgcaccaccatacccagctagttttgtttgttttttgtagagactaggtctcactatgttgcccaggctggtcttgaactcctgagctcaggtaatccacccgccttggcctctccaagtgctgggattacacgcgtgagccaccgcgcctggcctactttttgtctttgtaggtttttctattcttcatgtctcatgtacatggaatcatatgtgattttttgtgactcgcttctgtcatttagcaccatgtttttgaggatcatattgtagaatgtatcagtacctcattcctctatatagttgaatagtattccattgtatgaatctaatacattttgtctttctgttcaccagttgatggatatttaggtatttccagtttggggctattacgaataatgctgctagaaccatttgtgtccaagtcttgtctttgcatagacatatgttttcatttatcttgaagcagaaatgatcctactgcaagtagaataattctatacctaggagtaaaattactgggtcttatggtagttttatgtttatctttttgaggagctgccaaacttttccaaagtggctacaaattttacatccccaacaatgtatgaggaacttcaacaatgtattgggaacttctgagtgtttcctcatctataaagtgggaataagagtaactctgatttcctgaggttgttgtgagcattaaatgagattatggtgtatgaaggccaggaaaccttccaaaatgaccaaccccctcccaccaactcctgtaatgtataccagtcactacaattgttacattatttataattatatttttatgtgtttgtgttttgtgagcatcctgaaaatgggaactaggtcttattcatatttatcttctcagtgcccaacatgtaatattcagtaagctataacaatatccatgtacaaagtattaatgattacacgttaatgtcaagaaaactacaaaaagctctccctctccctctccctccccctccccctccccctccctctccccgtcccctctttccacggtctccctctgatgccgagccgaagctggactgtactgctgccatctcggctcactgcaacctccctgcctgattctcctgcctcagcctgcctagtgcctgcgattgcaggcgcgcgccgccacgcctgactggttttcgtatttttttggtggagacggggtttcgctgtgttggccgggctggtctccagctcctaacagcaagtgatccgccagccttggcctcctgaggtgccgggattgcagacggagtctccttcactcagtgctcaatggtgcccaggctggagcgcagtggcgtgatctcggctggctaaaacctccacctcccacccgcctgccttggcctcccaaagtgccgagattgcagcctctgcccggccgccaccccgtctgggaagtgaggagcgtctctgcctggccgcccatcgtctgggacgtgaggagcccctctgcctggctgcccagtctggaaagtgaggagcgtctctggccggccgccatcccatctaggaagtgaggagcgcctcttcccggccgccatcccatctaggaagtgaggagcgtctctgcccggccgcccatcgtctgagatgtggggagcgcctttgccccgccgccccgtctgggatgtgaggagcgcctctacccggccgcgaccccgtctgggaggtgaggagcgtctctgcccggccgccccgtctgagaagcgatgagaccctccgcccggcaaccgccccgtctgagaagtgaggagcctctccgcccggcagccgccccgtctgagaagtgaggagcctctccgcccggcagccgccccgtctgagaagtgaggagcccctccgcccggcagccgccccgtctgagaagtgaggagcctctccgcccggcagccgccccgtctgagaagtgaggagcccctctgcccggcagccaccccgtccgggagggaggtgggggggtcagccccccgcccgggagccgccccgtccgggaggtgaggggcacctctgcccagccgcccctactgggaagtgaggagctcctctgcccagccagcagccccgtcccggagggaggtgggggggtcagctccccgcccggccagccgcccctactgggaagtgaggagcccctctgcccggccaccacccggtctgggaggtgtacccaacagctcattgagaacgggccatgatgacaatggcggttttgtggaatagaaagaggggaaaggtggggaaaagattgagaaatcggatggttgccgtgtctgtgtagaaagaggtagacatgggagacttttcattttgttctgtactaagaaaaattcttctgccttgtgatcctgttgatctgtgaccttacccccaaccctgtgctctctgaaacatgtgctgcgtccactcagggttaaatggattaagggcggtgcaagatgtgctttgttaaacagatgcttgaaggcagcatgctctttaagagtcatcaccactccctaatctcaagtacccagggacacaaacacttcggaaggccgcaggtcctctgcctaggaaaaccagagacctttgttcacttgtttatctgctgaccttccctccactattgtcctatgaccctgccaaatacccctctgcgagaaacacccaagaatgatcaattaaaaaaaaaaaaaaagaaagaaaactacaaaaaaagattcttgaactgggccttcaagaataagtaggcacccactcagctcaaatggagcacagggcatcctaggtggaaggaacagcatgtggacaggcccagaagagggaagacgtgtcgatttcaggaaatgacaaggaagcccagtgtggcaatggtgctgggaaagggtggccagggaggccacaggtaaggtagaggaagccagttggaagttgtaaatagccatttataccatgcaaaagggttagaacttcatcccgagggcagagaggagccatggatgggcattaagcaggagagtaacgcgattagaactacattttagaaagatctttctggggatcgcttctcagccttttggctaagatcaagtgtagaaagatctctctggggcagcagaaggcatgcattctcaaacttcagctgcattagactcacctgggaggttcatggagcctcagaatactgagtcccgccccatgagtttcttattcagcaggtctgaggcaaggtctctttttttttttgagacggagtctcgctctgttgcccaggctggaatgcaatggcgccatctcggctcactgcaacctctgcctcctgggttaaagtgattctcctgactcagcctcctgagtagctggagttacaggcgcctgcaaccatgcccgctaatttattttatttttttagtagagacggggtttcactgtgttagccaggatgatctcaatctcctgaccttgcgatccgcccgccttggactctcgaagtgttgggattacaggcgtgagccactgcacctggcctttttttttgcagagtctcactatgtagcccaggctggagtgcagtggtgtgatctcactgcatcctctgcctcctgggttcaagcgattctcctgcctcagcctcttcagtagcttggattacaggcacccgccaccaagcccggctaatttttttatatttttagcagagatggggtttcaccatgctggccagactggtcttgaactcctaacttcaagtgatccaccgcacccagcgtgaggcatggtcttgaatatgcatgtctcacatttccaggtgatactgctgctgctggtctgaggactacagttggacccactgatgtagagggtgggagggagagtgtgggcagcaagacctttcaggaagctgtggaaatagatgggggagacagagtcagggctgatcacattttagatctgggtgctgcgaacttttcagtgccttaatggtgagattgcaggcatggtgataagagactgtatcttggagggaaatccactgggcaatcatgtgcccccagcattggccaggacagcccccaacacccagcctgcggggaccagatccacagttggtaatgagcttcagaaagcacgacaaagacaagatgcccagagctgcagtttaatgtttaatgcccaattatctcaatacaaggaggcttacatggtgctcataaagacacgaccaggcgaaaccaggccggcaggaaatgacccgcatgagtcccagcacggggaccatgttctctcggttccagctcaccctcgaaaagtgccacaggcaaggttcttcagctcacccaggagccagcaggctggccaggcgtgtggccaccatggtcactgaggatcctcgtgggagaatagggttctgggacctcaggatacaatcacaagaaccagaaagctgcttccaaacaaccccagaaggttttcacttcacatgcgctaagccacacaacacctggatgctggggcacccaaaccctttccctaaaactctgaacactgcagaatggaggttgagaacacttggggagggagaacaaagtcagaaccatcctaaagccagtttttcaagcttgaccacctccctcttcctccctgaaggcacaccagccgatcccattactgtggaaaagggacaccctctggtctattctaacacctttaatgggaaaggagttaggagcatgtccctggcttcaagaaatctctgaatctccaactctactggatgatttcctggagccccaagctttagaagtccctggggacacgagtgatttttttaggggggctgctggtggggctgggaagtttcctggcagaaattatttacctcagaaagacactggcttttctcttaccctcgttttaaagtctacctggtccctaaagaaaataccactcaggctgggcctggtggctcgtgcctgtcatctcaacactttgggaggccgaggtggtggatcacttgaggtcaggagttcaagaccagcctgactaacatggcaaaaccccgtctcgaccaaaaatacaaaattagccgggcgtggtggtgcatgtctatagtcccagctactctggaggctgaggcagaagaatcgcttgaacctgggaggcagaggttgcagtgagccgagatcaggccactgcactccagcctgggcaacagagcgagactccatctcaaaaaaaaaaaaaaagaagaaaaaaagaaaagaaaataccactcaaaatgtgtcctgaagcactctgtggaagtcgggaggcttcaagtgtcactggcaagacgggggcatgagcttgtgtcctgcactgaatctgaggcttagcctgggaggtctagccccttggccaggcaaggtgtgaaagggacagtagagggggacagaggcagctgctgagcacacggggcacaagcctgaaggcagctcccctgaccagccatatggagaggcctctagggcatgagcttacattccagacttcagtattaaactcattcccaatgggtcctgcaggccccttcttccttttctctgatgtaattcttggggaaagctccagagcccaaggaatgggagtcaaacacctctgacttcagagatggcacatggctaaatggcagcccagtggagacctcagagcagcccactcaccacaaacgagatcctacacagggtccctgagcatgctggactttaagacgggcgtctgataagacccttgtgagtatttgggtaggagaccaaaagcatttctgcaaagggtacacaattagccctgcttatagagtgggggcagctgtgacccgctgaccactcctgggagggggctaacttgggggcccaggaatttgagcaaatgatgaggcacaattgtccccagctgggcattagatcacattgggccccaccctgaaataatccctcgtctcaaacttcagacatcagtcagtcagctcaggagccatccaacaaaaccaacttcatattttaaaccagcttaatgctacaaacttttctaaaaagtgctgtccagctgagcctctgagaaaacctagctccctgaggggtggatggcaggcctctcagaccaacccctgagcctctctccagaagtcatagccttggttcagcccagagcacccacatcccagggtgggtgggggagaagagcagctgagctgaagggacaatgtgggatgatcaagcctctgggggaacaggctgaagccaaaagaccccctcaggaccccaggcctgcagaggtaacatgagttcctctccccattagctgtgaaggcctggtctgccatgaagacctctctctgtcaccccttcagtatacctgggaaaaaaggagtgaacaagtcaccaagccccagtcacctctgtccttggggtctgagtgagctctgaggggtggagtccttaatgaaccatccccttcaataacatggtgaaaaaattcctcccagggaagcagagaatgatgccagtgccacatggggggcagaggggatgcttttggcagttttttgttttaatctgacccttctttacagtggggctgcctctgcctaccaagtccttggtgcaaaatggctcctggaccagcgcaaggcagaaactctgaggaaaagtgcccgccacagccatgacagctgcccccatgctcctgtctgttttccacgggagcttgtctctgctggaccatttttacatctcaaggggagaggtaaggacttcctcaggaaaggggtctcctgagcaggtggctcctgtttccacaggagcctcagtgctacctgccctaggatggctccctgggaccatctctgggacagaggcgaccaggaagccaagaccggcagctcagctggagatgtgaggccaagaacaggggaagaggcaaaagggcccacagctgccgtttactagaaccatgaggcctaagtgcaattagcattctagcagactggacagcccctcagagtcccagcccccaccacagtggggaaaccaaggatgtagcctgggcccctcccttggaaacccagacctgccctggaacatggacagtgatgggcctgtctgcagaggtctcactaaaaactagaacaacctccctgctaaaactcagggaggacaaacaaacaactcaacctgaaataaatacaaaggcattatgtgcttcttggtacgtcgagggtcctaattacccctcaaaaggaggtagcagggcctttccctggacttggccacctcacctgcagccttcttgtgagaggtcagaagtcagaagactggatgggcctccctaggcccagcttccattaggaaggtgaggaccaccccttatccactcctcacccgtaccattcatatctccccacacagcttctgccggctggggcaggaaaggcgaggagaccccatgccctgagggcagcacctagtgtccaatgtccctgtgcaggcagaggggctgtcagcctgtctgtgaggaggtagagtcgggggcaggctgctgggggcaggcagggccactcaattaatcaacaggtccccaaggtcgtaggagtcgaagagatcgctgatgccctcacccgcctccaagccccacaggtagtcgtcctggtccaaggatggggagaagctgatcagaggggagctgcacgccagggtcggggacaggaactggtcctcagtctgctgcaggagtgggtgcggcagctccagcaggctgtcagtagcctccaaggggaccagggatggaggcggtggggcctgctggggggttggcgctggtgctggcactggagacaaacagacaaaggttacgcctggccctagcatccaactcctcagcacgcgaggacagacttccggttctctggatgactgcacccttcttctctctccttagcctgggtggactgtcgtgctctcaaaatccaccttccagagtctacacccaaccctacaacttttcatgtattttttatttttttgagaccgggtctcactctatcacccaggctagagtgcagtgttgtgatcttggttcactgcaacctctgcctcccaggttcaagcgattctcccacctgagcctcccgagtagctggactacaggcatgcaccaccacacccagctaatttgtgtatttttagtagagatggggtttcaccatgttggccaggctggtctcgaactcctgacctcaagtgatcggccttccaaagtgttgggattacaggcctgagccactgtgcccggccaaaaaggaaagaaattctgacacatgctacaacatagatgaaccctgaggacattaaactatgtgaaataagccaatcacaaaaaaacaaatactgtgtgattccacttacattagatacttagtcaaaatcgcagggacagagagtagaagggtggttgtcaggggctgggcagagaggggaatggggaataggtacagagtttcagttttacaaggtgaaaggagttatggagatgaatggtgatggttacacaacattatgaatgtattaattaccactgaactgtacatttaaaaatagttatgatggtaaatttttgttatgttgcctctactctccaccacacacaactatacctgacctcatcaccctctccaattactggcccatttttctgctcctttgcacagtaaactttctccagagtagcctcagcttgtctccacttccctattactattctctcttcaactcactccagtctggggtctctccccaccatgtccctgagccagtgacatccatgctgctaaacccaatggtcatttctctggcttcatcttatttgacctttcagtagccattctccagcactctatgctcatttctttctcgccgccttctttttttttttttgaaacagggtcttgcccaagctagagtacagagtgcagtagggtgaacacggctcactgcagcctcaaccttctgggctcaagcaatcctctcgcctcagcctcctgagtagctgggaccactggtgcgtgccaccatgcccatccaatttttaaacttttttgtagagacagggtctcactctgttgcccaggctggtctcgaactcccaggctcgagcaatcctcctgcctcagcctcccaaagtgctgggattacagacatgagccaccacacccaacctgctcatttccacttagatgttaagacggtgatttcccatacagggacatgcaatgaagcactggaaattgcctgccacatatatcctgatgctcagaatcccccacattgcagtcactccttaagccccagccaagtattattctgaagatacaactgcgctgggatgctaggctgcctgttgagactggtggtgcacccataggcatgtgatttcacattttatttatttatttaatttattttgagatggagtcttgctctggacttcacgttttagagcatccattttctcccctctgcatggggcagcatagcactacctacctcaaagggttgctcagaggaccgcatggtaagtgcatatgaagcactggtttggcctggtgcggtggctcatgcctataataccagcactttgggagggcgaggcaggcagatcacctgaggtcaggagttcgagaccagcctggccaacatggtgaaacaccgtctctactaaaaatacagaaattcgctgggtatggtggcaggcatctgtaatcccagttaatagggaggctgaggaaggagaatcattggaacccaggaggtggaggttgtagtgaggcaagatcacgccactgcactccagcctgggcaacaagagcgagactcgtgtctcaaaataaaaataaataaataaacaaacaaataaataaataagcactggtttgtcgggtctgcatgctgcccttgctcctgttaaaaattgctcccatttaccaaggctaatgggggaggtggtggcactgcccttgaggcgaggcgtggttcagcctccttgcacactcaaatggccctgagggagtccatgctgttacccctatttacagatgagaaaactagggcccaaagaagtccattaaatgtatattaattaaaaaaaaaaatctaaggtttgtttggcacgctgctgatgttacagtcagaggcctggcttgggagcggggagcatgtgggctcagactctagcgcctcctctcaccagccatggaaccccagaactctgtttcctcatgtggaaaaacagggatgagtattagaagcagtaactgataaaacacatgtgaaaatctctattataggtcagaccttgctgtctcctgctgttgatcacgtccagaaatagaatcgccttttgtaatatgtgtctctccaccacactctgaatggctcttactgcttttctgtctctaaaacagcaccaggcccagctcagtagatgctcttcacacaagcttttttttttttttgagacagagtcccactctgtcggtcaggctggagtgcagtggtgtaatctcagctcactgcaacgtctgctttcctggttcaagtgactattgtgcctcagcctcctgagtaactgggattataggcatgcaccaccacctccggctaatttttgtatttgtagtagagacggggtttcatcgtgttggccaggctggtctggaacttctggcctcaagtgatccacctccctcggcctctccaagtgctggattacaggtgtgtgccaccgcggctggccacataagttttttttttttttttttaaatcacatttatgccatgtcatcttctataacccattcaatattcatgaggaaatttcaagtgtccccatttgagagatgtgggaactggggctttggggggttaaagtgattcactcacagtcaccaagtcactaagaagtgagatacaggcttgaacacaggtctcccaatttcaaatcctgtgccatcagctacatttaggtgtatctcagaatgtcagagcctggagaaatgtcagagatgatgttgttgaaaccccttccattacagatgagggaaactgaggctgcagagaacacttcccctggtaatgcagaaccagggccaggacccaggtcccaagactgtagtggcttcctctcttacatggcttctggcactcagacctcaaaatgatactatttcagaacacagcacggaacatgtgtgtgtgtgtgtgtgtgtgtgtgtgtgtgtgtgtgtgtgtgtgtgtctgtgcaggagaatcccttgaacctgggaggcggaggttgcagtgagccaagaccaggaaaacttcctcctcctcccttcagcagggataatactatgaggccatgtgacaagggtcgtggggacagccatgacatgagagctggccccaccagactgctgtgtaagcctctgctcctctctgggcttcaggatcttgatttgtaaaactcaggtaaaaacttcacacccggctgggctcggtggctcacacctgtaatcccagcactttgggaagctgaggtgggtggatcacctgagatcaggagttcgagaccagcctggccaacatggtgaaaccctgtctctactgaaaatacaaaaattagccgggcatggtggcatgtacctgtactcctagctactcgggaggctgaggcaggagaattgcttgaacttgggaggcggaggttgcagtgagccaagattgtgccactgcactccagcctgggtgatagagtgagactctgtcttaaaaaaaaaaaaacaacttcacacccttgtttatgctttgggatctgccacctccacccaaggtctcagaggacaactgaagcgaaggtggttccagcttcggagggctatgcgcatgctgacacttgagtgaggaggcacagcaggaggaggatggaccagagggtggggcagaggtctgggatgggagataggcactggggaggtgtcccaagggacagatggctagcacagggagaagctctggtccctgatgaggcctgacagacacaggagagatcattagagaagagttgggaggctgggctctggtcccagctctgccatcaacttgctgtgtgaccttagggaagccacttgccctctctgggcctgtgttcattcatgtgttaaaagaagggttgagttagttggggacagcaaacttctataaagagctggagcctgtaatcccagcactttgggaagccaaggcaggtggatcacctgaggtcaagggttcaagaccaggctggccaacatggggaaaccctgtctctactaaaaatacaaaaaaaaaaaaaattagctgggtgtgatggcgggcacctgtaatcccagctacttgggaggctgaggcaggagaattgattgaacccaggaggcagaggttgctgtgagccaagatcataccattgcactccagcctggtgacggagcgagactgtctcaaaaaaaaaaaaaaaaaaaaaagctggagagtattttaggctttgtgggacacttgtggtctctgtcacatagttgccttctttttctttctcccacaactctttaaaaatgtaaaaccattcttagctcatgggtcattaaaagcaggtcagatttgacctgcaggcaatagtttattaacctctgagttagagaaatggacacaaccagtgtactgcagagcccttccagcaagcctcttccatcagcccagctctacctctaccttggtctaaacgctagggttctacttaagagaattctgctgctaagaagacaaaaagtggaacactggcctacatagccttgaagaatcctgccagtctagccggatgtgtgatccaggaaaaggcaaaaactgttctggagaggggcctttacaggcttccatttgtactccttctggactcccaccctccttgggaagctctcaggaactttgctccctggcaacttacctgtactaccttccatcaggggtagccagctcttaaccataccgtccacctcccagccagaagccccttcttcgatttgatctatgccttgtggagagagcactgggctgggagtatgtagaccaaggttcaagacacagctctgttgcctcccagctgggagaccttaggtaagacacatcacctctatgtcttattttttttttaatgggcaaattttattattttatttttattagagatggagtctcattatgttgcccaggctggtcttgaactcctgggctcaagtgatcctcccacctcagcttcccagagtgctgggattataggtggggaccacagcgcctggcctattttttaaaattttattcttatttttatttttgagacagggtctccctctgttgcccacgctggagtgcagtggcatgatcagagctcactgtagcctcaacctccatggctcaagtgttcctcccacctcagcttcccgagtagctggactacaggcgtgtgccaccacactcggctaatttgtaaatttttttatagagacagggtatccctatgttgcccgggctgctcttgaactcctggtctcaaatgattctcctgcctcagtctcccaaactgctgggattataggcgtgagctatataatctcacaacaacctatgagttagacagtattaattactgcgcccaactcacagatgagaaaaattgaggccaagagaggttaagtaacttgtctaaggtcacatagctggtaagtggatgggctgggattcaaatccaggccttcctctgccctggagcagcaccagccttcctagtgaggctttataaagcattaagtacaatgcacatgtgtggggtaggatgactacatccccagctgctggataaaacaggaggttttcaacaaacattgatatagaagagaaaactaaggccggtctctccccccacctcctgtccctctggacaagggacctacctgaggatgctgtgggctccatgatgctagggtcggtgctgctgctgggctgggcagagtcagggctggggcagagggtggaggtagaggggagaggctcctcggaaggactgtccggctcctgcacctcctctgggcacaggtagacttcgatgggcccttgggtgctcttgagatatatctgcaggttgtcctggaggaggaagagaagccaggtcattgctctgggcagctggacacttacacttagtgtgtatggacagacgcacgtggctgctgccatccatgggtgcaagctcaaaccctgggctggcactgagaccaactccatctggcctaactaaggtggacttccgctgtttctgctgtctggccctgaagcccacttcttttagggggaacaccttgattttcctgtgggaaatcactcttccccccactctcaggtcatctagttttggggcgggggggggggggcagcacccttccccaatgccagtgggtgagcttgtgacgcagccaggaaagttagtgtgacatgattggttcaggatggcccatggctcaggtggatccaaccagcactaggcccaggacttttgctggacttgtgggaaatggaagcccccttcccactggggttgctgagctggtatcataaaagctacctctaccaccacaaggagagagcccacctgggaatggagtcagcacagagaaaagcagagagatgaaaagcgtgagacagacctgaagtcatagtttgagcatctacatccaaccttgccagcaatctctgaatctcccccaggacttgtcatttggttcccaccacccctacccatacctcccgctgaagccagttggacttggctttctgttacctgtaaccaagagtcctagtatttggtcttcccaccctgtcccttccctaccacataaccgcaacttaagccacaactgatgacatgcatgccatccaggcacatgtccaggtctccatgcctgtactcacacagaactgcacctagcaaaaaccctattcattctttaagacctagtttaactgtccccacctgggatacctcctctaactaccctttctctatgcttgcaaagcacatcttcagtctataaatgacagcgtctttttcccactaagtcgtgaactcctccaagggtgggggcaggaccttaattgtctctgcagccccagttcttcctttaaataaattatttcttgagtccttataatatgccaggctctgggcaagggatacaaggtgagtagaacattctcttgtgaagcttacaccctaatagatgaagcagaatgcaatcgtgtaatcatgccaaatatacctcagcaaatggagattaaattaaaggcagcggaaaagcacaggtgtttatgaagtctggaggtaatcagagaaggcttccttgaggaagtgacatttgagttgagacctgtaggatgaatagcggtaaatcaggcagagagggaagaacatttcagctcgaggggaagagcatgtatgagggtcttgcacggctaggtgcggtggttcacgcctataatcccagcactttgggaggccaaggcgggcaaatcacttctatgccgaagttcaagaccagcctggacaacgtggcaaaacctcgtctctacaaaaaaaacaaaaaatgtgctaggcatggtggcatgcacctgtggtcccagctactcaggagggtgaggtgggaggatggcttgaacccgggaggcagaggttgcagtgagctgagatcatgccactgcactccagcctgggtgacagagcaagacgctgtcttaaaaaaaatcaaataggttgagtgtggtggctcatgcctgtaatcccagcactttgggaggccgaggcaggtggatcatgaggtcaggagttcaagaccagcctgaccaacatggtgaaaccccatctctactaaaaaaaaaatacaaaacttagccgggagtagtggcgggcatctgtaatctcagctacttgggaggctgaggcaggagaatcgcttcaacccaggaggcggagattgcagtcagccaagattgtgtcactgcactccagcctgggcaacagagtgagactctgtctcaaaaataaataaataaataaataaataaatcaaacaaaacagaagatctcatactaggaatgagcttagtgcaatggggaaactgcagacaggtcagtgtggccaaaacaaagacagatggggcagcggggaaaaggaggttggcaacgtcagctggggtctcagagcaccgaagcctcatagggagtgtcaggaattttggtctttaacctgggaaagcacggtcagcatgaaaggattttcatgagtattgacaccgtcatacgtgggcatgagtgtgcatgtgcgcaggaacccagggctggtgggatgcagaaagaaaccaggaacagagattttctcaggccactactcagtctccgttgccctttccagcttctgccatttctgcccaagcttgaaggccaccaatattgccatggacaccacaatgggcctgcaaagcatggggctaggcagtgccagggacagagtctgcagagccgcctggaacgctccctggcagggtctcaaccctgctctccaccaaatatttcccctctcacctcagtcctgtcgggcacttccagtctcgtctgcggaggggccttgacggcaatcactgtctgctccttaaagttgccaacagcacggatatcctggtaagtcacataggccagcgtagggcaggagagtcaagaaaagtgactgtctggtcaaaattcaaaccccaaacctgccagggagcaccttcacccacctctcctaagcctctgaacattactttctcactccttgtacaacttagaaataatacaatctgtaacctgttaatctcataagctaccttagatccctttggaaagcaaatgggaatataaatcataaaaaatgttgccttacattataaatcataaaaaatgttgccttatgtaaaggcttcatctctcaaactagatcattagctctgagaaggcaggaagatgtgttttatttctttatatttctcacaatgcctagcatccttccaaaaatacaaggtcagatccaaaaccaattagatatgaaatgattttggaaaatgtatgaaagagccttagcaaagtccatgctctttgacctcatcatttcaatcctagggatctgacctaggaaacaagtaaaaatatgggaaagcattctatgtataaagatattcggccgaacgcggcggctcatgcctgtaatcctagcactttgggaggctgaggcgggtggataacttgaggtcaggaattcaagaccagcctggccaacatggtgaaactccatctccactaaaaatacaaaaatcagctgggtgtgaaggccgggtgcggtatctcactcctgtaaccctagcacttacgaaggctgaggtgggtggatcacctgaggtcaggagttcgagaccagcctgaccaacatggtgaaaccccgtctctacataaaatacaaaaattagccgggtgtggtggcaggcgcctgtaatctcagctacttggaaggctgaggcaggagaatcgcttgaacccagggggcagaggttgcagtgagccaagatcatggcactgcactccagcctgggcagcaatagtaagactccatctcaaaaaaaaaaaaaaaaaattagccaggcatggtggcgggcacctgtaatcccagctacttaggaggctgaggcaggagagtcactagaacccaggaggtggaggttgcagcgagccgagattgtgccactgcactccatcctgggcaagagtgagactctgtctcaaaaaaaaaaaaaaaaaaaaaaaaaaaaaaaaaagctatgttcagcaggcacacaactacattacaactatattgaaataaaacacattctgtgtgcagttcaagaacaatggctatgttaaggtggcagctcatcattctttttctccgttttccagatttaaagaaatttacttggcttattttcaataatgaaaaaatacctttaataaacttgaggccaggcacagtgactcatgcctgtaatctcagcactttgggagactgaggcaggaggatcgactgaagccaagagttagagaccagcctgggcaacaaagcgagaccctgtctatacaaaaaataaagaattagccaggcatggtggcacatgactgtagttccagctattcaggaggctgcggtgggaggatcacttgaacccaggagggcgaggctatagcgagctatgatcatgccattgtactacagcctggatgacggaatgagtccttgtctctaaaaaaaataaataaataattttaaaaatagacttgagaagaaaagccacccaggaaggaagaaacagatgccagacccttagggtaagttactgaatcaactcaggatagatataaacatgcaacaggttcctgctccctgacaccttcccccaaccaaggaggatatctcttgttggccttgtcctcagtcaggtgcttgaagctcagagagcagctctggatgagctggtccaaggcctgctccgtgttcatcagctccttcagctcctgccccagctgttgctgcttcccaggtctggtggggtcttcaaacattcccctgcctctgggaacagagcagccccccagtgtcagtctgtgggtgaaactccagaacaaggtcattcaaaaaatagtctatgagggtgcttccctgggttgtggaaatcagtggtcatgcctgtctctcagggagctaccagggattggaaccagaggtttgggggttgggcttgggagaaaaaacaagtcaagacctgaaccccatttctgaggggctctcgactctgttcatccctatgccccagcctcctccaactggagtagcctcagtcctgactccctcccctgcctggtttctcttaggatttatgccaagggctataggtcagctctttaaaccctgtagaaatggagagaggaggctggagtactcctatctcagatctggaaggagtccgggatccccctacttagctcccaggggactgccctaagctagaagaagtggatattgggatctctgactcaagaggaagaatctgaggttccctttggcctttacacctcccagatgtcattctccactctgccccgcatcacgttctccgattacttcagcaggtacacggcgctcttcctcaccatacattggctctacccccagcaataagcctattggatgttgctcttggtccgcctcagcccttgtgcccattggatgttgctctcagccccgcccctgccactcacacccactggctattgcctctggctccgcccacagcacaagtacccattggagggtaccactggccgcccaggcactcacacccactggatgttgttcttggccttcttgcggatgagctggatgccttccagcacgttggtgatgtcatagatgcgccgcttctgcacgtccagcacctcagcggcccagttcaggtccaggaccccatcctctgactcgctcaggaggtaaatgaacttcttggtgagcagccccagcgaagtgtcataccgagtcttctccccgggggatttgggggctgaagaagaaagggacccagtcacagctcagggaggggagggcccgcccaggaccctcgtccattgacctaggctcattaagtaccacctttcaccacccactttccagtttacaaagcagtgtgagccagggcatccatcaccaccactgtccagacagggaacctgatacctaagagggaaggtgacttgcttaaggtctcacggccaatgggcagtgttggaagcctagtgtcctgactcctggttaaatgcacatttccaccacagcttagggctgccagaccaccacccacaactactgtcactgttctaagtgctttccatgtacgaacacatttaagccctacaacaccctgtaagggttgctgtacaatcatccccattttatagatgagaatactgaggcacagtttaagtaatttgctcagctcactcagctagaaagtggcaaagctggaattcaaatccaggcagtctgactccagagttttccttaaccattaccctatcctgccacttaaatgtccggagtttggaattagaatagggtagaaatgataagcctggatttaagagcatttttatagacacacacttgctttttcttcccatgtgaatcacaatgattatctgagaaaaatcggtcctgtaacatcaagtcggggaggttcatgagaaaggtccctttctcaatgaggttgatgttgcaagaccacatctcagctgcagcatcttaaaccacgaggggacttttgtaatcgagtgacttccaagtcatatagcaagttagtggccaatccagtaattctggaacctgaattttagagtcttaggttcctctggaggaggaccagttatcatgagcctcaggatccttcaagacagtgctctgggcagccttgaccaatcaaatgtagaggaaactttcttgccattcctgatctagctgtgtcttcttttacacaagacaactaaggttcacaacaactaaggttcacaggagtgacctgtcaggtcggagcagaatcctacctggacccccaaaactagtgttcctcccaaacacagttgctttaactcctgctctaaccaggatttttttttttttttggagatggagtctcactctctctcccaggctggagtggagtgcagtggtgcgatcttggctcactgcaacctgcctcccaggttcaagtgattctcctgccttggcctcctgagtagctgggattacaggcatgcgccaccacacccggctaatttttgtatttttagtatagacggggtttcaccacgttggccaggctggtctggaactcctgacctcaggttatctgcccaccttggcctcccaaagtgctgggattataggtgtgagccaccacgctcagcctatccaggatattgactgaaaatatcaagaggcagcaaccccctccaacttagctttaggaaggcaccacctgggcagcctctggatcttaaaaacctttggggtggcagagactggattaatctgtgcttcccttccctttgaatcacttattcagctccttgtctgcatgtgggagaaagaccctggttagcccctgctcttctgatttagaaaaatttaccttgacctaaacattaaaacgttttaaaaataataaattcccaaataaaacactggtcattgagtttagatcatgagagcagtacatggtatggtagaagtagtgcgagactggccaggcatggtggctcacgcctgtaatcccaccactttgggaggccgaggcgggtggatcatttgaggtcaggagtttaagaccagcctggccaacatggtgaaactgtgtctctactaaaaatacaaaaattaggcagggatggtggcatgtacctgtagtcccagctacctgggaggctgaggtgagagagttgcttgaaccccagaggtggaggttgcagggagccaagatggcaccactgcaatccacatttggtgacagagcgagacctgtctcacaacaacaacaacaacaacaacaacaacaacaaaaaaaaacacagaagtaatgcaagatttacatgtccaggctctagtcctgactccactctgagactatgggcaagtcactcaagctctctgagtctcaagttgcctgattagtaaagacagacaagcctacctacctggcaggatcaaataataaaatacgcaggaagcttttgtaaactggaaagtgatccaaatatgactaccagtgattgggcagggcactgccctctgcccctgccccaccccaccccagaggccccatcagcactgcttacttttggggctggggaggccatccactctgatgcacttccccttgggggttgggaactcagggacgacgggcctcccaatcccctccagatccagcttccttttggccttggagaaaagggggagagagaggcagagtttgagaatcattcctcctttagcctttccctgatgtggggccaaagcaatgaagccacttagcagccacctctgtgcctcagtttaccgccagtcctggtgaagcactgctgtacttgataggaaaacatcagtgacctgagaagtgagctttcaggggaaatcttgttttctgaagggcaaataaaactcccatcctctgaggcccaggcacttgagaccctaccaaagccagtctggccaagggctcagagctccttaaccacgggccctaagccggctcctatacctgctcctcaccccaccacacccagaggatgataccaggaggaagcagtgggtggggcctaaaccacatcagggtggggaaagggcccccctacagaagcagctggcccagctagactgagtgcccatcacagtcccacagctggtccttatcagggcggggctgggcatccgcccagacccaggggacttcctggctcagtgccacaacccagggaggtgcccacagtgggaagcagtgcaaacatccccacccccatgtttgggctccagcttgagggccccagggcctcctgaatagactgcatttgccattctttctttgccgagaggggcagacaatgaatccttcccgtgtcttaaggacaagcagctgaggccaccccccccctccagctccccctttctgttcccgccaagcttgggaaacacctgctggggaaatcaaaccacagacccatctgctcctctccaccctgttgccacccgggccccaattaggcccagagctgcactggcccggaaagggcctctctcctggttagggctgggcaggggcagggcaggggcagagctggggcactgggacactgggacataggtcagagacccatgcttgaatctccagctccttcgcaggctcacggtacaagttgggggaaatgttacacatctaaggagcctcagtttcttcctctgtaaatggggtaaaaatgcctacctcaaggggctattgtaaggattcaaggaaggcactacctgggcagcctctgcatcttaaaaaccctggaacaggctgaattaatccccgcgtggcttccctttgaagcacttatttagctccctgtctgcatgtgggagaaagaccctggttagctcctgctcctttaacttctgtaaagttctcagcctgtgtctcagcacacagtaggtgttcaggaaacacagagtcccttccctaaaatctaatctcgacctcttccttcatacatccttctgggggtcatcgagcccatttctttcctctttccaactctggatcccccagacacccctaccctggcttggacagagaggcctattttaacatttagtggtgaggtcatgctcagcagggctgagacttctaactgctgctgagcacagctgggctgacaggtgttggaggtggtgacagctcttcctgctgtcagttccccttcccccactcctgccccctccaggaagtcttcctgggctgatgtgaggagccctgctccttggtttgaggagcctggatataacactcttgctttccaccactaccgagacctggaaaccatccaaacactttactgctcattcttgaatgagtctcttgaatattccttttctaccttcctaactggtgaaatcctatattctagagatttagccccatgctgtcactagagaaagggccagtcactggctgagaccttccacatgccctgaaccacgccccaacattcatcacttcactgaatcttcccataccactaatccccattgtacagctgaagtaattgaggcttggggagctccgaggcctccatcaatcctgaccaaggctgcacatcctagtattcttcatatatcccccagcaggagcaccaagggcagggagaggaagggaagctcaggtggagttctacctgaggcagaggtggggcagcccagagcctccccagccacacctgtctcccccgccagaacaaaccagaaagaatcccaggaagaccttgaacagaatatctatgctgagcctgttacatgctcgtaacagtcctaccacatcagtattggcactggctctcggaagccaaaaaatggagacttacagagagtaagcacatgcccaaggtcacacaaaggccggagccagggtttgaacccaggcctgtctgactgcaaagccatgtaccaggctgcctcagctgcatcccacacacgctgccccaggatttgctagaatttgggccaaggcctgggctacgcccacctgcccccatcactgcatgtacttgcacacacacacacacacacacacacacacagccttctctcttttctcactctccttcacccttattctgcactcccagggtcccaatgcggcaagtgtccccctaaggatacctccctgacacctttggacagtgcccagaggaaagtcagcctatggcttgggctgaacctgcagaacacaggtggcagaggacaagcccaggaggatcagcatcaaggtgaggctgagcacaggtcttggagtcagactggcctggctttgcatctaggccttccccttcttagctgggaaatcagttgacgtcaagtcacctataaaatgggcatcattgtctccacctatgctgaggattcagtgagatagtgcagcaaagcgctttgcccatagggagtgcccccaccagggagctgctagcactgatgtatggggagcaccagtgggaaaaggggaaagttcaagggtgagctgaaaagagactgcgatgaggggaggagagcaaaggctatggccacagccagaggccagcttagccctatcctggacgctcttaggcagcccctttggctggatcttcaaggcctggtcaggacgcaagcccaccctgccaacccctatggagaagagtacagctccttcctcaggcagctgcagaagtgcagagggtcagagatcaccaggcacaacccccttacgggcaccacggtgaggaaactgggacttggggaagaggaattgacttgcccaaggtcacgcagagtggagcctggtctctcctaagccctaagtcagatggtgggggtaggagcaaatgtaaggggtcgaaccttgctttcagatcccagctctgccacttcgtagctgaacagcctgggattcactgtcttgcctctctgagcctacacctcctcacctgacctgccttgtagagttgtgtgttaaaatgtttattttctttcatgcctcacaagaggaaatctggaaaatgtagacaaattgaaagaaaaggaggaccgggcgtggtggctcacgcttgtaatcccagcactttgggaggccaaggcgggtggatcacctgaggtcaggagttcgaagctagcctggccaacatggtgaaaccccatctctactaaaaatacaaaaagtaatcccagctacttgggaggctgagacaggagaatcatttgaacctgggaggtggagtttgcagtgagcagagatggcgctattgcaagccagcctgggcagagcttcctgcaggcgtgaaagagaatgatgccatgcgcctggccagaggaggcatgcgataaaggggcattccctgagccttcctcagaggacttggaaagagctctggacagggagccaggagatctgggttgtggccttcattctgccattgaacttggttgccatccttggacagtgcctgaggtccctttaaacagaagctccacaacaaatcctgctcaccctgcactttgcagcccggccacaaagcaagcggccacacccagggttgggtttggaactgttccaggtcacgcccttgtaaaatgagtaagcagagggcaggcctgcccacggggctgggccccgggcatctggggattgacaggagcgggagctctgggcctggcagggctttagggtggtctgctgcaaggagactcccctgcttcttcacttgtgacccaggcaagtgacttcctttctttgctcagtttccttatctgcaaggtgcctcattctggacatcctgaccaagataatgaacgtgaagagtgccaagcagtgtctggcacacgagaggcactcagtaaaagagagaccttcttgctaagatcactgagcccttctgggagggaggtacagacagatgtacttgggctcctctgggagggttcaaagcagtgtaaaaccacagctgttactgaaacttccagtctgaaagcagctggccagaggagagtgggcctgccgcaaagctcccttccctggggggagctcagctcctaagttaggcagtattaaaaaaagtcaaggctacatagagaagagcctgctgcctgaccaggtgcattagagtagctagctcatgcctgtaatcccagcactttgggaggctgaggcaagaggattgcttgagcccaggagtttgagaccagcctggggaacatagggagacccctgtctctacaaaaaataaaaaataaaagacagaagagctgactgccttgtgagtcccatcactctaccccatccccatctctgaccttaggtcacatcccctctctgagcctcagtttccccctgtaacatggagctattaatgccatctatttcacgaactacaaagatgttttaggctataaaacactgaacacaagatacccaatcccagttatcctcggttgcttaacctgtaaaatggggataataccattcctgcccactgccctcctagttagaaatcatgtgcaggaagggtctccaggaaggttaacgttttgaacatgggcaaagcctgagtccactggcagggagtggtggctctgcctgcatccagagctggctgggcatccgtgcttgctgactagcacaggtctgaccagatgcctctggggcagtggggggtggtcttatccctgtacccgaacttattcaccaaactcacaactaagcaaacctacaacacccccttcctctccctggagcctgcttccaaaacccaggacctggagctgaatgtggctgagaagagctagccccacagccaccctgtgcacacacgcattgtgaaggagagaacactgaagcccagactgggtccaagacttgtccaaggacacacagagaattagtggcagagtcacaccagaaaccaggctcctcaaccaccaccacctccactcccccaggcttttcccactccaccccccaccctaaagttgttttgattcacacgggctccaggaattccactcccacaaaacacaccctgagcccaggtcagcaggcagcctggtgccactacactttgggccctctctggcaacgagcctgggagcttgaggagagagcagccaatctgaacagaacccaagggggctgcccacatttgtatctgctacatggctgtctgggagggaagactgggcctgggggaggacctagggcagatacttggggctatctcaggagctggctggacaatttggagtctgtccatggcagattggatgtgagagacccactagacctatccctctgtcttaccaaagtcccacagtgtccccaggccatactctttgcctggacaatagcaggcacccagtactggtttctggccaaacaatgaagtaatgaatgaatggcggcaacgctggctgcatggacttccccaaggtcacacagtgcactgggagtagtgagttgggtctccctccagactcgcaatccagtgctcattccactccactagaatggatgagattatttcatccaaagtctgaaaatgaaggggtcttctactcagatattgggggcactgggtcctggaaactgaaagctcatcttccctcttcccaaaactctacctgctccactcaaactggatctcaggcacccctccctcctttcccacacctggaaaagcatagggggaagcggtgggggcccccagcattaccggcagccggcctgccggcaggcatcgcacaacttggccctcgggtccgtggggagtggcgtcgaggcaggtgcctggcgccgctgcgggaggcgccgtctgcgggtacagcggtgtgtagtaggtagcagtagctgggcagagctgggggctgctgaggccggatggccacagctctgtggggctcatcgcgggcaccaccttcggggtctgcccagcggccgaagccaaggcccggggcccttgcagcatagcgagtaaggcgccccctacccaaaagggcttggcgcgcccgcggacacctgcgggttccggtgctgccgcctttcacacggcccgcggcatggcgcggaggccgggggaagccgccaatggacgcctgcggggcaaggccggaccctcccctcctggcccgcggccgagcagagagcagcgcttagagatcgccgcttggagatcgcccggcggctgcggtggtggcactgccaggggctgtctcgtcccgagggcaccgcgacccgggacgccccgcgctccccaaggcctcggcacctggggtccggccggctctggggaggggtccccggcgtgccctcaagctcggcggagacgcgatgcgctgggatggggaggggggtctcgactgcaccgacttccttgcggctcgctctctagtccttgagtctttctctgcctcttttttttcttcttttttttttttttttagcgccaaacgtcgtgccgcgaaattcggatctcccgcggaaaatgccgcgctccggttggctgctgcgacagtacaggctccacccccccccccccccccggaaagaacgcgtcctcgaggcggcgattgcaacactagcttcgctgcttaaaggggcagccacacctgctgttggtgccgccagccgccggccgcgctagttagcagccggcgagacggagacagagggtggttccgggattcacagtgcagaggcggccagagcagtgcacagcgccccgagaaatgggcccggattccctgggattgaagggaaacattttggcgcggggtcccagcctgagcccagacccagcagtgtattccccaggccacaggcccttttgttagtttgcattgttgcttagctagcacatgtgcattcatatcccctttcctgctaaaatgaaggccaggaacctgttccctttaatggcagaggggtgagggacggaggcaaactagtctacttctttgtagggaaaactaacatctattcagcgcctacaggatgccaggcaccatgctagatccttacaagcgttgttttagttaatttattccaacaatcctgggaagaggaatgatgatccccatgataaagactgacagtctgaaaggctgggtaacttgcccaaggtcatacagagagattccctgatttgagagctggcaacagaatctgggacaggtcccagctctggagcccttgtttttccagttaaggggttcttctactctcccaagctgcctgggggcacagcagggtcagagtcccactgcagagctttgtcttgttcacagttgtattattaggacccaatactcagtaaatgtttgaacatctctaggtttcttttaaacaatccttttgtcacaagagcctctctgcctcattcaaaaaccttcattgctgataatacattcctcatcactccggtttagagaggctcagagaagcaaacttgggtagtgagtggtaaaaagttgctagaagctgctgctagatttcaggtctgatttcttgcctggtgctgtgtgatttttatgcaagtctgagccttggcattcaaagccctccagagacagtccacagcttaattcctcattagatggttgaggccaaggtggcaataacccatgatgattaagagcccaggctttgtagccaacagccccgaattcaaacccaggcccagacactttattattcattgtgtgaccaaggcaaattttgtaaattctctgatccttgatccttgattttctcctcctaatagcacttacctcatatgatcatgaggaaatctcatgagataatgcatataaagctttcatcacagaacctggatcataaggagcctcaagaattggcagctgttgttatatctctgactttttttttttagacagagtctcactctgtcaccaggttggagtgcagcggtgcaattctcctgcctcaggttcaagtgagtctcctgcctcagcctcccgagtagctgggattacaggcgccagccaccatgcctggctaatttttgtattttcagtagaggcagggtttcaccatgttggccacgctggtctcggactcctgacctcaggcaatccgccctacttggcctcccaaagtgctgggattacaggtgtgagtcaccgctcccggtcacatctctgaccttatctccagtgcataagacccttttactctagtctacgtatctcattggtcctttttggtcctttgagggccagcttaaatctcacctcctccaagaagcctcccctgcctgcttcctctcagccagaatggctcttaccctcttgggacccttagtgtgttctacctcaacaaaacaaggcttcgttttcataccttgtttatcagttaggttctatgctccttcaagaatctaggtcagatctctctagaatgccccttagcatctagggcctggcttggagtgcagaaggcaggtaataaatactgattatgattcactcatctgcctggctgcaaagaataggagaagttaatgagatctgaagtcagaaagtcaggaggcccagattaagtaagtcccgctctctacttcctagttaagtgacactggacagccgctgcttcacttctcttaaccacaatttcctcaaccatcaaatgtggataatgctatcactcagtcaatttcacattacttcagagacactacttaaatgacagtggtggcgatgatcactgatttttattgagaacctactatacactgggctctaagcaccttgagcccctcctctgatcctcacaacactgctctgagacggacactattattatccccattttacagatgagggaacctggaaggaattgtggcagagcaggtttggggaagcagcagggccccagggccagggagggaaatgggggtggcagggtggagctgggagaaaagaagggagccagtgaggggctgagagccagctctctgtggttgagtttcgggcagctggggctggctttagagtttcactgcctgggaactgactaattcttgcaataggtgtggggcacagatctgaaatctgcctccctgagcttgaattcctgccccattcattcctagcattgtgatcatggtcaggttgctggaccattctgagtctcaatttcctcatctttgaaatggaggcggcacaagtgacctctccatttactgtgaggccttagtaaggtgttggttataaagtccttagagaaatgtcaggtgcatggtaggtacttaatatattttggctaaggtttatgtgaaatggacccgaagaggccctcacatggaaccagactaaatacttgcagtttcaggccgggcacattggttcatgcctgtgaacccagcactttgggaggccaaggtggacagatctgttgagcccaggagtttgagaccagcctgggcaacatggcaaaactctgtctctccaaaatacagaaaaattagctgggcgtggtggcacacgcctgtaatcccagctgctcgggaggctgaggtgggaggatcacctgagcccagggaggtcaaggctgcagtgagccatgatcatgtcactgcactccagcctgggtgacacagtaagactgtctcaaaataaacaaacaggccgggcacggtggctcatgcctgtaatcccagcactttgggaggccgaggtgggtggatcacttgagaccaggagcttgagatcagcatggtcaacatggcaaaaacctgtctctactaaaaatacaaaaaaaaaaaaaattagccaggcgtggtggtgtgtgcttgtaatcccagctactcgggaggctgaggcaggagaatcgcttgaacccaggaggtggaggttgcaatgagccaagatcgtgccactgcactccagcctgggtcacagagcgagaccctgtctcaaacacacacacacacatacacacacacacacacacacacacacacacacaaaaccctcagagtttctgccgtacacgccctacactttcccatctcccaggctttgcttacctggctccatatcctcctattcttcaggccccgcctcccctccaggcccctcctcccctccatccccatgtgcccaaatctgactcatccttcaaggtccaactcaaatggagtggaaggagcaaagaatctgaagtcagacatcccagggttcaaacccaggccctgacactttattagctgtgtgacccaggcaaaatttcctaaattctctgatctttgatccttgattttctaatcctaatagcacttacctcataggattgtgaagaaatctcatagataatgcatataaagctttcagcatggaacctggtttataaggagcctcaagaattggcagttttcttacgtctctgatcctatctccagtgcataagacccttttactttaatctacctatcaacaaatcttcagactccttgggggcaggacccaggctttgttttcacttttgcgccttcctcccctgagatgccaggcacaaagtaggcctgaaataaatgataatagttcacatttcctgagaacttcctaggcgtaaacacccagctaggtattttacatacattattttgtcgaaacctcccaactaccctgtaacacaggtacattttggacagatgaagaaattgaagctgaaatatgtaaaggaacttgacaactgtttgaagatgaaatcaggatctgaactcagatctctcccaaggcactgcgctgttgtgaacagtgaactcagccccaaaaccccatgtgaaggagggtacattctgctaatgaaccaggggttccagtgctgcacacattgctggaagtggaaagactgtgtcccacaactggatgagttggggatgcttagtactattttccagatgaggaagccatgacttgcctgaggccacagagcaggtaagtgaggaagttcctgttccaggcaaccccagatagtcctggaaaaatccccaaactaaagcaaacttccattccagctggtgtatcttctcctgaaaaattccacagattccctgtgctcaaagtcctgttaatcagaatacaaactgcttgacagacacttcctgaaggtacatattccctgtcccgggctcctcagcacatcacctgttcacacgaatcccaaatcacagagaaaccagatcagagctatgggaaacaagggagaaaaatccctgctccatcttctttgtgcttttcctattctacaataaacatgtattactttggtgattggagaaaaaaaagttgttttttaaaaagagaaacaaggtattgctttaaggaagttctgctagtggtaacctttttactggaacattgttggaagatgggttcgtgggcttttctaacagtgactggcatgtagtaaacactatatgaatgtttgttaaatacataaaattctaggtgcaggccgggcgcggtggctcacgcctgtaatctcagcactttgggaggctgaggcgggcggatcatgaggtcaggagattgagaccatcctggctaacacggtgaaaccccgtctctactaaaaatacaaaaaattagccgggcgagatggcaggcgcctgtagtcccagctactcgggaggctgaggcaggagaatggcgtgaacccaggggcggagcctgcagtgagccgagatctcgacactgcactccagcctgggcgacagtgactctgtctcaaaaaaaaaaaaaaaaaaaaaatctaggtgcagtggttcgtgcctgtaatcccaacactttgggagcccgaggtgggtggatcagttgaggccaggagttcgacaccagcctggccaacatggaaaaaccctgtctctactgaaaatataaaaattagctaggtgtggtggtgcacacctgtaattccagctactcggaaggctaaggcaggagaatcgcttgaacccaggaagcggaggttgcagtgagccaagattgcaccactgcactccagcttgggagacagagtgagaacccgtctcaaaaaaataaaaataaagaaaaataaagaaaaaaacataaaattctaaatcttggcactccataagctatgtgctcttggacatatcattgcattactctgggcctctgttccttcatctgataaacagggctaatcacagctgtctcgggtttattgcgttgaagtgaatctgggatgggatgtgaatgtgctgtgtgtgtgtgtgtgtgtgtgtgtgtgtaccaaaatttattaagaaggcaaacaatttggttggacaactcttcaaagaaaatatacagaggccaggccggacgcagtggctcacacacttgtaatcccagcactttgggagcctgaggcaggtggatcacctgaggtcaggcgttcgagaccagcctggctaacatggtgaaaccctgactctactaaaaatacaaaaattagctgggcgtgatggcgggcgcctgtagtaccagctactcaggaggctgatgcaggagaatcgcttgaacccaggaggcaaaggttgcagtgggccgagattgtgctattgcactccagcctgggagacaagagccaaagtccgtctcaaaaaaaacaggaaatatacagaggccaataagcacgtgaaaagatgctcaacatcattagtcattagggaaatgcaaatcaaaactacaatgagatgacacttcactaacccactagaatggttataatagaaaagagagacaataactagtgtcgtccaggatgtggagaaccctcatacattggaaccctcattcattgctggtgggattgtaaatgggtataactgctttggaaaatagttcagcagtttttaaaaaagttatacagagttaaccacatgactcagcaattctactcccatatacccaagagaattgaaaacatatgttcacacaaaaatgtgtacacagatgttcatagcagcattatccataataaccagaaagtagaaacaacccaaatgcccattaactgatgattggataagcaaaatgtggagtccaggcacagtggcacatgcctgtaatcccagcactttgggagaccaaggcgggtgcatcaattgagcccagaagtttgagaccagcttgggtagcacagtgagaccccatctctacaaaaaaaatacaaaaatcagctgggtgtggtggcgtgcacctgtagttccagctacttgggaggctgaggtgggagaattgcttgaacctgggaggcagaagtcatgccactgcatcccagcctggatgacagagcaagaccctgcctcaaaaaaaaagtggtatatttatataatagaatattattcagccaaaaaaaggaaaaaaaaatttttttttttttgagatggagtctcgctctgtcatccaggctggagtgcagtggtgcgatctcggctcactgcaagctctgcctcctgggttcacaccattctcccgcctcagcctcccgagtagctgggactacaggtgcatgccaccacgcccggtgaatttttgtatttttagtagagacagggtttcaccgtgctggccaggctggcctcaaactcctgacctcaggtgatggtgatccaccacctcagcctcccaaagtgctgggattacaggtgtgagccaccgtgcccagccttttttttcttaatagtgacgggggtctcactatatcccgtggtctggtcttggactcctgggctcaagtaatcctcctgcctcggctcccaaagtgttgggattataggcatgagccaccacgcctggccccataaaaaggaatgaggtactgatacatgctatgacatggaagactcttcaagacattatgctaagtgaaagaaaccagacacaaaaggctatgtttgtatgatcccatttagtgaaatgtctagaatagataaatctttttttttttttttttttttttgagacagagtcttgctctgtcacccaggctggagtgcagtggcatgatcttggctcactgcaaccttcacctcccaggttcaagggattctcctgcctcagcctcccaagtagctgggactacagttgtgcactaccacgcctggctaatttttgtatttttagtagagatggggtttcaccctgttggccaggctggtcttgaactcttgacctcaggtgatccgcccacctcggcctcccaaagtactgggattacagactagaatagataaatctatagaaacaaaaagtagattagtggggctgggcgtggtggttcacgcctgtaatcccagccctttgggaggctgaggtgggcagatcacctaaggtcaggagtttgagactagcctggccaacatggtgaaactccgtccctactaaaaatacaaaaattagctgggcgtggtggcaggcacctgtaatcccagcactttgggaggctgaggcaggagaatcgcttgaaccgggaggtggaggttgcagtgagccaagatcgtgctactgcactccagcctgggcgagagtgagactttgcctcggaaaaaaaaaaggccaggcacagtggctcaatcccagcacctgtaatcccagcaccttggaaggctgaggtgggtggatcacttgaggtcaagagttcgagaccagcctggccaacatggtgaaaccatgtctctactaaaaatacaataattagccaggcatggtagcgcatgcctgtaatcccagctacttgggaggctgaggcaggagaattgtatgaacccgggaggtagaggctgcagtgagccgagatcacgccactgcactccagcctgggtgacagagcaagactctgtctcaggaaaaaaaaaaagtagattagtgattgctgggaatgggtcagtctctgtacagatgaagaacatgaggctcagagaagccaattgccacccatctgtgtgactttggaccagtgacttcacgtctctcagttgtgacgtggagagaatgacgtgcgcctgagatggtggctctgcagctcagtaaatgtgcctgcggcgcctggtgggtccccctgcgtcttcgttagttccttttccttctctcagacctttggctggaagctggtggggctgaaaggtgaaggctgccacctagaggtgaactctggcacctgccaaagcctgcgaggcgtcttatcttctcatcaaggtaactcacccgctatgggcttggggaggagaaacaggatgtgaaagaagcagccccgctgaggacagggctactagactggccagattctttccagatgtttgtaggccctgggaatgcttttcacagatgttgggtcccgtggaggtgatcccatgcgggaagagggacatccatgcgggagtcaggtcccagcagagctgcttagcgtctcttggggaaatgccacctataattccttcttcttctttttttttttttttttttgagatggagtctcgttctgtcgcccaggctggagtcccgtggcgcgatctcggctcactgcaagctccgcctcccgggttcacgccattctcctgcctcagcctcccgtgtagctgggactacaggcgcccgccaccacacccggctaatttcttttgcatttttagtagagacggggtttcaccatgttagccaggatggtctcgatctcctgacctcgtgatccgcccctataattcctgtaattgtcagtttattccctcgttttcctgagggatctctttaacacacacacctgaccttgtctctctctagttcaaggtctggcaactagctccccaccacggcccagccacccccaccaccaggtccctccgatcttcagacccttcacacatgggccttaggtttttttttttttttttttttttttttgagacaggctctcaccctctcaccctggctgaagtgcagtggcacagtctctgcttattgcaacctctgcctcccaggctcaagcgattctcctgcctcagcctcccaagtagctgggattacaggcacgcaccactactgcccagctaattttatattcttagtagagacgagtttttaccatgttggccaggctggtctcgaactcctgacctcaaatgatccacctgccttggcctctcaaagtgctaggattacaggtgtgagccactgcacccggcccccttacgttctaatccaacacactcttcctaactcccctctgacctctcagctctctctattgcccatgctgttctccctgcttcacatgtctctctccatctcttccaccagaaaaaactgttctgctctcagatagaagtttcttccttcttttctttcttaaaccagataaataaatcattgagaatgctgtgtacccccatatcccccacgtgatcttaaacagcactcaattttaaaagggtgcatttttaactcctcaggctaagagaacagaaacctgggacaaaattaggaatccagctcacatgcctgtaatcctagcactttgggaggccaaggcgggcggatcacgaggtcaggagatggagaccatcctggctaacatggtgaaaccccgtctctactaaaattacaaaaaattagctgggcgtggtagcgggcgcatgtagtcccaactactcaggaggctgaggcaggagaatggcgtgaacccgggaggcggagcttgcagtgagccgagatcgtgccactgcactccagcctgggcgacagagcgagactctgtctcaaaaaaaaaaaaaaaaaaatgaagccagctcaattgctaacattgaaaaatgactcagaactcttttttttttttgagatggagtctcactctgcagcccaggctggagtgcagtggcgcaatcccagctcgatgcaagctctgcctcccgggttcacgccattctcctgcctcagcctcccgagtagctgggactacaggtgcctgccaccacgcctggctaattttttttttttgtattttttagtagtgacggggtttcaccgtgttagccaggctggtctcgaactcctgacctcaaatgatccacccgcctcggcctcctgaagtgctgggattacaggcgtgagccaccgtgcccggccagaacttttttttttttttttttttgagacagggtctcgctctgtcccccaggctggaatgcagtggagtgatcttggctcactgcaacctccacctgctgggttcaagcaattctcgtgcttcagcctcccgagtagctgggactacaggcatccaccgccacgcccagctaatttttgtggttttttttttttctttctttttagtagaaacagggtttcaccatgttggccaggctggtcttgaactcctgaccttaagtgatccacctgcctcaacctcccaacatgctgagattacaggcgtgagccaccacacccagcccagatctcttttgaaataagcaagacattcagttttgaaatcgaggtggttttggtgttggccacagttggggtggtggtagattatgccagccatcttttggaagctgaccctgagccctgcaccccacctcttgttaggaatctcaatctatcattgtttttgtttgtatgtttgtttgaggcggagtcttgctctgtcacccaggcttgagttcagtggcgcgatctcagctcactgcaagctccgcctcccaggttcacgccattctcctgcctcagcctcccgagtagctggaactacaggtgcccgccaccatgcccagctaattttttgtatttttagtagagacggggtttcaccgtgttagccaggatggtctcgatctcctgactcgtgatctgcccgcctcagcctcccaaagtgctgggattacaggcgtgagacaccgcgcccggcccgtttgtttgtttttgtagagaaggggtttcaccatgttgcccagactggtcttgaactggaatcaagtgatctgccttggcctcccaaggcgctgggatcacaggggtgagcaaccacaccggccctctataatcgttttgcaattgtaattacagttgttttaatgttcttcctccccaccccacccccagatttaagcttctccttgtctttttaattttcacaccccaatatccagcatagtacccactgcagagtacaagcacaagaattgcttattgaactaaactcaacaaaaggtttgtttgtttgttttgagatggagtcttgctctgtcgcccactggaatgcagtggcccaatcttggctcactgcaacctccgcctcccacaggttcaagtgattctcctgctgcagcctcccgagtagctgggattacagtcacgcaccaccacacctggctaattttgtatttttagtagagatggggtttctccatgttggtcaggctggtctcaaactcccaatctcaggtgatctgcccacctcggcctcccaaagtgctgggattacaggcatgagccactgcgcctggctaatttgtatttttagtagagacagtttcaccacattggccaggctggtctccaactcctgacctcaggtgatccgcctgcctcggccttccaaagtgctgggattacaggcgtgagccatgcggcctggccaatgaaaggttttttggaataggtgcaagatcactcacaatccccttccaagagactttccaagaaagtctctggccactgtcagagtccctctgtaactctgcttggggggaaatggtgagttgggggccttatgaggccaaagaggtagtcacaggagccagaattctcacgtacctcctccaggctcatgaagagaggcacaactcacttttttcctcccactccctcccctccatctctccctattctctctctttcctttatttctctttttttagagataagagtcttgctatgttgcccaggctggtcttgaactcctatattcaagcaatcctcccacctcagcctcccaaaatgctgggattacaagagtgagccaccatacctagcctataattcactttctaacccacctccccgcccactgctctcccccacgccctgccctatacactgccccacccctgtgattattcctccccaaacaagcagatcaaaagtgatgctaagaagtcgggcacagtggctcactcctataatccctgcactttgagaggccaaggcgggaggatggcttgagtccaggagttcaaggccagtctaggctacctggcgagactctgtctttacaaaaatatttaaaaattagctgggcgtagtggtatatgcctgtagtcacagctcctcaagaggctgagactggaggatctcttgagcccaggaggtcatggctgcaatgagctgtgattgtgtcactgcattccagcctggatgacagagggaaaccctgtctaaaaaaaaaaaaaaaaaagctaatagttgcaaagcaagcacattcatgcccgatctgcttaattatcacaacagccctatgaggaagccaccattagccccacagaacagatgaaggaactgagcccaggagtagttcgatgattatgcctgaaggacagcttgtgtgtcagggccctgaattttatttactatgtgtgggtcacctttctgaaggctcataaacttccacgcatatgatcctcatatcatccccatgagatgtgtaatatcatcacccccattttatagatgaagaaactgagactctgagcatttacgtaacttacccaaggccacagggctggtgacagtagaggtggttttgagccagggctgtccaggtacaccctctcaaccactttgtcatccttcctctggatattctctggacaccttggctttagcatgtgcaagtaggacgacacccccctcaccaagaggtagtaaggattagatctaatatgtgtgtgtatctggatcacagtaaatacccaggaaaagaggtcatcatttttgttcctctctgacaattgcagcaactggccgccagaggggagtcatgcactgaagacctaagcccttcccaggtgactggttgaccattcaacggttaagaattgtgctgggcccttttatctctgtgcccaaatgtgggatcaaggacagatctcaccagtacggaactacaaggatcttttgactcttgcaaaagaaatacagcttaggccttaaaacccatctaaggcccctttaccaacaccaattctaggactgggagggtgggggagatccctgtggagggaggcccagctgtgtcccatttggtggtggcagtgctgggggagcagcaattatcagtaattcctctcctgctggaggctgggctcctggagccacagctgcaaggtgggaggtggcaaggaggattttggaattgtctccctaaggggtttccatggttacagatggatacaggcagcccactaggctgggtcctttctccatattgtctcctggggagacaatgggctttggggatggggcggcatgccacgcagatcatttctagagcagggaccatgagtgcctgctctgtgaacccctggaccccagctgctgggacagagggagttgggcacagggatcagccttggtaaccgactgcttgctttggggtacaacactactgctacagcaactcaagagaggctgtccgctgagccactcaagcaaatctgaggctccaaaacagccaaactgcagaggcctccaggtatttaaaaagcatgcattttggagtcagatagtcatgtcatgattctgtcccttgctagctgtgtgacttgggcaagttattttaccttcctgagtccccgtgtccttatcgcgaaagtgggacaacacccactttataaaattggtgtgaggaagcaataagcacaaagcctagtgccaagaaaatgctcagagagttcctaagctcaggtgggttgatggggtcctgggatgtgggactggctctgtacccactctgtggccttagacaaggcccttcttatttctgggtctcagctgctccatctatgacttggagactttgaaaggcttataaaggatgaaagctactcaggaggctgaggtgggaggatcccttgagtcctggatccaagacccgcttgggcaacatagtgagacccgccctgcctcgaaagaaaaggaagtacctggccaggcgcggtggctcatgtctgtaatcccagcactttgggagaccgaggtgggcagatcacgaggtcaagagtttgagactagcctggccaatgtggtgaaaccctaactaaaaatacaaaaaacattaccgggcatggccaggcgtggtggctcacacctgtaatcccagcaccttgggaggccaaggcaggcagatcacaaggtcaggagatcgagaccatcctggctaacacggtgaaatcccgtctgtactaaaaatacaaaaaaaaatagccaggcgtggtggcaggtgcctgtagtcccagctactcgggaggctgaggcaggagaatggtgtgaacccgggaggcagagcttgcagtgagttgagattccgccactacactccagcctaggcaacagagagagactccgtttaaaaaataaataaataaatttcctgggcgtggtggcgggtgcctatagtcccagctactccggatgctgaggcaggagaattgcttgaacctgggaggtagaggttggagtgagctgagatcacgccactgcagtctagcctggtgacagagcaagactctgtctcaaaaaaaaaaaaaaagaaaagaaaagtacttggccgagcacagtggctcatacctgtaatccaagcactgtaggaggctgaggcaggaggatcacaaggtcaggagctcaagaccagcctgggtaacacagcaagacctcccaatctctacacatttttttttttaaagtagctgggtatggtggtgtgcacctgcagtctcagacttaggaggctgaggtgggaggatctcttgagcccaggggtttgaagctacagtaagctatgactgcaccactgcactccagcctgggtgacagattgagaccctgtctcagaaagaaaagaggggagggaacgggaggtgaggggagaaaagaaaagtgcgagcttgggaaaacagaaatcaaaacactaacacaacaaccccatcttccaggacttaaatccagttggaatatgcaacatgtgatcacaggggcatgtggtatttgtgtaagtagactctgtgctgtggcaattaagggagatttttctgagggaggcaggacttaagttaggccttcgagagtctcagaatcaggaaaatattccagaaaaatctcccacgctatgccaaggagaaacagaatcccagaagggcgaagggactcagttctctgccactcagtttcaaatccttcctagtcactgccttttccccaaggaagggtgtgtgtacgtggggaggaaaggaaggagtaagcaaaaaccattgtcatttatgtccaatttatgggacacctttacatgagtcaagttaatcattagccccattttatagataagtaaactaaggattgctctaatttttatccaactgatttggcgaaacaacgtacatggcccaagaataaactttgtctccagtatggaatacaaaacttccccaagggaaatgtaaaacaattccttcatgtttaaatcatcagcagagaaaatcaaatcgtttacatgtctattacttgtccttctattaagaggcacttagcacagagcctcgaacatggtaagtgttaagtaaatgaaagttgttgtcactgtcactgctattattaaatgtattactacatattcaatgctggggatacagaggtcaataaaactctctccctgtagtcccagctactctggaggctgacatgagaggatcgactgagccctgttggtggaggttgcagtgagccgagatggtgtcactgcactacagcctggatgacagagagagaccctgtcttaaaaataatgataataataataaaaataactcccttctgtctttgagaaattcagcctagtgagagaaaacgggctgcaaaaaaaatgatctcttacttcctggacacacatataccatctcgttaaattctccaaacaaccttgtgaggaaggttttttctttctctcattttagaaataaggaaactgaggttcagtgggcttcattgacttgcccagacattgtaaaatatgaataaaatatgaaataaaatagtgttagaagacaaacacctttattggattaacagatacatcaaaaagcaataaagtctattaattacgtaaggcacatagaccatagcccattttatttattattattattattttttgagacaagagtctcactctgtcgcccaggctggagtgcagtggtgtgatcttggctcactgcaatctccgcctcctgggctcacgccattctcctgcttcagcttcctgagtagctgggactacaggcgcctgccaccacacccggctaatttttttgtattttttttagtagagatggggtttcaccatgttatccaggatggtctcgatctcctgacctcgtgatccacccacctcagcctcccaaagtgctgggattacaggcgtgagccaccacgcccggccagccccattttattaaagactatgaaagatagcttttactgagctaaaaaatgagccagacttttgagagctctcatttatggagcaacaacgaagtgccaggcactttccatgtgtctgtcaaatcctcataaccctgagaggtaggaacagttagctccctttcacaaatgacaaagctggggctcagagaggtgaagttacatggccagggttgcacagcaaaagagggcatcgagccagtgctgggacccaggctctgacacttgggctaggagctggagccaggcctttctcccaagtcaggtttactaagagctatgctgctgctgtgagccaatcaccctttcctgcctcactccacggagcgcgatgagtgggcgggagaggggacaggcggttcttcagggcaagaggacttgtttcagcccatttgggaagcagcccggcgtagcatggccttctcaaagtgtgtgtgtctgcatgcatgtgtgctcatgcatgcacacatgtgactgtgtgtgatgttggctggctgtcgggtctcacaaagccatgtgataaaaatctggtacatctttctgaaatgtccgttttactcaaaaaatacaaataaaagaaagagagacatcacaattttatattaaaacacagagggctatagaatgtaagagaacacaaccttcacatggtatgttaagataatgaatgacaactagcatttgggggctgtggttattattatgtgccaggcactaatctaagaattttgtatggtaactaagcctcacaacaaccatctgtgtagggactgttagcagacacggagaagagaagttaagtcacttgtccaagttcacacagctagtatgtggaagagcctgggaacacaaagcatttcattagacaaatcttagaacatctctattatccattgtttgttcaattaaaagtttgtaacaagggtcaggcgcagtggctcatactcctgtaatcccagcactttgggagaccaaggtgggtggatcacttgaggtcaggagttcaagaccagcctggacaacatggagaaaccctgtctctattaaaaatacaaaaccccatctctactaaaaatacaaatcatggtgatgggtgcctgtaatcccagctacttgggaggctgaggcaggagaattgcttgaacctcagaggtggaggttgcagtgagccgagatcgcgccactgcacttcagcctggacgacagagcaagacaccacctcaaaaaaaaaaaaagtttacaaggacgggtgaggtggctcatacctgtaatcctagcactttgggaggccaaggcaagtggattgcttcagcccaggagttagagaccagcctgggcaatatggcaaaaccttgtctccattaaaaatataaaaattagccaggtgtgatgatgggtacctgtagtcccagctacttgggaggctgaggtgggaggatcacttgagcctggaaggccgaggtcacagtgagttgtgatcatgccactgcattctagcctggatgacagagagagaccctgtctcaaatataaacaataaaaataaaacaaaaaattgtttaaaagtttacaacaagatttatacacaagaatgaggataagaagtagctggctccggccaggcacggtggctcacacccataatcccagcactttgggaggccgaggcaggtggatcacttgaggtcaggagttcaagaccagcctggccaacatggtgaaaccccgtctctactaaaaatacaaaaattagcctggcatggtggtgtccacctgtaatcccagctattcaggaggctgaagcacaagaatcgctggaacccaggaggcagaggttgcagcaagccgagatcacactaccaccctccagcctgagtgacagaaagaggctctgtctcaaaaaaaaaaaaaaaaaggtagctggctccccttttgcttcctcttcatgaaattataagggctgccagttgggagcaggtactctacctctgttgtcttatttaattcctacaacaaccctatgggagaggtagcattgaaagtttacagatgaaaacctgaggctcagggaggtggtgtcatgtagctggtcacacagctaagaagtggcagagaaggatttaaatgcaggtctggctgatcacgaagctgctgctcttacctacacagttacaccaaccctggcctccacgttctctggcctctgggttatgttcttcctccccacaactcctattctcttcaagagagggtagtttcatgagtgagctggttctgggtcaggctgagccaggggaggctcacaacctctgaagctctgtccctccagcagccaaaagcacacttgtcatgaaataattacaaattccaagaatgagaaagtagtaattaggcactgactgggagcttgaagatctggatttttatccccagttctgtgagggaatctttgcctgagtcactttcccactctgggactcagtttctccatgtgtgaaatgaatctagtaatgcttcttgagtgcctgccacgtcctggcaggcttttaggtgctttacattcagtatatcggcacacaactgtggacagggttcttacagtattacagggaggagactgaggctcagagaggggaaggagcttgtccagggtggcagagcttgggagtagatgtgctggaccagagctctgcttttagtctctgcactgtttatatttattcctcaagccactgggcttcgacgctgatcagatgctgccaggctgagtgaaagggctctgcatatagagcgccaatgctggacaagagtcccggggtgctgtgactgggtcatgccaaccacattgccactctggaaagaagaagaaggaataaggctaggaatctgacaccaagcccagcaaactctgtggtgggggtcatctggagcctaccaagtaccagatgctttacatatgtcatctaatttaatcatcaattcaaccatgtgaggctcagagacgacaaataacttacctgtggcccggttcggtggttcagacctgtaatcccagcactttgggaagccaatgtgggagaactgcttgagcccaggagtttcagaccagcctaagcaacatacaaaaaaaaaaaattagccaggcatgctggcgcacacctgtagtcccaattacttagaaggctgaggtggaaggatcactcgagcccgggaggtcagggctgcagtaagagcagcgatcatgtcactgcagtcctgcatgggtaacagattgagaccctgtctcaaaaaaacaaaaagaaaacaaaaaacttacctgtgatagcacagctggtaaatgacaaagctgaagtttcaaccagtgtctgtatgtttcccagactcacagagagaacgtaacaggattactgctgtggctggaagaggccaattctgcagcacccaccggtttgcatgaagtttcaaaacagctgcagacatccaaagcactgggtaaggaggccatcctgtagactgtggctctgacagttactccagggtgacctttagcaggtcccctaacacctatgagccctgaggggggtgaaatggaagcaccccccaaccagtccacgttaccacatagactgtaaaatgccgcccactagtgaatggcctcttttgaaacactttcttgctgttctctttgtatatggagttgaacctgcagtggaaaatgtgattgacagggattaacatctaggccccttggggcccacctggatgaaccctcagtggaagctgggatcatgaacaatggatatggaaccactgtaagaccaggtggcccctggccctgatgaagagagtcagggtgtatgtggggtggggaatggagcaatatggttgtctgtcctgatggtcctgaatctctcatctcttccctgcataacctacagtggcatgtcttgaaacccccttttttttttggagatggaatctcactctgttgcccagatgctcagctcactgtaacctctgcctcctgggttcaagtgattctcctgcctcaaccttcccttcccagtagctgggattacaggcacgtggcaccatgtccagctaatgtttgtatttttagtagagacgaggtttatcatgttggccaggctcgtcttgaactcctcccctcaggtgatgtgccccccttggcctcccaaagtgctggaattacaggtgtgagccaccggcccggccttgaaaccctttttttgatgctagaaatggcataggtataggaggccgggcgcggtggctcacgcctgtaatcccagctctttgggaggccgaggagggcggatcacgaggtcaggagatcgagaccatcctggctaacatggcaaaaccccgtctctactaaaaatacaaaaaaaatagccaggcgtggtggtgggtgcctgtggtctcagctactcgggaggctgaggcaggagaatggcgtgaaccagggaggcggaggttgcagtgagctgagatcgcgccactgcactacagcctgggcgacagtacgagactcggttaaaaaaaaaaaaaaagacgaaaaaaagaaatggcacaggcataggaaacaaaccagtattcagaaataacttggatcggtgagtggggaggttattctggggagtctgccgtgccttgggtaccctcattgccacacaaggcacatttttagccccaaagggaccaactgccagctggccagcgaccacctcaactccgggtaatgagttccatatgtttccataagagcccagctaagcttttccccagcagttcttacagtgttctctccctccctgcctcatctcgatgcttggccacccttgttctatttgctcctaacgagggtggcagggagggggctaggtgggcaatgccaagagacaatgctttgggaagtcacccttccctgacttcatttttgcagatcctcaagctaagaggcagtctctcggcctctccaggcttccgctgccccatctctatagtgggaaaaacaacccttactcagggtagggagagcatcacgaaaagagccctggatagtaaagtgggaggctggtgttccaatcccaacgtgaacactaacttgctgtgtgtccctgagcaggttcctgcccctctctgggctacatttgtgacctctaagggcccgcccttccatccctgacaagcttcagaattacaacaaatgacttaaacagcaaggaagaacatctgctttcctgggtggcttcagggtaggggtccccaggaagcctaaggcctccctaccctggccaccctcactctaagcccaggctccctttgacaagtctggccgggtgagagcttctgcctgcagcatcgggcacaaagtagaagcagggtagcagtgaggagaggcgtcccccgatggaagcacagctccacagctcagaaggcggaggcgggggggcgcctatggtcagcccccaacgacggcgagaggtgaatatgagttcaggggacttcagagaactcctccctccttaatctggtttgtcaaaggcaacccccaaagtcccggtctcaaggtgtctcactaccctgatcccgactgcccaccgaccctacccaaacacggactcactaaccttggcttttgacactgcccacagacggacccccacagcctgactacccacatttatccctaaagcctgccccaggctggcgaaaccccaaatccggccacgctctgacccccgatctcagccacaaagagactccgtgaccttgccactgactgacccctaagaggagaactaatcagagaacaattaaattgctcgactctcagcgaagcacctcatggaacagaggggcggaggtggggaaggacttcgagagggcagaggcttcccggaggagcccagcgggcctggggccacactcggaaggccgggaaggccctgtgcagggcacgtcgcaggcgctcgaggaatgcgagttgcctgaaagaacgaaggaaggaaggaaccgggtgcgatccagggcggcctcgcggacggggcaggaagcgggtgggggtgcgcagaggctgcagcggcccgagcgcagctgggggcagcgggagaggagtggggtcagcgactccgctgggtggggggccccccaggccgcgaggctgggaaccgggaggccgcgctgctggcggagcggcgggggcgccgcgaggctccggatgggctgcgagccccgcccgcaggctgcggagggagccggagccagagcggagccagagctcagacatccgggcgccagcgaacacctgcgagcggcccccagggcccgcggggggagcgtggggcgccgggaggggcggggcggggaggaggcggggccggctcggctccgccctgccgggctccaggccacgtgggccgaggctctgccccagcccgggcgccgcagcgccgccggtggggagcggctgtctccggggaggtctgggagtgggcagagtggagcccttggaagcagcgctgcgggaaagagcgcggcaggaggttctcaggtttagcctggggcatggggaagagtcgtggccacgaggggtgatgaggccgggaagacagataattgaaggttgtccggcgcgtccacagctagagagctataactggctttctgaaaagggcaccatttctggtgtcacagacatgaatttgaattctggctttgttacttagaagccgtgtggccaccggcaagttacttcgcctgttctgagctagttcatttataaaataaagacacctcccaaatgtctgtatttcacagccgatgcgatcagctctgaatccgatcgcatgcgacaatttgcacaagacactcagcagtgaatcttgtagttaaggaagcctcgtggatactttatgcgccttatagtttatccgaacaacacacatggaagggaggtaccgacatccccctttcacagatgagggggagtcctaggtctttcattccacaagcgctccctgggacaagcaccccctggggaccaagcatgtgccaggctttgggaatggcgagggaaaagagccaatttgaagagaaggcaagaacatgagctttgaagctagaggaagctggggttcctaaactctgctctgctactttcttgctgtgtgaactgtttcttgctgtgtgccactttcttgctgggtgatcaagttattcagcctgagtcttttttctataaaccaaggaatgttacccatcacggtggtttgtgaggattagaacaaaaatggaagataaaatagtctggaacctggcaggcacttccataggtgattatgacagaagacactatcctctctgggagttatctgacctagggccaaattgctttcactctctaatgactaatggattggcatgctggtctttcttttgtcctggccacctgaacaactcagtcctgggagtcctgacaggcaatttccttggaattagcttaataatacctcgtaggtgtgtgatgcatttcaaagaactttcccaccattatcttctgtcctgggaggcagcagggcacagaaggagcatggctcagagaggtggaatgcttgctcaaggtcactcggcagatgaccaccgcagccctttttagccttccacggtactgaaacttccgagcaaacgggaggcaacatgctgtggcagaaaagggtataagacgttgagctcaatgcctggctctactgcagttcatggtgtaatgtggggcctaggacctcagaaccgctgccttagaatcagcttcctttacagatgcagaaactggggctcaagagaggcaaagtccctagcctgaagttatacaggtaagaggtgacagagcagggatttatgtccctttatggtcgtctctaaagccagcacagcacacctaaaaaacaatccaagatagacccaacccaggccttgtaggtggtttggggcaagggttcctcacatgaggattgaagtctgctattgctctgcactgtgtgtgtatttttttaagagagtgttcatatcttccttcagatcagagtgaccaggacacagaacaggttaagaaccactgatcaggctgggagtttggttggcaatgccagaggttctcctcctcccccatgcccctgttcaccccagcaagctcaccagggttaaggcactaaaggtgatgacgtgacctgtttgttatgaaatattgaagtaattcatgccagggaccaacacacagatgagatcataccataaacaggaatctctagtaaggccaggcacctggtgaagcccacctggggagccaccaggggtgtgggggaaggcatgggttgggatcttgctctctgccccactgccaggcctggcctcaaggaatggccagtccccagccctgctcctgttcaccacaatcaagtcacggttcaaatcccatctctacctctcaaaggctgtgaaaacctggttcagaagcattacccacagaggttccctttccccatttctgaaatagggatagggatgcttacagaataggttcccaatggaggtgatgtagaaataccagcagaaatgaggactgtggagtctctgcctcacattccttgttcagggtcggactccacaaccacctagcattaaagaagggattactatcagtacttcccaaccagcatccaaatctttatccatttcaggagacctccctcttttttccaactttggaagcccgcaaggaagccagcccagagagcaagaaggaaatgaaaccaggcccagttatcagtttattcatttttggaattggtctatcaaccaccacccatgcctgggcaccaggtgaagcaaacttgaggctctcctcttaccacatcccctgctagaaaggcatagtcaatagtaacaataaagaggaaagctactgctagatctcaagggacatgaaaactcagttttcaagttgcctgagccaccaactttcaagttgcctgagccaccaacttgctgggcaagcttgcaccagtctctggtttcatctctgaaataatgagcagagcccagaacttttctctgcacccatccctcaatggacatgagactcccatcatgaacccttctctctccaccccatcccctctcaaccaggcagtttttcatttccctctcgtagaataagcaagttcactttcccaaagctcccaaaattcggccatgtgcgagaaagcatcattagtacttaatggagacgggtgtcatcatatacacaagtgtttaaaaatcgtttattatgcaaaatgttaacttttataaaaagtttaatatacatcgcattgttacagaaagtcaccttcctgtaaaaaaggtacaaaacctatatactctattatagagttcataaatcagggcaacagaacctttctccaaggagaccagaagaccagctctgccgccgccttggcatagtttggagagcagccactccttccacacctccacgctctgaagagaccttagaacttgggggtggggtgggagcagggtgacgtcgcccagctggtggccagagctagctctggctcttcaggccacaagttcacagtccttcgctcctgagcaccaggtttagtctccaggaagggatttggtgaagtcaagtgggcagggcgaagttggggcccatccctgccgtccggcttccggcaggagaggttcccggggtcccaggcagaacgggcgccagcacctgcgttctgggcgggggaggaaagaagaccaaggagcagtcagtttccgccgagcgtgccgaggcgggggccgtccgcagactggccggcgccagggaggaaacttggtctgtacctccagctgataactccgcgccccacgctgcccccacccagttggcgccaaagaccacaggcggagcttgcgctacccctcctacttggaattgacactagctgggagggggctgccgaagacagctccctatacaacatggaacagaaagacttgtatttagtcggacccatgtctactttgccagaccctcggccactgcgggagggcagggcccaggcgcatttaaggcttaaatgcacatcacatggaaactgactctgccattcatttgatgcaaccatgggcaagtcacttgtccctctctggcctcagtttccctaaaccgagtgagtggcaatttttcaaaacgtctgccaactccaggacttgccgtttaaacctccctctccaagagaggagatactcacctggaggtgtcaggacacggccgagtcagtggcaaaagctccttttgtcgttggagatgacaagttccggagtgagctcggctgtctgattagaggaaaagagggaagagttacgcgaggcaatcgggagctccgagggtcccgcagcatccttgcctgggtgttcagccctgtcccgacttcgaggcttacctggatgggaaggtgggggccatcagggggtccaggggctggctcggccaggactacctgcaggtcgagaatgtagtcgatgacgcgctgtaggatttccacctggctaagctgagtgcctctcgggactccgggtaccagttcccgcaggcgggagtagcagtggttcatgtcgtccagcaagctcagcggctcctcagctgccgggcccttccctcggccccgggcgatggccagactgcgttccgacaggcagcacaccgcctcgtagcagccgcgcaccgggctcagcgccttcatgctggggagtgagtccagaggtgccccaaagagaaagaaaaccaaaagaagtcccgctacagtgacctgcaacgcgcgcacgctcgccgcggcggtcacttatagagcctgcctggaaggcacgcctctttattcaaaatggcccgcctcggccctgcccccgccggccctgggcgttcacagcccgcttaaattgcaaacaggcttcctccggctggtctgacgccgaagaccgcggagccgcggattcaaagaatgaggaagcgctgataccggggagaggcgggcctctccgccagcaaggatttaaaaatcactcaaaaccattaacttccagaatttgctttttcctggcagcaccccagatctttgagcttccctgccccctgccagtccgcctttagcccaacactggttcgagccacagctcctccgaggtcataaatccctgaacagcaaagaagctccccccaccccccgttttttttaagcgaaagatttttcaagggaaacttgtaaggaattagtgccgccttgttccccaatttgctgttcgtctgacctccagactcactggcgtcaggaattatcttgtgaccagagggaaaaaaaattaattgcggtgaagctgaggttacaatgaagaaaacagatttgcgctaggcgctgagattgcagaaggaggagggaaagggggtttgagcaaagaacactatttatttgagcaacaggggaaaagaagaaagcttgagcccatgctttttgcatggggaaaaaaggagcctggaccctctgccccataaactccataacgaactaaatatatgcacagttgtgctttgtgagttcaattagaattttggacaaggttttaaatatggaggcacagatgggacaatttctacataaacctttttaagagcccccccccacccaattgggtcagcaaatttcttaacttcccctctcttcactttccacacacctctgtgtagaaaacagtggtaatttcattgctctattgtctgtccctttctgctatggaagggcaggccacctggacttgattattcttagccctgctgaagtagctccagctccatctgaaagaccaggaaaggaaccagagggccggcaaactaagtcctgtattgcaacaggacactgtgctcagtattctttgattctttgcttgccttcttgtcacctccctagacatttggggacctgcacttccaagatgctgctttccattttggaaatgaccaagtgggattcccccaatagttgctttcctaatgaatcattggtgaatatttatggagtccctccgcataaaacagtggctcctgctttcaagaatctcacaatttggggagacaagattaacacaggaaacaagagttcgataatgtgtggcactgattaacaggacaagggggctcagagccaaagagagtcgcaaaacggttgaaaaggacactgactgggaattgagagccctgggttcatcatgctagccctgacaataatttgtcatgtaatcttgaacaagcccaggtactctggctttaattgccttgtgagtaaaatagacgatggtactaagtgattatttaaaatcctttccaattgtagaagtccaaggttgtgtgaaatttggatatgtaggtgaaagatgctgaggggcccaaggaaggcatttaagacatgcccaatgtcacactacaagtaatagcagagccagtcttgaagcctcgttcttttccatcaaaccacagggctctgtggcccaagaaagatttcttcctggaatgtttttttcaaggacaggctcttcagtaagaaaagaggaagaaaacctgtgagtgggcaagtcagtctttacatgctacagccgtcaagtgccagctatttggtcaggaaaggcaaaataatggctgtaggaactcctgaataaccgaagagaagatccttcttttcctatcttgcagacttctgtggcaaaacggtcaagtccagagggttctagaaaaatcacgggccaggcagatttctgtgcaaatgcccattcttcttcttcttcttctttttttgtttaaactaattgtgtagactttggctgagttatcctgggtgcttctattttcccatctataaaatggaactaattgggtctactcattcattcattcgataattattgaatgcctcttctctgcaaagcacttgatgtgttcactccatctgatcttagtcttcttactgcctgggggacccagcatgggccagttgtgtggaaggtgctcagtctacccagattctcctcccttcttttccttcctctactactgcagctgatgcctcaggcttgtatagtgatttaggtttgcaaagcaccttcgcatttattatttcccaggatgcttccaggctgaaatgcccatgggctgtgtgacataaggcagaaggatgctgtggaattagcaagcaaaattctgttctgtgcatgccaataatttgcagtgtgcccttggacgaatttcctcccttcctgggcttcattttctctttaaaaaaaaaaaaaaaaaaaagatagtgggtaggttgggaggaagcaagtgccctttaatggtcctctctagcctaagattctaattctgaaagaagcaggttatggttaggaacactgaatagtgtttaaacccaagagacttctttttccccacagcagactggacaggctagctcaggccttctgcaacttgtttagcagtggtggggcctcagcctcttattccaaatgcctctgaactttctgttcccagttctgctccttttaccagctttttcccccctcttgcattttttatttttatgaaaggatgtcattaaggcttttgtctgcgctgtttttgtttcagaacttttctcacaatcctattttttgttgaggaatccgctcctttgcccagctgtgggtcccggtcccacagctgtgttgatctaagactcagccccagacagcctggcgccagggtgggacgtcatgcgttcacacagggatgcgtgtcccaggcaacctttcctcgggcagtcaccggccggcgactgcctcccccaccaatgagcgccggacacccgagaaaggggcggggtctgcatcgccccaaccgcgagcggcttgtgaattgcagatgctgagaacttgataatgttgcttcaattggggccctttaaagtctttttttttctttctcttttagttctttattttcttttgtctattccctttctttccaccttcttcctttatctatatatgtgtataatttttcttcttcttttttctaactatctcctcccagtgtcaggaatcattttgtaagcatttccaggaactcaatcttcctctgccaaaataaaaaaaagaaaaaaaaattcaatgttgtgctctctgatttttttttttttgagaagttggcagaactctttaagttatactgttttgttttttaaaaaattttagaattttttaatttcgtggtagtgggctctctaaattgttgatttcaaagtcaaagtaatgatgacaaggattgcagatgcctttttgtctaagctgagcctctatttattatctatctatcatctttttcccatttatgtcccagacatggggatcatggggacctcagaaacttgctcacgtttacttgggatgtcagtagctggcctatggccagaacccagacctcctctcatttgactctctgtccactctgccctctctctcttttttttttttgggatggagtctcactccgtcgcccagggtggagtgcagtgttgtgatctcggctcaccgcaacctccacctcctgggttcaaacgattcttctgtctcagtctcctgagtagctgggactacaggcgcacgccaccacacccggctaatttttgtatttttagtagagacagggtttcaccatattggtcaggctggtctcgaactcctgacctcatgatccgcccgacttggtctcccaaagtgctgggattacaggtgtgagccaccgcgcccggcactcttaatagcattagggtggtcttagaacattcccaaatgccacatttcataatatgtatctccttgctcataagtgcctagaaggtgtggtgaggactttgcagtcacacacatagaacatcccttctccttctcctcccctcagagagtctggagcccaaagtattgcttgagattcaggtgatacaaggaaagcacaggggattcagaatcaagaccaggctcaatccttgccctgacttctcctaccttcactctgtctcagctgtctcttctattaaattgggaggaaaataccatccatctacctcacagctgggagagtcaaaggggacaagggatggaaaatggtgtgggaaacagttatttttatgtgctgtaatgtgatgtagcccctgttgagtgggataggtggtaccaagtgagttgagtggtccctgctgaggctgttgtcaggaatgtgaggagcatcaggatctaaggcatgagtccttacaggggtggggatttcaaaggcctccaggatgggctactctctaactcagaagcactcagcgccaccgccaccatcatcattcattgagttctgtttgccaagtcctgtttgccttcttacacattttcccgctgatcccttttatagacagagagacagtggctcagaaaggtgaatgtgcttgcccaaggtcacatagctagataagtggcaggtccaagatttgcacccaggtctgcctgtctcccaaagcctgtatcctcctgcacctatgcttctccttctgccctcacaaaggacctcctgggaaggtagcttggacttgagagggttttattctaccagatagggaaaagcaaaggtaaatccattaggtagggagacagacaccgaagtgttggggtactaggggaaaacattgttttctgtgcagagagactcagaaagcattggaatttgttggaaatctaaagcttttcctccctcaaatcctccctcaaagaccttcctatccatacttacgttttaggagatgtttattcttttttttttttttggagacagagtttcactctgtcacccaggctggagtgcaatggcatgatctcggctcactgcaatctctgcctcctgggttctaagctattctcctgcctcagcctctggagtagctgggattacaggcacgagccaccacgcccgggctaattccaggctggtctcaaattcctgacctcaagtgatccacccacctaggcgtcccaaagtgctgggatttcaggtgtgagccactgtgcccggccagattattcttaaagcaagtacacagtaactattcctgtttttaggagtcagctttagagttgagctccctcttctaacccagagtcagcctagcttcagtcagccacaacgccctgaagttaattaaccccttacttcagcaggcaggcagtaactacagaatgcccacggaccatctgggattgagggctgagcacccacagggaagcaggaagggaattcattttctgaggaactgtcatgtgttcaaagtttcataaattttattttaataattggccctcgagtttttttgggtaggtattatcatgatcattttctccacaaaaatactgaaattcagctgggcatggtggctcacatccgtaatcccagccctttgggaggctgaggtgggcggatcacctgaggtcaggagtttggaaccagcccggccaacatgatgaaaccccatctctactaaaaatacaaaatttagccgggtgtggtggcgggtgcctgtaatcccagctactcaggaggctgaggcaggagaatcgcttgaacccaggaggcggaggttgcagtgagccgagatcacaccgctgcactccagcctgggcaacagagcgagactccgtctcaaaaaaacaaaaaacaaaaaccaaaaaaacgaaacaaaacaaaaactgaagttcaaagagatttatccacacagctgacggggaaaaggagaaaacaatcagaatttgaatccaggcctatggctcaaacactgatacacacaaagacagagatcttcaagctgctcagtgtccagacacaaaaggactggttccctcatccttgcacttctaggctaatgagtacagagacagcctttgcctcatttctctgttaagggaaaagtttgaaacttctagactttggagagcatcagtaggttatgtaggaatttaactcagacttaacaaacagcaaaagaaaaagaattatgaactcataatgcagagtttcactacttccaaagcaatttcattcagtttcattgaacattccccgcaaccttgtggggcacacagctcacctgcttcgtaatcaagtcttatttgtctccctggagtcagtatccttcacggtgcctggcaccaagtaggcacttaataaagttgtactgaattaagttccaccccattaattgcttttgggagacaacttagaggggggatttgagactcaaatgcaggctgtgctggatgactgattctatgactcccaggcataatgttctttgctgtagacagatgctgatggttggatttgggaccccactaatcagggttcaggaaaggccttagaatgatggggtccaaggtaagaaaagatgaagtccaaaaaaggccttgaaaagcaatattcacctgcccaaatgtgttggcctaggtctcagcagtagttcaatggctgagagagtagagaggtcgggaagggagggatgtggcctggggaccgagctgaccctgcctgagaggaaagggcttccctgaccctaaccgggccagagctctgcagtgagctagagatacgggggtgccagaaagcagaggtaggggcgcagctcagagagagcctcctgctggccacagctatccctgagtgtaatcaagtggcccaagcatcagcaggcttaggaggatcttttgcaaagtgccagtcatgaaccagacattttacatgtattatcgccctcaattctcatatcagttgaggctcagagaggtgaagtgacttgcccaaggtcacacagcaactgggaggcagaacagagtccagagtttatggtttgcagcatgagccaggccaccaattggcgggagaaaggaatcaaatgctggagaatgggaactgtcttaataagaaactgggggctgggcatggtggctcagacctgtaatcctagcactttgggaggccgaggtgggcggatcacctgaggtcaggagtttgagaccagcctggccaacatggtgaaaccccatctgtactaaaaatacgtaagttcggctgggcgcggtggctcacgcctctaatcgcagcactttgggaggctgaggtgggtggatcatgaggtcaggagatcgagaccatccaggctaacgctgtgaaaccccgtctctactaaaaatacaaaaaattagccgtgtgtggtgctgggcgcctgtagtcccagctactcgggaggctgaggcaggagaatggtgtgaacccaggaggcggagcttgcagtgagccgagatcgcaagccactgaactccagcctgggcgacagagcgagactctgtctcaaaacaacaacaacaacaacataagttcgctggacgtggtggctcatgcctaaaatcctagctactcagtagactgaggcaggagaatcgcttgaacctcggcagtggaggttgcagtgagccgagatcatgccactgcactccagcctgggtgacagagtgactccgtctcaaaaaaaggaagtatgtatttgacatggattttgtttcacagaactttatggtgtcaggcagtgtgtgtgtgtgtgtgtgtgtgtgtgtgtgtgtgtctcagtttctttctttttttgagaggaagtcccactctgctgcccaggctggactttagtggcgcaatattggctcactgcagactccaacttccggattcaagggattctcctacctcagcctcctgagtagctgggattacaggcgtgcgccaccacgcccagctaatttttatattttttgtaaagacggtgtttcgccatgttggccaggctggtctcaaactcctgacctcaagtgatccgcccgcctcagcctcccaaaagtgctgggatcacaggcgtgagccaccgcgcccgacctcagtttctgagtgtattcctacctgagaatatgctgtccacccttgtctgagtgtggggctgtccttgggggctgtgcgcggggtgcgcctatgtgtcttcctccctgggtgtttcagcctgctgtgtgtgatgtgtccccgggtctagtataggatcttccctgggtgtgcggctttctatgtgcgtgcttcagtgtatgtccatcttcccccaatctcctagccaggtgcggaacagggccaagaggacaataggctcgagcgcccaggtggccttttcctccactccctcacccaccgcgaccctcccctcctgcaccccgcgccctgactgccccctctctggccctgcccgaccttccgcggccctccctgcccgcgccccggcggccccaccctggccctacccggccctccccgcccgcgccccgcgcccggcggccccaacccccggcggtcccggacgcgcagctgcgggacacacaatcgccggcgccccctctccgccccccgcgcagcccctcgtccaacaaaagccgctttctttccccacaacagattaaagaccaggagggggtgaaaaatagcttctccggccactggcgggggaggggcgcgggaaaagctgggactttggggactctttgatagcgagtgtgtgggaaacccgaaggaatgtggctgttcggaccgccgcggcggggccaggcgccgggaggagggtccgcacctcccccgctgggactcccgggacctcccggacccccgcggccccagcgtccctgcggccccggcgtccccacgccccacgccgccagcgccctgcacgccgcctcccgccagctgagcgtctcccgcgccccctgcttttcctcccctagtcaatttcctcacattctaatttccttactttcttctcactttcccttccaattctccttttcgcgagtcccctattctcgtcctccacctctttctctatgtcttttgctcaagtctgttcccctcgtctccctccccgggtctttatcttgatctatacattcttttttttttctctttgtctgggacacactctgtgtctctttgtttccgtgtctcttgctatttcttggtggctttcctgggttgggtcccagggatggtggatttagcaccgtcgctgtcgccctttctcctgcccatctggaagggctgggaaaagcaggccagggtgtgggcagtttgtttaaatgtccctctcccgccacacacgtgtgagtgcaggtgggcgctgggcagggaagtctggggagcccaggaacacccagggaggagctgtggggaggcctggccagctagaccaggatggagcagggatggggggactcgtggaagcctccaagggtttggaattatttttggcccggtataattcagtctctgaaaggaattcctggcccaggaccggatggtggccttgggacccttatgggaaatgagttgggtctcctggccccctcctctctagtccttgggacaggctagtgggaggaagggggctggttcaagacaaagggcttccaggtggctgaggaaggagaccttccatgtgaagacagcgtggtacagtggggaactcagccctggatcttggaatcccagctttcccctgggctctgccactccctgacaacctgggcgaatcccttcttcctctctgggcgtcagtttccccacctgtaaaatgagatgtttggaccagtggccttcagcctttttttccaccctcagattgtaaggtctgatttgttccaaatgcattgcttatattaatgaatctgctttcatattttgtgtttatgaaagacaagcattcagtcaggctttctgattagcatgcttcattaccatgcagaactggtctaattcaaagaacaaagacaccccagccaaagataccctagacagactctcgaacagagataccccaattccagctaaagacaccccagacagaccccaaaagctcttggtgttttagtagtctgtgcagcaaaatcccatggaagaagagcacaggctttgcagtcagacagcttgggtttgaatcctgactctgccagtgtccagctgtgaccttggggaggtcacacacaccctccctcagttttcttatctggaaaaaagaaatattcatgatatccacccccacataattgtattatatcagataacagatacaaaaatttaagaaataggtgctcaatgagagttaggatgttgatgctttatacgaatgctgtccaatagaacaataatgcaagccacaaatgtaattttaaattttccagcagctatagttaaaaaagcaaggacagtgaaattaatttttttttgagatagggtcttgctctgttgcccaggctagagtgcagtggtgtgatcatgttcaaactgcagcctcgatgtcctgggttcaagtgatcctcccacctcagcctcctgagtaactggaaccacagatgcgtgccaccaagcccggctcattttaaaattatttgtagagacagggtctcactatgttgcccaggctggtctcaaaaccctggactcaagctatcctcccacctcaacctctcaaagtgttgggattacaggtgtgagccactgtatctggccttaaaattaatttcagtaatatactttacctaatccaatatattcaaaacattatttcaacatgtgatgaacacagaaaaactattattcctacattattttttatacttagtcatcaaaatctcgtgtctttaattcagcacatctcagtttggactagatacatttcaaatgctctgtagccacacatagctagtggctaccaattgaaaaactctggtactccagatgtgtgccaccacacctggctaattttttttaaaaaattgtgtagagatgaggtcttgctatgttgcccaggctggtctcaaactcttggcctcaagcagtcctatcatctcagcctcccaaaggaattacagtcatgagccaccatgcccagcccagatgagattttggtacgtgaagacagggcaggagaaagactggagggaagggggcagagaatggtatgaacaaagctgctcaggtgcagatcacttgattgggcaggagcgaggaggtggagaggtgcaggccaggattgcagaagtagatggaggtggggtatctggagagctttgaatgccaggctaaagagcacaaataatgtaagcatacttccagggggaaaaaaaaaagaatttggtcagttttttcagagtgactgtggttatgagatccactttattcagggaagaaggcagccgttctctgggtactgtaactattcctgtttctattgaaacctgttagtgctaactatcatttactgaggatttactatgaccaggcgctatgccaagcactttgtgttaataatcctgtttaattatctcagcgaaccctcatatgctgctgatgggaaggtaaaacttcggaaaacagcttggccatttttaaaagttaaatatcagccgggtgtggtggctcacgcctgtaatcccagcactttgggaggccgaggcgggcggatcacctgaggtcaggagttcgagaccagctaaccaacatggaaaaacctcgtctctactaaaaatacaaaattagccgggtatggtggcacatgcctgtaatcccactgtaatcccagctgctcgggaggctgaggcaggagaatcacttgaacccaggaggcagaggttgcagtgagctgagatcgctccgttgcactccagcctgagcaacaagagcaaaactccgtctcaaaaaaaaaaaaaaagttaaacagcaatttatcacatgacctagcagttcttctcctagatctctacccaagagaaatgaaaacaagtctacccagaaactcatacagggatgttcacagcagcattgttcatgatagcaaaaaagtggaaatgactcaaatggccatcagctgatgaatggatcaacaaaatgtggtgtattcatacaatggaatattattcagctataaaaaaggaatgaactactaatctacacaataaatagatggacctcaaaaaatatgcttacatgaaaggagcaagacacaaaggaccacatactgtgcagttccatttatgtgaaatttctaaaagaaatttctataaatttctaaaaatttatagagacagaaagtagattaatggttgcctgggactgggggacagaaggggagtgactgctaatggatacagggttttatgtgggggtgatgaaagtattctggaattgatgtgatggttgcacgactctgtaaatgtgctaaaaatcattgaattatatacataaatattggtgaattttctagtatgtaaattaaacaccaataaatctctttttaaaaattctcccaacaacttttttttttttttttttggagacagggtcttgctctgttgcccaggctggagtgcagtggcctgatcatggctcactgcagcctcaaccttcatgcttaggcaatcctcctgcctcagcctcccgagtagctggaaccacaggtacatgccaccacagctggcaaatttttttttttttttttgagatgaagtctcactctgtcgcccaggctggagtgcagtggtgcaatctcggctcactgcaagctccgcctcctgggttcacaccattctcctgcctcagcctcctgaatagctgggattacaggcgcccaccaccatacccagctaatttttttgtatttttagtagagacggggtttcaccatgttagctaggatggtctcgatttcctgacctcgtgatctgcctgcctggtcctcccaaagtgctgtgattataggattatagaccactgcgcccggcccaatttttttgtacttatttgtagagacagggtctctctatgctgcccaggcttccaaacaacttttgtgacagatactattatcatcccatttcacagttgcggaagcatcagaaaggtgaagccacccgcctaagaccgaagagctagaagcaaaagagccaaatttcaaaactgcaaagtgttcctgacctctgggctgtcctgcttcctggaaattgcttgggcagtgcgctccatcttcctggggcatttaacccacaagtttgctagcagccatgttttcaagctgcaacaactacttcttggatggtgagaattgggagagatggcagaaggcctggggaagagtggggatgctgggaaagcctcctggtgagaaagctcaggccacagctgggccagggacatccacagcagtctccaggctctgacaccccctccccaaccctgactccctcccaggggagagaataacttggctccaaagctgaggccagaatataagccagagacctgctgacctgacccccccaccctggaatctactgaatctggggccaggagcaaggaagggctgaccccaaactgaacaaatcaaaaagccaagttcccctctgagccctgcaatttttttttcttttggaccaaataaggaaggagcacctgttactttataatcatactgtaggacagcctcgagttgaaagccatgggatctggagtcttgaaaacgcggttcaagctcctatcttttctatttccaaactcagtgtcctagagcaactcactcactttccccaagcttcagtttttctatctatgaaatagacaatgatactcctgttaagagggcgcttgtaaggatttgggggaccagaggttaaattcgcttcattttagttcacctacgttacttatgttttgttacatgtcttaagttatggttttaataatccccccactcaaaaataaacaagattaaaagaataatgaaaatagttaataataagtgtcaacatttatgggcactgattttgtgctgtttcaagtgctttatacacattaactcatttatcttcataaaaagcctatgaagccattatacagatgaggaaacaggctcagagaggctaagcatgttgttcaaggtcacacagcatggaagaggcaagccgactgactccagagccttagctttgtgccagtcagaatggaaaagaactccaaaagacaccaacctggtttattcaagtgctggcatgtaaggataaggaaaagcagccatcagtttgaatgacaggcgatgggtccggagtaattagccaaatgtatgaagatttcaccatttctaaaccatcctgttatatgaccacacataccatcttcatggaagtgcagtagcatcaccatgacaactacttttgtgtttttacctctaatgtaatcgattgtattttaaaatatttttaaatgaataaaagcttttgaatttaatgttttaagtaggtaatactttcacctggttaaaaactcaaaaagctcgagaggcataaagtgaaaggcctccttctcaccccggcccctgccatcctcttctcacagtcagccaatgttgctagttttgtggggaggggaagaactgatactttttgaaagtagaaagagtgtgcttgatttgttctgaggtcacaagccataaagcccaccttactctggttgatttcttcaggtcggcctcagcctgatttcctgtaccctttgaggcactgctgcttcctgcaggtgatggttagtcccttagggagatggtcagtcccttctccctctgaactttcccctgaggcacccccttcagtacccgctatgctcctgaccacattctctctggcctctaggcctgactggttctccatcccccagaacctgcagagcctgtaaatgccagagaaatctcatcatctcacacagctgatgtggtagaggtggacccagaggtcacacctgggtggcttcaggctatatctagcctatgagattttttgttcttttttggtctgcacagtgatgtcagaattggaaatcttcacctgaaagtccaattttctgatttcacttgaaatattggcagactcagccacactgaacccatactgatgcatgatgatgacagctggagctgagcagcagttgctcccttgagaaggagcacaagctctctgggttgtatggtccccgccactctgggttggttaacatggtaggcaggatcatagtcacctccaaagatgtctgtgtcctaatccctataatttgtgaatgtactgttacacggcaagtgggaattaagtttgcagatggaatgaaggttgctatgcaggattatctaggtgggtccaatggaatcagaagggtccttaaaagtgggagagggcagcagaaaagagtcagagaaagagaggcaaccacgaaaacagggtcagagagatgccatgttgctggctttgaaaatgaaggaaggggtcacaacccaaggaatgttggcagcctccagaagctggaaaaggcaaggaaatcaattatcttccagattctccgaaagggaagtccctgcaaacaccctgattttagcccagtgagatcaggttggtttgagagcataaacttaagttgttttaagtgactaagtttgtagtcattttgttatagcagcaatagagaagtaatacagttaatatgggcccttgtaggtctccagggatgggggagtggggcacagctgtgagagctgttgtaagtgtgcaagactcatagcttaaagagctcggtaaatggccatgaatgttctaatgaataggcgtagcaggcgggttctgggcagagtagagatatgggtgacccttgctttggttttttctccctccactcttgtgacaccctctgcccagtttccttcacagccctggggcttgctgagagagccgggctgatatgtcaggccttcagcattgagtagggcaatcacttagcaagttggcaggtctcagcagctggtggaggaatctgggctctgactgaggacaggattagaggtcaaagtgggaaagtagggaataggccccagactgagtaaaaagaccaggagagctgaaggtgggggagggtcaggagcaggttctgaaagggggtgcaaagctaggcagggcccagacttgaggcctgttctaggtggtgctggctggtaggggaatgactgatggtctaggattgctgaggacaactgtgcacctgccagcactgtcctaagcctgcctctgaacactaagctgtcagcctctgtttaccttccactctcagtataacctgcattcggcctatttgttgggaggcaactgaaaaactaatttatcctgaattattcttagtgactgatagtggcttactgtgtcagatacttgccaaggagattcatgttgaagtgcatatcattttaacctaaaaagatgaagtgcatttaaggtagcagtgtctgagaaggaaaacctcatggctactggtggtggggggtggcagggaacataggatgtcacacggtggacagccttacctgctcacagggctgtacacccccaggaggtctctcatattccagcccccatgtccttaagtctctttagatttttttcacctgggctttcattacaattcttttactttccgtgtttcctgggtaagcttgtttatatatttttagcaaacattcatgtaacactatgtgccaggcaccattctaagtgctttacaaatgtttatttaggtaacagaggtactgttgcctccattttacagataaggaaactgagacacagagaggctaatttgcccaagaccacgtggctagcgagtggctacactttctgagcctcggctttcttggctgttaaattgatatgtatatacaagcgccctctgcatagcagggcttctcagacccaacactattgacattttgggctggataattctttgttgtgaggctgtcctgtgcattgcaggatgtttagcggtatccctggcctctaccacatagggtattcactgccaagagatgccagtagcaactcccactcaagctgtgacaaacctaaaatgtcccctgatcttgccaaatgtcctctgggggcaaaatcaaccctagtttagaaccactgcctaataggatcctggggaggattaaatgagctatttcatataaaataccttccggcaatcccttccccattccttccataactctatggtgagttctaactcctcagaaccctcttgttctttctgttcctctactgtttggaaaatgtgcccacctatggagactgggtgcttgagagcttcttgcaaatccaaagctgttccaggagctagacctgattccagtcctgtcatttccacagacatgctgtgggaccttggctgaagtccttcccctccttgagcctcggtttccccatgtgtacgagggggctgacccagaagctttccgaaaggtcttctcactgcaggaatcagtgactgggtgattcataccaagtgcaaattcccctcacaaagtccaaattcttccagcgacttagtcattccagggtttgaactttctcgcaaaaaccatttgaaaaattcttccagcttaaaaaaaaaaaaaaaaagctattaaaagaaagtaaaagtttcaaaaccaaatcctaggcaaacaaccctgaaaacaatacacacacatacatatacatacagcacccaaggtagctctgagaacaggatatgaaaccttgcaggccggcactaagaaatgattcacaggcctttgagatgcttctatttcaagacacagtccacccactggatctggtggctccaaaaacaaactttcagctgctgtttcttatcgcagtgtggttcgcctggccagtatccttgggtctcaagagctccagacagaagacaaggttgagtcctgtgaattccctttctgttctatttcaagcctcaagctgctggcttgtttaaagaaagtcttttgcatccaccttttggttggctgacccgagtttaaagcaacatagcctaatgggttcgtagcacagcctgcgaattcataattttagtttagcaaggcctctgtgtggctccagcaagtcctactggatcctgggctggtcattctagaagctgtctccagctaaacaatcctgcctggctttccttatacatatcaatattatacttgccctaggccaggattaagaattttagcacaaattcaaaatttcatgcttttatgtaaaatagaaatataaaagtaattcattcgatgaaatgcttactgagtgctcactatatgccaagcaccagcaatgtactggcgataaaatacagcccctgccttcaggagccacattgaacaggaaaagcagacaatctaaatatacatagtagaaacacatggaactattccctatgggaaatgccctgcataaaaagtgataccaaagttggagcaaaattgaaagaaatgcaaatgcttgtgatacggttaagtacattttcatctgtacttacccttgattttgttttagatttagaaaatcttgaactttcactgttgcttcatttgccctccaaaaatccagaatcttacagaaagggtcagtgtctggatcaaacatgtttcttatctaatttccttgccccagtttttgtttatgccatcattgctgcatggagtcctccctcctctccttgtgtatcctccaagttctgatgcaaagcccacttcctccaggaagcattcgcagacccatctggccacatcctcgctgttctctaaacacacatatctcatgctcttgacttggcctttagcctgtcctgccttatgatctctcttgtacttctgtcctgaagttttatctaacttatgaattgggggaaagaggacaggcactgacatttattaagtgttttattggtgacgggcattttgctagctctttactgtatataatgtgcctggtatgtagaagatgttcaataaatatttgttcaacgaatgcttcagtgatttggcttaaacctaacaataaccctatgagaccaattctattagtattcccattttacagataagagaactgaggcacagacaggtaaagtctgcatttgagggctttctgtcttaaaagttgaagttcagactttctcttcttctctgttgcttttttctgcaaatagatttccctgaagtgtcttgattaattaataggacatatactgtgctccctgctttatcccatctcaggcaatattacctgttctctccgttgtgagcccatatttgtatttctacagttagtttagaaaccactctgcatcaggcgtggtgactcacgcctatagtcccaacactttggggaggctgaggcgggtagattgcttgaactcaggagttcgacatcagcctgagcaacatggcaaaaccccatctctacaaaaaaatgaaaaattagccaggcctggtagtgcacatctgtggtctcagctactggggaggctgaggtgggaggatcatttgagcccaaaaggtggaggctgcattgagcgaagattgtgccactgtactccagcctgggtgacagagtgagaccccatctcaaataaaaaaaatcatcaccccaccattacctgtgccttgtctacctttcccactagaccataggcagcactaatgtagtatgactgctgtgcccctggctggcacactgctcatgctcagtgaagatttgctgagccagggtggtagtggtggtggtggtggtgataacaataggttgagtagtgatgttccccaaaagatatgtgttaatttttttttttttttttttttttttttttagatagagtcttgctctgttgcccaggctggagtgcagtggtgcgatctcggctcactgcaagctctgactcccgagttcacaccatactcctgcctcagcctcctgagtagctgggactacaggcgccggccaccatgcctggctaagtttttgtatttttagtagagacggggtttcaccgtgttagccaggatggtctagatctcctgaccatgtgatccacctgcctcggcttcccaaagtgttgggattacaggcgtgagccactgtgcccggccagatatgtgttaaattttaatacccagtacctgtgaatgggaccttatttggaaatagggtatctaaagatagaattaaggatc

SEQ ID NO: 845 - protein, 119 aa, Homo sapiens
MKALSPVRGCYEAVCCLSERSLAIARGRGKGPAAEEPLSLLDDMNHCYSRLRELVPGVPRGTQLSQVEILQRVIDYILDLQVVLAEPAPGPPDGPHLPIQTAELTPELVISNDKRSFCH

SEQ ID NO: 846 - DNA, 3197 bp, Homo sapiens
tgtagctcgcgttgaagccgcacgtccggccccgatcccggcaccatgagcttcggctcggagcactacctgtgctcctcctcctcctaccgcaaggtgttcggggatggctctcgcctgtccgcccgcctctctggggccggcggcgcgggggcttccgtcgagtcgctgtcccgcagcaatgtggcctcctcggccgcctgctcctcggcctcgtcgctcggcctcggactggcctatgcccggccgccggcgtccgacgggctggacctgagccaggcggcggcgcgcaccaacgagtacaagatcatccgctccaacgagaaggagcagctgcagggcctcaacgaccgcttcgccgtgttcatcgagaaggtgcatcagctggagacgcagaaccgcgcgttggaggccgagctggcgcgctgcgacacccacgctgagccgtcgcgcgtcgggcagctcttccagcgcgagcctcgccacctgccgcagctggaggaggccagctcggctcgctcgcaggccctgctggagcgcgacgggctggcggaggaggtgcagcggctgcgggcgcgctgcgaggaggagagccgcggacgcgaacgccgagcgcgcctgaagcggcagcagcgcgacgtggacggcgccacgctggcccgcctggacctggagaagaaggtggagtcgctgctggacgagctggccttcgtacgccaggtgcacgacgaggaggtagccgagctgctggccacgctgcagcggtcgtcgcaggccgcggccgaggtggacgtgactgtggctaaaccagacctgaccgcggctctgagggagatccgcgcccagtatgagtccctggccgctaagaacctgcagtccgcggaagaatggtacaagtccaagtttgccaacctgaacgagcaggcggcgcgcacgaccgaggccatccgggccagccgcgaccagatccacgagtatcggcgcctgcaggcgcgcaccatcgagatcgagggcctgcgcggggccaacgagtccttggagaggcagatcctggagctggaggagcggcacagtgccgaggtagctggctaccaggatagcattgggcagctggagaatgatctgaggaacaccaagagtgagatggcacgccaccttcgggaataccaggacttgctcaatgtcaaaatggctcttgacattgagatagcagcttacaggaaactgctggaaggcgaggagacacgttttagcaccagtgggttaagcatttcggggctgaatccacttcccaatccaagttacctgctcccacctagaatcctcagtgctacaacctccaaagtctcatccactgggctatcacttaagaaagaggaggaggaggaggaggcatctaaggtagcctctaagaaaacctcccagataggggaaagttttgaagaaatattagaggagacagtaatatctactaagaaaaccgagaaatcaaatatagaagaaaccaccatttcaagccaaaaaatataattccattgctttgaaaaagttaatgcttaagagggaatgatatgcatttgacttgttaaacagcctattcctgaactataacacctgccaccactataaaatgtcttcaaggcttcagtctcatatttagtattgaatacttacattctctaataagaaaaccaccccttagattgaagtaaactgcagtctggagcaatacagatgagttatctaagaatacagctttctgaccttcagctcacgttcacagtgatcgatgattcaggtgcagaggaagtacaaactaaggtgctaaatctgagatcatcgtcatttgctgtgaactgaaattaaaactattcatgctacccagccattacccagctaaataatcttactctagatacctaaaacataagatcactgccagagataaactaatggtccacacccaattccactctgatagaattatttcacaaataataggtgtttgtttaatggacacttttcacctccttcaattccatatatccttttcttctatgtaggaaaaaaatagtctagtgtagtattcttcccttttaaacacattttggttcttgctcaaaagaacttacccccattcgcgctctgctcagtgggtaaaattagatgcatgttgaccatgtctatgattcgtgtaattacttatccctgcccatttcatattctttcaattctgtaggttaaaaaaatggcagtgatgaattttaagggtttcccccaacatataaaataatgcaaagaatccctagactttaggctttcagcttacacaaatctatttaattaggaaaaaaactattaaggatgtagcttttcacctttactttagaagcacagtaaatatcccaaactgtgatgaagccgaccttagatttagtagtgtaagctagaagaagtgagtgtttctatgagtggaaaaagccaaggtgtcatttatgtgtcagttcatttgtggtgatatagaattagctttttcatccccttacccttagaatccacgtattcagcttcccactagcctaggtcataaagaggcgttgctttcactctcctatgccttttacgagtgctaagtgtaggatattttgtcaccagaacacaactgtaccgccccaaagtaaaagaaaccacttctggtcaatcaacactaccagcgtatatataagaaagacatctttctcttttctaaaagacttccctaacacttaccccatggctgcacagttggtggggtcctgccggagaggaagagacactcagaccagagaaggggtgtgcatgcgcctactcgcttgctagaagtagattctggacagtcagctcttcatctgcccaactgtgtagcatctcgattgccagtcttcatgtgtgccaaggctgatgcaggatttgttctctgtccagcagtcacttcggccagagctgaagagttgccccgtctctgttccatgtctcctttaagagctctggtgataaggacatgatgcttttactgaactttcttatcctagcacatgcttcaatagttcaaggaacttgaaaaatacttttccttacctttaccccatccctgtctttactcctcacacttactgtaagacattagtaacataataaattaaaagtcacagatctca

SEQ ID NO: 847 - protein, 494 aa, Homo sapiens
MSFGSEHYLCSSSSYRKVFGDGSRLSARLSGAGGAGASVESLSRSNVASSAACSSASSLGLGLAYARPPASDGLDLSQAAARTNEYKIIRSNEKEQLQGLNDRFAVFIEKVHQLETQNRALEAELARCDTHAEPSRVGQLFQREPRHLPQLEEASSARSQALLERDGLAEEVQRLRARCEEESRGRERRARLKRQQRDVDGATLARLDLEKKVESLLDELAFVRQVHDEEVAELLATLQRSSQAAAEVDVTVAKPDLTAALREIRAQYESLAAKNLQSAEEWYKSKFANLNEQAARTTEAIRASRDQIHEYRRLQARTIEIEGLRGANESLERQILELEERHSAEVAGYQDSIGQLENDLRNTKSEMARHLREYQDLLNVKMALDIEIAAYRKLLEGEETRFSTSGLSISGLNPLPNPSYLLPPRILSATTSKVSSTGLSLKKEEEEEEASKVASKKTSQIGESFEEILEETVISTKKTEKSNIEETTISSQKI

SEQ ID NO: 848 - DNA, 951 bp, Homo sapiens
atgacgccatcagagggcgccagagcagggaccggacgcaagttggagatgttggactcgctgttggccttgggcggcctggtgctgcttcgggattccgtggagtgggaggggcgcagtctcttgaaggcgcttgtcaagaaatctgcactgtgtggggagcaagtgcatatcctgggctgtgaagtgagcgaggaagagtttcgtgaaggttttgactctgatatcaacaatcggctggtttaccatgacttcttcagagaccctctcaactggtcaaaaactgaggaggcctttcctggggggccgctgggagccttgagagccatgtgcaagaggacagatcctgttcctgtcaccattgctctcgattcactcagctggctgctacttcgccttccctgcaccacactctgccaggtcctgcatgctgtgagccatcaggactcttgtcctggtgacagctcctcagtggggaaagtgagtgtgctgggcttgctacatgaagagcttcatggaccaggccctgtgggagctctcagcagccttgctcagactgaggtgaccctgggcggtaccatgggccaggcctcggcccacatcctgtgtcggaggccccgacagcgcccaactgaccagactcagtggttctccatccttccggacttcagcctggatctccaagaggggccctctgtagagtcccagccctactccgatcctcatatacccccggtggatcccacaactcatttgacctttaaccttcacctgtccaagaaagagagagaagccagagatagcctgatcctgcccttccagttcagttctgaaaaacagcaggctctcctgcggcctaggccagggcaggctaccagccacatcttctatgagccagatgcttatgatgacctggaccaagaagacccagatgacgacctggatatttga

SEQ ID NO: 849 - protein, 316 aa, Homo sapiens
MTPSEGARAGTGRKLEMLDSLLALGGLVLLRDSVEWEGRSLLKALVKKSALCGEQVHILGCEVSEEEFREGFDSDINNRLVYHDFFRDPLNWSKTEEAFPGGPLGALRAMCKRTDPVPVTIALDSLSWLLLRLPCTTLCQVLHAVSHQDSCPGDSSSVGKVSVLGLLHEELHGPGPVGALSSLAQTEVTLGGTMGQASAHILCRRPRQRPTDQTQWFSILPDFSLDLQEGPSVESQPYSDPHIPPVDPTTHLTFNLHLSKKEREARDSLILPFQFSSEKQQALLRPRPGQATSHIFYEPDAYDDLDQEDPDDDLDI

SEQ ID NO: 850 - DNA, 605 bp, Homo sapiens
gcagttggtccttagtactgcggccgtgtgggtgagttggctgtcggtgagttgggtgccggtggagtcgtgttggtcctcagaatccccgcgtaccgctgcctcctcctaccctcgccatgtttcttacccggtctgagtacgacaggggcgtgaatactttttctcccgaagaagattatttcaagtggaatatgccattgaggctatcaagcttggttctacagccattgggatccagacatcagagggtgtgtgcctagctgtggagaagagaattacttccccactgatggagcccagcagcattgagaaaattgtagagattgatgctcacataggttgtgccatgagtgggctaattgctgatgctaagactttaattgataaagccagagtggagacacagaaccactggttcacctacaatgagacaatgacagtggagagtgtgacccaagctgtgtccaatctggctttgcagttttggagaagaagatgcagatccaggtgccatgtctcgtccctttggagtagcattattatttggaggagttgatgagaaaggacccagcttgtttcatatggacccatctgggaccttt

SEQ ID NO: 851 - DNA, 668 bp, Homo sapiens
gggggctgagtttgtggcrcgcttagtgatgggatggccctgtgcaggacgccgacacgaaaagatgaagagttcaatccgtgctgtctgaactcacagtgtagcaggcgagatagacgggaagatcggtagggtgggagatgccggaaaggcttcccgtgagactggataagaaatcaaaaatctggtgaaattgccggcaagagggagttaaggacattccaggcagaggcaagtccagattcctaagatgaggacacagcatcctgggccactgtcactaatacaaatttgcctctggagggactctacggaagataattcccctgaaatttggagagttgaattaagctaggactgattctggctggaatttgtggtggctacgtaccctagagggcctcaaggaaacccacggttcaagacagccctgacagattctggagtctagaacagaaatggatttgaacatgggcaaggccaccacccagttcacggcctgtgtacagcaaagattacgttacagcctgagagctaagcctggaagctctttcatccatccgtttgtccatctatccatccatctgctcatccatccctccatctgctcaacaaacgttagagaatcaatccttgtgtcagatactggggctgcctcaaggagcttt

SEQ ID NO: 852 - DNA, 1374 bp, Homo sapiens
attgcggcggcgccagagctgctggagcgctcggggtccccgggcggcggcggcggcgcagaggaggaggcaggcggcggccccggtggctcccccccggacggtgcgcggcccggcccgtctcgcgaactcgcggtggtcgcgcggccccgcgctgctccgaccccgggcccctccgccgccgccatggctcggccgctagtgcccagctcgcagaaggcgctgctgctggagctcaaggggctgcaggaagagccggtcgagggattccgcgtgacactggtggacgagggcgatctatacaactgggaggtggccattttcgggccccccaacacctactacgagggcggctacttcaaggcgcgcctcaagttccccatcgactacccatactctccaccagcctttcggttcctgaccaagatgtggcaccctaacatctacgagacgggggacgtgtgtatctccatcctccacccgccggtggacgacccccagagcggggagctgccctcagagaggtggaaccccacgcagaacgtcaggaccattctcctgagtgtgatctccctcctgaacgagcccaacaccttctcgcccgcaaacgtggacgcctccgtgatgtacaggaagtggaaagagagcaaggggaaggatcgggagtacacagacatcatccggaagcaggtcctggggaccaaggtggacgcggagcgtgacggcgtgaaggtgcccaccacgctggccgagtactgcgtgaagaccaaggcgccggcgcccgacgagggctcagacctcttctacgacgactactacgaggacggcgaggtggaggaggaggccgacagctgcttcggggacgatgaggatgactctggcacggaggagtcctgacaccaccagaataaacttgccgagtttacctcactagggccggacccgtggctccttagacgacagactacctcacggaggttttgtgctggtccccgtctcctctggttgtttcgttttggctttttctccctccccatgtctgttctgggttttcacgtgcttcagagaagaggggctgccccaccgccactcacgtcactcggggctcggtggacgggcccagggtgggagcggccggcccacctgtcccctcgggaggggagctgagcccgacttctaccggggtcccccagcttccggactggccgcaccccggaggagccacgggggcgctgctgggaacgtgggcggggggccgtttcctgacactaccagcctgggaggcccaggtgtagcggtccgaggggcccggtcctgcctgtcagctccaggtcctggagccacgtccagcactgagtggacggattcaccaat

SEQ ID NO: 853 - protein, 298 aa, Homo sapiens
IAAAPELLERSGSPGGGGGAEEEAGGGPGGSPPDGARPGPSRELAVVARPRAAPTPGPSAAAMARPLVPSSQKALLLELKGLQEEPVEGFRVTLVDEGDLYNWEVAIFGPPNTYYEGGYFKARLKFPIDYPYSPPAFRFLTKMWHPNIYETGDVCISILHPPVDDPQSGELPSERWNPTQNVRTILLSVISLLNEPNTFSPANVDASVMYRKWKESKGKDREYTDIIRKQVLGTKVDAERDGVKVPTTLAEYCVKTKAPAPDEGSDLFYDDYYEDGEVEEEADSCFGDDEDDSGTEES

SEQ ID NO: 854 - DNA, 303 bp, Homo sapiens
  misc_feature (27)..(27): n is a, c, g, or t
ttcctgctacatgggcatttgcatcanaaacaagtgcagcttctaatcctttcaattgaaccactgcattggaatcagtgacaaattttttgatcaatcctaaaaatttggaccactctgggctcttttcatcctttattttctggaagatcttcagggcctcttcatacccacttaaccttgctttccacagcttgtgttcacatttctgatcaactggcagtttcaaccactcactgtcatctcccattgtgcttccaggttttccttagaattaagagtatttcctcagctgggtcagaa

SEQ ID NO: 855 - DNA, 530 bp, Homo sapiens
atttttccactagctgtccaacatcattccaggtatactttctattaggtcttgaaaagtcaggatttaattctaactgattggcaagggagtagcatgacctagatagtccaagagtctgcaatggggtaaaatgaatcatgttgtagcctgattcttttgcaaccctaagtctgctttcccattcatcaaaaggtcccaaacacttagctaaaaatgtctgaagagtaacacagtccaagggtagcacatgattatcagcaccaacacgtaaaatggggtccacaactatgtaacctccaccacttttctcatttccttgaaggaaataatactgaaatgaacccgattgttgcagattaagtttacagtatttatcagaatcatcttctctttctgttggattttcccaatcctgagaacggaatttttctctattaaatgtttctccaggaaatgggtaatttgtatacacggtaactgcttttccctgtaaagttgggcctaatcggaactgtagctcataccct

SEQ ID NO: 856 - DNA, 759 bp, Homo sapiens
atgcggggccagggccgcaaggagagtttgtccgattcccgagacctggacggctcctacgaccagctcacgggccaccctccagggcccactaaaaaagcgctgaagcagcgattcctcaagctgctgccgtgctgcgggccccaagccctgccctcagtcagtgaaaacagcgtggacgatgaatttgaattgtccaccgtgtgtcaccggcctgagggtctggagcagctgcaggagcaaaccaaattcacgcgcaaggagttgcaggtcctgtaccggggcttcaagaacgaatgtcccagcggaattgtcaatgaggagaacttcaagcagatttactcccagttctttcctcaaggagactccagcacctatgccacttttctcttcaatgcctttgacaccaaccatgatggctcggtcagttttgaggactttgtggctggtttgtccgtgattcttcggggaactgtagatgacaggcttaattgggccttcaacctgtatgaccttaacaaggacggctgcatcaccaaggaggaaatgcttgacatcatgaagtccatctatgacatgatgggcaagtacacgtaccctgcactccgggaggaggccccaagggaacacgtggagagcttcttccagaagatggacagaaacaaggatggtgtggtgaccattgaggaattcattgagtcttgtcaaaaggatgagaacatcatgaggtccatgcagctctttgacaatgtcatctag

SEQ ID NO: 857 - protein, 252 aa, Homo sapiens
MRGQGRKESLSDSRDLDGSYDQLTGHPPGPTKKALKQRFLKLLPCCGPQALPSVSENSVDDEFELSTVCHRPEGLEQLQEQTKFTRKELQVLYRGFKNECPSGIVNEENFKQIYSQFFPQGDSSTYATFLFNAFDTNHDGSVSFEDFVAGLSVILRGTVDDRLNWAFNLYDLNKDGCITKEEMLDIMKSIYDMMGKYTYPALREEAPREHVESFFQKMDRNKDGVVTIEEFIESCQKDENIMRSMQLFDNVI

SEQ ID NO: 858 - DNA, 271 bp, Homo sapiens
ttttttttttttttttaaaatgaataacatactttatttaatccaatagagccaacatattatcattgcaatacacaaaggaaaagttattagtgagatattttacattattttttgaagtaggtatttgaaatctggtatatattttatacattgagcacatctcaattcagactaggcatgtatgaagtactcaacagacattggtggctcctggataccatatgggacagccagtgccattctcatccttgatatttgtttctaccct

SEQ ID NO: 859 - DNA, 613 bp, Homo sapiens
ggtagcgaggtctgggtggcgacttcggcacgaggctcagcttccccaggagcaagacctctgagcccgccaagcgcggccgcacggccctcggcagcgatggcactgaaggactacgcgctagagaaggaaaaggttaagaagttcttacaagagttctaccaggatgatgaactcgggaagaagcagttcaagtatgggaaccagttggttcggctggctcatcgggaacaggtggctctgtatgtggacctggacgacgtagccgaggatgaccccgagttggtggactcaatttgtgagaatgccaggcgctacgcgaagctctttgctgatgccgtacaagagctgctgcctcagtacaaggagagggaagtggtaaataaagatgtcctggacgtttacattgagcatcggctaatgatggagcagcggagtcgggaccctgggatggtccgaagcccccagaaccagtaccctgctgaactcatgcgcagatttgagctgtattttcaaggccctagcagcaacaagcctcgtgtgatccgggaagtgcgggctgactctgtggggaagttggtaactgtgcgtggaatcgtcactcgtgtctctg

SEQ ID NO: 860 - DNA, 739 bp, Homo sapiens
atcggctaggtagcgaggctgggtggtagagcgtggaggttcttgtctcccctggtttgtgaagtgcggaaaaccagaggcgcagtcatgtcgggattcgacgatcctggcattttctacagcgacagcttcgggggcgacgcccaggccgacgaggggcaggcccgcaaatcgcagctgcagaggcgcttcaaggagttcctgcggcagtaccgagtgggcaccgaccgcacgggcttcaccttcaaatacagggatgaactcaagcggcattacaacctgggggagtactggattgaggtggagatggaggatctggccagctttgatgaggacctggccgactacttgtacaagcagccagccgagcacctgcagctgctggaggaagctgccaaggaggtagctgatgaggtgacccggccccggccttctggggaggaggtgctccaggacatccaggtcatgctcaagtcggacgccagcccttccagcattcgtagcctgaagtcggacatgatgtcacacctggtgaagatccctggcatcatcatcgcggcctctgcggtccgtgccaaaggccacccgcatctctatccagtgccgcagactgccgcaacaccctcaccaacattgccatgcgcctggcctcgagggctatgcctgccaggaagtgcaacacagatcaggctgggcgcccaatgccattggaccgtacttcatcatgcccgacaatgca

SEQ ID NO: 861 - DNA, 10211 bp, Homo sapiens
gagaggtcgttttcccgtccccgagagcaagtttatttacaaatgttggagtaataaagaaggcagaacaaaatgagctgggctttggaagaatggaaagaagggctgcctacaagagctcttcagaaaattcaagagcttgaaggacagcttgacaaactgaagaaggaaaagcagcaaaggcagtttcagcttgacagtctcgaggctgcgcctcagaagcaaacacagaaggttgaaaatgaaaaaaccgagggtacaaacctgaaaagggagaatcaaagattgatggaaatatgtgaaagtctggagaaaactaagcagaagatttctcatgaacttcaagtcaaggagtcacaagtgaatttccaggaaggacaactgaattcaggcaaaaaacaaatagaaaaactggaacaggaacttaaaaggtgtaaatctgagcttgaaagaagccaacaagctgcgcagtctgcagatgtctctctgaatccatgcaatacaccacaaaaaatttttacaactccactaacaccaagtcaatattatagtggttccaagtatgaagatctaaaagaaaaatataataaagaggttgaagaacgaaaaagattagaggcagaggttaaagccttgcaggctaaaaaagcaagccagactcttccacaagccaccatgaatcaccgcgacattgcccggcatcaggcttcatcatctgtgttctcatggcagcaagagaagaccccaagtcatctttcatctaattctcaaagaactccaattaggagagatttctctgcatcttacttttctggggaacaagaggtgactccaagtcgatcaactttgcaaatagggaaaagagatgctaatagcagtttctttgacaattctagcagtcctcatcttttggatcaattaaaagcgcagaatcaagagctaagaaacaagattaatgagttggaactacgcctgcaaggacatgaaaaagaaatgaaaggccaagtgaataagtttcaagaactccaactccaactggagaaagcaaaagtggaattaattgaaaaagagaaagttttgaacaaatgtagggatgaactagtgagaacaacagcacaatacgaccaggcgtcaaccaagtatactgcattggaacaaaaactgaaaaaattgacggaagatttgagttgtcagcgacaaaatgcagaaagtgccagatgttctctggaacagaaaattaaggaaaaagaaaaggagtttcaagaggagctctcccgtcaacagcgttctttccaaacactggaccaggagtgcatccagatgaaggccagactcacccaggagttacagcaagccaagaatatgcacaacgtcctgcaggctgaactggataaactcacatcagtaaagcaacagctagaaaacaatttggaagagtttaagcaaaagttgtgcagagctgaacaggcgttccaggcgagtcagatcaaggagaatgagctgaggagaagcatggaggaaatgaagaaggaaaacaacctccttaagagtcactctgagcaaaaggccagagaagtctgccacctggaggcagaactcaagaacatcaaacagtgtttaaatcagagccagaattttgcagaagaaatgaaagcgaagaatacctctcaggaaaccatgttaagagatcttcaagaaaaaataaatcagcaagaaaactccttgactttagaaaaactgaagcttgctgtggctgatctggaaaagcagcgagattgttctcaagaccttttgaagaaaagagaacatcacattgaacaacttaatgataagttaagcaagacagagaaagagtccaaagccttgctgagtgctttagagttaaaaaagaaagaatatgaattgaaagaagagaaaactctgttttcttgttggaaaagtgaaaacgaaaaacttttaactcagatggaatcagaaaaggaaaacttgcagagtaaaattaatcacttggaaacttgtctgaagacacagcaaataaaaagtcatgaatacaacgagagagtaagaacgctggagatggacagagaaaacctaagtgtcgagatcagaaaccttcacaacgtgttagacagtaagtcagtggaggtagagacccagaaactagcttatatggagctacagcagaaagctgagttctcagatcagaaacatcagaaggaaatagaaaatatgtgtttgaagacttctcagcttactgggcaagttgaagatctagaacacaagcttcagttactgtcaaatgaaataatggacaaagaccggtgttaccaagacttgcatgccgaatatgagagcctcagggatctgctaaaatccaaagatgcttctctggtgacaaatgaagatcatcagagaagtcttttggcttttgatcagcagcctgccatgcatcattcctttgcaaatataattggagaacaaggaagcatgccttcagagaggagtgaatgtcgtttagaagcagaccaaagtccgaaaaattctgccatcctacaaaatagagttgattcacttgaattttcattagagtctcaaaaacagatgaactcagacctgcaaaagcagtgtgaagagttggtgcaaatcaaaggagaaatagaagaaaatctcatgaaagcagaacagatgcatcaaagttttgtggctgaaacaagtcagcgcattagtaagttacaggaagacacttctgctcaccagaatgttgttgctgaaaccttaagtgcccttgagaacaaggaaaaagagctgcaacttttaaatgataaggtagaaactgagcaggcagagattcaagaattaaaaaagagcaaccatctacttgaagactctctaaaggagctacaacttttatccgaaaccctaagcttggagaagaaagaaatgagttccatcatttctctaaataaaagggaaattgaagagctgacccaagagaatgggactcttaaggaaattaatgcatccttaaatcaagagaagatgaacttaatccagaaaagtgagagttttgcaaactatatagatgaaagggagaaaagcatttcagagttatctgatcagtacaagcaagaaaaacttattttactacaaagatgtgaagaaaccggaaatgcatatgaggatcttagtcaaaaatacaaagcagcacaggaaaagaattctaaattagaatgcttgctaaatgaatgcactagtctttgtgaaaataggaaaaatgagttggaacagctaaaggaagcatttgcaaaggaacaccaagaattcttaacaaaattagcatttgctgaagaaagaaatcagaatctgatgctagagttggagacagtgcagcaagctctgagatctgagatgacagataaccaaaacaattctaagagcgaggctggtggtttaaagcaagaaatcatgactttaaaggaagaacaaaacaaaatgcaaaaggaagttaatgacttattacaagagaatgaacagctgatgaaggtaatgaagactaaacatgaatgtcaaaatctagaatcagaaccaattaggaactctgtgaaagaaagagagagtgagagaaatcaatgtaattttaaacctcagatggatcttgaagttaaagaaatttctctagatagttataatgcgcagttggtgcaattagaagctatgctaagaaataaggaattaaaacttcaggaaagtgagaaggagaaggagtgcctgcagcatgaattacagacaattagaggagatcttgaaaccagcaatttgcaagacatgcagtcacaagaaattagtggccttaaagactgtgaaatagatgcggaagaaaagtatatttcagggcctcatgagttgtcaacaagtcaaaacgacaatgcacaccttcagtgctctctgcaaacaacaatgaacaagctgaatgagctagagaaaatatgtgaaatactgcaggctgaaaagtatgaactcgtaactgagctgaatgattcaaggtcagaatgtatcacagcaactaggaaaatggcagaagaggtagggaaactactaaatgaagttaaaatattaaatgatgacagtggtcttctccatggtgagttagtggaagacataccaggaggtgaatttggtgaacaaccaaatgaacagcaccctgtgtctttggctccattggacgagagtaattcctacgagcacttgacattgtcagacaaagaagttcaaatgcactttgccgaattgcaagagaaattcttatctttacaaagtgaacacaaaattttacatgatcagcactgtcagatgagctctaaaatgtcagagctgcagacctatgttgactcattaaaggccgaaaatttggtcttgtcaacgaatctgagaaactttcaaggtgacttggtgaaggagatgcagctgggcttggaggaggggctcgttccatccctgtcatcctcttgtgtgcctgacagctctagtcttagcagtttgggagactcctccttttacagagctcttttagaacagacaggagatatgtctcttttgagtaatttagaaggggctgtttcagcaaaccagtgcagtgtagatgaagtattttgcagcagtctgcaggaggagaatctgaccaggaaagaaaccccttcggccccagcgaagggtgttgaagagcttgagtccctctgtgaggtgtaccggcagtccctcgagaagctagaagagaaaatggaaagtcaagggattatgaaaaataaggaaattcaagagctcgagcagttattaagttctgaaaggcaagagcttgactgccttaggaagcagtatttgtcagaaaatgaacagtggcaacagaagctgacaagcgtgactctggagatggagtccaagttggcggcagaaaagaaacagacggaacaactgtcacttgagctggaagtagcacgactccagctacaaggtctggacttaagttctcggtctttgcttggcatcgacacagaagatgctattcaaggccgaaatgagagctgtgacatatcaaaagaacatacttcagaaactacagaaagaacaccaaagcatgatgttcatcagatttgtgataaagatgctcagcaggacctcaatctagacattgagaaaataactgagactggtgcattgaaacccacaggagagtgctctggggaacagtccccagataccaattatgagcctccaggggaagataaaacccagggctcttcagaatgcatttctgaattgtcattttctggtcctaatgctttggtacctatggatttcctggggaatcaggaagatatccataatcttcaactgcgggtaaaagagacatcaaatgagaatttgagattacttcatgtgatagaggaccgtgacagaaaagttgaaagtttgctaaatgaaatgaaagaattagactcaaaactccatttacaggaggtacaactaatgaccaaaattgaagcatgcatagaattggaaaaaatagttggggaacttaagaaagaaaactcagatttaagtgaaaaattggaatatttttcttgtgatcaccaggagttactccagagagtagaaacttctgaaggcctcaattctgatttagaaatgcatgcagataaatcatcacgtgaagatattggagataatgtggccaaggtgaatgacagctggaaggagagatttcttgatgtggaaaatgagctgagtaggatcagatcggagaaagctagcattgagcatgaagccctctacctggaggctgacttagaggtagttcaaacagagaagctatgtttagaaaaagacaatgaaaataagcagaaggttattgtctgccttgaagaagaactctcagtggtcacaagtgagagaaaccagcttcgtggagaattagatactatgtcaaaaaaaaccacggcactggatcagttgtctgaaaaaatgaaggagaaaacacaagagcttgagtctcatcaaagtgagtgtctccattgcattcaggtggcagaggcagaggtgaaggaaaagacggaactccttcagactttgtcctctgatgtgagtgagctgttaaaagacaaaactcatctccaggaaaagctgcagagtttggaaaaggactcacaggcactgtctttgacaaaatgtgagctggaaaaccaaattgcacaactgaataaagagaaagaattgcttgtcaaggaatctgaaagcctgcaggccagactgagtgaatcagattatgaaaagctgaatgtctccaaggccttggaggccgcactggtggagaaaggtgagttcgcattgaggctgagctcaacacaggaggaagtgcatcagctgagaagaggcatcgagaaactgagagttcgcattgaggccgatgaaaagaagcagctgcacatcgcagagaaactgaaagaacgcgagcgggagaatgattcacttaaggataaagttgagaaccttgaaagggaattgcagatgtcagaagaaaaccaggagctagtgattcttgatgccgagaattccaaagcagaagtagagactctaaaaacacaaatagaagagatggccagaagcctgaaagtttttgaattagaccttgtcacgttaaggtctgaaaaagaaaatctgacaaaacaaatacaagaaaaacaaggtcagttgtcagaactagacaagttactctcttcatttaaaagtctgttagaagaaaaggagcaagcagagatacagatcaaagaagaatctaaaactgcagtggagatgcttcagaatcagttaaaggagctaaatgaggcagtagcagccttgtgtggtgaccaagaaattatgaaggccacagaacagagtctagacccaccaatagaggaagagcatcagctgagaaatagcattgaaaagctgagagcccgcctagaagctgatgaaaagaagcagctctgtgtcttacaacaactgaaggaaagtgagcatcatgcagatttacttaagggtagagtggagaaccttgaaagagagctagagatagccaggacaaaccaagagcatgcagctcttgaggcagagaattccaaaggagaggtagagaccctaaaagcaaaaatagaagggatgacccaaagtctgagaggtctggaattagatgttgttactataaggtcagaaaaagaaaatctgacaaatgaattacaaaaagagcaagagcgaatatctgaattagaaataataaattcatcatttgaaaatattttgcaagaaaaagagcaagagaaagtacagatgaaagaaaaatcaagcactgccatggagatgcttcaaacacaattaaaagagctcaatgagagagtggcagccctgcataatgaccaagaagcctgtaaggccaaagagcagaatcttagtagtcaagtagagtgtcttgaacttgagaaggctcagttgctacaaggccttgatgaggccaaaaataattatattgttttgcaatcttcagtgaatggcctcattcaagaagtagaagatggcaagcagaaactggagaagaaggatgaagaaatcagtagactgaaaaatcaaattcaagaccaagagcagcttgtctctaaactgtcccaggtggaaggagagcaccaactttggaaggagcaaaacttagaactgagaaatctgacagtggaattggagcagaagatccaagtgctacaatccaaaaatgcctctttgcaggacacattagaagtgctgcagagttcttacaagaatctagagaatgagcttgaattgacaaaaatggacaaaatgtcctttgttgaaaaagtaaacaaaatgactgcaaaggaaactgagctgcagagggaaatgcatgagatggcacagaaaacagcagagctgcaagaagaactcagtggagagaaaaataggctagctggagagttgcagttactgttggaagaaataaagagcagcaaagatcaattgaaggagctcacactagaaaatagtgaattgaagaagagcctagattgcatgcacaaagaccaggtggaaaaggaagggaaagtgagagaggaaatagctgaatatcagctacggcttcatgaagctgaaaagaaacaccaggctttgcttttggacacaaacaaacagtatgaagtagaaatccagacataccgagagaaattgacttctaaagaagaatgtctcagttcacagaagctggagatagaccttttaaagtctagtaaagaagagctcaataattcattgaaagctactactcagattttggaagaattgaagaaaaccaagatggacaatctaaaatatgtaaatcagttgaagaaggaaaatgaacgtgcccaggggaaaatgaagttgttgatcaaatcctgtaaacagctggaagaggaaaaggagatactgcagaaagaactctctcaacttcaagctgcacaggagaagcagaaaacaggtactgttatggataccaaggtcgatgaattaacaactgagatcaaagaactgaaagaaactcttgaagaaaaaaccaaggaggcagatgaatacttggataagtactgttccttgcttataagccatgaaaagttagagaaagctaaagagatgttagagacacaagtggcccatctgtgttcacagcaatctaaacaagattcccgagggtctcctttgctaggtccagttgttccaggaccatctccaatcccttctgttactgaaaagaggttatcatctggccaaaataaagcttcaggcaagaggcaaagatccagtggaatatgggagaatggtggaggaccaacacctgctaccccagagagcttttctaaaaaaagcaagaaagcagtcatgagtggtattcaccctgcagaagacacggaaggtactgagtttgagccagagggacttccagaagttgtaaagaaagggtttgctgacatcccgacaggaaagactagcccatatatcctgcgaagaacaaccatggcaactcggaccagcccccgcctggctgcacagaagttagcgctatccccactgagtctcggcaaagaaaatcttgcagagtcctccaaaccaacagctggtggcagcagatcacaaaaggtcaaagttgctcagcggagcccagtagattcaggcaccatcctccgagaacccaccacgaaatccgtcccagtcaataatcttcctgagagaagtccgactgacagccccagagagggcctgagggtcaagcgaggccgacttgtccccagccccaaagctggactggagtccaagggcagtgagaactgtaaggtccagtgaaggcactttgtgtgtcagtacccctgggaggtgccagtcattgaatagataaggctgtgcctacaggacttctctttagtcagggcatgctttattagtgaggagaaaacaattccttagaagtcttaaatatattgtactctttagatctcccatgtgtaggtattgaaaaagtttggaagcactgatcacctgttagcattgccattcctctactgcaatgtaaatagtataaagctatgtatataaagctttttggtaatatgttacaattaaaatgacaagcactatatcacaatctctgtttgtatgtgggttttacactaaaaaaatgcaaaacacattttattcttctaattaacagctcctaggaaaatgtagacttttgctttatgatattctatctgtagtatgaggcatggaatagttttgtatcgggaatttctcagagctgagtaaaatgaaggaaaagcatgttatgtgtttttaaggaaaatgtgcacacatatacatgtaggagtgtttatctttctcttacaatctgttttagacatctttgcttatgaaacctgtacatatgtgtgtgtgggtatgtgtttatttccagtgagggctgcaggcttcctagaggtgtgctataccatgcgtctgtcgttgtgcttttttctgtttttagaccaattttttacagttctttggtaagcattgtcgtatctggtgatggattaacatatagcctttgttttctaataaaatagtcgccttcgttttctgtaaaaaaaaaaaaaaaaaaaaaa

SEQ ID NO: 862 - protein, 3113 aa, Homo sapiens
MSWALEEWKEGLPTRALQKIQELEGQLDKLKKEKQQRQFQLDSLEAAPQKQTQKVENEKTEGTNLKRENQRLMEICESLEKTKQKISHELQVKESQVNFQEGQLNSGKKQIEKLEQELKRCKSELERSQQAAQSADVSLNPCNTPQKIFTTPLTPSQYYSGSKYEDLKEKYNKEVEERKRLEAEVKALQAKKASQTLPQATMNHRDIARHQASSSVFSWQQEKTPSHLSSNSQRTPIRRDFSASYFSGEQEVTPSRSTLQIGKRDANSSFFDNSSSPHLLDQLKAQNQELRNKINELELRLQGHEKEMKGQVNKFQELQLQLEKAKVELIEKEKVLNKCRDELVRTTAQYDQASTKYTALEQKLKKLTEDLSCQRQNAESARCSLEQKIKEKEKEFQEELSRQQRSFQTLDQECIQMKARLTQELQQAKNMHNVLQAELDKLTSVKQQLENNLEEFKQKLCRAEQAFQASQIKENELRRSMEEMKKENNLLKSHSEQKAREVCHLEAELKNIKQCLNQSQNFAEEMKAKNTSQETMLRDLQEKINQQENSLTLEKLKLAVADLEKQRDCSQDLLKKREHHIEQLNDKLSKTEKESKALLSALELKKKEYELKEEKTLFSCWKSENEKLLTQMESEKENLQSKINHLETCLKTQQIKSHEYNERVRTLEMDRENLSVEIRNLHNVLDSKSVEVETQKLAYMELQQKAEFSDQKHQKEIENMCLKTSQLTGQVEDLEHKLQLLSNEIMDKDRCYQDLHAEYESLRDLLKSKDASLVTNEDHQRSLLAFDQQPAMHHSFANIIGEQGSMPSERSECRLEADQSPKNSAILQNRVDSLEFSLESQKQMNSDLQKQCEELVQIKGEIEENLMKAEQMHQSFVAETSQRISKLQEDTSAHQNVVAETLSALENKEKELQLLNDKVETEQAEIQELKKSNHLLEDSLKELQLLSETLSLEKKEMSSIISLNKREIEELTQENGTLKEINASLNQEKMNLIQKSESFANYIDEREKSISELSDQYKQEKLILLQRCEETGNAYEDLSQKYKAAQEKNSKLECLLNECTSLCENRKNELEQLKEAFAKEHQEFLTKLAFAEERNQNLMLELETVQQALRSEMTDNQNNSKSEAGGLKQEIMTLKEEQNKMQKEVNDLLQENEQLMKVMKTKHECQNLESEPIRNSVKERESERNQCNFKPQMDLEVKEISLDSYNAQLVQLEAMLRNKELKLQESEKEKECLQHELQTIRGDLETSNLQDMQSQEISGLKDCEIDAEEKYISGPHELSTSQNDNAHLQCSLQTTMNKLNELEKICEILQAEKYELVTELNDSRSECITATRKMAEEVGKLLNEVKILNDDSGLLHGELVEDIPGGEFGEQPNEQHPVSLAPLDESNSYEHLTLSDKEVQMHFAELQEKFLSLQSEHKILHDQHCQMSSKMSELQTYVDSLKAENLVLSTNLRNFQGDLVKEMQLGLEEGLVPSLSSSCVPDSSSLSSLGDSSFYRALLEQTGDMSLLSNLEGAVSANQCSVDEVFCSSLQEENLTRKETPSAPAKGVEELESLCEVYRQSLEKLEEKMESQGIMKNKEIQELEQLLSSERQELDCLRKQYLSENEQWQQKLTSVTLEMESKLAAEKKQTEQLSLELEVARLQLQGLDLSSRSLLGIDTEDAIQGRNESCDISKEHTSETTERTPKHDVHQICDKDAQQDLNLDIEKITETGALKPTGECSGEQSPDTNYEPPGEDKTQGSSECISELSFSGPNALVPMDFLGNQEDIHNLQLRVKETSNENLRLLHVIEDRDRKVESLLNEMKELDSKLHLQEVQLMTKIEACIELEKIVGELKKENSDLSEKLEYFSCDHQELLQRVETSEGLNSDLEMHADKSSREDIGDNVAKVNDSWKERFLDVENELSRIRSEKASIEHEALYLEADLEVVQTEKLCLEKDNENKQKVIVCLEEELSVVTSERNQLRGELDTMSKKTTALDQLSEKMKEKTQELESHQSECLHCIQVAEAEVKEKTELLQTLSSDVSELLKDKTHLQEKLQSLEKDSQALSLTKCELENQIAQLNKEKELLVKESESLQARLSESDYEKLNVSKALEAALVEKGEFALRLSSTQEEVHQLRRGIEKLRVRIEADEKKQLHIAEKLKERERENDSLKDKVENLERELQMSEENQELVILDAENSKAEVETLKTQIEEMARSLKVFELDLVTLRSEKENLTKQIQEKQGQLSELDKLLSSFKSLLEEKEQAEIQIKEESKTAVEMLQNQLKELNEAVAALCGDQEIMKATEQSLDPPIEEEHQLRNSIEKLRARLEADEKKQLCVLQQLKESEHHADLLKGRVENLERELEIARTNQEHAALEAENSKGEVETLKAKIEGMTQSLRGLELDVVTIRSEKENLTNELQKEQERISELEIINSSFENILQEKEQEKVQMKEKSSTAMEMLQTQLKELNERVAALHNDQEACKAKEQNLSSQVECLELEKAQLLQGLDEAKNNYIVLQSSVNGLIQEVEDGKQKLEKKDEEISRLKNQIQDQEQLVSKLSQVEGEHQLWKEQNLELRNLTVELEQKIQVLQSKNASLQDTLEVLQSSYKNLENELELTKMDKMSFVEKVNKMTAKETELQREMHEMAQKTAELQEELSGEKNRLAGELQLLLEEIKSSKDQLKELTLENSELKKSLDCMHKDQVEKEGKVREEIAEYQLRLHEAEKKHQALLLDTNKQYEVEIQTYREKLTSKEECLSSQKLEIDLLKSSKEELNNSLKATTQILEELKKTKMDNLKYVNQLKKENERAQGKMKLLIKSCKQLEEEKEILQKELSQLQAAQEKQKTGTVMDTKVDELTTEIKELKETLEEKTKEADEYLDKYCSLLISHEKLEKAKEMLETQVAHLCSQQSKQDSRGSPLLGPVVPGPSPIPSVTEKRLSSGQNKASGKRQRSSGIWENGGGPTPATPESFSKKSKKAVMSGIHPAEDTEGTEFEPEGLPEVVKKGFADIPTGKTSPYILRRTTMATRTSPRLAAQKLALSPLSLGKENLAESSKPTAGGSRSQKVKVAQRSPVDSGTILREPTTKSVPVNNLPERSPTDSPREGLRVKRGRLVPSPKAGLESKGSENCKVQ

SEQ ID NO: 863 - DNA, 477 bp, Homo sapiens
  misc_feature (437)..(437): n is a, c, g, or t
gactagttctagaccgcgagcggccgcccgcgcctcctcggccgcctgtcgggcatgaaaaccaaattctgcaccgggggcgaggcggagccctcgccgctcgggctgctgctgagctgcggtagcggcagcgcggccccggcgcccggcgtggggcagcagcgcgacgccgccagcgacctcgagtccaagcagctgggcggccaacagccgccgctcgcgctgccccctccgccgccgctgccgctgccgctgccgctgccccagcccccgccgccgcagccgcccgcagacgagcagccggagccccggacgcggcgcagggcctatctgtggtgcaaggagttcctgcccggcgcctggcggggcctccgcgaggacgagttccacatcagtgtcatcagaggcggccttagcaacatgctgttccagtgctncctactgacaccacagccacccttggtgatgagcctcgga

SEQ ID NO: 864 - DNA, 538 bp, Homo sapiens
acgaggctgggtggtgaatcggccgaggggggagggccgttggccggggcctgcggtacgccgcttcagtgagggacgccactgcggccacccggcttgctgccttcctgggcgccactcccccaggcgacccgacgcgacgcgccagtagcgcagcaccgattcctctcgggctcttgggcgctgctctgagcagcgtcaccctttacaccagaaagctggcgggcactatggggaaaaaacaaaacaagaagaaagtggaggaggtgctagaagaggaggaagaggaatatgtggtggaaaaagttctcgaccgtcgagtggtaaagggcaaagtggagtacctcctaaagtggaagggattctcagatgaggacaacacatgggagccagaagagaacctggattgccccgacctcattgctgagtttctgcagtcacagaaaacagcacatgagacagataaatcagagggaggcaagcgcaaagctgattctgattctgaagataagggagaggagagcaaaccaaagaagaa

SEQ ID NO: 865 - DNA, 187 bp, Homo sapiens
  misc_feature (84)..(84): n is a, c, g, or t
  misc_feature (92)..(92): n is a, c, g, or t
  misc_feature (95)..(95): n is a, c, g, or t
  misc_feature (130)..(130): n is a, c, g, or t
gtttttggcgctcggtccggtcgcgtccgacacccggtgggactcagaaggcagtggagccccggcggcggcggcggcggcgcncgggggcnacncgcgggaacaacgcgagtcggcgcgcgggacgaanaataatcatgggccagactgggaagaaatctgagaagggaccagtttgttggcggaa

SEQ ID NO: 866 - DNA, 3314 bp, Homo sapiens
ggaggcaggcggtgccgcggcgccgggacccgactcatccggtgcttgcgtgtggtggtgagcgcagcgccgaggatgaggaggtgcaacagcggctccgggccgccgccgtcgctgctgctgctgctgctgtggctgctcgcggttcccggcgctaacgcggccccgcggtcggcgctctattcgccttccgacccgctgacgctgctgcaggcggacacggtgcgcggcgcggtgctgggctcccgcagcgcctgggccgtggagttcttcgcctcctggtgcggccactgcatcgccttcgccccgacgtggaaggcgctggccgaagacgtcaaagcctggaggccggccctgtatctcgccgccctggactgtgctgaggagaccaacagtgcagtctgcagagacttcaacatccctggcttcccgactgtgaggttcttcaaggcctttaccaagaacggctcgggagcagtatttccagtggctggtgctgacgtgcagacgctgcgggagaggctcattgacgccctggagtcccatcatgacacgtggcccccagcctgtcccccactggagcctgccaagctggaggagattgatggattctttgcgagaaataacgaagagtacctggctctgatctttgaaaagggaggctcctacctgggtagagaggtggctctggacctgtcccagcacaaaggcgtggcggtgcgcagggtgctgaacacagaggccaatgtggtgagaaagtttggtgtcaccgacttcccctcttgctacctgctgttccggaatggctctgtctcccgagtccccgtgctcatggaatccaggtccttctataccgcttacctgcagagactctctgggctcaccagggaggctgcccagaccacagttgcaccaaccactgctaacaagatagctcccactgtttggaaattggcagatcgctccaagatctacatggctgacctggaatctgcactgcactacatcctgcggatagaagtgggcaggttcccggtcctggaagggcagcgcctggtggccctgaaaaagtttgtggcagtgctggccaagtatttccctggccggcccttagtccagaacttcctgcactccgtgaatgaatggctcaagaggcagaagagaaataaaattccctacagtttctttaaaactgccctggacgacaggaaagagggtgccgttcttgccaagaaggtgaactggattggctgccaggggagtgagccgcatttccggggctttccctgctccctgtgggtcctcttccacttcttgactgtgcaggcagctcggcaaaatgtagaccactcacaggaagcagccaaggccaaggaggtcctcccagccatccgaggctacgtgcactacttcttcggctgccgagactgcgctagccacttcgagcagatggctgctgcctccatgcaccgggtggggagtcccaacgccgctgtcctctggctctggtctagccacaacagggtcaatgctcgccttgcaggtgcccccagcgaggacccccagttccccaaggtgcagtggccaccccgtgaactttgttctgcctgccacaatgaacgcctggatgtgcccgtgtgggacgtggaagccaccctcaacttcctcaaggcccacttctccccaagcaacatcatcctggacttccctgcagctgggtcagctgcccggagggatgtgcagaatgtggcagccgccccagagctggcgatgggagccctggagctggaaagccggaattcaactctggaccctgggaagcctgagatgatgaagtcccccacaaacaccaccccacatgtgccggctgagggacctgaggcaagtcgacccccgaagctgcaccctggcctcagagctgcaccaggccaggagcctcctgagcacatggcagagcttcagaggaatgagcaggagcagccgcttgggcagtggcacttgagcaagcgagacacaggggctgcattgctggctgagtccagggctgagaagaaccgcctctggggccctttggaggtcaggcgcgtgggccgcagctccaagcagctggtcgacatccctgagggccagctggaggcccgagctggacggggccgaggccagtggctgcaggtgctgggagggggcttctcttacctggacatcagcctctgtgtggggctctattccctgtccttcatgggcctgctggccatgtacacctacttccaggccaagataagggccctgaagggccatgctggccaccctgcagcctgaaccacctggggaggaggcgggagagggagctgccatctctaggcacctcaagccccctgaccccattccctcccctcccaccccttgctccttgtctggcctagaagtgtgggaaattcaggaaaacgagttgctccagtgaagcttcttggggttgctaggacagagagctcctttgacacaaaagacaggagcagggtccaggttcccctgctgtgcagggagggcagccccgggcagtgggcatagggcagctcagtccctggcctcttagcaccacattcctgtttttcagcttatttgaagtcctgcctcattctcactggagcctcagtctctcctgcttggtcttggccctcaactggggcaagtgaagccagaggagggtcccccagctgggtgggctggaatggaactcctcactagctgctggggctccgcccaccctgctcccttccggacaatgaagaagcctttgcaccctgggaggaaggaccaccccgggccctctatgcctggccagcctccagctcctcagacctcctgggtggggtttggcttcagggtggggtttggaagcttctggaagtcgtgctggtctcccaggtgaggcaagccatggttgctgggctgtagggtgagtggcttgcttggtgggacctgacgagttggtggcatgggaaggatgtgggtctctagtgccttgccctggcttagctgcaggagaagatggctgctttcacttccccccattgagctctgctccctctgagcctggtcttttgtccttttttattttggtctccaagatgaatgctcatctttggagggtgccaggtagaagctagggaggggagtgtcttctctctccaggtttcaccttccagtgtgcagaagttagaagggtctggcgggggcagtgccttacacatgcttgattcccacgctaccccctgccttgggaggtgtgtggaataaattatttttgttaaggc

SEQ ID NO: 867 - protein, 747 aa, Homo sapiens
MRRCNSGSGPPPSLLLLLLWLLAVPGANAAPRSALYSPSDPLTLLQADTVRGAVLGSRSAWAVEFFASWCGHCIAFAPTWKALAEDVKAWRPALYLAALDCAEETNSAVCRDFNIPGFPTVRFFKAFTKNGSGAVFPVAGADVQTLRERLIDALESHHDTWPPACPPLEPAKLEEIDGFFARNNEEYLALIFEKGGSYLGREVALDLSQHKGVAVRRVLNTEANVVRKFGVTDFPSCYLLFRNGSVSRVPVLMESRSFYTAYLQRLSGLTREAAQTTVAPTTANKIAPTVWKLADRSKIYMADLESALHYILRIEVGRFPVLEGQRLVALKKFVAVLAKYFPGRPLVQNFLHSVNEWLKRQKRNKIPYSFFKTALDDRKEGAVLAKKVNWIGCQGSEPHFRGFPCSLWVLFHFLTVQAARQNVDHSQEAAKAKEVLPAIRGYVHYFFGCRDCASHFEQMAAASMHRVGSPNAAVLWLWSSHNRVNARLAGAPSEDPQFPKVQWPPRELCSACHNERLDVPVWDVEATLNFLKAHFSPSNIILDFPAAGSAARRDVQNVAAAPELAMGALELESRNSTLDPGKPEMMKSPTNTTPHVPAEGPEASRPPKLHPGLRAAPGQEPPEHMAELQRNEQEQPLGQWHLSKRDTGAALLAESRAEKNRLWGPLEVRRVGRSSKQLVDIPEGQLEARAGRGRGQWLQVLGGGFSYLDISLCVGLYSLSFMGLLAMYTYFQAKIRALKGHAGHPAA

SEQ ID NO: 868 - DNA, 381 bp, Homo sapiens
tttttttttttttttttctgtcatagtaaaacatttatttgttaaagtgatatagattattcaagattctacagtctgttaaatcatggatggcaatgtaagatggattgatacagaacttgatgccaatgtaggctttttttcttttttaaaaaaaaaatacttgtaggccagaagaaaaaaaaatttggttttaaaagaggatgaaccatggtctaatggagccagttccgccgtcatcagagactttcaccttggctcctgtaaacaatttcttctacgacaccagttcaacaattagcctttgtgaattgaaacatttttgaattttatccagtaaaaatatcagtggcaaattttttcaggagagagaggaaaagt

SEQ ID NO: 869 - DNA, 7258 bp, Homo sapiens
ttcaataggaagcaccaacagtttatgccctaggactttgttcccacaatcctgtaacatcatatcacgacacctaacccaatccttatcaagccctgtcaaaaacggactttaaaccaagctgcaaattttcagtaatctggccttgcctttccccctctgatagcaccatcaaacaaacccccttactgccgaaagcaataagcccggctttgttccatccactggttgtgttggtgatatctggggactgccactgaacagacgcacagagggagcccctacaggcaggggtttttctgtctgtgcttcttgggagagtatgtctcgtacatttgtcgcgtgatgaagacttcacagctccatccagcgaccagactcacagctccatccagctgcggcaagggggtctgaggcagtcttaggcaagttggggcccagcgggagaagttgcagaagaactgattagaggacccaggaggcttcagagctgggctgaggtagagagtctcctgtgcgccttctctcctctctgcaattcggggactccttgcactggggcaggccccggcaggtgcatgggaggaagcacggagaatttacaagcctctcgattcctcagtccagacgctgttgggtcccctccgctggagatcgcgcttcccccaaatctttgtgagcgttgcggaagcacgcggggtccgggtcgctgagcgctgcaagacaggggagggagccgggcgggagagggaggggcggcgccggggcgggccctgatatagagcaggcgccgcgggtcgcagcacagtcggagaccgcagcccggagcccgggccagggtccacctgtccccgcagcgccggctcgcgccctcctgccgcagccaccggtgagtgccgcggtcctgagatccccgggccggatgcgcggcggccccagctcccgagcgtctgcctgccccgccctgggctgcccgggctccctgggctccccggcggctgcacggagtcaaggcgccccgtcccgggcgtcccccgcgggtgccgatccaggctgcccggagtccggagcccatagaggagagagacagctggggagcctggtcaccgcgggcatctcccctgcgctgcagtcgcccgcctggcctgccttcccgttcctccgcctcttgccctgacttctccttcctttgcagagccgccgtctagcgccccgacctcgccaccatgagagccctgctggcgcgcctgcttctctgcgtcctggtcgtgagcgactccaaagtgagtgcgctcttgctttgactgatgctgcccaaggacctctgatcagcaccaggggagaggaggggctgctcagggagctggggtctccggattccatccacagcagggccagactctccccaggaaatgggacagggtggcagcggaggcttgagaaccacgggggttggcactggctggcaagggaggaagagggccaccgggactgccccagcctgcgggcatctggtagatgaagcttaatccatttctcctggctggaaaccatggtcttccatttgagaactagatacgaacagggtgaggcgagagggagagggaagagtgggttttgggattggggccagtttaccctcaccctggatccctggagcatgggacctttgatgaagcctcctcccgaatctcttccagggcagcaatgaacttcatcaagttccatgtgagtatccacccctacaacagttggctgcacagacaagttgggaaggcttcaggggacactcccctccctgccctctgctgcagcgtgcgccaccccttaccacttccactccccctcgcttaccccacctttgttctctccagcgaactgtgactgtctaaatggaggaacatgtgtgtccaacaagtacttctccaacattcactggtgcaactgcccaaagaaattcggagggcagcactgtgaaataggtatggggatctccactgcaactgggagagaaatttggggacagggagggatgggtgggaggcaagagcaggcaggagttaggagctggaggtagggtgggtgacatcttcatccctatgtgacaagcataaacacacacacacgctcacgaaacagtggccacacaaatgtgaggtggggttggaaggagaccctgtccagtcttctggcaggtctgaaacgacatctttaaaatgtccgttggcagccgggcatggtggctcacgcttgtaatcccagcattttgagaggtcaagtttgagtggatcatttaggtcaggagttcaagaccagcctggacaacatggtgtaaccctgcctctactaaaaatgcaaaaatcagcctggcatggtggtggatgcctgtagtcccagctacttgggaggctgaggcaggagaattgcttgaacatgggaggccagatctcagtgagctgagatcacaccactgcactccaactgggcgacagagcaagactccatctcaaaaaaaaaaaaaaataaaagttagttggaatgttcttctctttctcatattctctcatcctcctgtccccttgtagataagtcaaaaacctgctatgaggggaatggtcacttttaccgaggaaaggccagcactgacaccatgggccggccctgcctgccctggaactctgccactgtccttcagcaaacgtaccatgcccacagatctgatgctcttcagctgggcctggggaaacataattactgcaggtgaggtgggggcaacaaggaccaaaagccctccctacagcttcccagaaaccttgttaccatccccttctcccagagggctggccatagcacaagagaagtgcggcctctggttgagtcttccctgaggggaggaggcagggaaggccctctgggttggaatgacatcccctatctttctgtgttgtgccaggaacccagacaaccggaggcgaccctggtgctatgtgcaggtgggcctaaagccgcttgtccaagagtgcatggtgcatgactgcgcagatggtgagcatcactgacctgctgatgacaggtgggtggaaggggacaaacttacatgtccccttattccatcacaggaggactgaggaggtggggggtgcccgagagggatgctttctcctacctgcctccctaagacatccctctgtttgtcctccaggaaaaaagccctcctctcctccagaagaattaaaatttcagtgtggccaaaagactctgaggccccgctttaagattattgggggagaattcaccaccatcgagaaccagccctggtttgcggccatctacaggaggcaccgggggggctctgtcacctacgtgtgtggaggcagcctcatgagcccttgctgggtgatcagcgccacacactgcttcatgtacggccctgggtttctcctcttcgactcttctgccccaccccaagcacatccctttctccttcccagcaaagtgttccgcctcatttctccctcatctgcccctgtccatgcgcccatggccttggggacaagtcgtgctttgaggcctctagggagggaaggaagaagtggcatgatttcatgggactaagctgtttgatgggtatcttcttccacagtgattacccaaagaaggaggactacatcgtctacctgggtcgctcaaggcttaactccaacacgcaaggggagatgaagtttgaggtggaaaacctcatcctacacaaggactacagcgctgacacgcttgctcaccacaacgacattggtgagggggaacgcccgcgactactgtggccataatggcttggggagagtgggacccagggagagactggagctgagttgaagctgccggtggggcaggggtggggcgagggaccttgaagcctcgatatacatgacaaaggatggcagggaagagttccatgaagtctgaggggcctggtgctcctctggagagaccctgaatttccccaacaagtagccctcttgcgagtggaaacagccctgtgggtatatggcttgggctgggaaggccctgtttatatgaattagaaaaagacacaccttcctttgtgggatgcagcctctgtctgtgctaggatatagaacttggagaatggagccttgggatggattccagcctaactacctcagggggatcctctagagtgcagctgggagtttttgcagaaacgacctgtacagctgtatgcagtggctctggccatccaagcctttttcaacacctggaacaaagcccttggggcatggggcaggggaggtttccaggtgataagcgaccagcagacctccctggatgactgacctagggataggcatagctacttcctcggcacttggaggggacagatggggaccgcctaaccagtagtgatctttctcctctgaccctctgtcctcccccagccttgctgaagatccgttccaaggagggcaggtgtgcgcagccatcccggactatacagaccatctgcctgccctcgatgtataacgatccccagtttggcacaagctgtgagatcactggctttggaaaagagaattctagtaagtgacaattgcgactgacttagaaggtcctgaggagtgttttgacctgaaaatgagcccagtgtgatcaagggaagactgcagagttagaggtgggagcactgaggcggtggcagatgggtccagggatggatgaagagtgttgtttagggagcgatgggctgcaaaggtaaatagatggtaggggctataggtggaggtaaatggctcagatttgcatggagagagaataatgggcctctccctgggtgatgatactttatggtgtcccctctctggcgagacgtcccacgtggaggcagataaatcttgatgcaaacgcctccctgttttctccacctagccgactatctctatccggagcagctgaaaatgactgttgtgaagctgatttcccaccgggagtgtcagcagccccactactacggctctgaagtcaccaccaaaatgctgtgtgctgctgacccacagtggaaaacagattcctgccaggtgagtgttccaagcatctctctccacctcttccatatctccccagagctcctgggcttgttccagccagcttaagggtgtctctctctagccaaagccctaagtagccagaatcaggagctcaggtctttgagggtttaaaccagtccttatgtgtttgccagacattaccaaaaaaatcccagctctgcgctagtcacttcagactgggggcacgagatcctagaaagaggaaacagtaaaagacaatgtaactcagtgcccagggtgtgttgtgaactataaatgatcaggtgttcaggagagggaggtgagtgccaacctgagggtcagggaggggaggctttaaaggaaatgtgacttgataggcatttgaagaggcagagggaagaaaggaaggtgtttcagttgaaagatacaaaactgagaaggaggctggcatattccgggtggggaggagaactagggtctgggagtgtggatggaatagtggcagatgacagggcttttaaagccaagcaggggattttccaacttcgatgtggtagaaatggggctgcgtcaggcacagtggctcatgcctgtaatcccagcattgggctaggccgtagtcgatggatcattgaggccagagttgagaccggcctggaccaacatggtgaaaccctgtgtctactaaaaaatgcaaaaaaaaaaattagccaggtgtggtggtgcctgcctgtaatcccagctaatcaggaggctgagacatggaatcgcttgagcacaggaggcaagtttgacgtgagctgagatcacgtcattgcacgccagcctgggcgacagagcgagattctgtcctcccgccgaaaaaagaaagaaaatgggaagtcgctaaggactttgactgggaaactcttccctctctctggtatggttgggtgatgggatcagaaatcccctcctcacttctctagggctcatcttttgtatctttggcgtcacagggagactcagggggacccctcgtctgttccctccaaggccgcatgactttgactggaattgtgagctggggccgtggatgtgccctgaaggacaagccaggcgtctacacgagagtctcacacttcttaccctggatccgcagtcacaccaaggaagagaatggcctggccctctgagggtccccagggaggaaacgggcaccacccgctttcttgctggttgtcatttttgcagtagagtcatctccatcagctgtaagaagagactgggaagataggctctgcacagatggatttgcctgtgccacccaccagggtgaacgacaatagctttaccctcaggcataggcctgggtgctggctgcccagacccctctggccaggatggaggggtggtcctgactcaacatgttactgaccagcaacttgtctttttctggactgaagcctgcaggagttaaaaagggcagggcatctcctgtgcatgggtgaagggagagccagctcccccgacggtgggcatttgtgaggcccatggttgagaaatgaataatttcccaattaggaagtgtaacagctgaggtctcttgagggagcttagccaatgtgggagcagcggtttggggagcagagacactaacgacttcagggcagggctctgatattccatgaatgtatcaggaaatatatatgtgtgtgtatgtttgcacacttgtgtgtgggctgtgagtgtaagtgtgagtaagagctggtgtctgattgttaagtctaaatatttccttaaactgtgtggactgtgatgccacacagagtggtctttctggagaggttataggtcactcctggggcctcttgggtcccccacgtgacagtgcctgggaatgtacttattctgcagcatgacctgtgaccagcactgtctcagtttcactttcacatagatgtccctttcttggccagttatcccttccttttagcctagttcatccaatcctcactgggtggggtgaggaccactccttacactgaatatttatatttcactatttttatttatatttttgtaattttaaataaaagtgatcaataaaatgtgatttttctgatgacaaatctccctggtgcttgtatgggaaggagttggagtacataaaaaggagaaaataacaaaggtgg

SEQ ID NO: 870 - protein, 431 aa, Homo sapiens [sequence omitted]

SEQ ID NO: 871 - DNA, 2504 bp, Homo sapiens
ctttgccgtccggctattagcctactgtggctagtcacccccggggtcccggccttctcgggctggggccgccgccaccgcggcaggacggggaggcgggccatggcgtcctgcgtggggagccggaccctaagcaaggatgatgtgaactacaaaatgcatttccggatgatcaacgagcagcaagtggaggacatcaccattgacttcttctaccggccgcataccatcaccctgctcagcttcaccatcgtcagcctcatgtacttcgcctttaccagggatgactctgttccagaagacaacatctggagaggcatcctctctgttattttcttctttcttatcatcagtgtgttagctttccccaatggtccgttcactcgacctcatccagccttatggcgaatggtttttggactcagtgtgctctacttcctgttcctggtattcctactcttcctgaatttcgagcaggttaaatctctaatgtattggctagatccaaatcttcgatacgccacaagggaagcagatgtcatggagtatgctgtgaactgccatgtgatcacctgggagaggattatcagccactttgatatttttgcatttggacatttctggggctgggccatgaaggccttgctgatccgtagttacggtctctgctggacaatcagtattacctgggagctgactgagctcttcttcatgcatctcctccccaattttgccgagtgctggtgggatcaagtcattctggacatcctgttgtgcaatggcggtggcatttggctgggcatggtcgtttgccggtttttagagatgaggacttaccactgggcaagcttcaaggacattcataccaccaccgggaagatcaagagagctgttctgcagttcactcctgctagctggacctatgttcgatggtttgaccccaaatcttcttttcagagagtagctggagtgtaccttttcatgatcatctggcagctgactgagttgaataccttcttcttgaagcatatctttgtgttccaagccagtcatccattaagttggggtagaattctctttattggtggcatcacagctcccacagtgagacagtactacgcttacctcaccgacacacagtgcaagcgcgtaggaacacaatgctgggtgtttggggtcattggtttcctggaggccattgtttgcataaaatttggacaagatctcttctctaagacccaaatactctatgttgtgctttggcttctttgcgtggctttcaccactttcctctgtctgtacggcatgatttggtatgcagaacactatggtcaccgagaaaagacctactcggagtgtgaagatggcacctacagtccagagatctcctggcatcacaggaaagggacaaaaggttctgaagacagcccacccaagcatgcaggcaacaacgaaagccattcttccaggagaaggaatcggcattccaagtcaaaagtcaccaatggcgttggaaagaaatgaaaaaccctggttaatcaaagatgttccagagtgcctagaactgagagggaaatggaactcatttggaactccccgtgaggaggtcgaggcgcacagggcaagcaggaagaggcgagggcacttgggggtcattatttgagatcgtaagtcttgtttcccacagacctggccgcgtcaggcagatcatcgcctggggggcctttgccaacgtggggtctcttctaacttcagcacttgacatgcggtcaccggtggcagcgcggtgtgttgaagggaaacggtagctattcattcacagttgccaagagcagctccgcgcctgctggatcgtggatgcagcgtaaacatcttccttcagacgaggcattaaccccatggttaatggactggtcaccagtttttattttatttttatgaatctacctttccattgattgatttaagttcaggccacttttctgtcttttatttggttactgttgttatttgtttttaagttaggatgctttttaacagcctttagaagccgctgctgaaattgatactgggggaagggttccccttccttctagagcagaaaagggagagaagtgttgtattcctgtttggtaacctcagtctcctgtaagacctcctaccacatggcgagtatacaccaatcaggagagggtagctgcctgcataggagcctcgcttccgattattcccttcccaatattattcatccagacttagccacagtgcacaaaagcaaacctgctagagaggcagtgaacaccacagcttctccccagcttggtgccttttacatcgggtttgttctccttccatggtgtgttgctgacattgtcactgagtcccatgtgaggtgctggtgagtattacctttcatctgtgccatgctctagaaccttgaccttgatagttcaccacgtctgatggatccctgttttaaataaaaacgattcactttaaagcct

SEQ ID NO: 872 - protein, 473 aa, Homo sapiens
MASCVGSRTLSKDDVNYKMHFRMINEQQVEDITIDFFYRPHTITLLSFTIVSLMYFAFTRDDSVPEDNIWRGILSVIFFFLIISVLAFPNGPFTRPHPALWRMVFGLSVLYFLFLVFLLFLNFEQVKSLMYWLDPNLRYATREADVMEYAVNCHVITWERIISHFDIFAFGHFWGWAMKALLIRSYGLCWTISITWELTELFFMHLLPNFAECWWDQVILDILLCNGGGIWLGMVVCRFLEMRTYHWASFKDIHTTTGKIKRAVLQFTPASWTYVRWFDPKSSFQRVAGVYLFMIIWQLTELNTFFLKHIFVFQASHPLSWGRILFIGGITAPTVRQYYAYLTDTQCKRVGTQCWVFGVIGFLEAIVCIKFGQDLFSKTQILYVVLWLLCVAFTTFLCLYGMIWYAEHYGHREKTYSECEDGTYSPEISWHHRKGTKGSEDSPPKHAGNNESHSSRRRNRHSKSKVTNGVGKK

SEQ ID NO: 873 - DNA, 367 bp, Homo sapiens
agcggccgctccagccagccccgcaggatgaagggaggacacgagggtcggtgtagttctagaagcccgcactcacactagcgcgtcctccgtcccgagccgccacccgatatcccgacgctctgaggggatggcggcccctaaccggcggtttatagcctggccccgcccccggcccccaggggggctgtgcgtcacttcctgaggcacgtacgctcgcgaggtgctctgacagatcgccccgggggcggggatgcgcgcgcagcgggcggggccctctgcggagggcgctgcgggcgaggcgaaggccaaggggaaaggcgccaaggcagcaggtgccccgaggagccgcgcgatgggcgcactg

SEQ ID NO: 874 - DNA, 2545 bp, Homo sapiens
atccaatacaggagtgacttggaactccattctatcactatgaagaaaagtggtgttcttttcctcttgggcatcatcttgctggttctgattggagtgcaaggaaccccagtagtgagaaagggtcgctgttcctgcatcagcaccaaccaagggactatccacctacaatccttgaaagaccttaaacaatttgccccaagcccttcctgcgagaaaattgaaatcattgctacactgaagaatggagttcaaacatgtctaaacccagattcagcagatgtgaaggaactgattaaaaagtgggagaaacaggtcagccaaaagaaaaagcaaaagaatgggaaaaaacatcaaaaaaagaaagttctgaaagttcgaaaatctcaacgttctcgtcaaaagaagactacataagagaccacttcaccaataagtattctgtgttaaaaatgttctattttaattataccgctatcattccaaaggaggatggcatataatacaaaggcttattaatttgactagaaaatttaaaacattactctgaaattgtaactaaagttagaaagttgattttaagaatccaaacgttaagaattgttaaaggctatgattgtctttgttcttctaccacccaccagttgaatttcatcatgcttaaggccatgattttagcaatacccatgtctacacagatgttcacccaaccacatcccactcacaacagctgcctggaagagcagccctaggcttccacgtactgcagcctccagagagtatctgaggcacatgtcagcaagtcctaagcctgttagcatgctggtgagccaagcagtttgaaattgagctggacctcaccaagctgctgtggccatcaacctctgtatttgaatcagcctacaggcctcacacacaatgtgtctgagagattcatgctgattgttattgggtatcaccactggagatcaccagtgtgtggctttcagagcctcctttctggctttggaagccatgtgattccatcttgcccgctcaggctgaccactttatttctttttgttcccctttgcttcattcaagtcagctcttctccatcctaccacaatgcagtgcctttcttctctccagtgcacctgtcatatgctctgatttatctgagtcaactcctttctcatcttgtccccaacaccccacagaagtgctttcttctcccaattcatcctcactcagtccagcttagttcaagtcctgcctcttaaataaacctttttggacacacaaattatcttaaaactcctgtttcacttggttcagtaccacatgggtgaacactcaatggttaactaattcttgggtgtttatcctatctctccaaccagattgtcagctccttgagggcaagagccacagtatatttccctgtttcttccacagtgcctaataatactgtggaactaggttttaataattttttaattgatgttgttatgggcaggatggcaaccagaccattgtctcagagcaggtgctggctctttcctggctactccatgttggctagcctctggtaacctcttacttattatcttcaggacactcactacagggaccagggatgatgcaacatccttgtctttttatgacaggatgtttgctcagcttctccaacaataagaagcacgtggtaaaacacttgcggatattctggactgtttttaaaaaatatacagtttaccgaaaatcatataatcttacaatgaaaaggactttatagatcagccagtgaccaaccttttcccaaccatacaaaaattccttttcccgaaggaaaagggctttctcaataagcctcagctttctaagatctaacaagatagccaccgagatccttatcgaaactcattttaggcaaatatgagttttattgtccgtttacttgtttcagagtttgtattgtgattatcaattaccacaccatctcccatgaagaaagggaacggtgaagtactaagcgctagaggaagcagccaagtcggttagtggaagcatgattggtgcccagttagcctctgcaggatgtggaaacctccttccaggggaggttcagtgaattgtgtaggagaggttgtctgtggccagaatttaaacctatactcactttcccaaattgaatcactgctcacactgctgatgatttagagtgctgtccggtggagatcccacccgaacgtcttatctaatcatgaaactccctagttccttcatgtaacttccctgaaaaatctaagtgtttcataaatttgagagtctgtgacccacttaccttgcatctcacaggtagacagtatataactaacaaccaaagactacatattgtcactgacacacacgttataatcatttatcatatatatacatacatgcatacactctcaaagcaaataatttttcacttcaaaacagtattgacttgtataccttgtaatttgaaatattttctttgttaaaatagaatggtatcaataaatagaccattaatcag

SEQ ID NO: 875 - protein, 125 aa, Homo sapiens
MKKSGVLFLLGIILLVLIGVQGTPVVRKGRCSCISTNQGTIHLQSLKDLKQFAPSPSCEKIEIIATLKNGVQTCLNPDSADVKELIKKWEKQVSQKKKQKNGKKHQKKKVLKVRKSQRSRQKKTT

SEQ ID NO: 876 - DNA, 618 bp, Homo sapiens
ccgccagttccttcctgctccctgaaatgaccagtgcctccctgaggacaggcacatcaggtctcagccaaccttcccttccaaacataactcagctagaccctctggtctctaaatagtatctcttctctttgtctttttctgtttcaggcctccagttaccaactcctgtctggtttcatgtccttttctatctggcagtgggaataatgtttttagtgaacactgttctctgggtgacaatacgtaaagaactgaaaagaaagaaaaagtgggatttagaaatctctttggattctggtcatgagaagaaggtaatttccagccttcaagaagacagacatttagaagaagagctgaaatgtcaggaacaaaaagaagaacagctgcaggaaggggtgcaccggaaggagccccagggggccacgtagcagcggctcagtgggtggccatcgatctggaccgtcccctgcccacttgctccccgtgagcactgcgtacaaacatccaaaagttcaacaacaccagaactgtgtgtctcatggtatgtaactcttaaagcaaataaatgaactgacttcaactgggatacatttggaaatgtggtcatcaaagatg

SEQ ID NO: 877 - protein, 374 aa, Homo sapiens
MWFLTTLLLWVPVDGQVDTTKAVITLQPPWVSVFQEETVTLHCEVLHLPGSSSTQWFLNGTATQTSTPSYRITSASVNDSGEYRCQRGLSGRSDPIQLEIHRGWLLLQVSSRVFTEGEPLALRCHAWKDKLVYNVLYYRNGKAFKFFHWNSNLTILKTNISHNGTYHCSGMGKHRYTSAGISVTVKELFPAPVLNASVTSPLLEGNLVTLSCETKLLLQRPGLQLYFSFYMGSKTLRGRNTSSEYQILTARREDSGLYWCEAATEDGNVLKRSPELELQVLGLQLPTPVWFHVLFYLAVGIMFLVNTVLWVTIRKELKRKKKWDLEISLDSGHEKKVISSLQEDRHLEEELKCQEQKEEQLQEGVHRKEPQGAT

SEQ ID NO: 878 - DNA, 3259 bp, Homo sapiens
gacgcgcgccgggagccggcggccgggccagccggcgccggggcccagtgcgccgcgctcgcagccggtagcgcgccagccgtaggcgtcgctcggcagccgcggggccctaggcgtgccggggagggggcgagggcggccaggcgcctgccgccccggaggcaggatgagcatcgagatcccggcgggactgacggagctgctgcagggcttcacggtggaggtgctgaggcaccagcccgcggacctgctggagttcgcgctgcagcacttcacccgcctgcagcaggagaacgagcgcaaaggcaccgcgcgcttcggccatgagggcaggacctggggggacctgggcgccgctgccgggggcggcacccccagcaagggggtcaacttcgccgaggagcccatgcagtccgactccgaggacggggaggaggaggaggcggcgcccgcggacgcaggggcgttcaatgctccagtaataaaccgattcacaaggcgtgcctcagtatgtgcagaagcttataatcctgatgaagaagaagatgatgcagagtccaggattatacatccaaaaactgatgatcaaagaaataggttgcaagaggcttgcaaagacatcctgctgtttaagaatctggatccggagcagatgtctcaagtattagatgccatgtttgaaaaattggtcaaagatggggagcatgtaattgatcaaggtgacgatggtgacaacttttatgtaattgatagaggcacatttgatatttatgtgaaatgtgatggtgttggaagatgtgttggtaactatgataatcgtgggagtttcggcgaactggccttaatgtacaatacacccagagcagctacaatcactgctacctctcctggtgctctgtggggtttggacagggtaaccttcaggagaataattgtgaaaaacaatgccaaaaagagaaaaatgtatgaaagctttattgagtcactgccattccttaaatctttggagttttctgaacgcctgaaagtagtagatgtgataggcaccaaagtatacaacgatggagaacaaatcattgctcagggagattcggctgattcttttttcattgtagaatctggagaagtgaaaattactatgaaaagaaagggtaaatcagaagtggaagagaatggtgcagtagaaatgcctcgatgctcgcggggacagtactttggagagcttgccctggtaactaacaaacctcgagcagcttctgcccacgccattgggactgtcaaatgtttagcaatggatgtgcaagcatttgaaaggcttctgggaccttgcatggaaattatgaaaaggaacatcgctacctatgaagaacagttagttgccctgtttggaacgaacatggatattgttgaacccactgcatgaagcaaaagtatggagcaagacctgtagtgacaaaattacacagtagtggttagtccactgagaatgtgtttgtgtagatgccaagcattttctgtgatttcaggttttttcctttttttacatttacaacgtatcaataaacagtagtgatttaatagtcaataggctttaacatcactttctaaagagtagttcataaaaaaatcaacatactgataaaatgactttgtactccacaaaattatgactgaaaggtttattaaaatgattgtaatatatagaaagtatctgtgtttaagaagataattaaaggatgttatcataggctatatgtgttttacttattcagactgataatcatattagtgactatccccatgtaagagggcacttggcaattaaacatgctacacagcatggcatcacttttttttataactcattaaacacagtaaaattttaatcatttttgttttaaagttttctagcttgataagttatgtgctgccttggcctattggtgaaatggtataaaatatcatatgcagttttaaaactttttatatttttgcaataaagtacattttgactttgttggcataatgtcagtaacatacatattccagtggttttatggacaggcaatttagtcattatgataataaggaaaacagtgttttagatgagagatcattaatgcatttttccctcatcaagcatatatctgcttttttttattttgcaattctctgtattctatgtctttaaaaatttgatcttgacatttaatgtcacaaagttttgtttttttaaaaagtgatttaaacttaagatccgacattttttgtattctttaagattttacacctaaaaaatctctcctatcccaaaaataatgtgggatccttatcagcatgcccacagtttatttctttgttcttcactaggcctgcataatacagtcctatgtagacatctgttcccttgggtttccgttctttcttaggatggttgccaacccacaatctcattgatcagcagccaatatgggtttgtttggtttttttaattcttaaaaacatcctctagaggaatagaaacaaatttttatgagcataaccctatataaagacaaaatgaatttctgaccttaccatatataccattaggccttgccattgctttaatgtagactcatagttgaaattagtgcagaaagaactcagatgtactagattttcattgttcattgatatgctcagtatgctgccacataagatgaatttaattatattcaaccaaagcaatatactcttacatgatttctaggccccatgacccagtgtctagagacattaattctaaccagttgtttgcttttaaatgagtgatttcattttgggaaacaggtttcaaatgaatatatatacatgggtaaaattactctgtgctagtgtagtcttactagagaatgtttatggtcccacttgtatatgaaaatgtggttagaatgttaattggataatgtatatataagaagttaaagtatgtaaagtataacttcagccacatttttagaacactgtttaacatttttgcaaaaccttcttgtaggaaaagagagctctctacatgaagatgacttgttttatatttcagattttattttaaaagccatgtctgttaaacaagaaaaaacacaaaagaactccagattcctggttcatcattctgtattcttactcactttttcaagttatctattttgttgcataaactaattgttaactattcatggaacagcaaacgcctgtttaataaagaactttgaccaag

SEQ ID NO: 879 - protein, 418 aa, Homo sapiens
MSIEIPAGLTELLQGFTVEVLRHQPADLLEFALQHFTRLQQENERKGTARFGHEGRTWGDLGAAAGGGTPSKGVNFAEEPMQSDSEDGEEEEAAPADAGAFNAPVINRFTRRASVCAEAYNPDEEEDDAESRIIHPKTDDQRNRLQEACKDILLFKNLDPEQMSQVLDAMFEKLVKDGEHVIDQGDDGDNFYVIDRGTFDIYVKCDGVGRCVGNYDNRGSFGELALMYNTPRAATITATSPGALWGLDRVTFRRIIVKNNAKKRKMYESFIESLPFLKSLEFSERLKVVDVIGTKVYNDGEQIIAQGDSADSFFIVESGEVKITMKRKGKSEVEENGAVEMPRCSRGQYFGELALVTNKPRAASAHAIGTVKCLAMDVQAFERLLGPCMEIMKRNIATYEEQLVALFGTNMDIVEPTA

SEQ ID NO: 880 - DNA, 5434 bp, Homo sapiens
cgtccgcgtggggggggtgtgtgcccgccttgcgcatgcgtgttccctgggcatggccggctccgttccatccttctgcacagggtatcgcctctctccgtttggtacatcccctcctcccccacgcccggactggggtggtagacgcgcctccgctcatcgcccctccccatcggtttccgcgcgaaaagccggggcgcctgcgctgccgccgccgcgtctgctgaagcctccgagatgccggcgcgtaccgccccagcccgggtgcccacactggccgtcccggccatctcgctgcccgacgatgtccgcaggcggctcaaagatttggaaagagacagcttaacagaaaaggaatgtgtgaaggagaaattgaatctcttgcacgaatttctgcaaacagaaataaagaatcagttatgtgacttggaaaccaaattacgtaaagaagaattatccgaggagggctacctggctaaagtcaaatcccttttaaataaagatttgtccttggagaacggtgctcatgcttacaaccgggaagtgaatggacgtctagaaaacgggaaccaagcaagaagtgaagcccgtagagtgggaatggcagatgccaacagcccccccaaacccctttccaaacctcgcacgcccaggaggagcaagtccgatggagaggctaagcctgaaccttcacctagccccaggattacaaggaaaagcaccaggcaaaccaccatcacatctcattttgcaaagggccctgccaaacggaaacctcaggaagagtctgaaagagccaaatcggatgagtccatcaaggaagaagacaaagaccaggatgagaagagacgtagagttacatccagagaacgagttgctagaccgcttcctgcagaagaacctgaaagagcaaaatcaggaacgcgcactgaaaaggaagaagaaagagatgaaaaagaagaaaagagactccgaagtcaaaccaaagaaccaacacccaaacagaaactgaaggaggagccggacagagaagccagggcaggcgtgcaggctgacgaggacgaagatggagacgagaaagatgagaagaagcacagaagtcaacccaaagatctagctgccaaacggaggcccgaagaaaaagaacctgaaaaagtaaatccacagatttctgatgaaaaagacgaggatgaaaaggaggagaagagacgcaaaacgacccccaaagaaccaacggagaaaaaaatggctcgcgccaaaacagtcatgaactccaagacccaccctcccaagtgcattcagtgcgggcagtacctggacgaccctgacctcaaatatgggcagcacccaccagacgcggtggatgagccacagatgctgacaaatgagaagctgtccatctttgatgccaacgagtctggctttgagagttatgaggcgcttccccagcacaaactgacctgcttcagtgtgtactgtaagcacggtcacctgtgtcccatcgacaccggcctcatcgagaagaatatcgaactcttcttttctggttcagcaaaaccaatctatgatgatgacccgtctcttgaaggtggtgttaatggcaaaaatcttggccccataaatgaatggtggatcactggctttgatggaggtgaaaaggccctcatcggcttcagcacctcatttgccgaatacattctgatggatcccagtcccgagtatgcgcccatatttgggctgatgcaggagaagatctacatcagcaagattgtggtggagttcctgcagagcaattccgactcgacctatgaggacctgatcaacaagatcgagaccacggttcctccttctggcctcaacttgaaccgcttcacagaggactccctcctgcgacacgcgcagtttgtggtggagcaggtggagagttatgacgaggccggggacagtgatgagcagcccatcttcctgacgccctgcatgcgggacctgatcaagctggctggggtcacgctgggacagaggcgagcccaggcgaggcggcagaccatcaggcattctaccagggagaaggacaggggacccacgaaagccaccaccaccaagctggtctaccagatcttcgatactttcttcgcagagcaaattgaaaaggatgacagagaagacaaggagaacgcctttaagcgccggcgatgtggcgtctgtgaggtgtgtcagcagcctgagtgtgggaaatgtaaagcctgcaaggacatggttaaatttggtggcagtggacggagcaagcaggcttgccaagagcggaggtgtcccaatatggccatgaaggaggcagatgacgatgaggaagtcgatgataacatcccagagatgccgtcacccaaaaaaatgcaccaggggaagaagaagaaacagaacaagaatcgcatctcttgggtcggagaagccgtcaagactgatgggaagaagagttactataagaaggtgtgcattgatgcggaaaccctggaagtgggggactgtgtctctgttattccagatgattcctcaaaaccgctgtatctagcaagggtcacggcgctgtgggaggacagcagcaacgggcagatgtttcacgcccactggttctgcgctgggacagacacagtcctcggggccacgtcggaccctctggagctgttcttggtggatgaatgtgaggacatgcagctttcatatatccacagcaaagtgaaagtcatctacaaagccccctccgaaaactgggccatggagggaggcatggatcccgagtccctgctggagggggacgacgggaagacctacttctaccagctgtggtatgatcaagactacgcgagattcgagtcccctccaaaaacccagccaacagaggacaacaagttcaaattctgtgtgagctgtgcccgtctggctgagatgaggcaaaaagaaatccccagggtcctggagcagctcgaggacctggatagccgggtcctctactactcagccaccaagaacggcatcctgtaccgagttggtgatggtgtgtacctgccccctgaggccttcacgttcaacatcaagctgtccagtcccgtgaaacgcccacggaaggagcccgtggatgaggacctgtacccagagcactaccggaaatactccgactacatcaaaggcagcaacctggatgcccctgagccctaccgaattggccggatcaaagagatcttctgtcccaagaagagcaacggcaggcccaatgagactgacatcaaaatccgggtcaacaagttctacaggcctgagaacacccacaagtccactccagcgagctaccacgcagacatcaacctgctctactggagcgacgaggaggccgtggtggacttcaaggctgtgcagggccgctgcaccgtggagtatggggaggacctgcccgagtgcgtccaggtgtactccatgggcggccccaaccgcttctacttcctcgaggcctataatgcaaagagcaaaagctttgaagatcctcccaaccatgcccgtagccctggaaacaaagggaagggcaagggaaaagggaagggcaagcccaagtcccaagcctgtgagccgagcgagccagagatagagatcaagctgcccaagctgcggaccctggatgtgttttctggctgcggggggttgtcggagggattccaccaagcaggcatctctgacacgctgtgggccatcgagatgtgggaccctgcggcccaggcgttccggctgaacaaccccggctccacagtgttcacagaggactgcaacatcctgctgaagctggtcatggctggggagaccaccaactcccgcggccagcggctgccccagaagggagacgtggagatgctgtgcggcgggccgccctgccagggcttcagcggcatgaaccgcttcaattcgcgcacctactccaagttcaaaaactctctggtggtttccttcctcagctactgcgactactaccggccccggttcttcctcctggagaatgtcaggaactttgtctccttcaagcgctccatggtcctgaagctcaccctccgctgcctggtccgcatgggctatcagtgcaccttcggcgtgctgcaggccggtcagtacggcgtggcccagactaggaggcgggccatcatcctggccgcggcccctggagagaagctccctctgttcccggagccactgcacgtgtttgctccccgggcctgccagctgagcgtggtggtggatgacaagaagtttgtgagcaacataaccaggttgagctcgggtcctttccggaccatcacggtgcgagacacgatgtccgacctgccggaggtgcggaatggagcctcggcactggagatctcctacaacggggagcctcagtcctggttccagaggcagctccggggcgcacagtaccagcccatcctcagggaccacatctgtaaggacatgagtgcattggtggctgcccgcatgcggcacatccccttggccccagggtcagactggcgcgatctgcccaacatcgaggtgcggctctcagacggcaccatggccaggaagctgcggtatacccaccatgacaggaagaacggccgcagcagctctggggccctccgtggggtctgctcctgcgtggaagccggcaaagcctgcgaccccgcagccaggcagttcaacaccctcatcccctggtgcctgccccacaccgggaaccggcacaaccactgggctggcctctatggaaggctcgagtgggacggcttcttcagcacaaccgtcaccaaccccgagcccatgggcaagcagggccgcgtgctccacccagagcagcaccgtgtggtgagcgtgcgggagtgtgcccgctcccagggcttccctgacacctaccggctcttcggcaacatcctggacaagcaccggcaggtgggcaatgccgtgccaccgcccctggccaaagccattggcttggagatcaagctttgtatgttggccaaagcccgagagagtgcctcagctaaaataaaggaggaggaagctgctaaggactagttctgccctcccgtcacccctgtttctggcaccaggaatccccaacatgcactgatgttgtgtttttaacatgtcaatctgtccgttcacatgtgtggtacatggtgtttgtggccttggctgacatgaagctgttgtgtgaggttcgcttatcaactaatgatttagtgatcaaattgtgcagtactttgtgcattctggattttaaaagttttttattatgcattatatcaaatctaccactgtatgagtggaaattaagactttatgtagtttttatatgttgtaatatttcttcaaataaatctctcctataaaccaaaaaaaaaaaaaaaaaaaaaaaaaa

SEQ ID NO: 881 - protein, 1616 aa, Homo sapiens
MPARTAPARVPTLAVPAISLPDDVRRRLKDLERDSLTEKECVKEKLNLLHEFLQTEIKNQLCDLETKLRKEELSEEGYLAKVKSLLNKDLSLENGAHAYNREVNGRLENGNQARSEARRVGMADANSPPKPLSKPRTPRRSKSDGEAKPEPSPSPRITRKSTRQTTITSHFAKGPAKRKPQEESERAKSDESIKEEDKDQDEKRRRVTSRERVARPLPAEEPERAKSGTRTEKEEERDEKEEKRLRSQTKEPTPKQKLKEEPDREARAGVQADEDEDGDEKDEKKHRSQPKDLAAKRRPEEKEPEKVNPQISDEKDEDEKEEKRRKTTPKEPTEKKMARAKTVMNSKTHPPKCIQCGQYLDDPDLKYGQHPPDAVDEPQMLTNEKLSIFDANESGFESYEALPQHKLTCFSVYCKHGHLCPIDTGLIEKNIELFFSGSAKPIYDDDPSLEGGVNGKNLGPINEWWITGFDGGEKALIGFSTSFAEYILMDPSPEYAPIFGLMQEKIYISKIVVEFLQSNSDSTYEDLINKIETTVPPSGLNLNRFTEDSLLRHAQFVVEQVESYDEAGDSDEQPIFLTPCMRDLIKLAGVTLGQRRAQARRQTIRHSTREKDRGPTKATTTKLVYQIFDTFFAEQIEKDDREDKENAFKRRRCGVCEVCQQPECGKCKACKDMVKFGGSGRSKQACQERRCPNMAMKEADDDEEVDDNIPEMPSPKKMHQGKKKKQNKNRISWVGEAVKTDGKKSYYKKVCIDAETLEVGDCVSVIPDDSSKPLYLARVTALWEDSSNGQMFHAHWFCAGTDTVLGATSDPLELFLVDECEDMQLSYIHSKVKVIYKAPSENWAMEGGMDPESLLEGDDGKTYFYQLWYDQDYARFESPPKTQPTEDNKFKFCVSCARLAEMRQKEIPRVLEQLEDLDSRVLYYSATKNGILYRVGDGVYLPPEAFTFNIKLSSPVKRPRKEPVDEDLYPEHYRKYSDYIKGSNLDAPEPYRIGRIKEIFCPKKSNGRPNETDIKIRVNKFYRPENTHKSTPASYHADINLLYWSDEEAVVDFKAVQGRCTVEYGEDLPECVQVYSMGGPNRFYFLEAYNAKSKSFEDPPNHARSPGNKGKGKGKGKGKPKSQACEPSEPEIEIKLPKLRTLDVFSGCGGLSEGFHQAGISDTLWAIEMWDPAAQAFRLNNPGSTVFTEDCNILLKLVMAGETTNSRGQRLPQKGDVEMLCGGPPCQGFSGMNRFNSRTYSKFKNSLVVSFLSYCDYYRPRFFLLENVRNFVSFKRSMVLKLTLRCLVRMGYQCTFGVLQAGQYGVAQTRRRAIILAAAPGEKLPLFPEPLHVFAPRACQLSVVVDDKKFVSNITRLSSGPFRTITVRDTMSDLPEVRNGASALEISYNGEPQSWFQRQLRGAQYQPILRDHICKDMSALVAARMRHIPLAPGSDWRDLPNIEVRLSDGTMARKLRYTHHDRKNGRSSSGALRGVCSCVEAGKACDPAARQFNTLIPWCLPHTGNRHNHWAGLYGRLEWDGFFSTTVTNPEPMGKQGRVLHPEQHRVVSVRECARSQGFPDTYRLFGNILDKHRQVGNAVPPPLAKAIGLEIKLCMLAKARESASAKIKEEEAAKD

SEQ ID NO: 882 - DNA, 698 bp, Homo sapiens
aggtgagggaggaagggatagccagcgcgaaggaagtgctggagtcgtgtgttttggctgcgcgtgatcctgcgtgggtcgggaggtgtttctgtgaaaagcctaaagattagactgtaagaaaagaaaatagaagccatgtttcgaagacctgtattacaggtacttcgtcagtttgtaagacatgagtccgaaacaactaccagtttggttcttgaaagatccctgaatcgtgtgcacttacttgggcgagtgggtcaggaccctgtcttgagacaggtggaaggaaaaaatccagtcacaatattttctctagcaactaatgagatgtggcgatcaggggatagtgaagtttaccaactgggtgatgtcagtcaaaagacaacatggcacagaatatcagtattccggccaggctcagagacgtgggcattatccaatatgtgaacacaggggtctcgaattttatctggcaagggaaaatagactatggtgaatacatggattacaaaataatgtgaggcgaaaagccaacaagcaattcatagctggattagtattcatatttctgagtgaccagaagaaagagaaggagctacaaaacgatgattcttccttcggcatccattggtaacaggcctcatttcccaaggtcgatgttaaatctttagggttccacgacaggaattaatactcct

SEQ ID NO: 883 - DNA, 448 bp, Homo sapiens
  misc_feature (246)..(246): n is a, c, g, or t
  misc_feature (273)..(273): n is a, c, g, or t
  misc_feature (401)..(401): n is a, c, g, or t
gaagctgggttggctgggttggtagctcctacctactgtgtggcatcaaggtatgggtcatgaacagaaccaaggagctgcgctgctacagatgttaccacttctgtggctgctaccccactcctgggccgtccctgaagctcctactccaatgtggccagatgacctgcaaaaccacacattcctgcacacagtgtactgccaggatgggagtcccagtgtgggactctctgaggcctacgacgnggaccagcttttccttcttcgactttncccagaacactcgggtgcctcgccttgcccgaattttcctgactggggcttcagggaacagggagatgctcctgccattttattttgacaaaagagtttttgcgagtgggatggattccaggcaaatngggggccaaaatttgatggggaaaattccccggtgttccagagggtt

SEQ ID NO: 884 - DNA, 339 bp, Homo sapiens
  misc_feature (8)..(8): n is a, c, g, or t
  misc_feature (119)..(119): n is a, c, g, or t
  misc_feature (123)..(123): n is a, c, g, or t
  misc_feature (132)..(132): n is a, c, g, or t
  misc_feature (289)..(289): n is a, c, g, or t
cgggaggngtccaagaatctgctgatgaactccagaagatgctgcaggaggacgagctgcgggatgcagtgctgctggtatttgccaacaagcaggacatgcccaacgccatgcccgtnagcnagctgactnacaagctggggctacagcacttacgcagccgcacgtggtatgtccaggccacctgtgccacccaaggcacaggtctgtacgatggtctggactggctgtcccacgagctgtcaaagcgctaacccagccaggggcaggcccctggatgcccggaagntcctgcgtgcatccccgggatgaccagacttccggacttctcaggcagtg

SEQ ID NO: 885 - DNA, 543 bp, Homo sapiens
ttattttttttttttttttttttttttggctctagagggggtagagggggtgctatagggagttgcttggaggttggcggccggggctgaaggctagcaaaccgagcgatcatgtcgcacaaacaaatttactattcggacaaatacgacgacgaggagtttgagtatcgacatgtcatgctgcccaaggacatagccaagctggtccctaaaacccatctgatgtctgaatctgaatggaggaatcttggcgttcacagagtcagggatgggtccattatatgatccatgaaccagaacctcacatcttgctgttccggcgcccactacccaagaaaccaaagaaatgaagctggcaagcacttttcagcctcaagctttacacagctgtccttacttcctaacatctttctgataacattattatgttgccttcttgttccccacttggatatttaaagaatgtccaatacaccgttgaaaggtgcttggaacctgcttggcttccttggttagagcccaccacccaccataggcccagcc

SEQ ID NO: 886 - DNA, 4646 bp, Homo sapiens
gtctgtgtcctaatcttctcttttaatggggataccactcaggttggattagggcccatcctaacaatcccattttaacttagttacctcttcagggcctatcttcaaatatactcacattttgaggtacaggtagatggttagggcttcagcatgaatttttgtggggacataattcaaccctccacacataattaccaatttctgaatgtctttctggttaagttgcataaaaacgtttatctacttgaactctaggatgatagttaaaaaaaaaaatgttggccaggcgcagtgatggatgcatatgatcccagcactttgggaggccgaggtgggcagattgcttgagttcaggagttcaagaccagcctggcaacatggtgaaatcctgtgtctacaaaaaatgcaaaaattagctggacatgatggcatgtgcctttggttccagctacttaggaggctgaggtaggaggatggcttgagcccaggaggcggaggttgcagtgagccaaaatcgtgccaccgcactctagcctgggcaacagagccagaccatatctcaaaaaaaaaaaaaaaaagtttatctacaaaaatgcttttgtgcctcttacatacaacccttccagaggaaaggcctagctgagagtaagagatggttgaaaaaaatgcaatgttatgattgctgaacagggcacgactgtttttgtaattttggagaaaataattaaagcctggcacctggggaggcttgatccctggaagcctcctcttgctgaaggaaaattcccagtgctgcctttccatgtgctgtgagtgctttgagttcagactgacaacagagtgggtctagcttctatgctttccatgaagatctcccacaaatgtcatccatgctcatgagatggatcaacttgtatcctgaacaagcaaaactgtttgggactcactgccttcaggcagtcccttggaagccaaggactctgggaacttttcagatgggactggaaacacttgggcaggagttcccctggtaggaggtctgttcacctgtacagcctaatggatgtcctgcttgaggtgccctaatattgcaaattctttgtttacaggggtaccacctgtgcccctgggactgtgcttctgtacatgaccacaactctcatgatgtcccctcagccctggaaagcatttgggttagcttccgcttactggtcagagttatactgtgcctgaattgatgcctcaggtcaggttgaaaaaaaaaaaaaaggttcagacagcaattaagggctgggcacggtggctcatgcctgtaatcccgacactttgggaggctgaggtgggcagatcacctgaggtcaggagtttgagaccagcctgaccgacatggtgaaaagtaaaaatacaaaaataaaaaaattagctgggtgtggtggtgtgcacctgtagtcccagctactcgggaggctgaggcaggagaatcgcttgaacccaggaggtggaggctgcagtgagccaagatcacgccactgcactccagcctgggtgacagagcaagactccatctcaacaacaacaacaaaaaggaattaaggaggaagccacctggcttcctaagatagactttatggttaatgggatttattttagctggttaagtccaggacccctaccaggaagaactgaggtccatatttgaggttggtctcacccttttgcatgtggtcctactaataataattttgctgtaaagaagcctcaataaggagatggactgtgtgaaaagagatgagaaagcaggcctgtttgcaaggctggcccttggctggcatctgaaagcttggatttcaggagggttctcattactccctaaatgataagagtggctcactgtgcctaaactgttcgtacaaacaatgtgggttatgcccaacatctgctttccttctgggagtcagattttcatatgtgttaggcagaggatgaggtgagcagctcccaatgagaaccctgaacactgagtctgtaatgagcttcccttgtatacaacattgcacatgggttgtcacaactgattgctggaggaattgtgtcctatgtgactctgctgggagaggactgtgggaggcttacacctggtttccctggactttgtccatgcgcttttttcctttgctgattttgcttcctagcctttcgctgtagtaaaacatagccatgagtatgactacaggctgagtctgtgaatctcctagtacatcatcagactaggaggtggtggtgttggcaccccccagcacagggcacaagggagacttgcagggtgtttgtcatgttccctttctcaatctgggtgtggtttacagatttgttcagtttgtgaaaattcactgagctctatgaacaattataatatgtacatttttttctgtaagtgtattaaatttcaataaaaagaattcacactataggggtacaaaataacttaatttttcaaagtcttccttttattcagccaacattttagtaagtacccttttttttttaccaagcactgctctgggagcttgggacatggggtagaaaggacggcatcattgtcctcattgtccttcagcttagctgcaaggcaggtgaaggatgcttatagtatggttgatttttgctgggctctatgaaggatcagagggtgctaaggaggcacagagaaagagcttttaacgtgggtattttactgttccagggttgccactcaagtacctacagaacaaacgggtgtagctgtaaactgtggcaaactgaaagcatgtaggcacagagtaagtagctagagctgatttttttcaggaaaggccacaaatcccaacttttatgagctcctcttttaaatgctgtaaatgttttacaatggcggggcgcggtggctcacgcctgtaatcccagcatttgggaggccgaggggcagatcacttgaggtcaggagttcaagaccagcctggccaacatggtgaaacctcttctctactaaaattacaaaaattagccgggcatggtggtgcatgcttgtaattccagctgctagggaggccgaggcgggaggattgcttgaacccgggaagcagaggttgcagtgagctgagatcgtgccactgcactccagcctgggcgacagagcaagattccgtcacacacacaaaaaaaaggcgtggggggaggccaaacaaaaccccgcaagacacatttggctatgacctgccagtttgctaggcattcttccaaccttccctccctctgaccaagaaactgagtgtccactattttaggccctgggaaattcagtagcgaggaggccagacagcttcgttgcatcatggggggctctggtactgtgcttctccaacttcaggatgtgtaggaatcacctgagcagtcttgttgagaggcggacactgactcgggaggtctggggtagggcctgaacgtttgcctttgcggttctaacaagctctcaggtgatggcgatgctactgttccctggccccgaggtagaggaagatttaagtaaaagcttcctggaggaggcgcaagtgaaccgcaggagctttcccggacgcccgagaagggagaaaccccgaaggaattcctcctctctcggggctgggtctccgcatccacgccgggtttggtttcccaggctatcccacgtgttcgggcgtccgtgtcaatcaggttttccccggctgggtccgggtttaaaggctgctgctgcgcagggcgctcccatggtgccgcgcggcgggcgggtttggattttaaatccccgcggccaatcagtggcgcgcaggcttttgtaacgttcccagcgccgcgtttgaattcggggaggagcggagcggttgcggaggctctgctcggatcgaggtctgcagcgcagcttcgggagcatgagtgctgcagtgactgcagggaagctggcacgggcaccggccgaccctgggaaagccggggtccccggagttgcagctcccggagctccggcggcggctccaccggcgaaagagatcccggaggtcctagtggacccacgcagccggcggcgctatgtgcggggccgctttttgggcaagggcggctttgccaagtgcttcgagatctcggacgcggacaccaaggaggtgttcgcgggcaagattgtgcctaagtctctgctgctcaagccgcaccagagggagaagatgtccatggaaatatccattcaccgcagcctcgcccaccagcacgtcgtaggattccacggctttttcgaggacaccgacttcgtgttcgtggtgttggagctctgccgccggagggtgagtgtcgctgctggggaactggaactgcctgcggggcagttggagcgcccagacctggagctgctggaaagagtacccagcaagggagagcctgggacttggagctgctagagaagggtgctgggagcctcccgcttacgtatggaaagtgtctttggtaagggcttcttggctctgggagctgctagaggagggggttccagtgaagtggagtctgagtcatgttgctgatagggaagtcagcttctggacgcgaggtgctggggggaggggtgctggtaatggacg

SEQ ID NO: 887 - protein, 136 aa, Homo sapiens
MSAAVTAGKLARAPADPGKAGVPGVAAPGAPAAAPPAKEIPEVLVDPRSRRRYVRGRFLGKGGFAKCFEISDADTKEVFAGKIVPKSLLLKPHQREKMSMEISIHRSLAHQHVVGFHGFFEDTDFVFVVLELCRRR

SEQ ID NO: 888 - DNA, 2787 bp, Homo sapiens
agagcggaggccgcactccagcactgcgcagggaccgccttggaccgcagttgccggccaggaatcccagtgtcacggtggacacgcctccctcgcgcccttgccgcccacctgctcacccagctcaggggctttggaattctgtggccacactgcgaggagatcggttctgggtcggaggctacaggaagactcccactccctgaaatctggagtgaagaacgccgccatccagccaccattccaaggaggtgcaggagaacagctctgtgataccatttaacttgttgacattacttttatttgaaggaacgtatattagagcttactttgcaaagaaggaagatggttgtttccgaagtggacatcgcaaaagctgatccagctgctgcatcccaccctctattactgaatggagatgctactgtggcccagaaaaatccaggctcggtggctgagaacaacctgtgcagccagtatgaggagaaggtgcgcccctgcatcgacctcattgactccctgcgggctctaggtgtggagcaggacctggccctgccagccatcgccgtcatcggggaccagagctcgggcaagagctccgtgttggaggcactgtcaggagttgcccttcccagaggcagcgggatcgtgaccagatgcccgctggtgctgaaactgaagaaacttgtgaacgaagataagtggagaggcaaggtcagttaccaggactacgagattgagatttcggatgcttcagaggtagaaaaggaaattaataaagcccagaatgccatcgccggggaaggaatgggaatcagtcatgagctaatcaccctggagatcagctcccgagatgtcccggatctgactctaatagaccttcctggcataaccagagtggctgtgggcaatcagcctgctgacattgggtataagatcaagacactcatcaagaagtacatccagaggcaggagacaatcagcctggtggtggtccccagtaatgtggacatcgccaccacagaggctctcagcatggcccaggaggtggaccccgagggagacaggaccatcggaatcttgacgaagcctgatctggtggacaaaggaactgaagacaaggttgtggacgtggtgcggaacctcgtgttccacctgaagaagggttacatgattgtcaagtgccggggccagcaggagatccaggaccagctgagcctgtccgaagccctgcagagagagaagatcttctttgagaaccacccatatttcagggatctgctggaggaaggaaaggccacggttccctgcctggcagaaaaacttaccagcgagctcatcacacatatctgtaaatctctgcccctgttagaaaatcaaatcaaggagactcaccagagaataacagaggagctacaaaagtatggtgtcgacataccggaagacgaaaatgaaaaaatgttcttcctgatagataaaattaatgcctttaatcaggacatcactgctctcatgcaaggagaggaaactgtaggggaggaagacattcggctgtttaccagactccgacacgagttccacaaatggagtacaataattgaaaacaattttcaagaaggccataaaattttgagtagaaaaatccagaaatttgaaaatcagtatcgtggtagagagctgccaggctttgtgaattacaggacatttgagacaatcgtgaaacagcaaatcaaggcactggaagagccggctgtggatatgctacacaccgtgacggatatggtccggcttgctttcacagatgtttcgataaaaaattttgaagagttttttaacctccacagaaccgccaagtccaaaattgaagacattagagcagaacaagagagagaaggtgagaagctgatccgcctccacttccagatggaacagattgtctactgccaggaccaggtatacaggggtgcattgcagaaggtcagagagaaggagctggaagaagaaaagaagaagaaatcctgggattttggggctttccagtccagctcggcaacagactcttccatggaggagatctttcagcacctgatggcctatcaccaggaggccagcaagcgcatctccagccacatccctttgatcatccagttcttcatgctccagacgtacggccagcagcttcagaaggccatgctgcagctcctgcaggacaaggacacctacagctggctcctgaaggagcggagcgacaccagcgacaagcggaagttcctgaaggagcggcttgcacggctgacgcaggctcggcgccggcttgcccagttccccggttaaccacactctgtccagccccgtagacgtgcacgcacactgtctgcccccgttcccgggtagccactggactgacgacttgagtgctcagtagtcagactggatagtccgtctctgcttatccgttagccgtggtgatttagcaggaagctgtgagagcagtttggtttctagcatgaagacagagccccaccctcagatgcacatgagctggcgggattgaaggatgctgtcttcgtactgggaaagggattttcagccctcagaatcgctccaccttgcagctctccccttctctgtattcctagaaactgacacatgctgaacatcacagcttatttcctcatttttataatgtcccttcacaaacccagtgttttaggagcatgagtgccgtgtgtgtgcgtcctgtcggagccctgtctcctctctctgtaataaactcatttctagcag

SEQ ID NO: 889 - protein, 662 aa, Homo sapiens
MVVSEVDIAKADPAAASHPLLLNGDATVAQKNPGSVAENNLCSQYEEKVRPCIDLIDSLRALGVEQDLALPAIAVIGDQSSGKSSVLEALSGVALPRGSGIVTRCPLVLKLKKLVNEDKWRGKVSYQDYEIEISDASEVEKEINKAQNAIAGEGMGISHELITLEISSRDVPDLTLIDLPGITRVAVGNQPADIGYKIKTLIKKYIQRQETISLVVVPSNVDIATTEALSMAQEVDPEGDRTIGILTKPDLVDKGTEDKVVDVVRNLVFHLKKGYMIVKCRGQQEIQDQLSLSEALQREKIFFENHPYFRDLLEEGKATVPCLAEKLTSELITHICKSLPLLENQIKETHQRITEELQKYGVDIPEDENEKMFFLIDKINAFNQDITALMQGEETVGEEDIRLFTRLRHEFHKWSTIIENNFQEGHKILSRKIQKFENQYRGRELPGFVNYRTFETIVKQQIKALEEPAVDMLHTVTDMVRLAFTDVSIKNFEEFFNLHRTAKSKIEDIRAEQEREGEKLIRLHFQMEQIVYCQDQVYRGALQKVREKELEEEKKKKSWDFGAFQSSSATDSSMEEIFQHLMAYHQEASKRISSHIPLIIQFFMLQTYGQQLQKAMLQLLQDKDTYSWLLKERSDTSDKRKFLKERLARLTQARRRLAQFPG

SEQ ID NO: 890 - DNA, 520 bp, Homo sapiens
tttttttgtatttttagtagagccttaccatgttgcccaggctggtcaccaactcctgagctcaggcaatccgcctgcctcggcctcccaaagtgctgggattacaggcgtgagctcccacgcctggctctatcaaggttttcaaagccctttgcagatctgccaggtatggggatgggcacgagtggatggactgtctgaagcgaacactcccatctcccaggtactcgggaggcctggccccacctaataaccatatgtccattctccaggtgggcctcgacaaaggtgaactctgcaactctcagctgcctttgctcggagaagagcacctcacagcatggccagaagctcagggctgcccacgtcaagccctcaccagcgcgtccttcagcgccccgggaacaacgcttccccctgcaggcggggagcagccacgcacaaatgcttggcactgcagggcacacacaggagccgcagccatggagcgcagagcaccctgctcacctgcctccaccag

SEQ ID NO: 891 - DNA, 2046 bp, Homo sapiens
gttgacagcggcggcggtggaaccgggcgggcggcgggagtcggcgcctcgggttcctacctcgcgtccctaggcggcggcggccgggcgtcccgggatggccttcatggagaagccgccagccggcaaggtgctgctggacgacacggtgccgctgacagcagccatcgaggcgagccagagcctgcagtcccacacggaatatattattcgagtgcaaggaggaatttctgtggaaaacagctggcagattgttagaagatacagtgactttgatttgcttaacaacagcttacagattgcaggcctaagtctacctcttcctcccaaaaaattgattggtaacatggatcgtgaattcatagctgaaaggcagaaaggtcttcagaactatctcaacgtgatcacaacaaatcatatcttgtctaattgtgagctggttaagaagtttttagatccaaacaactattccgcaaactatactgagattgccttgcaacaggtttccatgttcttccgatcagagccaaagtgggaggtggtggaacctttgaaagacataggttggagaataaggaagaaatatttcttgatgaagattaaaaatcagccaaaggaacggctagtgttaagctgggctgaccttggcccagacaagtatttgtcagataaagattttcagtgtctaatcaaacttctgccttcttgtttgcacccttacatctatcgggttacctttgccacagctaatgaatcctcagcgttgctaattaggatgtttaacgaaaagggaacattgaaggatctgatctacaaggcaaaaccaaaagacccatttctaaagaagtactgcaaccctaagaagattcagggcctggaactccagcaaataaaaacatatggacggcaaatattagaggtactgaagtttcttcatgacaagggattcccttatgggcatcttcacgcctccaatgtgatgctcgatggggacacttgccggctgctggaccttgagaattccttattgggcctgccttccttctaccgatcttatttttcacaattcaggaaaatcaatacattggaaagtgtggatgtccactgctttggccacttactgtatgaaatgacttatggacgaccgccagactcggtgcctgtggactccttccctcctgccccgtccatggctgtggtggccgtgttggagtctacgctgtcttgtgaagcctgtaaaaatggcatgcctaccatctcccggctcttacagatgccattattcagcgatgttttactaaccacttctgaaaaaccacagtttaagatccctacaaagttaaaagaggcattgagaattgccaaagaatgtatagagaagagactaattgaggaacagaaacagattcaccagcatcgaagactgacaagagctcagtcccaccatggatctgaggaggaaagaaaaaaaagaaagattttagctcgaaagaagtcaaaacgatctgctcttgaaaatagtgaagagcattcagcgaagtacagcaactccaataattcagcaggatctggggccagctcacctctcacgtccccgtcatcgccaactccaccctctacatcagggatatctgcattacctccacctcctccacctccaccaccaccagcagctcccttgcctcctgcgagcaccgaggcacctgcccagctctcgtctcaggctgtgaatggcatgagccgaggggccttgctcagctccatccagaatttccaaaaaggaactttgaggaaagccaaacctgtgatcacagtgctccgaagatcggctgaagcttcctgtttacacttggagggaaaagttcttttttattcctactcacccctaccccccaactaccctcttcctgggaaagtaattgctgagccagtacagccacaaacagtactattttgcagatgctcatgtaagcagcttttcgagagaaataattctttaagcagaataaagttaggctggcatgcaaaaaaaaaaaaaaaaaaaaa

SEQ ID NO: 892 - protein, 649 aa, Homo sapiens [sequence omitted]

SEQ ID NO: 893 - DNA, 237 bp, Homo sapiens
aagctttgcagtgctctctggtgaagcccctsccctggsaccgcctsccctagcttccctctgggaagtgacttcctggtaaggtaaaaagtgtgycaccagctgcttctgcaaaacagatgcactggcagcccaggggagtccttstgaggtgggaaatggcttctsmctgcttaatttagcttcaaaagcacacatattyycatgatygtgcscacacgcatatgtgtgtgtgwa

SEQ ID NO: 894 - DNA, 359 bp, Homo sapiens
tgacctgggaccaagggccagatcagacgcgcgcgaggttcggggagctcggccaggctgctggtacctgcgtccgcccggcggacaggctgctttggtttgtgacctccaggcaggacggccatcctctccagaatgaagatcttcttgccagtgctgctggctgcccttctgggtgtggagcgagccagctcgctgatgtgcttctcctgcttgaaccagaagagcaatctgtactgcctgaagccgaccatctgctccgaccaggacaactactgcgtgactgtgtctgctagtgccggcattgggaatctcgtgacatttggccacagcctgagcaagacctgttccccgccttt

SEQ ID NO: 895 - DNA, 210 bp, Homo sapiens
atgaacaaaaaggtcatcataagggacagcctgtkagtttatgcactgcatactgcaaatkacccactccagcaatgggaagacacccctaacattgcttctttycttataacggaaatwttwtttwttatcagctttaactgtkctctaagcctacatatctwactkcctaatggccttttcacttgattgacacatcattyagtttca

SEQ ID NO: 896 - DNA, 9645 bp, Homo sapiens
aagcttcagagtgctctcctccactagggcatcttccagatctgcctacaactgcaccccatcccgaaggcgaggggttctctgtaacaggtggaaaactgaggcccacagcaggcatcaggggagacgagctccttaccagccgcccaactgagacaggagccaggagacttagtgccccttcctggggttccaatgctggaggaccatcctctgagcagctccaccctcagcatctcaattccctccctctctagggccctcagcctcatacagcacaggcgagagtccctgggaactgtgggagccagggaatgtggaccccagaggcaaagctgggagtgctcacaaggacgattgtcccaaactgtcagggccccagcacccagtctgagaagctctgggaacaagtggccccgtagacgccagacacacagagcctgagctgggctcattctccagatagaagttcttcctcctattgccctgacacctggcacgcggcctgctcgatgtcccatctcacccatctgcgccctcccccagctgggcaccagcaccctggctgttgaaggccagtcggggagatggatgaggaagtgactcctcaaggggcccttgtggttcctcccccagagctattcctggcctgggcgcctctccaccctccagtcctcctgcttgacctgaccccacagctgggaatcgtttgctgggggtggggcagcccctgactatataagcctggacctaggtgtcccaggcaccctagagcccaggccccccaacggctgacccctgcacactccaccctggccccccagccagtccagcaatgatggaaaaaaacacctccgagggccctgcctgcagtccagaggagaccgcatctgaatctgccaaggtgcccacagcagagcctcccggagaagtggcagtatcagagtccaccagagaagagcaggtgcccaagccgcacggccctgccccacaggcccctacagcctccacagccactaagcctgcacccccaagtgaaggtgactgaaggtggggcagggggaggagggaggcaggcatgtcaggggtggaggggagctcttggccatgaacctcttcatctccccagatgtccccagtgccccactgctgctgaccctggatgatgtgagcagcagctctgtgactgtgagctgggagcccccagagaggctggggaggctgggcctccagggctatgtgctggagctctgcagagagggaggtgagtcgtctgggctaagtcttgcatacatccaggggaggttgtcatggagggctgcagggacaagtgcacaggccctgtggttggtcagtctgggagagatacagaaggaggggatgcgagcagtaggctcctcaacccacccacctgccctttcttgctccaccagcaggagagcaagaaagggtaggtgggtgggttgaggggctcccttgtcctcagctccaaggagcttctgagtaagggaagggtaagggggcactgggttctcctttggtgagaagggaaggaagtgctaagtctcagaggaccccgaactgtaggaagtggaaagggaggagctggagaggggaatgttagcgtaagagacagtgaggagaaagcgggaatggggtggggggtgtggggccacatccctgctgccactgtccccctccatggcccaagtccagcctggcctctgcctctgcccctaccttgctgtgtgactttgcaaatgtgtccaaccctctctgggcttcaacaacctcatctctagccacaatttcagggctctaacatcaggtgtctttgatgccatttgacaagaagtcagggaaggcaaacaaggggaaaatgaggcccagagagggaggctgatttccccagatcacaagcaggaaaagaagccccatggagaggggcgcctgtggccacattgcaaagacctcacactctctccatcccctcaggctcggagtgggtgcctgtgagtgcccggcccatgatggtgacccagcagactgtgcggaacctggctctgggagacaagttcctcctgcgcgtgtctgcagttcgtcctgcaggggctggcccgccggccatgctggaccagcccatccacatccgagagaacattggtaaagcccatcctggccttcagctacccagcccttcccaaacaccttatctaatggagaaactgaggccagcaggtagagggaaccagccagtcatttcccccgtcccacgctcacatgcacaagccacacgctatcaccatcttgccttaagaaagttccaggttcctcagcagtaaggggcctctggaggtctaagaagccatttccctgagtggtccagcccccacgcttgagaaggggctcagaaacaaaagtccagttccctgggtcacctgctcaatgctaagagtccatctgttctatctcccatctaatctcaatctctccagtggccataaatgctcattttctacccatttcctgtggcctgggttccagattctctcaaaggtcttgaaacagagagaaggcgctgcttgccccttgttccaccatggccctagtggaaagaaaaagaaggtctgcaaaaggcccatgaagacttctccaccgcagagggcatacctcactggggccccgcaggccagctgccatccccattgctaatatttctatttgcaaggtgcattagcctcaatcctcccctcgctcccctcccggagctgatcgggtttcagtctgttaatgacagtgagtcatttggtctgatctgaggtctctggggacagcacagtcccccagggtgaggagagacacaggcaggcaggtggcctgaagccttctccaccttccttcttgctcctccactaggggatggatgatttctggtagctctagacaaggcctccagaaggagaggggatccacaggaggggtcaagtctggattcgaaaggaaatgctcagctctgaggcctgagagacatgggaaccatggggttagggagcttagattcatagattatcaaggcccaaggagatcccaaggagcccagggcatcccttgaggtcacccagccttttattggcagtcccagagtctgatgcctacacaggaccactcatgtcccactgcactgcagagcatcttctctggtggcacccaaaacccaagcctcccaaccctaattcccagcctttggctctaggtgagatgtggccccaccaggcagctgcattatggctgtgtcgaccctagtcctggaggcgccaggaaggcttcttggttgggacggtgctgggccttccccagggaaccagggagctcagactctgagaggcccctgaggcccagcattgatggacccagccagactcagcacccacttctccattcaaattcctctggcaggagagaaggggatttcctggagagaagagggagaggaggctgtgaacaagtggggaacagccaggcttatcacagggcagagtgggggccctgtccaggatccttggctgctcagctgtctctccttggccacctggagctgccaagcattcttgaccccctgcagctgtccctagagcattccatgcctgagctcccagagccaagtgcccactcagctaatcctcagagacaccgtgttccttctcactgtcttgtcctcctccgccctgcatgccaccaaccaactgctgccacctgtttgctgctgaggagcctcagtcatggacccagcacccaccccaggggacagggatggtggccactgcagcttcccttagaatgcccaggggcttcagtggttgcccctgaccagatgagggtcagaatgtcattccttagcatagcaggcagctgaaataggacttcaagaaggacttcccggctctgagactaacagattttgggagggtgacagaggaagaaggggggatacccgccctggcttcacttgggaagagaaagatcctaaacctttcaatagggcctggagacagaggaatggacaaacagggtttcacaaaggcttctctgaaagtcctgggcttgtggagagctggggatattagagcaggaagacggcagtggcctccccttcctagaagtgcagcctgacaggtgcagcacctgctccccagcagggggagacagagagtcagctggggcccatctggtgcttgggaatgcctgggctgcaggacaaatcccatcctggcagagtcgaggcgccaagggagttcccaggatgcttaccagttcacaccatggaggcgctgacctcctgaaacctcctgctcccttaagggatttgggcccctagacctcaggagtgagagcttcacccttcctgcaaggagggaccccatggcagccaggcacacccaggaccctcctcccagccagcatccctcaccagctgtcccctgccccatctcagaaaccccaatcagccaccccactgcactgctaagcccagactcttgctttgatccagaggcccccaagatccgtgtcccccgccacctccgtcagacctacatccgccaggtgggagagacggtcaacctgcaaatccccttccaggtgggtattacccccaccaagggtaacagcctgggtgggaaccagggcccccatttaaggggagcctgggagatggcagggtctccaagggtccagctgagacccagcgagacggcttcatccttccgcaatcatgcacatgactcattggtgattctcagcctgtggatgggcaggtgggcccccagagcgggatggacacctggaagatgtggctgtgggcagcacctgtggctccagcctctgctgcccctcctgagaagggccagtgggacaggcttccccgagaacagctccagagactcctggagttaaggaggtgtggggactctggcacctccctacactcaccctgggggctcctccctgccaggggaagcctaagcctcaggccacatggacccacaacggccatgccctggacagccagcgggtgagcatgcgcaccggggaccaggactccatcctcttcattcgctcggcccagcgctccgactctggccgctacgagctcactgtgcgcgtggaagacctggaggccaaggcagtcattgacatcctggtgattggtatggagccaggggaacagtgctgtctcatgggggacctggagcccccaacctcctatcccagagctgatggctgatgggagcaggccaagggagtgtggcaagagccaaattttgggtgtgggggctctgtgccagcctggccctcacactcacttcctctcacactctgggcctacagagaaacctggacccccctgctgcatcaggctcctggacgtctggggctgcaatgctgctcttcagtggacgccaccccaggacacaggcaacacagagctcctgggctacatggtgcagaaggcagacaaaaagacaggggtgaggctggctgaggcaaagtggggtcggggtacgaagtggtcaaggtggtggggaaggcccatcccactgagtctagggaccgagtctagggatcgagttctggtctgcccactgctaacctgactccctaggaggcccttagcaagactcttcctctctggacctcagatgcctcctgaagactgtgaagagggctggcccgggctgtctgaagcctttcaagttctggagccatgcttctcaaatcttaatgtccacatgagtcacctggggagcttgctaagaggcagagtctgactcagctaggtccagggtgggggctgagggcctgcatttctaagacgtttccaggtgatgctgaagttgcacatccatgggccacactttgcacacaaaggctctaggattctctgaggaccctacagaggtcacctgagtgacccaggggccccttcttccaattcaatgtccctgaggcccaaagctggatggttcagcatcctaaggttgggggcatggaatgagttcctgtgaggaaaggtctccagggtaagcagggagggtgaggacaggggtgagaaatgagggtgacacccggggccctgcagcaatggttcacagtgctggagcgctaccacccaaccacctgcaccatctctgacctcatcatcggcaactcgtactccttccgggtcttctcagaaaacctgtgtggactcagcacctcggccaccgtcaccaaggagctcgcccacatccagaaggcaggtgggtttgggcccggagctggctgtgctaactctctccctgtctctgcttcttcctccgcgtctctgcacccctctctctgggtttctcctgggcgtctgcccctggaacacttgccgtctcctcactccacggctatgcatacacacacatggagtggctgcaaagtagtgaatgtggttggctgattttaacaaacacatcagagcaaatccacacaaatgaaagatgcccctttggaggctgtgtgcttattccaaagaggtgtgtggctgccagcatcacagcagccgccgagtctcaggcagtgagtgtccgaagggaacctaaagggtgacctgcgcatggctgggtagtgtgctaaaacaagcctcccaaccctaatacataccacatagatggacaagagagataggagtatttactgtctccacacaggcacctgaccctcttgcgtcaaatgttaaaccccgggcccttttccctgtcccttgtgtgccccaaggccctctccgacccacagtctgtgtgggttccagaaggcaaactttttttaacactagcctgaactgcacagaattaggaagaaacttttgtttaaaaaaagaaagccagtcaagtctccaacgacaaacccaaaggaaacgtggcacctctgagttgctagcatccatcttctgccaagatgctcttatctctggtttttccaccttctcatctctactcatcaccctgacccacccagctacagtctcagctttctctgcctctttgagattgtccaagttcctgcaaataagccacgacttgctatccatagatcttgaatcatagtcagtcctgacaggtctccctcactcctgtaagctcagatgcacccgactttctcccctgaacccagatattgctgccaaacctaaagggtttattgagcgagacttctcagaagccccctcattcacccagcccctggctgaccacacctccacccctggctacagcacccagttgttctgcagtgtccgagcttcacccaaggtgaggggccaggccctgttgtgccctgggctggtgggggcaggtggggacagcagggctgaggaatcctccgggcgtccacacctaagcctggggatagctgttgagagccccgccccagtccatacctccccagctctcttctgaccatgtctcccagcccaagatcatctggatgaaaaacaagatggagatccagggcaaccccaaataccgcgccctctctgagcaaggcgtctgcaccctagagatccggaaacccagcccctttgattctggggtctacacctgcaaggccataaatgtgctgggggaggcatctgtggactgccggctggaggtcaaaggtgagagtttgaggacgggagaacaggagtaagcacctctctggaactggactagaggcagcagacagcttaaaatcaaggccgaagagaaggggtggtaagactggggtcaggctgtgctgattactttccaagcggcagggtggacaggtgtagaagagggtgtataaccgtgaactttccagttccccgccacttcccccaagctctaactgcagcatctcttccagcctcagccgcacactgaagagtcacgggaggaggctgtgatgaggagccaggtaaatggcctgacccacccactctgttacctctgtgggcagcacagaagcagagaggaggccaggagcagggggttggggtgagaagggaagtgtggtcagctctgtggacacaaacttgtggacacaggcaactagcacgcatgtccagagactcacagtgatgttgcagggccaggcgacgccggtgtctcctggaaggggggtgattccgtggaccgccacacaaccagagtctactcccagctctgagtgatcttcagcaagggtgttctctttggacacattctctcatccgaaaactggggataacaacctttccctgccttccttcccctggtggttctgaggctctgcataagtacggaagtatctagaactgcagtgggcagagctcagacctgggcattgcacctgagggagggaggcctggtgaggaagaggatgctgctccccctccccactctgcacctctctggcctgcagccgagctctgctcacaccaggggctcaggaagcatgtcctcctccaggtgctgcaggcctgaggggccaggtccaccaggcctacagtcaaactccagagatgcccaagacccccgcttccatagcgacggctgatggaaccgcccctggtacctgctggcctcccttccccagaggctggtgtccagaactcaggaatgggcctggtaggccccaggccagactaactgggctcaaggggtgctggaaggcgcagagattggagtgccctgcggagttgcactctgggtgggaagcactcaaataaagatgcgtggtgttaacagtgcggggcctctgtgcagtgagcgacatcatctgggggaggcgctgtgtcacgaggagggggggtgtctgaatgtttcaccatgagggggtctccagatatgtcaccaagaggaagatgccaatgggagaggtctcaggatgtcatggctggggcagggaggtggggggatggggggtgttctggacctgtgagttttcaggatctcccttctgatcagggtttgctaccgccagtgcgtaactatggaaacagacacaccctctctggaaccctccttgctccaacgcctccacgtgccccctctcgcagctcctcccagcccccgtcattgcttcctgtctgctgaagctgtcttattgccctcaacagtggtggggatgggcgcccagcaatgtgctctccacagggttcacagttttttattagtcacatgggcctcccttgggagccagggcacacccaatttccaacagagggaagggcttggaagcaagtcctggagttgacactcatgttcagaaggtcaactcgacggccacctcccctccctcgccccccgacacaggggctccaggatcccccgcctcgccctcccacacaggggctccaggctcccccgcctcgccctcccacacaggggctccaggctcccccaccttgccccccaacacaggggctccaggcttggcagggcatgggttggtccttccccagatccctaaagtcctagacccccggacacctgcaacagagcttccaaagcccctgaaaacccagccagatactaggggtattgagggattcacatgacagcaaggccttcccccacatgctctcaggggggtactctcctctgcctgctgcag

SEQ ID NO: 897 - protein, 477 aa, Homo sapiens [sequence omitted]

SEQ ID NO: 898 - DNA, 2476 bp, Homo sapiens
atttttagtttgttgaagttcgtgactgcttcactctctcattcttagcttgaatttggaaatgacttttgatgacctaaagatccagactgtgaaggaccagcctgatgagaagtcaaatggaaaaaaagctaaaggtcttcagtttctttactctccatggtggtgcctggctgctgcgactctaggggtcctttgcctgggattagtagtgaccattatggtgctgggcatgcaattatcccaggtgtctgacctcctaacacaagagcaagcaaacctaactcaccagaaaaagaaactggagggacagatctcagcccggcaacaagcagaagaagcttcacaggagtcagaaaacgaactcaaggaaatgatagaaacccttgctcggaagctgaatgagaaatccaaagagcaaatggaacttcaccaccagaatctgaatctccaagaaacactgaagagagtagcaaattgttcagctccttgtccgcaagactggatctggcatggagaaaactgttacctattttcctcgggctcatttaactgggaaaagagccaagagaagtgcttgtctttggatgccaagttgctgaaaattaatagcacagctgatctggacttcatccagcaagcaatttcctattccagttttccattctggatggggctgtctcggaggaaccccagctacccatggctctgggaggacggttctcctttgatgccccacttatttagagtccgaggcgctgtctcccagacatacccttcaggtacctgtgcatatatacaacgaggagctgtttatgcggaaaactgcattttagctgccttcagtatatgtcagaagaaggcaaacctaagagcacagtgaatttgaaggctctggaagaaaagaaaaaagtctttgagttttattctggaatttaagctattctttgtcacttgggtgccaaacatgagagcccagaaaactgtcatttagctggctgcagaactcctttgcagaaactggggttccaggtgcctggcacctttatgtcaacatttttgattctagctacctgtattatttcacctagcttgtcccaagcttccctgccagcctgaagtccattttcccctttttattttaaaatttgactcctcttcaagcttgaaaaccctctgaactcagtcttctttacctcattatcaccttcccctcacactcctaaaattgcatgaaagacagaacatggagaacttgctcaagtgcaggcagagagcaaaaaggggaaatatgtctgggaaaaagtgcacgtgaagaaacaaagaaggacagaggccattccgaaatcaagaaactcatgttcttaactttaaaaaaggtatcaatccttggtttttaaactgtggtccatctccagactctaccacttacggacagacagacagacagacacacacacacacacacacacacattttgggacaagtggggagcccaagaaagtaattagtaagtgagtggtcttttctgtaagctaatccacaacctgttaccacttcctgaatcagttattatttcttcatttttttttctaccagaggacagattaatagatttaacccttcacaacagttcttgttagaatcatgggatgtgtggcccagaggtaagaatagaatttctttccctaaagaacataccttttgtagatgaactcttctcaactctgttttgctatgctataattccgaaacatacaagacaaaaaaaatgaagacactcaatctagaacaaactaagccaggtatgcaaatatcgctgaatagaaacagatggaattagaaatatatcttctatttttaggcttctatttcctttccacccactcttcacaggctattctactttaaaggaagcctttttattttgctgcacacaatctagcaggaatctttttttttttttaagagctgtgtcatccttatgtaggcaagagatgtttgcttttgttaaaagctttattgagatataattaacataaaataaactgaacatatttaaagtgtactatttgataagttttcacaccttgtggagaacatgcatactacaattaagagagtgaacatatccatcatccctcaaagtgtcacaatgctcctcctgatgactcctccccagaaaaccaccaatcggctttcattttgcattttgtagttttatgtgaatggaatcatatagtatgtcttttttttttgtctggcttctttcactttgcataattattttgagattcatatgtctccatcttgatgctcgtatgaattcattcttttaaatgttgaatattcccttgtatggatataccacaattcatttacccatttacttgttgatgacatttgggttgttttagttttgggatattacaaataaagctgctgtgaacatttgtgtacaaaaaaaaaaaaaaaa

SEQ ID NO: 899 - protein, 273 aa, Homo sapiens
MTFDDLKIQTVKDQPDEKSNGKKAKGLQFLYSPWWCLAAATLGVLCLGLVVTIMVLGMQLSQVSDLLTQEQANLTHQKKKLEGQISARQQAEEASQESENELKEMIETLARKLNEKSKEQMELHHQNLNLQETLKRVANCSAPCPQDWIWHGENCYLFSSGSFNWEKSQEKCLSLDAKLLKINSTADLDFIQQAISYSSFPFWMGLSRRNPSYPWLWEDGSPLMPHLFRVRGAVSQTYPSGTCAYIQRGAVYAENCILAAFSICQKKANLRAQ

SEQ ID NO: 900 - DNA, 582 bp, Homo sapiens
ctgggagccaagctggtctggcaagggcgctcaggcctgggagagaagggagcaatggccagtcaccttcaccttctaactaactagcctccggatgaggtggctgccaccaggcccgaatgatccccaggagcccagcttacaaaccccaacatcgaatcaaacatctccatccccaagtgcagtaacacacaaaaaccaaacactctgccctgggaaaggcctggtgcgattctcagtaggactcacacccaccctacctagaagtactgggctggcctgggtactgcatccgtgtgttttgataagggggtgatgtggccacgcccttatctagatttcactttgtatccactgggcacagatattctagagaacttatctttcactcttgtaaaagccacatatccacatctctttcattttctcagtgtgttatgcagcaatttaataaaagtatttattgtctaaaaaaaaaaaaaaaaactcgagggggggcccggtaccccaaatccccttatgtgaagagtataaggcgcgctaactggccggggttttacaagtggtgaatgggaaaaccct

SEQ ID NO: 901 - DNA, 458 bp, Homo sapiens
tttcactgttcattgagcagtttattaccatcaacctgtccccagctttccagcacaacagccagcccacactctagacacgccttcactccagtccattctggcacctagcctcagtcttcaccctcctccctcctccacacactccttcccccagccctccaaggcagcaccaggcctgagggccacacctcagctgggggaggggagggaagacagtgagacaaacagaacctggggaaagaggagccagggttggccccaagcttctgtagccaccactccaggaaggagggaaagggggaagggctgaggctggggctggggttgccaggtgatgacagttcacgtggttcaggcaggaggctcttctccaggaggtgcagggaagccactcaggtctcggccaatgatctcactcacttcctccagcgtgataccctggatagggacactgt

SEQ ID NO: 902 - DNA, 392 bp, Homo sapiens
  misc_feature (66)..(70): n is a, c, g, or t
tttttagcggggaggagtgaagagagtgaggtttggggatccttctcggagagagaaaggcgggcnnnnncccttgtgccccgcgcaggccgacgcgcttagccgattccgcacgttgggcaagtgggggcacagcgtccccgggcactccggtcccggcaggtcaggctcgcgcgggcagcgctcacacccagtcctccgagcctggggttccacggccgaaatgcctgcgacagagaattagagatagaagctcgtgaatgtccctttcttcgaagggctgggaccccgggcgggccgctggccagctcgcccgcagcccgttgccatgtgctccctgttgctgctcccggtgattgacaggccggcgcacagtcggcgtgtcagccgcg

SEQ ID NO: 903 - DNA, 413 bp, Homo sapiens
  misc_feature (204)..(204): n is a, c, g, or t
ttttttttgagatatgcagctattttatttctctaaattctctattgccttgacaattatgctccagttgaatgttccttctccattcttgtgtaaatattccaaagccgaaagaacaaatgtccaaaagtcattgtcacacaattctgtaaaagacacaaataaatggaagtctcaaaacttctaatgtaaaacttgactggnccaagcacataatttgggatgaggcaaatttggggtttgggattattttaaatataggactttgttcttaaaatttagtgtaacatacaggaaaaacttgggtttctggatatgggctttacttaggattatggtgaggcaaaaatggaaactggaattatccaaatgaggtaataggttgtgctgggaggaggtcctatccttatcct

SEQ ID NO: 904 - DNA, 2284 bp, Homo sapiens
aaaggagactggccgctggggctcaggaccgggattatccgagctctgcagaagtgcaccgctattgctttgggagggtaaaaaaaaaaaatcacacggtttccagtgaaaaagtgacagagggtggtggcctttggaaccgtcgtgaagtcttctgcctggaacccgaaacttgcatgctatggaacacccgctctttggctgcctgcgcagccctcacgccacggcgcaaggcttgcacccgttctcccaatcctctctcgccctccatggaagatctgaccatatgtcttaccccgagctctctacttcttcctcatcttgcataatcgcgggataccccaacgaagagggcatgtttgccagccagcatcacagggggcaccaccaccaccaccaccaccaccatcaccaccatcagcagcagcagcaccaggctctgcaaaccaactggcacctcccgcagatgtcttccccaccgagtgcggctcggcacagcctctgcctccagcccgactctggagggcccccagagttggggagcagcccgcccgtcctgtgctccaactcttccagcttgggctccagcaccccgactggggccgcgtgcgcgccgggggactacggccgccaggcactgtcacctgcggaggcggagaagcgaagcggcggcaagaggaaaagcgacagctcagactcccaggaaggaaattacaagtcagaagtcaacagcaaacccaggaaagaaaggacagcatttaccaaagagcaaatcagagaacttgaagcagaatttgcccatcataattatctcaccagactgaggcgatacgagatagcagtgaatctggatctcactgaaagacaggtgaaagtctggttccaaaacaggcggatgaagtggaagagggtaaagggtggacagcaaggagctgcggctcgggaaaaggaactggtgaatgtgaaaaagggaacacttctcccatcagagctgtcgggaattggtgcagccaccctccagcaaacaggggactctatagcaaatgaagacagtcacgacagtgaccacagctcagagcatgcgcacttatgatataaacagaggaccagctccattctcaggaaagaaatgttgtgatggcaagccttacccaaatatcgtttacacagagagatgactatggcagtgatgtttaatattattaaatccaggcatttcgaatctgtttttcatgatttatagagggtttacacaaagtgccacttattaaagagcttccacagtgaagatggagaaggtgaacttgctttgaatattccagatgtgtttggtcgtgcgtatggcagtgagcaggtatgtgtttgcttttgcttgcactgaaaattaaattgctatcaagagcaaactatgaacggttttttattcaagatgtctccagagtgaagatgccgaggatgaacttgcattgaacattccagatgtgtgagatcatgtgtattacagtgggcaggtatttgcttttgcttgcactgaaaattaaattgctatcaagaataaaccatgaaacattttatcctgaacagccacagtgcctgaattcactcaagtggataaaaagtgtattttaactctgtatatattacccttaagtcattttcctgtcttcactaatttagcaatgcattcatattagctgatgaaaataggcactcacaatgacaaccagagccagtttcttgtcttttttatacattttgtcatcccagagacaatcagtatgtgcttacctgtgttcaagtagagaaaaatacagtagagtctgataggacatattcttgtaccacagacaaaacaaatcttatgttgcatttactatcaactgctgctaatacgttattataaaacttacctagctcctgaattcttcctatcttatagcttaaaaaaattaggatcataggcaaatcagttaccttgcagaaagagctttgtatgacagacattgtcttattttatttctgtaaaatattagctgtatgaatatgatttaattaacaagaaaacatttcttcctgattgacaacagtgttagacaaggtgcaaagcgaaactggttgctcaagttgatagaaaacaaaattctgaatatcttcaaattaaattcggtaaaaacacattattttttcatatgtgatgtattcatgcagaacaactatctttgtattttgtttttaaaatgtgtttaataaatgatcctttgtaaataaaaaaaaaaaaaaaaaa

SEQ ID NO: 905 - protein, 303 aa, Homo sapiens
MEHPLFGCLRSPHATAQGLHPFSQSSLALHGRSDHMSYPELSTSSSSCIIAGYPNEEGMFASQHHRGHHHHHHHHHHHHQQQQHQALQTNWHLPQMSSPPSAARHSLCLQPDSGGPPELGSSPPVLCSNSSSLGSSTPTGAACAPGDYGRQALSPAEAEKRSGGKRKSDSSDSQEGNYKSEVNSKPRKERTAFTKEQIRELEAEFAHHNYLTRLRRYEIAVNLDLTERQVKVWFQNRRMKWKRVKGGQQGAAAREKELVNVKKGTLLPSELSGIGAATLQQTGDSIANEDSHDSDHSSEHAHL

SEQ ID NO: 906 - DNA, 2443 bp, Homo sapiens
cccccccccgccgctgccgcctctgcctgggtcccttcggccgtacctctgcgtgggggctgcctccccggctcccggtgcagacaccatgtacggatttgtgaatcacgccctggagttgctggtgatccgcaattacggccccgaggtgtgggaagacatcaaaaaagaggcacagttagatgaagaaggacagtttcttgtcagaataatatatgatgactccaaaacttatgatttggttgctgctgcaagcaaagtcctcaatctcaatgctggagaaatcctccaaatgtttgggaagatgtttttcgtcttttgccaagaatctggttatgatacaatcttgcgtgtcctgggctctaatgtcagagaatttctacagaaccttgatgctctgcacgaccaccttgctaccatctacccaggaatgcgtgcaccttcctttaggtgcactgatgcagaaaagggcaaaggactcattttgcactactactcagagagagaaggacttcaggatattgtcattggaatcatcaaaacagtggcacaacaaatccatggcactgaaatagacatgaaggttattcagcaaagaaatgaagaatgtgatcatactcaatttttaattgaagaaaaagagtcaaaagaagaggatttttatgaagatcttgacagatttgaagaaaatggtacccaggaatcacgcatcagcccatatacattctgcaaagcttttccttttcatataatatttgaccgggacctagtggtcactcagtgtggcaatgctatatacagagttctcccccagctccagcctgggaattgcagccttctgtctgtcttctcgctggttcgtcctcatattgatattagtttccatgggatcctttctcacatcaatactgtttttgtattgagaagcaaggaaggattgttggatgtggagaaattagaatgtgaggatgaactgactgggactgagatcagctgcttacgtctcaagggtcaaatgatctacttacctgaagcagatagcatactttttctatgttcaccaagtgtcatgaacctggacgatttgacaaggagagggctgtatctaagtgacatccctctgcatgatgccacgcgcgatcttgttcttttgggagaacaatttagagaggaatacaaactcacccaagaactggaaatcctcactgacaggctacagctcacgttaagagccctggaagatgaaaagaaaaagacagacacattgctgtattctgtccttcctccgtctgttgccaatgagctgcggcacaagcgtccagtgcctgccaaaagatatgacaatgtgaccatcctctttagtggcattgtgggcttcaatgctttctgtagcaagcatgcatctggagaaggagccatgaagatcgtcaacctcctcaacgacctctacaccagatttgacacactgactgattcccggaaaaacccatttgtttataaggtggagactgttggtgacaagtatatgacagtgagtggtttaccagagccatgcattcaccatgcacgatccatctgccacctggccttggacatgatggaaattgctggccaggttcaagtagatggtgaatctgttcagataacaatagggatacacactggagaggtagttacaggtgtcataggacagcggatgcctcgatactgtctttttgggaatactgtcaacctcacaagccgaacagaaaccacaggagaaaagggaaaaataaatgtgtctgaatatacatacagatgtcttatgtctccagaaaattcagatccacaattccacttggagcacagaggcccagtgtccatgaagggcaaaaaagaaccaatgcaagtttggtttctatccagaaaaaatacaggaacagaggaaacaaagcaggatgatgactgaatcttggattatggggtgaagaggagtacagactaggttccagttttctcctaacacgtgccaagcccaggagcagttcttccctatggatacagattttcttttgtccttgtccattaccccaagactttcttctagatatatctctcactatccgttattcaaccttagctctgctttctattactttttaggctttagtatattatctaaagtttggcttttgatgtggatgatgtgagcttcatgtgtcttaaaatctactacaagcattacctaacatggtgatctgcaagtagtaggcacccaataaatatttgttgaatttagttaaatgaaactgaacagtgtttggccatgtgtatatttatatcatgtttaccaaatctgtttagtgttccacatatatgtatatgtatattttaatgactataatgtaataaagtttatatcatgttggtgtatatcattatagaaatcattttctaaaggagt

SEQ ID NO: 907 - protein, 619 aa, Homo sapiens
MYGFVNHALELLVIRNYGPEVWEDIKKEAQLDEEGQFLVRIIYDDSKTYDLVAAASKVLNLNAGEILQMFGKMFFVFCQESGYDTILRVLGSNVREFLQNLDALHDHLATIYPGMRAPSFRCTDAEKGKGLILHYYSEREGLQDIVIGIIKTVAQQIHGTEIDMKVIQQRNEECDHTQFLIEEKESKEEDFYEDLDRFEENGTQESRISPYTFCKAFPFHIIFDRDLVVTQCGNAIYRVLPQLQPGNCSLLSVFSLVRPHIDISFHGILSHINTVFVLRSKEGLLDVEKLECEDELTGTEISCLRLKGQMIYLPEADSILFLCSPSVMNLDDLTRRGLYLSDIPLHDATRDLVLLGEQFREEYKLTQELEILTDRLQLTLRALEDEKKKTDTLLYSVLPPSVANELRHKRPVPAKRYDNVTILFSGIVGFNAFCSKHASGEGAMKIVNLLNDLYTRFDTLTDSRKNPFVYKVETVGDKYMTVSGLPEPCIHHARSICHLALDMMEIAGQVQVDGESVQITIGIHTGEVVTGVIGQRMPRYCLFGNTVNLTSRTETTGEKGKINVSEYTYRCLMSPENSDPQFHLEHRGPVSMKGKKEPMQVWFLSRKNTGTEETKQDDD

SEQ ID NO: 908 - DNA, 458 bp, Homo sapiens
  misc_feature (180)..(180): n is a, c, g, or t
  misc_feature (183)..(183): n is a, c, g, or t
  misc_feature (372)..(372): n is a, c, g, or t
ttttttttgcttttcttttgctttttctcagcctgatttttgcttggcttctttttcttggtttcctctttataccatggtccccagacccctccattgagcctagggttacttctggggtctttggggggatacctgaccggcactgcagttttgttgaactgtgagagcctccgtagnctntcttcacgattcctgggatacctgttagataggtccaccctctcatatgggtcggctgtgatgttgaaaagccatacacttttgccagttgacaaggtgatccgttcattgtgccaccggttcggtcccagggttgctgaaagactgaggggggacccagttcgctgtagccagggatttcctgtaagnaatttccagtgctggcactctgatgggctgactgggattgcagtgttccagatcccataggcctggtggcccagggagccattttt

SEQ ID NO: 909 - DNA, 384 bp, Homo sapiens
ttaaaataagattaaattaaatgtcttatgagactaaaactctgatctctgaatattgaaatttccattatatgaagtaatttttgcccaaaatataatttcataacacagttccccgacctgattgaatgaatctagattcagtcagtcttctatggttaataaaatctatagtgaacccaaagaaatgctggtctgcataaagtcacattaatgcaggctgcctattgttaataaaagtactttcaagatattaaatcattagtaatgttttaagatttttgtattatgtcaaaccaaatgggtaaatacataaaggaaaatcaaaattgtgcatatttctaaaccaaagaatccctcccagctaaggctttattgatattc

SEQ ID NO: 910 - DNA, 380 bp, Homo sapiens
  misc_feature (50)..(50): n is a, c, g, or t
  misc_feature (73)..(73): n is a, c, g, or t
  misc_feature (75)..(75): n is a, c, g, or t
  misc_feature (172)..(172): n is a, c, g, or t
  misc_feature (179)..(179): n is a, c, g, or t
  misc_feature (312)..(312): n is a, c, g, or t
  misc_feature (336)..(336): n is a, c, g, or t
ggcacgagcggcgctccagcctcgccatccccgcgccggcatcatgctcncccagaaagtggctgcaacggcncngcccactgtcagggttggggggacagagaaagtgatgtgcgccttctaaagcctcgcccagcgccgccgaagcagcttcacctctccaacttttttncacccancgactgcttgtcttgaccctgccctccacccttccccagagccactttcgggtgcgcgctcttgggtaaagggggggtcaccggctgtctgggatggcttccaattttaatgacatagttaaacaagggtacntgaaggatccgaagcagacccctnggggatttatcagcgatgctggtttaatattcaagaaagctttc

SEQ ID NO: 911 - DNA, 1575 bp, Homo sapiens
agaaccgcgacctccgcaaccttgagcggcatccgtggagtgcgcctgcagctacgaccgcagcaggaaagcgccgccggccaggcccagctgtggccggacagggactggaagagaggacgcggtcgagtaggtgtgcaccagccctggcaacgagagcgtctaccccgaactctgctggccttgaggtggggaagccggggagggcagttgaggaccccgcggaggcgcgtgactggttgagcgggcaggccagcctccgagccgggtggacacaggttttaaaacatgaatcctacactcatccttgctgccttttgcctgggaattgcctcagctactctaacatttgatcacagtttagaggcacagtggaccaagtggaaggcgatgcacaacagattatacggcatgaatgaagaaggatggaggagagcagtgtgggagaagaacatgaagatgattgaactgcacaatcaggaatacagggaagggaaacacagcttcacaatggccatgaacgcctttggagacatgaccagtgaagaattcaggcaggtgatgaatggctttcaaaaccgtaagcccaggaaggggaaagtgttccaggaacctctgttttatgaggcccccagatctgtggattggagagagaaaggctacgtgactcctgtgaagaatcagggtcagtgtggttcttgttgggcttttagtgctactggtgctcttgaaggacagatgttccggaaaactgggaggcttatctcactgagtgagcagaatctggtagactgctctgggcctcaaggcaatgaaggctgcaatggtggcctaatggattatgctttccagtatgttcaggataatggaggcctggactctgaggaatcctatccatatgaggcaacagaagaatcctgtaagtacaatcccaagtattctgttgctaatgacaccggctttgtggacatccctaagcaggagaaggccctgatgaaggcagttgcaactgtggggcccatttctgttgctattgatgcaggtcatgagtccttcctgttctataaagaaggcatttattttgagccagactgtagcagtgaagacatggatcatggtgtgctggtggttggctacggatttgaaagcacagaatcagataacaataaatattggctggtgaagaacagctggggtgaagaatggggcatgggtggctacgtaaagatggccaaagaccggagaaaccattgtggaattgcctcagcagccagctaccccactgtgtgagctggtggacggtgatgaggaaggacttgactggggatggcgcatgcatgggaggaattcatcttcagtctaccagcccccgctgtgtcggatacacactcgaatcattgaagatccgagtgtgatttgaattctgtgatattttcacactggtaaatgttacctctattttaattactgctataaataggtttatattattgattcacttactgactttgcattttcgtttttaaaaggatgtataaatttttacctgtttaaataaaatttaatttcaaatgt

SEQ ID NO: 912 - protein, 333 aa, Homo sapiens [sequence omitted]

SEQ ID NO: 913 - DNA, 2100 bp, Homo sapiens
acatcactgcgctggccgtccaaggtccgccgccccaccatgccgcccccgccgctgctgctgctccttacagtcctggtcgtcgccgctgcccggccggggtgcgagtttgagcggaaccccgccgccacctgcgtggacctgcagctcaggacctgcagcgatgccgcctacaaccacaccaccttccccaacctgcttcagcaccggtcgtgggaggtggtggaggccagctccgagtacatcctgctgagcgttctacaccagctcctggaaggccagtgcaacccggacctgcggctgctgggctgtgctgtgctggccccccggtgtgagggcggctgggtgcgcagaccctgccggcacatctgcgagggcctgcgggaggtctgccagcccgccttcgacgccattgacatggcctggccctacttccttgactgccaccgctacttcacgagagaggacgagggctgctatgacccgctggagaagcttcggggaggcctggaggctgacgaggcactgccctcagggctgccgcccaccttcatccgcttcagccaccactcctacgcccagatggtgcgtgtgctgaggcggacggcctcccgctgtgcccacgtggccaggacctacagcatcgggcgcagcttcgacggcagggagctgctggtcatcgagttctccagccgccccggccagcacgagctgatggagcccgaggtgaagctcatcggcaacattcatggcaacgaggtggcgggccgggagatgctcatctacctagcccagtacctgtgctctgagtacctgcttggtaacccccgcatccagcgcctgctcaacaccacccgcatccacctgctgccctccattaaccctgacggctatgaggtggcagctgccgagggtgccggctacaacgggtggacgagcgggaggcagaacgcgcagaacctggatctgaaccgaaatttcccggacctgacgtccgagtactaccggctggcggagacccgcggcgcacgcagcgaccacatccccatcccccagcactactggtggggtaaggtggccccggagacaaaggcaatcatgaagtggatgcagaccataccctttgtgctctcagccagccttcatgggggcgacctggtggtgtcctaccccttcgacttctccaagcacccccaggaggagaagatgttttctcccacgcccgacgagaagatgttcaagctgctgtccagagcctacgctgacgtccaccccatgatgatggacaggtcggagaataggtgtggaggcaatttcctgaagagggggagcatcatcaacggggcggactggtacagcttcacgggaggcatgtccgatttcaactacctgcacaccaactgctttgagatcacggtagagctgggctgtgtgaagttcccccccgaggaggccctgtacacactctggcagcacaacaaggagtcactcctgaatttcgtggagacggtgcaccggggcatcaaaggtgtggtgacagataaattcggcaagccagtcaaaaacgcccggatctcagtcaaaggcattcgccacgacatcaccacagccccagatggtgactactggagactgctgcccccaggtatccacattgtcattgcccaagcccctggctacgccaaagtcatcaagaaagtcatcatccccgcccggatgaagagggctggccgtgtggacttcattctgcaacctctggggatgggacccaagaactttattcatgggctgcggaggactgggccccacgacccgctgggaggtgccagctctttgggggaggccacggagcccgacccgctccgggcgcgcaggcagccctcggccgacgggagtaagccctggtggtggtcctacttcacatcgctgagcacccacaggccacgctggctgctcaagtactagccccggccccagcacccgccaggatgtggagaccgaggcccatctccgcatcccgggctcctggctcttgattttgtctgccacagacatcccacaaagccgctgccattttattaaagtgttttgatccacaaa

SEQ ID NO: 914 - protein, 641 aa, Homo sapiens
MPPPPLLLLLTVLVVAAARPGCEFERNPAATCVDLQLRTCSDAAYNHTTFPNLLQHRSWEVVEASSEYILLSVLHQLLEGQCNPDLRLLGCAVLAPRCEGGWVRRPCRHICEGLREVCQPAFDAIDMAWPYFLDCHRYFTREDEGCYDPLEKLRGGLEADEALPSGLPPTFIRFSHHSYAQMVRVLRRTASRCAHVARTYSIGRSFDGRELLVIEFSSRPGQHELMEPEVKLIGNIHGNEVAGREMLIYLAQYLCSEYLLGNPRIQRLLNTTRIHLLPSINPDGYEVAAAEGAGYNGWTSGRQNAQNLDLNRNFPDLTSEYYRLAETRGARSDHIPIPQHYWWGKVAPETKAIMKWMQTIPFVLSASLHGGDLVVSYPFDFSKHPQEEKMFSPTPDEKMFKLLSRAYADVHPMMMDRSENRCGGNFLKRGSIINGADWYSFTGGMSDFNYLHTNCFEITVELGCVKFPPEEALYTLWQHNKESLLNFVETVHRGIKGVVTDKFGKPVKNARISVKGIRHDITTAPDGDYWRLLPPGIHIVIAQAPGYAKVIKKVIIPARMKRAGRVDFILQPLGMGPKNFIHGLRRTGPHDPLGGASSLGEATEPDPLRARRQPSADGSKPWWWSYFTSLSTHRPRWLLKY

SEQ ID NO: 915 - DNA, 379 bp, Homo sapiens
  misc_feature (4)..(4): n is a, c, g, or t
  misc_feature (6)..(6): n is a, c, g, or t
  misc_feature (19)..(21): n is a, c, g, or t
  misc_feature (23)..(23): n is a, c, g, or t
  misc_feature (37)..(38): n is a, c, g, or t
  misc_feature (179)..(179): n is a, c, g, or t
  misc_feature (181)..(181): n is a, c, g, or t
gcancnggggcgccgtacnnngngcgggcgtttcaanngcttctggtgctctagggtgagctctgcccggctgcaaggatggcggggaggggtaagctcatcgcagtgatcggagacgaggacacggtgactggtttcctgctgggcggcataggggagcttaacaagaaccgacatcncnatttcctggtggtggagaaggatacaaccatcaatgagatcgaagacactttccggcaatttctaaaccgggatgacattggcatcatcctcatcaaccagtacatcgcagagatggtgcggcatgcctggacgcccaccagcagtccatccccgctgtcctggagatcccctccaaggagcacccatatgacgccgc

SEQ ID NO: 916 - DNA, 355 bp, Homo sapiens
ctacagttctgggtattcatatttgtttcagtcagctaatgttggactctgttagcacagctgtttggaatttaaacttttcaagaattctytcatccttattattcattcctgtyttattcttggatatcctaagtgcatacccagactaatgataatatcaacacttgttcagtatggttggtcatttttaaaaataaacaggcaatttatgggtgacccacacaaagaacagctgctgccatcactcacgccctctccattgttgatggcctctgcaactgacattgtcccaagcagctgctgacagagctgccagtacctgtttccacgtccaacctttattctattcgtt

SEQ ID NO: 917 - DNA, 1204 bp, Homo sapiens
ctctgaggagaagcagcagcaaacatttgctagtcagacaagtgacagggaatggattccaaacagcagtgtgtaaagctaaatgatggccacttcatgcctgtattgggatttggcacctatgcacctccagaggttccgagaagtaaagctttggaggtcacaaaattagcaatagaagctgggttccgccatatagattctgctcatttatacaataatgaggagcaggttggactggccatccgaagcaagattgcagatggcagtgtgaagagagaagacatattctacacttcaaagctttggtccacttttcatcgaccagagttggtccgaccagccttggaaaactcactgaaaaaagctcaattggactatgttgacctctatcttattcattctccaatgtctctaaagccaggtgaggaactttcaccaacagatgaaaatggaaaagtaatatttgacatagtggatctctgtaccacctgggaggccatggagaagtgtaaggatgcaggattggccaagtccattggggtgtcaaacttcaaccgcaggcagctggagatgatcctcaacaagccaggactcaagtacaagcctgtctgcaaccaggtagaatgtcatccgtatttcaaccggagtaaattgctagatttctgcaagtcgaaagatattgttctggttgcctatagtgctctgggatctcaacgagacaaacgatgggtggacccgaactccccggtgctcttggaggacccagtcctttgtgccttggcaaaaaagcacaagcgaaccccagccctgattgccctgcgctaccagctgcagcgtggggttgtggtcctggccaagagctacaatgagcagcgcatcagacagaacgtgcaggtttttgagttccagttgactgcagaggacatgaaagccatagatggcctagacagaaatctccactattttaacagtgatagttttgctagccaccctaattatccatattcagatgaatattaacatggagagctttgcctgatgtctaccagaagccctgtgtgtggatggtgacgcagaggacgtctctatgccggtgactggacatatcacctctacttaaatccgtcctgtttagcgacttcagtcaactacagctgagtccataggccagaaagacaataaatttttatcattttgaaat

SEQ ID NO: 918 - protein, 323 aa, Homo sapiens
MDSKQQCVKLNDGHFMPVLGFGTYAPPEVPRSKALEVTKLAIEAGFRHIDSAHLYNNEEQVGLAIRSKIADGSVKREDIFYTSKLWSTFHRPELVRPALENSLKKAQLDYVDLYLIHSPMSLKPGEELSPTDENGKVIFDIVDLCTTWEAMEKCKDAGLAKSIGVSNFNRRQLEMILNKPGLKYKPVCNQVECHPYFNRSKLLDFCKSKDIVLVAYSALGSQRDKRWVDPNSPVLLEDPVLCALAKKHKRTPALIALRYQLQRGVVVLAKSYNEQRIRQNVQVFEFQLTAEDMKAIDGLDRNLHYFNSDSFASHPNYPYSDEY

SEQ ID NO: 919 - DNA, 489 bp, Homo sapiens
  misc_feature (254)..(254): n is a, c, g, or t
  misc_feature (420)..(420): n is a, c, g, or t
  misc_feature (440)..(440): n is a, c, g, or t
cctacatgagaagcttctctgccacaaaagtgacttcaaagacggatgggttgagctggcagcctatgagattgtggacatataacaagaaacagaaatgccctcatgcttattttcatggtgattgtggttttacaagactgaagacccagagtatactttttctttccagaaataatttcataccgcctatgaaatatcagataaattaccttagcttttatgtagaatgggttcaaaagtgagtgtttctntttgagaaggacactttctcatcatctaaactgattcgcataggtggttagaatggccctcatattgcctgcctaaatcttgggtttattagatgaagtttactgaatcagaggaatcagacagaggaggatagctctttccagaatccacacttctgacctcagnctcggtctcatgaacaccgntgatctcaggagaacacctgggctagggaatgtgggcgagaaagggcag

SEQ ID NO: 920 - DNA, 745 bp, Homo sapiens
gccggcgagcgcgcgcgcagcgggggcgcgggtggcgcgcgtgtgtgtgaagggggggcggtggccgaggcgggcgggcgcgcgcgcgaggcttcccctcgtttggcggcggcggcggcttctttgtttcgtgaagagaagcgagacgcccattctgcccccggccccgcgcggaggggcgggggaggcgccgggaagtcgacggcgccggcggctcctgcaggaggccactgtctgcagctcccgtgaagatgtccactccagacccacccctgggcggaactcctcggccaggtccttccccgggccctggcccttcccctggagccatgctgggccctagcccgggtccctcgccgggctccgcccacagcatgatggggcccagcccagggccgccctcagcaggacaccccatccccacccaggggcctggagggtaccctcaggacaacatgcaccagatgcacaagcccatggagtccatgcatgagaagggcatgtcggacgacccgcgctacaaccagatgaaaggaatggggatgcggtcagggggccatgctgggatggggcccccgcccagccccatggaccagcactcccaaggttacccctcgcccctgggtggctctgagcatgcctctagtccagttccagccagtggcccgtcttcggggccccagatgtcttccgggccaggaggtgccccgctggatggtgctgacccccaggccttggggcagca

SEQ ID NO: 921 - DNA, 247 bp, Homo sapiens
atgtcatctatggaattgcgtcctttttcttcttgtatgggatcattctgttggcagaaggcttttacaccacaagtgcagtgaaagaactgcacggtgagtttaaaacaaccgcttgtggccgatgcatcagtagaatgttcgttttcctcacctatgtacttggagtagcctggctgggtgtgtttggttctcatcggtgccgtgtttatgttctacaacaaatggtcaacttgtgaagtcatca

SEQ ID NO: 922 - DNA, 421 bp, Homo sapiens
  misc_feature (220)..(220): n is a, c, g, or t
  misc_feature (411)..(411): n is a, c, g, or t
tttttaagggaatgtcatagtgtagctgctgaagtggatattatttttatggcagacaaagtaaattctaccaagaaacaatgcatcccaactccatatactgtgaggaaggaaacaggatgactatgcatggttacagcagaatgactgacggagcataatggctcattaccaaagactctggcacacctgcaggaaggcacctctgcctgcattaggnactaccacagaatctgtctgttatgcaccatgggaatacaccatgatcagtgagctcttcaaagaccattctgggaaacccggggcagaaatactatccacctatgtgatgggccacctgaaggcaacatgtcagcatgtttaaggcctccccaatttgacggtaggggcattcatggggttccaattccnggttttgttc

SEQ ID NO: 923 - DNA, 599 bp, Homo sapiens
ttttctctctcatggtagggttatgagtcagttgccaaaaggtggggacatttcctgatgcatttgcaacactgagaagttatcttaagggaggctgggccccattctactcatctggcccagaaagtgaacaccttgggggccactaaggcagccctgctaggggagacgctccaacctgtcttctctctgtctcctggcagctctcttggcctcctagtttctacctaatcatgtccctggtggaggccatcagcctctggaatgaaggggtgctggcagcggacaagaaggactggaagggagccctggatgccttcagtgccgtccaggacccccactcccggatttgcttcaacattggctgcatgtacactatcctgaagaacatgactgaagcagagaaggcctttaccagaagcattaaccgagacaagcacttggcagtggcttacttccaacgagggatgctctactaccagacagagaaatatgatttggctatcaaagaccttaaagaagccttgattccagcttcgagggaaccagctgatagactataagatcctggggctccagttcaagctgtttgcctgtga

SEQ ID NO: 924 - DNA, 331 bp, Homo sapiens
ggtctccctttgttgttcaggctcatcttgaactcctggtgtcaagcgatcctcccacctcgacctcccagggtgctgggattataggcatgagcccccacacctggacacaaaatacattatatactctaaagtataggattactttaagagaaggaaactaaaagtatgatggcttactttctaatccataacttcacagttttcccttcctgcagctttcacagaaaaaaccaggtgcctggtactgggtccttctctctgccaagcaggagtaaggcggcagagccaaccctgcatctgcagttagaagctctccatgacgacagga

SEQ ID NO: 925 - DNA, 341 bp, Homo sapiens
gaaatcagtacacaaataacagttgccacagtgtaccagtatttcaatttctaaagaataccatagagtctgaattagaacctttaactagattgcaaaggaatatactaaattgaaaacttgtaaaagggaagtaataaacaccataatcctagataagatcctatggtctttcagagtttttccatatacagtaattatttgatgtacagtaattattgataaccaaaatgacaaaaactgaatctactcttcaaattcaaccatgtatcttaaaaaggagtaaaatgtactgttttcagtgtttcctttggtttcttacagtttataattttataaat

SEQ ID NO: 926 - DNA, 318 bp, Homo sapiens
  misc_feature (83)..(83): n is a, c, g, or t
gggagtgatggctgccggcgctctctgcgtggttcttcttctcggccgctgaaacccccgcggctgcttcctgggaaggtcgngattcccgctgagctgtccccggtgccgccgacccgggccgtgtgcccgtggctccagccgctgccgcctcgatctcctcgtctcccgctccgccctcccttttccctggatgaacttgcgtcctttctcttctccgccatggaattctgctccgtgcttttagccctcctgagccaaagaaaccccagacaacagatgccccatacgcagcgtatagcagtaactccccagctc

SEQ ID NO: 927 - DNA, 1086 bp, Homo sapiens
agcatagtgcctggcacagtgcaggttctcaatgagtttgcagagtgaatggaaatataaactagaaatatatccttgttgaaatcagcacaccagtagtcctggtgtaagtgtgtgtacgtgtgtgtgtgtgtgtgtgtgtgtgtgtaaaaccaggtggagatataggaactattattggggtatgggtgcataaattgggatgttctttttaaaaagaaactccaaacagacttctggaaggttattttctaagaatcttgctggcagcgtgaaggcaacccccctgtgcacagccccacccagcctcacgtggccacctctgtcttcccccatgaagggctggctccccagtatatataaacctctctggagctcgggcatgagccaccaaggccacccatccaggcacctctcagcacagcagagctttccagaggaagcctcaccaagcctctgcaatgaggttcttctgtgcacgttgctgcagctttgggcctgagatgccagctgtccagctgctgcttctggcctgcctggtgtgggatgtgggggccaggacagctcagctcaggaaggccaatgaccagagtggccgatgccagtataccttcagtgtggccagtcccaatgaatccagctgcccagagcagagccaggccatgtcagtcatccataacttacagagagacagcagcacccaacgcttagacctggaggccaccaaagctcgactcagctccctggagagcctcctccaccaattgaccttggaccaggctgccaggccccaggagacccaggaggggctgcagagggagctgggcaccctgaggcgggagcgggaccagctggaaacccaaaccagagagttggagactgcctacagcaacctcctccgagacaagtcagttctggaggaagagaagaagcgactaaggcaagaaaatgagaatctggccaggaggttggaaagcagcagccaggaggtagcaaggctgagaaggggccagtgtccccagacccgagacactgctcgggctgtgccaccaggctccagagaaggtaagaatgcagagtgggggg

SEQ ID NO: 928 - protein, 504 aa, Homo sapiens
MRFFCARCCSFGPEMPAVQLLLLACLVWDVGARTAQLRKANDQSGRCQYTFSVASPNESSCPEQSQAMSVIHNLQRDSSTQRLDLEATKARLSSLESLLHQLTLDQAARPQETQEGLQRELGTLRRERDQLETQTRELETAYSNLLRDKSVLEEEKKRLRQENENLARRLESSSQEVARLRRGQCPQTRDTARAVPPGSREVSTWNLDTLAFQELKSELTEVPASRILKESPSGYLRSGEGDTGCGELVWVGEPLTLRTAETITGKYGVWMRDPKPTYPYTQETTWRIDTVGTDVRQVFEYDLISQFMQGYPSKVHILPRPLESTGAVVYSGSLYFQGAESRTVIRYELNTETVKAEKEIPGAGYHGQFPYSWGGYTDIDLAVDEAGLWVIYSTDEAKGAIVLSKLNPENLELEQTWETNIRKQSVANAFIICGTLYTVSSYTSADATVNFAYDTGTGISKTLTIPFKNRYKYSSMIDYNPLEKKLFAWDNLNMVTYDIKLSKM

SEQ ID NO: 929 - DNA, 206 bp, Homo sapiens
cccccgcgccgcgcagccccggccgccaggccttagcccgccccggcccccgccaggccgcgtccccctcccctcccctcccccgcgcgccacccgcgcccgcccccgcccggcaccgcggacccacccggacctcggcggggagatggagtgagtaggcgcgctcgggccgcggggctgggggcccggagctccgggagccgggg

SEQ ID NO: 930 - protein, 387 aa, Homo sapiens
MEVLAAETTSQQERLQAIAEKRKRQAEIENKRRQLEDERRQLQHLKSKALRERWLLEGTPSSASEGDEDLRRQMQDDEQKTRLLEDSVSRLEKEIEVLERGDSAPAAAKENAAAPSPVRAPAPSPAKEERKTEVVMNSQQTPVGTPKDKRVSNTPLRTVDGSPMMKAAMYSVEITVEKDKVTGETRVLSSTTLLPRQPLPLGIKVYEDETKVVHAVDGTAENGIHPLSSSEVDELIHKADEVTLSEAGSTAGAAETRGAVEGAARTTPSRREITGVQAQPGEATSGPPGIQPGQEPPVTMIFMGYQNVEDEAETKKVLGLQDTITAELVVIEDAAEPKEPAPPNGSAAEPPTEAASREENQAGPEATTSDPQDLDMKKHRCKCCSIM

SEQ ID NO: 931 - DNA, 311 bp, Homo sapiens
  misc_feature (277)..(277): n is a, c, g, or t
ggcagagcaatcatttacctatattctttggggtgtatgccaaggtaaggtctctaggtagcccagttgctttgtctaaaacagaagactcttaaaagaagctcctgtattctccctgagctgacctttcctgtcttgtccctcgatattaagcttatgctatcgagcctcatctcagttagatatctgtggcttcctttgccagctgacctagctggagctgctaatggagtaatcaagtatgaattcctgtataaatcaagtctggctcttattncagggatctagactactacaggcctacacaattt

SEQ ID NO: 932 - DNA, 509 bp, Homo sapiens
  misc_feature (57)..(58): n is a, c, g, or t
  misc_feature (121)..(121): n is a, c, g, or t
  misc_feature (403)..(403): n is a, c, g, or t
  misc_feature (406)..(406): n is a, c, g, or t
  misc_feature (427)..(427): n is a, c, g, or t
  misc_feature (436)..(436): n is a, c, g, or t
  misc_feature (440)..(440): n is a, c, g, or t
  misc_feature (489)..(489): n is a, c, g, or t
  misc_feature (507)..(507): n is a, c, g, or t
cacggacctaccactggccctgcgtatgtggtgcagcctctcttcaatccctaaganntggttctttcaaagcatgtattttctgaagaaactttagaaccacgtttattttaaaagaacnaattggagaaaacaaatcgattaatgctcacagcttcttgggtgctttctcacgggtaaagccatggcatccgtaccttccattggttgccttctagccagaaatcagtattatcgaaagtccagtgtttcttcagttagttctttaactagctctgattctgttaacttcatagatgacgacaaaccacagcaagggttgcctgaagtggcagaatccacctggtggtttaaatcgtttttccattctgaacctgtgctttcaaatgtgagaataaaagantgntgctactggattacagatganactttgtantganaactttgcactgcatttgatgacatgttggtacggtgctgcttatgtancagacagtgatctgcaanaa

SEQ ID NO: 933 - DNA, 646 bp, Homo sapiens
  misc_feature (525)..(525): n is a, c, g, or t
  misc_feature (546)..(546): n is a, c, g, or t
  misc_feature (553)..(553): n is a, c, g, or t
  misc_feature (616)..(616): n is a, c, g, or t
  misc_feature (626)..(626): n is a, c, g, or t
  misc_feature (634)..(634): n is a, c, g, or t
gtgctgccaccattttattttgtgaagtaagagcattagaaaacaattgccacctactgtcctcctattccataagtaagggctaatttaatactccagtaataaaacaaaggcatgcatgcttttagatcagaggaaggtcgtttccactgaatacatttagctttatgaaaatctcactacatttgtggccctggtttcctccttgtggggtggaacagttgaaatttaggtcacaaagagccagtcaggagaagagcatctgggaggcactagtacaggggacacacaggtgtctgtgacactcagggcgggcagacaggtcatcaccctgcattctgcatgcccacgcatacacaccatgctcaccccttctgatgaacaggcacaagcgttcacacacacgctcctcccccaggggctcccaggttggaacacctcccctgactgccaggcaaagcatacctctctcctgaacccagggcaaagggccaggctcacccagctgtgccaccagtgagagangccatggttggactggagcanttgggtntgattgagccaagattggaactgttaaatcctggcgtttctctgcaggagccaagcctgtccnatcaattccnagatggantgggccaatcca

SEQ ID NO: 934 - DNA, 371 bp, Homo sapiens
tcactcaaccttcaagccaaggacagtctaaagcctgaaaaccaagctatgagttctggataaatccatgagccagactgagagctcccattctcgtctggcaccctctctcctgattggtccttacccttcacctattttatacatacctacccttccgcgattggtcctctacactatcgtgcctatttctgaatggtgctttgtcaagcatagccacagaccaatcagcatgcacttgcccatttctagcccacaaaaacccatagactcaggctcgtggccagcaacccaccttcgggtcccctctcactgccaagagccgttctgtcactcaataaattctactttgccttactcacaaaaaaaaa

SEQ ID NO: 935 - DNA, 260 bp, Homo sapiens
  misc_feature (2)..(2): n is a, c, g, or t
  misc_feature (12)..(12): n is a, c, g, or t
gnggcgcacgcnactctgtcgccgccgtcagaccggaattgccggtgccgccgccaccgctgtctgtgcgcccacctctgctgctaccatggggatcttagagaagatctcggagatcgagaaggagatcgctcggacacagaagaacaaggccactgagtatcatctgggcctgctgaaagttaagctcgccaagtatcgggcccagctcctggaaccgtccaaatcggcctcatccaaaggagagggctttgatgtca

SEQ ID NO: 936 - DNA, 638 bp, Homo sapiens
aacacggaccccagcccctgtcagggcctctgccaaggaaataatatggaccatttacctggcaggcagtctgctctctctcaggatcaccacgcatctcaggattggtctaaacttcaagtctcaaccaagtgtctgaagtgaactttgcattgaataaatttttgccatggaaagaacatcaaacaagccactcatctctacagagataagaaaacaagtttggcagagcaagagacagaagaccgtggagaaatcagaagggggaacagtcagtttagttaaggatggaacctgggaaaggccaccattcctgcttgatggggctctgatttgctcttgctcaagtggaataaaaccccatggtcttcttgacatgattcttgatcttttctccactgagacacacttaagtgatgatccttacaggactgacaccctaatgccaataaaagttgctcattatggactgctacaaaaaaaaaaaaaaaaaactcgagggggggcccggtacccaattcgccctatagtgagtcgtattacaattcactggccgtcgttttacaacgtcgtgactgggaaaaccctggcgttacccaacttaatcgccttgcaaaacatcccccttttgcccaact

SEQ ID NO: 937 - DNA, 363 bp, Homo sapiens
  misc_feature (357)..(357): n is a, c, g, or t
cggaggttgcagtgagccgagattatgccattgcactccagcctgggcaacaggagcgaaactccgttgcaaaaaaaaaaaaaaaaaaaaaaattataatcacaactttttgcaatggagtgacttatatctgcagcttatatctgcagtgtttgtgttaggaacctagcttttataatgtgttaactttttaactcagtattctggctttgggattttttgttttgtttttggaaacatttcagaagtggaatgtagcctgttaaaggtgtgcacaaaaatattttgcatgtgttttttttttttgcctgtgtgaattctactttttagcaaaaataaggccccccaaaggatggnccaaaa

SEQ ID NO: 938 - DNA, 563 bp, Homo sapiens
cacatggaagaggcagtacgtggccaagaggaaacagaccatgtgcgctggagaaaaaggatggccagacttgcagaaacctggaattggtgattggctttagaagtggagagacaaaaaaggaggcatagaaagtgccaacatttggctacacagggaagaaagacgtaaaataataaaaacattggcatcacctgtagactcaaatcctgtgagtgaaggacctgagcaatgaaggatggattgaactcgtgattagccttctcagcatatgtaaaatgatgtctgcttttcttctctatttgtcattttaccgactttttatatatagtagtttccccatatccatggaggatgtatcccaagacccccagaggatgcttgacaccacagataataacaaacttctatgtatcctatgatttttcctgtacatccttacctatcataaagtgagtgtttaaacttggcacaggagatttaaaacaatttctcataataaaattggaccaattagttcaaccttccgaaaaaaaaagtctttcaatataataggacctcca

SEQ ID NO: 939 - DNA, 430 bp, Homo sapiens
atggccagggaatgacagggggcctataaggcttttctccttgtcaccacccggctgcttacagctcccctggcggccggcctgcgtctgcagcacagcggaaaccgaggttgtctgaggctgaatctggagtgttgcccatcctggtggtgacccgggcccggtgattggcagagccatcagctgtgtcgatccaggatgccccccggaggacgcgcatgtcctgctcagcagcctggtacggtgatgctgtccactcccacacgttccccaggaggtcatagagcccgtagttgttctgggcggggaaagcattcactggggagactccatggaagccatcctcagctttgtctcccttggggaactttccctgccacaggttggtgcggtttggctggaaccagttcccccatgggtaaacttgacc

SEQ ID NO: 940 - DNA, 1280 bp, Homo sapiens
tgccgcagcccccgcccgcccgcagagcttttgaaaggcggcgggaggcggcgagcgccatggccagtccgggctgcctgctgtgcgtgctgggcctgctactctgcggggcggcgagcctcgagctgtctagaccccacggcgacaccgccaagaagcccatcatcggaatattaatgcaaaaatgccgtaataaagtcatgaaaaactatggaagatactatattgctgcgtcctatgtaaagtacttggagtctgcaggtgcgagagttgtaccagtaaggctggatcttacagagaaagactatgaaatacttttcaaatctattaatggaatccttttccctggaggaagtgttgacctcagacgctcagattatgctaaagtggccaaaatattttataacttgtccatacagagttttgatgatggagactattttcctgtgtggggcacatgccttggatttgaagagctttcactgctgattagtggagagtgcttattaactgccacagatactgttgacgtggcaatgccgctgaacttcactggaggtcaattgcacagcagaatgttccagaattttcctactgagttgttgctgtcattagcagtagaacctctgactgccaatttccataagtggagcctctccgtgaagaattttacaatgaatgaaaagttaaagaagtttttcaatgtcttaactacaaatacagatggcaagattgagtttatttcaacaatggaaggatataagtatccagtatatggtgtccagtggcatccagagaaagcaccttatgagtggaagaatttggatggcatttcccatgcacctaatgctgtgaaaaccgcattttatttagcagagttttttgttaatgaagctcggaaaaacaaccatcattttaaatctgaatctgaagaggagaaagcattgatttatcagttcagtccaatttatactggaaatatttcttcatttcagcaatgttacatatttgattgaaagtcttcaatttgttaacagagcaaatttgaataattccatgattaaactgttagaataacttgctactcatggcaagattaggaagtcacagattcttttctataatgtgcctggctctgattcttcattatgtatgtgactatttatataacattagataattaaatagtgagacataaatagagtgctttttcatggaaaagccttcttatatctgaagattgaaaaataaatttactgaaatacaaaaaaaaaaaaaaa

SEQ ID NO: 941 - protein, 318 aa, Homo sapiens
MASPGCLLCVLGLLLCGAASLELSRPHGDTAKKPIIGILMQKCRNKVMKNYGRYYIAASYVKYLESAGARVVPVRLDLTEKDYEILFKSINGILFPGGSVDLRRSDYAKVAKIFYNLSIQSFDDGDYFPVWGTCLGFEELSLLISGECLLTATDTVDVAMPLNFTGGQLHSRMFQNFPTELLLSLAVEPLTANFHKWSLSVKNFTMNEKLKKFFNVLTTNTDGKIEFISTMEGYKYPVYGVQWHPEKAPYEWKNLDGISHAPNAVKTAFYLAEFFVNEARKNNHHFKSESEEEKALIYQFSPIYTGNISSFQQCYIFD

SEQ ID NO: 942 - DNA, 298 bp, Homo sapiens
caaacttcccaagcatataaaagataataagaacgatttgtcccccaaagttgaactggcaacctccctgtcagatatggaatgtaaaattactacctcaaaggatcagaaaaaagtaatggtgatgaccagcagtgaacacacggagacaaagcagaacgttattagtaagagtcttgatgaaagaaaacaattatctattgactctgcaaactgtctctcacacacagttccaggaacttcagcacccaggaaaaaacagattgcgcctcttataaaatctcattcatttccagag

SEQ ID NO: 943 - DNA, 2622 bp, Homo sapiens
cttccgttgagcaccaagcaagatggcagcttccgagacggttaggctacggcttcaatttgattacccgccgccagctaccccgcactgtacggccttctggcttctggtcgacttgaacagatgccgagtcgtcacagatctcattagtctcatccgccagcgcttcggcttcagttctggggccttcctaggcctctacctggagggggggctcttgccccccgccgagagcgcgcgccttgtgagagacaacgactgcctcagagttaaattagaagagagaggagttgctgagaattctgtagtcatcagtaatggtgacattaatttatctcttagaaaagcaaagaagcgggcatttcagttagaggagggtgaagaaactgaaccagattgcaaatattcaaagaagcattggaagagtcgagagaacaataacaataatgagaaggtcttggatctggaaccaaaagctgtcacagatcagactgtcagcaaaaaaaacaagagaaaaaataaagcaacctgtggcacagtgggtgatgataacgaagaggccaaaagaaaatcaccaaagaaaaaggagaaatgtgaatataaaaaaaaggctaagaatcccaagtctccgaaagtacaggcagtgaaagactgggccaatcagagatgtagttctccaaaaggttctgctagaaacagccttgttaaagccaaaaggaaaggtagtgtaagcgtttgctcaaaagagagtcccagttcctcctcggagtctgagtcttgtgatgaatctatcagtgatggtcccagcaaagtcactttggaggccagaaattcctcagagaaattaccaactgagttatcaaaggaagaaccctctaccaaaaatacaactgcagacaaactggctataaaacttggctttagccttacccccagcaagggcaagacctctggaacaacatcttccagttcagactctagtgcagagtcagacgaccaatgcttgatgtcatcgagcaccccggagtgtgctgcgggtttcttaaagacagtaggcctttttgcaggaagaggtcgtccaggcccagggctgtcatcacagactgcaggtgctgctggatggaggcgttctggctcaaatggtggtggacaggctcctggtgcttctcccagtgtgtctctccctgctagtttaggaagaggatggggtagagaagagaaccttttttcttggaagggagctaagggacggggcatgcgggggagaggtcgaggacgagggcatcctgtttcctgtgttgtaaatagaagcactgacaaccagaggcaacagcaattaaatgacgtggtaaaaaattcatctactattatccagaatccagtagagacacccaagaaggactatagtctgttaccactgttagcagctgcccctcaagttggagaaaagattgcatttaagcttttggagctaacatccagttactctcctgatgtctctgactacaaggaaggaagaatattaagccacaatccagagacccagcaagtagatatagaaattctttcatccttacctgccttgagagaacctgggaaatttgatttagtttatcacaatgaaaatggagccgaggtagtggagtacgctgtgacacaggagagcaagatcactgtattttggaaagagttgattgacccaagactgattattgaatctccaagtaacacatcaagtacagaacctgcctgagtatgacctctccaccttatagtttatgaatgtcttgtttgtgaaagtgactataacccaaactttttttttttttaaagaggatttggaagttgtatggatttttttgttatcttcactttactgcataggaaacaatctacctcatcatttaaaatgacatgggtgtcggttttgtagatctttggtttttttgtcaggtttaattaccattaacaaatgtaaaacatgacattccctgcagatattgttgtataccagtatggtttattatctttctttaaatcttattggccatcaagtatgcagtcgtcagtatgtgatgtttataataccaatgaatgtgctgcgtatcttgtctcaataagttttaagtaacatttaaaaatattaaagcatgttatttgacctaattttttagcatttgagttgttccattaaatggagcatcttgtaaatttcaagtattttatacttgcaattgttaagagttaacaggtagttggatttgtcgcagacaatgagttaaggaatcctttcacgtttttcccaactttaaaattaaggattctcaggtccctgtgtagagcagtgaaaataagatgtgcgtatgtgtgtgtatgcctggagattggtgtttcacttcagtgagaggattggctgtgagcttcagaccagaaatgtgtcatcttgccagcccctggctgagtgtgctggagtgaggatcttgaacagaaacttccttttctgttattattcactacgaagctaaaatggccaaatatataccgtgaaaattggtttcatttaacaaaagatcagatccctccttcagctgtacacatttttaaataaaatcatattgaact

SEQ ID NO: 944 - protein, 576 aa, Homo sapiens
MAASETVRLRLQFDYPPPATPHCTAFWLLVDLNRCRVVTDLISLIRQRFGFSSGAFLGLYLEGGLLPPAESARLVRDNDCLRVKLEERGVAENSVVISNGDINLSLRKAKKRAFQLEEGEETEPDCKYSKKHWKSRENNNNNEKVLDLEPKAVTDQTVSKKNKRKNKATCGTVGDDNEEAKRKSPKKKEKCEYKKKAKNPKSPKVQAVKDWANQRCSSPKGSARNSLVKAKRKGSVSVCSKESPSSSSESESCDESISDGPSKVTLEARNSSEKLPTELSKEEPSTKNTTADKLAIKLGFSLTPSKGKTSGTTSSSSDSSAESDDQCLMSSSTPECAAGFLKTVGLFAGRGRPGPGLSSQTAGAAGWRRSGSNGGGQAPGASPSVSLPASLGRGWGREENLFSWKGAKGRGMRGRGRGRGHPVSCVVNRSTDNQRQQQLNDVVKNSSTIIQNPVETPKKDYSLLPLLAAAPQVGEKIAFKLLELTSSYSPDVSDYKEGRILSHNPETQQVDIEILSSLPALREPGKFDLVYHNENGAEVVEYAVTQESKITVFWKELIDPRLIIESPSNTSSTEPA

SEQ ID NO: 945 - DNA, 891 bp, Homo sapiens
agggtacgagacgggggtgaatcggacgaggcggagagacctgggcttggcgcgggcgggagctgcggcggatacccttgcgtgctgtggagaccctactctcttcgctgagaacggccgctagcggggactgaaggccgggagcccactcccgacccggggctagcgtgcgtccctagagtcgagcggggcaagggagccagtggccgccgacgggggaccgggaaacttttctgggctcctgggcgcgccctgtagccgcgctccatgctccggcagcggcccgaaacccagccccgccgctgacggcgcccgccgctccgggcagggcccatgccctgcgcgctccgggggtcgtaggctgccgccgagccggggctccggaagccggcgggggcgccgcggccgtgcggggcgtcaatggatcgccactccagctacatcttcatctggctgcagctggagctctgcgccatggccgtgctgctcaccaaaggtgaaattcgatgctactgtgatgctgcccactgtgtagccactggttatatgtgtaaatctgagctcagcgcctgcttctctagacttcttgatcctcagaactcaaattccccactcacccatggctgcctggactctcttgcaagcacgacagacatctgccaagccaaacaggcccgaaaaccactctggcaccaccatacccacattggaatgctgtcatgaagacatgtgcaaattaccagagggctgcacgatgttctctctcctccccaggggtgaggcctcaggaccagggaacaggtatcagcatgatggtagcagaaaccttatcaccaaggtgcggagctgacttcttccaaagaagttgtggttccgggcgcgggccattgc

SEQ ID NO: 946 - DNA, 693 bp, Homo sapiens
  misc_feature (6)..(7): n is a, c, g, or t
  misc_feature (9)..(9): n is a, c, g, or t
gtccgnnanacaacttacggctaggtacgaggactgggtgtgtgcagcaggaccggccccaagatggaagggagcggcggccgcgtccgcctcaaggcgcattacgggggggacatcttcatcaccagcgtggacgccgccacgaccttcgaggagctctgtgaggaagtgagagacatgtgtcgtctgcaccagcagcacccgctcaccctcaagtgggtggacagcgaaggtgacccttgcacggtgtcctcccagatggagctggaagaggctttccgcctggcccgtcagtgcagggacgaaggcctcatcattcatgttttcccgagcacccctgagcagcctggcctgccatgtccgggagaagacaaatctatctaccgccggggagccagaagcatggaggaagctgtaccgtgccaacggccacctcttccaagccaagcgctttaacaggagagcgtactgcggtcagtgcagcgagaggatatggggcctcgcgaggcaaggctacaggtgcatcaactgcaaactgctggtccataagcgctgccacggcctcgtcccgctgacctgcaggaagcatatggattctgtcatgccttcccaagagcctccagtagacgacaagaacgaggacgccgaccttccttccgaggagaccgatggcattgcttactttcctcatcc

SEQ ID NO: 947 - DNA, 356 bp, Homo sapiens
  misc_feature (299)..(299): n is a, c, g, or t
  misc_feature (328)..(328): n is a, c, g, or t
gacgaatggaaaggctggatgcaacttgtgattttgatttatcacatttctggagcaagtacagtaagtatttggaatttaagttcagaaagtataggaagtgatgtcattttaatgtttctttaagggcaccagcttttttgtgttttataatctctaccagttatagacccttcttatttcccacttaatctttccgcctttccatttttctcctctttgaggaaaatgtaattttcaaaggcaaaattttttttaaaaaaggataagggcaataattgctttgtatttgcttgggncttaatttttaacataataggaaatagcnggatatctaaggggtattattttatggc

SEQ ID NO: 948 - DNA, 422 bp, Homo sapiens
  misc_feature (292)..(292): n is a, c, g, or t
  misc_feature (336)..(336): n is a, c, g, or t
  misc_feature (399)..(399): n is a, c, g, or t
  misc_feature (408)..(408): n is a, c, g, or t
cggatactgctggtttctgccttctccatgctgagaacaaaatcacctattcactgcttatgcagtcggaagctccagaagaacaaagagcccaattaccagaaccacattaagtctccattgttttgccttgggatttgagaagagaattagagaggtgaggatctggtatttcctgggtctaaattccccttgaggaagacgaagggatgctgcagttccaaaagagaaggactcttccagagtcatctacctgagtcccgaagctccctgtcctgaaaaccacagacantatgggtcccaaatgactgactgcaccttctgtgccttcagccnttcttggacatcaggatcttctgtttccacatccacacaggccattacatttattcaaaccantgttatggnacaggtgtagggca

SEQ ID NO: 949 - DNA, 296 bp, Homo sapiens
gggaccccagaatggctgaggagaagaagctgaagcttagcaacactgtgctgccctcggagtccatgaaggtggtggctgaatccatgggcatcgcccagattcaggaggagacctgccagctgctaacggatgaggtcagctaccgcatcaaagagatcgcacaggatgccttgaagttcatgcacatggggaagcggcagaagctcaccaccagtgacattgactacgccttgaagctaaagaatgtcgagccactcttatggcttccacgcccagggagttcattcctttcc

SEQ ID NO: 950 - DNA, 3350 bp, Homo sapiens
ctgcaggaattccccggcgaaagaggcaaagtcccgcacgccggaggacatgcgcctcggttagcggccccgggccccaccaccgtgcggctttctccagattattcctctctcgctgtctctgactgtctctctctgtctctgtctctgtctctctctctctcacacacacacacacacacacaaacacacattcgcacgcacgatctcacttcgatctatacactgggggattaaaacaaacaaacaaaaaaaaacatttccttcgctccccctccctctccactctgagaagcagaggagccgcacggcgagggggcgcagaccgtctggaaatgcgaatcctaaagcgtttcctcgcttgcattcagctcctctgtgtttgccgcctggattgggctaatggatactacagacaacagagaaaacttgttgaagagattggctggtcctatacaggagcactgaatcaaaaaaattggggaaagaaatatccaacatgtaatagcccaaaacaatctcctatcaatattgatgaagatcttacacaagtaaatgtgaatcttaagaaacttaaatttcagggttgggataaaacatcattggaaaacacattcattcataacactgggaaaacagtggaaattaatctcactaatgactaccgtgtcagcggaggagtttcagaaatggtgtttaaagcaagcaagataacttttcactggggaaaatgcaatatgtcatctgatggatcagagcatagtttagaaggacaaaaatttccactygagatgcaaatctactgctttgatgcggaccgattttcaagttttgaggaagcagtcaaaggaaaagggaagttaagagctttatccattttgtttgaggttgggacagaagaaaatttggatttcaaagcgattattgatggagtcgaaagtgttagtcgttttgggaagcaggctgctttagatccattcatactgttgaaccttctgccaaactcaactgacaagtattacatttacaatggctcattgacatctcctccctgcacagacacagttgactggattgtttttaaagatacagttagcatctctgaaagccagttggctgttttttgtgaagttcttacaatgcaacaatctggttatgtcatgctgatggactacttacaaaacaattttcgagagcaacagtacaagttctctagacaggtgttttcctcatacactggaaaggaagagattcatgaagcagcttgcaggtcagaaccagaaaatgttcaggctgacccagagaattataccagccttcttgttacatgggaaagacctcgagtcgtttatgataccatgattgagaagtttgcagttttgtaccagcagttggatggagaggaccaaaccaagcatgaatttttgacagatggctatcaagacttgggtgctattctcaataatttgctacccaatatgagttatgttcttcagatagtagccatatgcactaatggcttatatggaaaatacagcgaccaactgattgtcgacatgcctactgataatcctgaacttgatcttttccctgaattaattggaactgaagaaataatcaaggaggaggaagagggaaaagacattgaagaaggcgctattgtgaatcctggtagagacagtgctacaaaccaaatcaggaaaaaggaaccccagatttctaccacaacacactacaatcgcatagggacgaaatacaatgaagccaagactaaccgatccccaacaagaggaagtgaattctctggaaagggtgatgttcccaatacatctttaaattccacttcccaaccagtcactaaattagccacagaaaaagatatttccttgacttctcagactgtgactgaactgccacctcacactgtggaaggtacttcagcctctttaaatgatggctctaaaactgttcttagatctccacatatgaacttgtcggggactgcagaatccttaaatacagtttctataacagaatatgaggaggagagtttattgaccagtttcaagcttgatactggagctgaagattcttcaggctccagtcccgcaacttctgctatcccattcatctctgagaacatatcccaagggtatatattttcctccgaaaacccagagacaataacatatgatgtccttataccagaatctgctagaaatgcttccgaagattcaacttcatcaggttcagaagaatcactaaaggatccttctatggagggaaatgtgtggtttcctagctctacagacataacagcacagcccgatgttggatcaggcagagagagctttctccagactaattacactgagatacgtgttgatgaatctgagaagacaaccaagtccttttctgcaggcccagtgatgtcacagggtccctcagttacagatctggaaatgccacattattctacctttgcctacttcccaactgaggtaacacctcatgcttttaccccatcctccagacaacaggatttggtctccacggtcaacgtggtatactcgcagacaacccaaccggtatacaatggtgagacacctcttcaaccttcctacagtagtgaagtctttcctctagtcacccctttgttgcttgacaatcagatcctcaacactacccctgctgcttcaagtagtgattcggccttgcatgctacgcctgtatttcccagtgtcgatgtgtcatttgaatccatcctgtcttcctatgatggtgcacctttgcttccattttcctctgcttccttcagtagtgaattgtttcgccatctgcatacagtttctcaaatccttccacaagttacttcagctaccgagagtgataaggtgcccttgcatgcttctctgccagtggctgggggtgatttgctattagagcccagccttgctcagtattctgatgtgctgtccactactcatgctgcttcagagacgctggaatttggtagtgaatctggtgttctttataaaacgcttatgttttctcaagttgaaccacccagcagtgatgccatgatgcatgcacgttcttcagggcctgaaccttcttatgccttgtctgataatgagggctcccaacacatcttcactgtttcttacagttctgcaatacctgtgcatgattctgtgggtgtaacttatcagggttccttatttagcggccctagccatataccaatacctaagtcttcgttaataaccccaactgcatcattactgcagcctactcatgccctctctggtgatggggaatggtctggagcggaattcgatatcaagctt

SEQ ID NO: 951 - protein, 1005 aa, Homo sapiens
MRILKRFLACIQLLCVCRLDWANGYYRQQRKLVEEIGWSYTGALNQKNWGKKYPTCNSPKQSPINIDEDLTQVNVNLKKLKFQGWDKTSLENTFIHNTGKTVEINLTNDYRVSGGVSEMVFKASKITFHWGKCNMSSDGSEHSLEGQKFPLEMQIYCFDADRFSSFEEAVKGKGKLRALSILFEVGTEENLDFKAIIDGVESVSRFGKQAALDPFILLNLLPNSTDKYYIYNGSLTSPPCTDTVDWIVFKDTVSISESQLAVFCEVLTMQQSGYVMLMDYLQNNFREQQYKFSRQVFSSYTGKEEIHEAACRSEPENVQADPENYTSLLVTWERPRVVYDTMIEKFAVLYQQLDGEDQTKHEFLTDGYQDLGAILNNLLPNMSYVLQIVAICTNGLYGKYSDQLIVDMPTDNPELDLFPELIGTEEIIKEEEEGKDIEEGAIVNPGRDSATNQIRKKEPQISTTTHYNRIGTKYNEAKTNRSPTRGSEFSGKGDVPNTSLNSTSQPVTKLATEKDISLTSQTVTELPPHTVEGTSASLNDGSKTVLRSPHMNLSGTAESLNTVSITEYEEESLLTSFKLDTGAEDSSGSSPATSAIPFISENISQGYIFSSENPETITYDVLIPESARNASEDSTSSGSEESLKDPSMEGNVWFPSSTDITAQPDVGSGRESFLQTNYTEIRVDESEKTTKSFSAGPVMSQGPSVTDLEMPHYSTFAYFPTEVTPHAFTPSSRQQDLVSTVNVVYSQTTQPVYNGETPLQPSYSSEVFPLVTPLLLDNQILNTTPAASSSDSALHATPVFPSVDVSFESILSSYDGAPLLPFSSASFSSELFRHLHTVSQILPQVTSATESDKVPLHASLPVAGGDLLLEPSLAQYSDVLSTTHAASETLEFGSESGVLYKTLMFSQVEPPSSDAMMHARSSGPEPSYALSDNEGSQHIFTVSYSSAIPVHDSVGVTYQGSLFSGPSHIPIPKSSLITPTASLLQPTHALSGDGEWSGAEFDIKL

SEQ ID NO: 952 - DNA, 295 bp, Homo sapiens
tttttttttttttttttttttaagcacatagctacatatttattaatcaggaaaacatatatagagaaatttaccctcaataatcagaaaatatacattcttttcaagtacaactggaagcattcactaaattaactatgtactaggccacaaagatgcaacaatatactccaaaaagttaatatcatgcaaatcatgttctctgacaataatccaatatagaaagaaagcaatgatacaattttaaaagaatataccagcaaactaaatatctaagaaaaccttcagttaaaag

SEQ ID NO: 953 - DNA, 5559 bp, Homo sapiens
ggctggcattgcagtgcgggccgtgcgggctgcgcgggcgcggggaggcgcgggcggcaaactgcgggcacccggcaccccgcagccagtaccgggcggaggcgtcagagccgcgcaccgcggacgagcaggcccaggcatccagtaccctgctgactctgacatgcccccagcctcccccagctctgcagggagccctggtgccagagaccttctcccatttctccctatgggtgcctgacctgagggcagagacatctgagtgtgtataagcacagcaggacaccaggacctggcctgaagacatttcctctcctcccctctggatttctcagagactgttctgcgatgaccacagcaaggtaccggcccacctgggacctggccctcgacccgctggtgtcttgcaagctctgtcttggggagtacccagtggagcagatgacaaccatagcccagtgccaatgcatcttctgtactctgtgcctgaaacagtatgttgagctcttgatcaaagaaggattagaaaccgcaattagctgcccagatgctgcctgccctaaacagggccacctacaggagaacgagattgagtgcatggttgcagctgaaattatgcaaagatataaaaagctacaatttgaaagagaggtgctgtttgatccctgtcggacttggtgcccggcgtccacctgccaagctgtgtgtcagctccaggacgtggggctgcagaccccccagccagtgcagtgcaaagcctgccgtatggaattctgctccacctgcaaagccagctggcaccctggccagggctgcccggagaccatgccgatcaccttcctccccggggagaccagtgctgctttcaaaatggaagaagatgacgcgcccatcaagcgctgccccaagtgcaaagtctacatcgagcgagacgaaggctgcgcgcagatgatgtgcaagaactgcaagcacgccttctgctggtactgcctggagtctctggacgatgatttccttctgatacactacgataagggaccctgccggaacaagctgggccactcccgggcatctgtgatctggcatcggacacaggttgtgggcatttttgcaggatttgggctgctgctcttggtggcctcacctttcctactcctggccactccctttgtactttgctgcaagtgcaagtgcagtaaaggtgacgacgacccgttacccacctagaggaagcgcgatgctggaacacatccctgcctccgggaagtgtggctctcccccaaccctccccaccgtccccccttcactaaacatctttcttgccttatgtgccccattgagcttcacagtgtcaggctggacgccgtgatttcagggacctatgtcacaatgttcgctgaggccccaggtgtggtggggaggggaggcaggtgtgggtagcgcacatccccacagatcaatctctgcagatgacagggaggtgctgtgagaagtgcaccaggcagctttctctctgtggtagactaggcatgtctggggatggcctaagagactttctgctccttggcttctagatggcaccatgttgtcagagaagtcttttaaggactgccactctcttcagacagaatctgattattccagcttgagagaagcactctgtttatgacaactgtttttattactaatggcatttagtaaaatcctttttagaaggtattttttttccaactgagtagtgaaaatcaacaaggtgcatataaaccatcctatgcctttcttgaaatgtgcattttaagaagttatagttaaacgacttttcaggagatttagaaagccttatgcactctttgtgtttttcttgaaacttgctgtagtaactttttgaacgctgtaagctgtgtactgttataagtgtgcttcctatattgttgcatttccttgataatattgacgtgtttaaaggaacatctcatctccattagatttgccttttgttgttttctctctttggtgattcagctcagctcatgggcctcatcccttctctcccaggtagcagaaaacgctttttattgcattcaatcccactgctttgctcggcaatggttctcctccgaattgctgccgtctggcctctggcctcagtcttcagatagacagtaagaagaaagcagcctcattgatccgcagatgtaggggcctcttggcagaggctggaggactctgggggctagggaagagcctgccagattttcacatttttaaaatgttctagtcattttgagaaatcatatatcttacacagttccaagtcctgttgctaaccgttttgctcttgttggggaaaagaacctcccatttcacttcgttttaacgtggggattttaccacttgatcttttacagggctgtctgtgaccatttccatggcagcaggatgcagggattaataaggacacatacacattattccaccaattgactttgaaaagtggagaaagtgtattctttaaagagaatttacttctaaaagccacaggtgcttttacaaagcaaactgcattgaatttaaaacttctaaaaataacaggcaaatattgtagctatattacagtgggattttaaaaatcttgttaaacattctataaagaagtaaaacaaaatccttttatctcagttatttgcccatcacaagcacatttttaaaatgttgctttgtgtgtgtttgacttctgcatttgagtatcagtctcaggtcctagtttactttccctggttggaaatttatttcttatttcctaacattgaattcgttagaaaaaacagcgtcacctcactcttcacctgtcatgttgattttccttatgaacccgaagccatttagaaaatccctgtgtgtcaaaattacattcaaaaagctctccttgtaattgcaagtttagtaactcagtaagaacatgcctgcgactccctttctggatggaacctgggctgtggctctctgtcgtttgtggtgctgtgatggtgtctactgttagaatagcttttctggaggtgggtggcaactccacgcgggagtcattggctgggcttgagccctcagcctgtgatatgtggatgcagctgtccagccactgccctttaacatgcccagcacacatgggaggcctgtggccctgtgcccagtggcccacaggacacgcctccaccatatgctcatccttcctgcctgaaattgctgctgcccatcgcatgagcccacacagtagcacccccgtccttaggatgagagtcagagcctttggaaaggctgcatccccagggctagagctcagatgaccttatttctagagggacaggctgttctgttggaagagtctctggcccagtcatgcacatctgtagccccagccatccttgtgccttcacctctgatgtgtttcacaagcacgtagttcaacccagatagggaccacagagattctggggccagccaggggcagtcaaattagcacctactggctctgactttttgtatgaagcatgcctcagtttcctcattttgatctagatataaaattaaaattgtccatttcctatataaataccagcaagatcactctgagatacataaactcgcatttccttctgttttagtaaggagtgccagacttatctttgatgggaatacagtatgaaccctgcttgatgtaaaatggaaatagcacacaggcagatggccctgggtttggactttgatcttgccatcattccccagtaaaacctggggagttctgcgttgagtggacggacttattcctgtgaagcggcataatttgtctccattgaaaaatggcattcactcttacagatggtgttcactgcaagccccagaagcatatggcatgtgttcactaagaggcctttaatcctggggagtaaggggcgaaggcccttagacaaccatggctgctgtaccgccgcccagggtgggtggccagtgaggactggccttagcccagtggacctgtggcttctctgaggcccttgagtaactgaccacatttggaggttttgctggaaatgcctgacctctcagtctggctctgctgtgtagtccatagcccagccagatgagcttgcagcctcataggaggtcagcaccttgcaaagatgcagtcaccatagatgtccacgtagcagagactgacttaggatctgagataaagcatcggattgcaggaataactgtccaaattagttcttcctcctcaactcataggagtagctgtggacagaggaaccaacatctgccacctctggcattttctttcttttttttctttttgagacggagtttcgcttttgtcccccaagctggagtacaatgacaggatctcggctcactgcaagctctgcctcccgggttcaagcgattctcctgcctcagcctcccaagtagctgggattacaggcacccaccacctcacccagctaatttttgtattttcagtagagacggggtttcaccatgttggccaggctactctcaaactcctgacctcaggtgatctgcccacctcggcttcccaaagtgctggaattacaggcctgagccaccccacccggcctattttcttaaaggggaacaaatgatcttgacaacatattattccataaaaccagtttagggcacaggccagttcctgattagaacacaggacctgtgggagggactatcagagatgcaaaaattacttcaagatgagtttattgttttcatttgtattgcaaaagttagaagtcattttacaaattaaaaaaacatttttttcttggtagtctttaaaaattaggggattgaaaggatccaggatgggctttgtgtgtgtgtctcagattctcatttattagtgagcacacctgtgtatatatataaatcacaaggagatcatcaagggaaaacattttgcatgtgtaaagcttcatgaagttctctttaaaaaataccaaagcttgtttatttctgataattaacctaagcccttatgaaaataaacaaaatgaagggattatgacaggtattaccaaaaacaccaaaaggaacaaaggggcctgcgttaaaacctaattgctaatgcttcacaactaggagagcatgccgtcttgatgtttaaaaaacccagggtctccacccttcctttgatttgtgcaattctgtcttccacagttccggagccttcagtgaggggtagctacatgccccatgcctgccctttctttccttctttgctcactttactatgggtgtattttaatcttgtataaaaatatgcatgaatgagtcatgcacatgtatacgttatgtatttgacaagtggtggtgaaacaaaatcaaaacagatttgatttgtgtttttgaaatgtcagtacattttgtgccactaacactgtgatgtataaaagagctgtttgaatgccttttaatgttgtgttttgtactctggaatcatatggaaaaagtttgatttgtaatttcaatacatattttaaatgt

SEQ ID NO: 954 - protein, 292 aa, Homo sapiens
MTTARYRPTWDLALDPLVSCKLCLGEYPVEQMTTIAQCQCIFCTLCLKQYVELLIKEGLETAISCPDAACPKQGHLQENEIECMVAAEIMQRYKKLQFEREVLFDPCRTWCPASTCQAVCQLQDVGLQTPQPVQCKACRMEFCSTCKASWHPGQGCPETMPITFLPGETSAAFKMEEDDAPIKRCPKCKVYIERDEGCAQMMCKNCKHAFCWYCLESLDDDFLLIHYDKGPCRNKLGHSRASVIWHRTQVVGIFAGFGLLLLVASPFLLLATPFVLCCKCKCSKGDDDPLPT

SEQ ID NO: 955 - DNA, 421 bp, Homo sapiens
  misc_feature (137)..(137): n is a, c, g, or t
ctggctggtaactctcagctgccctggccaataactgacatgtagaaggagggtacaaaagacgggctcccttgctttaaggaggcctaactgtggtgccatttgtgctcagagttccccatgagagcaagcggaantaggtctccacgtgagaccacactctggctcagccttagcctttttctcgccctgtcttgcttccctcacccccttctcctgagagcatttccccaataattcacttgaacaagaatgctcagcttaggctctgcttctagggaacctggacccatgacacgctctgttagcttcctgaggagactatcttgttagttcccctaggaacaaattcctgtcttgggactctgcttatgatcactcccttcattcccctggccaagaatggacagctcagtggagg

SEQ ID NO: 956 - DNA, 364 bp, Homo sapiens
  misc_feature (39)..(39): n is a, c, g, or t
  misc_feature (253)..(253): n is a, c, g, or t
ggcacgagtttagctatttatatatgcagtactctcagncatatgcagaaatacttttttttttttaattaatagttacaggcttgttggtccagtgggatttgggtagggggagaaagataccttctaaaatggatcaatagaaccaaaataatacagcatgttctataaccacaaggaaatcaaatgatcctgtcatgattccagttagtcataactatgttagcagtgctaaatgcattttagaaatggngacttctgtggttttcctagcatttgtctctaacaaatggtgaaataattactcatggccctctctgccattgtctttcattttttcacagtgaaattagacccctttact

SEQ ID NO: 957 - DNA, 3100 bp, Homo sapiens
actcgtctctggtaaagtctgagcaggacagggtggctgactggcagatccagaggttcccttggcagtccacgccaggccttcaccatggatcagttccctgaatcagtgacagaaaactttgagtacgatgatttggctgaggcctgttatattggggacatcgtggtctttgggactgtgttcctgtccatattctactccgtcatctttgccattggcctggtgggaaatttgttggtagtgtttgccctcaccaacagcaagaagcccaagagtgtcaccgacatttacctcctgaacctggccttgtctgatctgctgtttgtagccactttgcccttctggactcactatttgataaatgaaaagggcctccacaatgccatgtgcaaattcactaccgccttcttcttcatcggcttttttggaagcatattcttcatcaccgtcatcagcattgataggtacctggccatcgtcctggccgccaactccatgaacaaccggaccgtgcagcatggcgtcaccatcagcctaggcgtctgggcagcagccattttggtggcagcaccccagttcatgttcacaaagcagaaagaaaatgaatgccttggtgactaccccgaggtcctccaggaaatctggcccgtgctccgcaatgtggaaacaaattttcttggcttcctactccccctgctcattatgagttattgctacttcagaatcatccagacgctgttttcctgcaagaaccacaagaaagccaaagccattaaactgatccttctggtggtcatcgtgtttttcctcttctggacaccctacaacgttatgattttcctggagacgcttaagctctatgacttctttcccagttgtgacatgaggaaggatctgaggctggccctcagtgtgactgagacggttgcatttagccattgttgcctgaatcctctcatctatgcatttgctggggagaagttcagaagatacctttaccacctgtatgggaaatgcctggctgtcctgtgtgggcgctcagtccacgttgatttctcctcatctgaatcacaaaggagcaggcatggaagtgttctgagcagcaattttacttaccacacgagtgatggagatgcattgctccttctctgaagggaatcccaaagccttgtgtctacagagaacctggagttcctgaacctgatgctgactagtgaggaaagatttttgttgttatttcttacaggcacaaaatgatggacccaatgcacacaaaacaaccctagagtgttgttgagaattgtgctcaaaatttgaagaatgaacaaattgaactctttgaatgacaaagagtagacatttctcttactgcaaatgtcatcagaactttttggtttgcagatgacaaaaattcaactcagactagtttagttaaatgagggtggtgaatattgttcatattgtggcacaagcaaaagggtgtctgagccctcaaagtgaggggaaaccagggcctgagccaagctagaattccctctctctgactctcaaatcttttagtcattatagatcccccagactttacatgacacagctttatcaccagagagggactgacacccatgtttctctggccccaagggaaaattcccagggaagtgctctgataggccaagtttgtatcaggtgcccatccctggaaggtgctgttatccatggggaagggatatataagatggaagcttccagtccaatctcatggagaagcagaaatacatatttccaagaagttggatgggtgggtactattctgattacacaaaacaaatgccacacatcacccttaccatgtgcctgatccagcctctcccctgattacaccagcctcgtcttcattaagccctcttccatcatgtccccaaacctgcaagggctccccactgcctactgcatcgagtcaaaactcaaatgcttggcttctcatacgtccaccatggggtcctaccaatagattccccattgcctcctccttcccaaaggactccacccatcctatcagcctgtctcttccatatgacctcatgcatctccacctgctcccaggccagtaagggaaatagaaaaaccctgcccccaaataagaagggatggattccaaccccaactccagtagcttgggacaaatcaagcttcagtttcctggtctgtagaagagggataaggtacctttcacatagagatcatcctttccagcatgaggaactagccaccaactcttgcaggtctcaacccttttgtctgcctcttagacttctgctttccacacctgcactgctgtgctgtgcccaagttgtggtgctgacaaagcttggaagagcctgcaggtgccttggccgcgtgcatagcccagacacagaagaggctggttcttacgatggcacccagtgagcactcccaagtctacagagtgatagccttccgtaacccaactctcctggactgccttgaatatcccctcccagtcaccttgtgcaagcccctgcccatctgggaaaataccccatcattcatgctactgccaacctggggagccagggctatgggagcagcttttttttcccccctagaaacgtttggaacaatgtaaaactttaaagctcgaaaacaattgtaataatgctaaagaaaaagtcatccaatctaaccacatcaatattgtcattcctgtattcacccgtccagaccttgttcacactctcacatgtttagagttgcaatcgtaatgtacagatggttttataatctgatttgttttcctcttaacgttagaccacaaatagtgctcgctttctatgtagtttggtaattatcattttagaagactctaccagactgtgtattcattgaagtcagatgtggtaactgttaaattgctgtgtatctgatagctctttggcagtctatatgtttgtataatgaatgagagaataagtcatgttccttcaagatcatgtaccccaatttacttgccattactcaattgataaacatttaacttgtttccaatgtttagcaaatacatattttatagaacttc

SEQ ID NO: 958 - protein, 355 aa, Homo sapiens
MDQFPESVTENFEYDDLAEACYIGDIVVFGTVFLSIFYSVIFAIGLVGNLLVVFALTNSKKPKSVTDIYLLNLALSDLLFVATLPFWTHYLINEKGLHNAMCKFTTAFFFIGFFGSIFFITVISIDRYLAIVLAANSMNNRTVQHGVTISLGVWAAAILVAAPQFMFTKQKENECLGDYPEVLQEIWPVLRNVETNFLGFLLPLLIMSYCYFRIIQTLFSCKNHKKAKAIKLILLVVIVFFLFWTPYNVMIFLETLKLYDFFPSCDMRKDLRLALSVTETVAFSHCCLNPLIYAFAGEKFRRYLYHLYGKCLAVLCGRSVHVDFSSSESQRSRHGSVLSSNFTYHTSDGDALLLL

SEQ ID NO: 959 - DNA, 705 bp, Homo sapiens
  misc_feature (44)..(44): n is a, c, g, or t
ccacgagatatgttatatgtactgatacctcggtgtataattcnagtacgatggcttgttgtctaccgcgctatttactatggcacgtggcggacctgctgaagcgcggcgctgcgggccgggtccgcggggcacagccgggggccgtcggcggcgcgcggactccgcatcccgcaccccgatggtagccgaggagctggtgtaattacttcaagcctccaggatggcaatccagttccgttcgctcttccccttggcattgcctgggatgctggcgctcctcggctggtggtggtttttctctcgtaaaaaaggccatgtcagtcagccatgatgagcagcagtgtggaggctggtgctgtgcagctgagggctgaccctgccatcaaggaacctctccccgtggaagacgtctgtcccaaagtagtgtccatcaccccccatgtgtcacagagcctccatgaaaaggaactgtccaccgtgagcaagctgccttgcatgagcccccagcattgctccagacacacccaccttgcctgaagatcagagtcctcgggcattcttcctaacaccacagacatggagattgcgaccaggaacactgcagagatgacagtacaaagctggagctagccctgacaggtggtgaagccaaatcgattcctctagagtgcccctttcatccccaaagggtgtactattctc

SEQ ID NO: 960 - DNA, 2947 bp, Homo sapiens
ggcgggaaacagcttagtgggtgtggggtcgcgcattttcttcaaccaggaggtgaggaggtttcgacatggcggtgcagccgaaggagacgctgcagttggagagcgcggccgaggtcggcttcgtgcgcttctttcagggcatgccggagaagccgaccaccacagtgcgccttttcgaccggggcgacttctatacggcgcacggcgaggacgcgctgctggccgcccgggaggtgttcaagacccagggggtgatcaagtacatggggccggcaggagcaaagaatctgcagagtgttgtgcttagtaaaatgaattttgaatcttttgtaaaagatcttcttctggttcgtcagtatagagttgaagtttataagaatagagctggaaataaggcatccaaggagaatgattggtatttggcatataaggcttctcctggcaatctctctcagtttgaagacattctctttggtaacaatgatatgtcagcttccattggtgttgtgggtgttaaaatgtccgcagttgatggccagagacaggttggagttgggtatgtggattccatacagaggaaactaggactgtgtgaattccctgataatgatcagttctccaatcttgaggctctcctcatccagattggaccaaaggaatgtgttttacccggaggagagactgctggagacatggggaaactgagacagataattcaaagaggaggaattctgatcacagaaagaaaaaaagctgacttttccacaaaagacatttatcaggacctcaaccggttgttgaaaggcaaaaagggagagcagatgaatagtgctgtattgccagaaatggagaatcaggttgcagtttcatcactgtctgcggtaatcaagtttttagaactcttatcagatgattccaactttggacagtttgaactgactacttttgacttcagccagtatatgaaattggatattgcagcagtcagagcccttaacctttttcagggttctgttgaagataccactggctctcagtctctggctgccttgctgaataagtgtaaaacccctcaaggacaaagacttgttaaccagtggattaagcagcctctcatggataagaacagaatagaggagagattgaatttagtggaagcttttgtagaagatgcagaattgaggcagactttacaagaagatttacttcgtcgattcccagatcttaaccgacttgccaagaagtttcaaagacaagcagcaaacttacaagattgttaccgactctatcagggtataaatcaactacctaatgttatacaggctctggaaaaacatgaaggaaaacaccagaaattattgttggcagtttttgtgactcctcttactgatcttcgttctgacttctccaagtttcaggaaatgatagaaacaactttagatatggatcaggtggaaaaccatgaattccttgtaaaaccttcatttgatcctaatctcagtgaattaagagaaataatgaatgacttggaaaagaagatgcagtcaacattaataagtgcagccagagatcttggcttggaccctggcaaacagattaaactggattccagtgcacagtttggatattactttcgtgtaacctgtaaggaagaaaaagtccttcgtaacaataaaaactttagtactgtagatatccagaagaatggtgttaaatttaccaacagcaaattgacttctttaaatgaagagtataccaaaaataaaacagaatatgaagaagcccaggatgccattgttaaagaaattgtcaatatttcttcaggctatgtagaaccaatgcagacactcaatgatgtgttagctcagctagatgctgttgtcagctttgctcacgtgtcaaatggagcacctgttccatatgtacgaccagccattttggagaaaggacaaggaagaattatattaaaagcatccaggcatgcttgtgttgaagttcaagatgaaattgcatttattcctaatgacgtatactttgaaaaagataaacagatgttccacatcattactggccccaatatgggaggtaaatcaacatatattcgacaaactggggtgatagtactcatggcccaaattgggtgttttgtgccatgtgagtcagcagaagtgtccattgtggactgcatcttagcccgagtaggggctggtgacagtcaattgaaaggagtctccacgttcatggctgaaatgttggaaactgcttctatcctcaggtctgcaaccaaagattcattaataatcatagatgaattgggaagaggaacttctacctacgatggatttgggttagcatgggctatatcagaatacattgcaacaaagattggtgctttttgcatgtttgcaacccattttcatgaacttactgccttggccaatcagataccaactgttaataatctacatgtcacagcactcaccactgaagagaccttaactatgctttatcaggtgaagaaaggtgtctgtgatcaaagttttgggattcatgttgcagagcttgctaatttccctaagcatgtaatagagtgtgctaaacagaaagccctggaacttgaggagtttcagtatattggagaatcgcaaggatatgatatcatggaaccagcagcaaagaagtgctatctggaaagagagcaaggtgaaaaaattattcaggagttcctgtccaaggtgaaacaaatgccctttactgaaatgtcagaagaaaacatcacaataaagttaaaacagctaaaagctgaagtaatagcaaagaataatagctttgtaaatgaaatcatttcacgaataaaagttactacgtgaaaaatcccagtaatggaatgaaggtaatattgataagctattgtctgtaatagttttatattgttttatattaa

SEQ ID NO: 961 - protein, 934 aa, Homo sapiens [sequence omitted]

SEQ ID NO: 962 - DNA, 340 bp, Homo sapiens
cgagcggccgcccgggcaggtacttttttttttttttttttttttttggtatttagaaataatttctagtgctaatttatttttagtgatattttgcacagactctccaaataaaaaaccaagaacgaccaattttattgggaaaatactatatgtaacaaactttattttttgatgagtgaagactatttttctaattttgcttaaaaattttaggtttagccttaggtaatacagttaatagagagaatgtttactaccatgcataaattcaaaagacttgttagtttagattgtcaatttaatgttgaacaaagttgcttgaaattttcagatgaaa

SEQ ID NO: 963 - DNA, 321 bp, Homo sapiens
agaaatgcaaaatattgaactgatatttttgtgtgtagttgattactcttccattgagtgaatgatgaatacctgtgaggataggaaattagttctgagatctagtccctctctgattcacttagtaatctatcctcttttcagtattacatgtgcttaatctcagatgaaccatttcaccatggcagtgttatctcatctctgggcttttctgggaattgaagtatctctccttaaccccaattgtcaagggtagtagctgtatactaccactttgaattattgaaacaggtcagtttacggagcctgcattgggtatgg

SEQ ID NO: 964 - DNA, 264 bp, Homo sapiens
  misc_feature (124)..(124): n is a, c, g, or t
  misc_feature (170)..(170): n is a, c, g, or t
  misc_feature (192)..(192): n is a, c, g, or t
gtaccttggtgatcatctccagcctaaatttcatcatcccttctatggtattcccaacaaattatcatccaacctatacttaaaaacatatggtgagccactgcacccggcctgaaattttttnaaggtgaaaatgttttgacaagttcctttttcagaataggtttttnagcagaactctttcagcttgtnagacccaactttgcttttgtttagcttcacagcatagctgaaagttgccaaactggacattgtgcaataaag

SEQ ID NO: 965 - DNA, 603 bp, Homo sapiens
ggagacccagaaggcgccaccatggcggcgcccccgcagcccgtcacccacctcatctttgacatggacggacttcttctggatactgaacggctgtattcagtggtgtttcaagaaatatgtaatcgctatgacaagaaatacagctgggatgtaaagtccctggttatgggtaagaaggcattagaggcggcacagattataatagacgtcttgcagctcccgatgtccaaagaggagctggtggaagaaagccaaacgaagttaaaggaagtgttccccacggctgcgctcatgccaggggcggagaaactcatcatccacctgcggaaacatggcatcccctttgcactggccaccagctcggggtccgcgtcgttcgatatgaagacgagccgccacaaggagttcttcagcttgttttcccacattgtgctgggagatgaccccgaagtgcagcatggcaagccagaccgggactcttcctagcttgtgccaagaggttctctccccctcctgctatggcagaagtgccttgtctttgaagatgctcccaatggggtggagcggccctggccagctgggatgcaggtggtcatggtt

SEQ ID NO: 966 - DNA, 514 bp, Homo sapiens
tttttttttcatttactaattttactaatttattctttgacatacaccaatgtatgatattgaaaaacagaaagcaggtcataaagatggtcctgtccgataaaggaaatcttttaaaacactttcgaaagctaaaataactaaaactattaagcctattgatagctaagaaaataattgtcttcaataatattaggtggaccatatgaaactgctgacagtttttaaactacaaatgcagcaatttcatatgtttcagcctaatccatggggttgtactgatctttctgaccattctcggctgaaaattgacatggtcaaagtccttgcccttcagtatatgcatcgtattagccctttcatggaagtatatctacataaatatatatgtatatatagtgggccaatgtaagcatacacaaggtatcacaccaaatctattcttggagaaaccattcctatttcagactgaatgtttagaagatcatatattgattgtgattactccagactg

SEQ ID NO: 967 - DNA, 250 bp, Homo sapiens
ttttttttttttttttttttttttttttcacggtcactatttattctttgttcctttttctttttgtaagaaacattcacaaaaaccagtgcaaaaccatcagtgtgggcgtcctgttttatattacaaaacttcctctggatatatcatataaaagggggggtctcacaggagagaaacgtgataaattagctctgcaatctacggcaaggaacatagtttttaaaatagactttcaacatatgaccca

SEQ ID NO: 968 - DNA, 551 bp, Homo sapiens
agagcgcgcgcttgcggacgcggcggcattaaacggttgcaggcgtagcagagtggtcgttgtctttctaggtctcagccggtcgtcgcgacgttcgcccgctcgctctgaggctcctgaagccgaaaccagctagactttcctccttcccgcctgcctgtagcggcgttgttgccactccgccaccatgttcgaggcgcgcctggtccagggctccatcctcaagaaggtgtcggaggcactcaaggacctcatcaacgaggcctgctgggatattagctccagcggtgtaaacctgcagagcatggactcgtcccacgtctctttggtgcagctcaccctgcggtctgagggcttcgacacctaccgctgcgaccgcaacctggccatgggcgtgaacctcaccagtatgtccaaatgtactaaaatgcgccggctgatgaagatatcattacactaagggccgaagataacgcggataccttggcgctagtatttgaagcacctaaccaggagaaagtctcagactatgaaatgaagtcgatggattc

SEQ ID NO: 969 - DNA, 493 bp, Homo sapiens
aagtgattatttcactgaaggctagacaacaattccgagaaagagacggagagagagggaagaaaaagacagatagatattggggggaaggagaagactggagaagagagggaagagaggacagcggagagagagcaccagagagagagggagagagagagagagcgctagagagagggagcgagcatgtgcgatgagcaatagctgtggaccttacagttgctgctaactgccctggtgtgtgtgagggagagagagggagggagggagagagagcgcgcttcgcgagagagcgagtgagcaagcgagcagaaaagaggtggagagggggggaataagaaagagagggaaggaaaggagagaaggcaggaagaaggcacgggacgagacaaccatgctgtgctgtatgagaagaaccaaacaggtttaaaaaaatgatgacgaccaaaagattgaacaagatggtatcaaaccagaagataaagctcatagg

SEQ ID NO: 970 - DNA, 112604 bp, Homo sapiens
gatcatagaggagataacaacaggacaactggtactttgagggcaacttggtttcatttaccaaagttgttaatatacttgccctataatccagcattttcacttctaccctacataaattgttggcatatgtttagtcctgagtcctacaaatacaagctaaggctaccaatactgctagaagcaaaagcaaaatgtctatgggtctttttagatgaacccaatggctataggaaaaaattgaaagaacagacttgaagggcactgagagcaaaatggcttgcaaatataccctcaaactttggactaatgaataatagtaagatatcatgatagtcaattcatgtggagaatctaaatactcaacaattgattaagacaaagcatattttaagaaacaacataggatctagcaattatttggccaaatgctgacagaataaaaagatccaaatatgttacagaggtaaagagatgttgaatcaattacaaaaatggaaagaagacagtgtcataggagatatgtgacataaaagtgtcccttcctagccacgaactgtttcagctagcaatttagtggattaagaaaataaacacagggaaactacttatgggaagcaacattttatgataagctatccaagaaaagattgattacaccaatagcattttaagtcagccaacaataaacttatctaaaacatggctataacttcctattattctcctgacatctaattacataacttacctccttttcacttgtcatttcagtaactgcaggccttttctgaagataaaatcagaatgcaaaatagattaggtataatagaggtagacacatcataagtatttctgatgctgctttatctggaagggatgggtttataactttgccagaagatgtaaatatgtatattttcattatgaaatgcttgaactatgactgtgactacctagctactattactcataacattatttaattcaacatttttactcatagcctggcattagtaaaataaagtctgttcctagaaatagcattttcaattagtggtctacaatacaatcaacttgtaaagttacatgttgatatggtttggctgtgtccccaaccaaatctcattttgaattcccaggtgttgtgggagggggccgatgggaggtaattgaatcatggaggcaggattttcccatgctgttgtagttgttattaaaagggggcgttttcctgcacaagctctttttgcccgctgccattccacataagatgtgacttgctcctccttgccttatgccatgattatgaggcctccccagccatgtggaactgtaagtccattaaacctctttcttttgtaaattgcccagtttcaggtatgtctttatcagcagcgtgaaaatggactaatacacatgttaaatgtactaagaaaaataagaaaataccatccagggtcaagtcctttcctaacccctccttttagccctcaccattatgattaattttagtctacgatttggttattaccatagattttactcagaccaagaaggtacatggaggaagtcaggctggaggaagtaagacatgaaaatcatggtatagagcaagcaattagctgatattccaagtaattgtatttgtctaagattctttcatgaaatgcattcgggttatttttcaacagcttttaacctccaaccagtgaaggactgctgtatctagaaggaaatatgtgcaccctctccctgctgcgatcagctcaacaagtaaatatacccacaaaacgagaatcatccaatttataggattctgcagttcaccctcagtcccctttaacaatctataaaaaggattgactatgtttcatatgaagatttgtttttcatatattctgagcatattgtaaaagagacaaaaactactttttgctgggcagatattggcaataacatagtcatgttttcaagaaatattatttctaccaaaacattaaaaatcactatgaatgatttgtcatgtggccttgcatcgggctgtggtaacctccacaacaggcagtcctaaattggagtatctgtgatttctttaaagaccctaacagcataatgagtgaaagtctactgaatctgactcaacggcattaactgcatctccaagggtgaagtgagaactgtgtgagtcaaagaaaactttatagtactataaaatactggtgtagaagtcacaggggaggggaactgcagggtaagtgagggtgagagctgacttcctgcccaatcactaacttggctgaggctgggccttcagtggcaaaacttccttaccagccttacgtttgtttgtttattttctttttgagatggggtctttgttctgtcgcccagactgaagtgcagtggcacgatcttggctcactgcagcctcaacctctggagctcaagtgatcctcctgcctcagactcctgagtacctgggactataggtgcatgccacgacgcctggctaatttttgtatttttttgtagagacagggtgctgccatgctgcccaggctagtctcgaacttctgagctcatgcgattcactcacctcagcctctcaaagtactgggattacaggcatgaaccaccacacccggcctaccagccttaagtttataatcataatcacaaccacagcaaatgaacacactcctcttcttaagcatttcggacacaaagttaagctctccaaaaactcagggtgccagccatattgtactttttctaaatctcaatgttacctggaagaaaagtcagatgtaaactagtcaacattactatctacattaaatagagaaaatataaacacacacagaaaacagaaacatcttttcccagagagaaagtaggtggggccttaaaatttttcactcctaaattgagagcagttttacttcagttcaatgatcaaatctattctctacatattgacagcttcaagcagatataagtagcagcaaattacaatacgtgccatttggaatgcagttttacaattataatctttagctgcattacattcacaaaactcagaaaggctttatggatctcaaaggggactaatgaaaatatttggtcagaacacaaatgaagtgtaaagccaatagctatttttaaaatacaaaaattacttaacacagttcacagcacacagtaaatactacgtaaacaatagggctttttaaatttatttaaaagatcacatatattcccaaaaaccagaagtagtaagtgctaatattttggtttatatttatttctagcctttcccacattatactttcttataatttattgatgatatttggaaaagtcacctctttttgaaaatttgcagtctcaaatattttgctaatgatctaaatctagtaattttacaattgatgctactgggccttctaagtataaattcataatgtctaaataatactgtttgttttcctctgtatgtgtgtaaaattatttaaatccataaaaaattctaaaacaatattagtaatggtgatatggagcagatcttaatttattagtgctctttctatgagatggagtgttaatttgctggtaaattaatatctctttccaatcatcttcaatgctacttccaatacaggatattcagcagccattgatggcagagtggcgacaagccaggcaatgttctaagcaatctgaacaattcatttaatccccacaccttggtggggggtacattaatatgaaacaatttatttaatccccacaacaacctaaaaagttgggcattattatcattcccattttattgatgaggaaactaaggtagagagagcttgagtaatttgttcaaggtctcattgctagtaaggcaccaagccatagttcaaatccaagcaaagctggcagttccaaacttcttttcaaatatgtactgcaaggggaagagaaacatcaaacttcaggagaaagccaacatgctggccaggtatcaccaagtcgaaaatgcaaactagaatggtaggccagcagcctcatatgataggccagagaacactagcattcctgcaatacaggaaagatctctgcagaaagaagatacatttttgtacaaactatggccaatgataagagttctctaaggaaaggcagatttcatgcttcagacactccacgtggtagagtaatggcttccggttggcccaggaatctcatagacttctcaagccagtgaattttaagtaagctgttggcactaattctcttgcactcctttctccctatttcttcccttcacgagcgggagggaggcatggtctcatttcagcagctgtgactcagctgtctactctacatgcccacactaggaatttggacaaccctttagagatgccatttacaagtgagaaactgttgggagaacaaggatgtgtgcctctttcagttagcatctcttttgtgtaataaatatttttaacctagtttatttcagcatctacaacccatatatttcctcaggaagggcatttagtttactagaaccagctatttgagaatatctgtatttaagcccgcctacatatccctaaagcaggacaaggcaattatattctaaactgtctcctacagagttcaaagcaatcccacaaaggaagagaaaggaaatatcaagggtatctgtcaagtgtctgtctgcatagagtactgcacagaccagggcataagagaacattcgctggtccctttcatgaattccatcctacttttcaaggaaaacgcagagctctacttattctaaatgatcatttatttaaaatgaaaaaaaaaaatcaaatgtgaggagttgcgaaagactcccaagcccacttagtacaattctccacccagtataggaatgtcctctagagtctcaagacagatggcctctctgcatctgcttggatatttttcatactcttcatcttaagaaaggacaggacttctgtgatatcaatggtattcctccgtggtgtctttgaaatcactggactattcagatggaatggcacggcacatttgagaaattagatctttccaaaggctacaccctattgaatgtaacataaccactggaaatcggaattgagaatgactttaagaatcatttaagcacaggtcaccacaatctaggtcagtttagtaagaagtccacgggtgtataaatgtgatgcctacctagaatgatcactttataaggattaccttcctatactgacccaacttttcaaaacatggttttatttctgttgcctttttcttactcaaaccaatgtctacttaagttttctctttccttactatttaattgaccttaataaccctattaaaaaaagactaacagtagttaataaatcactaaaagaaaagagaaactatagtactgggattctgatagctcatgggtcacaactgggagaaaaataaaagtagattcattcagcccttaagaaggactgagtagagcaacaaattccctgtgatactccccaaactctaaggcacaatcctattcatcctaaatatacttataatagtaaatagatactcacagaaaaagtccacattttctccaactcctagtattagagtttcagaacctgaaggaatgtcaagattttacctgaatcagctccctatctccaggtaggaaaggtatcatagcctcctttcacaccccagattctctaaggttaactgagtttctcagactcatagtaaatgatgagcgtctccatcgcgggaccccttcttcctagtgcggcagttctttccctgttgcacaccaccctgcaatgtttaattattcaagttgcctctgtcagccgatttgattttttaaatattttttggtagtatgcacaactgaaataacctcagagtgaaaaaaatttaaagagagcagctattgtatatcattcacctaaatttttaaaaaatgaatcaaataggtgagaagttggattgccttgccactacttatttgtaaaaccttatcttctggaggagatttgttcttttattgttctgtccagttgatctaatgtaacgatgccattgctaagctttactaagtgtggtacacagaatatgtgaaaccaaatgcttgcttcataaagtaacctaaacggttttattaagtcacatattatgtgttcagactgtaggtggtactttcacttaatatttacaagtgtttaagttttatattatttaatatttatgaatattaatttccattttttcacttgatataaaatgttaacattttatttactataaacattcaatttcatttaatatttacaaacaaggtcaatgaaaaagttctcattttacacctcagaaaactgctttaaagaacagttcattgatttggccaaggtcagacagctattaattggtgaactgaaacatgttatccgattccaaagcttgtatacttttcaaataaaagcaacaggggtcttaatgacatcgcggaatgaagaaatggcagggactcttcagaagcatacggcctagactagggaagtattacaaaatcacacacaacctggcagaaaacacagacagtcaagagctattgtctacagatcactgtacaaagttcctcccaacgatctcagaattctccaacggcaagaattctatgtgaaaattgaaagaaaaaaatgtttttctctaggaatcttagtttttaatcttgagaaaaatctggatgaggaatcatataaaaatttaacttgttcttaatgtccaaagccacaaaaccattgccacaattaagaatgctttttcttttaatgaataagttagctattatttttaataaacacaaaagaactgtcttcctattttcagtggtgaaaaacatgccatttgagatatgcagtgagaaaaaaaaaaaaaaaattattctcacaaatcacttccacaaagccctctggcagagatgactcttgaggataatgtccatttgttaagttctcctctcttcagagagaacaggctggagccactgagcagcatctgaatccaagaggcagcagatgagccttgttgaagataatggcatgataaacaaaccctaatccaaccagcgttatgattacaataatattaaatccctctataaaagattcttgatgtttattcactcaatcacagtaatctgtttgaaaccagcagggtccatgacacataggaaggcttaaataaattactattcaaaataactgaaaatttaaaaaaaaattccattcctatatatacgataaaaatggtggttgtgctaaatttttgatggttgagattaaatgtttggggctgataatatatttgtaggtgacatcagagctcactaaacctagttaacagtaaagaatttaattcaataaacatgtagtgaagtatcagtactacactcaatctggggaatacagagatgaaaagtgcctgtcctaaacaggactacagaaatataagtacataattacagtatgagaaatatatgccatgtgtacaggcagcaataggatacatggttaataagtacttatacttgggtggatggtcaaaaaagacttcacagaagatctgacatattaactaatttttgcaacaagaatgacgaccaccacacacacaaaaaaagtacaaaagcagcatgattaacgattaatgcagcattaactttgttgatgggcaggatcaagttgaaggtggaatactaagataagaactggagaggtggccgggcacggtggctcacacctgtaatcccagcactttgggaggcggaggcaggcggatcacgaggtcaggagatcgagaccatcctggctaacacggtgaaacccagtctctactaaaaatacaaaaaaaaaaaattagccgggtgtggtggctggcgcctgtagtcccagctactcgggagggctgaggcaggagaatggcgtgaacccgggagtcagagcttgcagtgagccgagatcacgccactgcagtccagcttgggtgaaagagccagactccatcttaaaaaaaaaaaaaaaaaagaactggagaggcaaacaacactcaataacaactggcttttattccatgctgagtatcctgtattgccttgtaatgaggtacatcagtgagatctgtgttttaacacattaacaatagtatacaggatagattgcagaaggccatccacagagacaaaaacaaaatttgaagatgtgatagcaatagtctgggtaagagtcggtgaagagctaaactaactcaggtttaaaaccagatctactgttggtgttgtgctatacacataattttatggatataataattatatataataaaattatatagatataataattataaaattataattatataggtaatatcactatataattatagttatctcagataattatctatataattttatgtgtatatatatatactgtaaagtaggacattttatctaaagtctgtattttcccctttttttatatagtactctgacgtgccttggaaagtaattccttttttttcttgagctaacatttacgttttcaaaacaatctcattagttttaacaagtggtcaagtattaaagatacacggtatgtgtgaggaataagagagccaagaagttaaaataccaggacaagataagccactatgaaagtcatgcctaggaagacaacagagtactaattgtaatttcaaaattgccctatggatcataatattctccctgcaacctttcccaagaataggccattaaatatcagcacctccaaagagaagtttatacaccatttgtacatagaaaaactataatggttaataatgcaaattcaaaagcaatcatgttagaatggaaagcatgggagtcatttaataatgtcaacaggtacagatcactttaatacaagaaaactaatgtgtttgcatatcattaaaggttctttctgggtctatcactattataaatcattctgacttcactaacatataataattagccaataaaggtgggccttccattttgatttgcttaataacaagaaaatttgttcgatcatcatggtatttttgtcactcagtatctcttccttaactttctcatagccaataatattgccaggaactcatggtttgcttttcctccctgaggaacaagcagaattccacagggaatcttacgtggtatgagaagaaaaaggaacgtggtccttttcgtgtctaattcccagacacattcttggcaaccactttgtgtgtgttcctctcacactcttcacattctgggcaatgtatcacattacttcccacccatatacagagagatgaaagagaaagtaaaaatgcctaggtgcaagtgaatttatttgtttttaaattattttagatgcaaagatggacgctaacattctattagacactgtatctcgtcaaaaaaaattgatatgtatttttgccaatgctaggctttatgaattccatttattacaaaggtctaaccatctaaaatccattaggtgttaatttttaacataatcacagttccttcaaaccatccccaccctcgcactcctcaaaattccaaatactccaaataaaatgttacctttaggaaaaatgtggcttgacctagaggtcgcagtcctcattacaaacttgttctgcatgtcctaaagcaggggtccctaacccccaggtcatggactggtacatgtctgtggcttgttaggaacccggctgcacagcaggaggtgagcactggctgaatgagcatactgcctgagctctgcctcgtgtgtcagatcagctgaggcattagattctgatagaagtgtgaaccctattatgaagtgcacatgtgagggatctaggttgcaagctccttatgagaatctaactaatgcctgatgacctgaggtggaacggtgtcctccccataccagccccccaatccctcaccctcatctggggaaaaattgtcttccatgaaaccagttcctggtgccagaaaggttgtgaaccactgtcctaaagcatctaccataagcatatgtccaccgtatccagatcctgagcctcctcctcagcaccagaacactactaaaagcagcaagggggaaactgaggaaaaaatcacacctctgccaaattttaagtgttgcttagggtgtctctgacattatctcaaccaccttcttgtctatatcattctttttttccatccctatttttgatgcctatccttgctcagaaatacttcactgtaatgatcccctctagctctgtaaagcactctattgtgtcaccaatccacactactccccaatatactcagtcacctaagagctatgccttccttttctgaaaattcttatcaggactttacggagaaacctccaaatgtctacaaagaactagtatccagtaattcaaatgaagtataaatggtaacaccaaagctattctgttttgtttggtttctgaatgcttttaatgtttttgttttaccacatgatgtctacagagctgtaaggaaaacacttggggcatggggccattatttgaaatattggagtctactaaatctgtgcactacagaccacggaaagattaaaatggacactaaaagggggtaagtgtggccttgagctgcctcttttaaatattagaaagtgaaaagacagagaatgcggccgggcgcggtggctcacgcctgtaatcccagcactttgggacaccaaggcgggcggatcacgacgtcaggagatcgagaccgtcctggctaacacggtgaaaccccgtctctactaaaaatacaaaaaaaaattagccgggcatggtggcgggcacctgtagtcccagctgaggctgaggcaggagaatggcgttaacccgggaggcggagcttgcagtgagcagagattgcgccactgcaccactccagcctgggcgacagagcgagactccgtctcaaaaaaaaaaaaagaaaaagaaaaaaagaaaagacagagaatggaaattcaataggaaaccaatctgagaacctgtttaaaacttaaatttccaataatcttgctgttctgggaacctctcattgccagtgttgtggagccagggcaagaccgattctggggttgaagaggatcatatgctctttatgttcccaacaaaaaaactgttaagcaataatagcgagaagagtatctgttcctctaaagtcttccctccaaaaaggaaggtaacaaaggatccaaaagctgtgcttccaaacttcccaagatcaactctttcttcttggggaagatcatggtgttggtttagttaggtaggaaatccttcataatagctgtctagtactaaagcccaattagcacctagcaaacgaataatcatgcgtaacactgaatgtgtataagatctactatattgtgagtttatatcactacatttccaaacttttttcgagtgtattcagcctaccttgcactttgcttaaaatgtagctacctgttcttccccaaaaaggaatggaacattgtctttgtcgatagtgtgtcgagaaaaatagtcatcccaaataactgaatcaaattgaaagaaaaaatataaattgtctcaatgaggttaaaattcttggaatgatccttttttctatgcatagggaaattaatcaataaaataaacacaaggcggtaaactgaattatttgcacaattttgcctgaaattcttgtaagcagaaaactaaaatatctatttttccttctttaatctgtgaatcaactgttggtttttaatcaataaatgtttaattactacccactaaatcctagaccttactttaggtatatggaacatgctttgatgaatgagactttgccattgccctcagaatgcttagagctccctggagaagcccgggcatagaaacaaataatgacaacccaagcaactggtggtaattattaatacaacagaaagtacaagcaaagtgatgtgagcatttagagagcagcaggaattttacatttgccatttacagtcaggaagaacttacgaaaatgacagcattaagaataaatcacgaaagattttgtaaactaaagctgaagaaggacattctagtggtggggacagtatagacaaaaagccacacagtgtatctggagaacagtgtaacatgtagcttagatttgaaccaaaaaacagtggcagataaagatagaaattaagtggttattctcagtataatcaatttcaactctggataaaatgacgaaattcaattttggtatttggaagagaccttctgtgcccaggtaaaatagcctacttgatatttatatgttattgtttgccagcatgtcttaaatatcaatatcatctttcctacattagcttctagttgcttataaaaaacacaatcattcttttccatattgttgtttaaaatcaacattgatcaaatctgacagatatatttttcctaatgtcatttataaacaagtaaaaattcactgtatttttagtacatcaactggtaaagaaatgtattagaatattttatcttaaaattataaagcaataaagttttaggggaaaataaatcttaccttgtggaataaaactggaaaatataatttgggagtttatgagtttggaaagatgggagcaaaaagggatatgaaaacaaaatagggctggttgccaaaagcagtcccataaatatttttaagaacatcggtatttgtggcagaagatattagtcagtctcttttcctaaaagtgagaataagagaatggggagtttttttaaaagtgtgtattatttattttcctttttttcaatctaatggtaatactcctctgacaaagattcgaaactcgttgaatataagaacaggattttttacaaatcattcaagacgactcttcacaagtattcacttttccagaattacgattcatttcaggaaggaaggactcagtaactacacaagagaacacctctccacttcccaccttacacaatatacccaaaatgtactgctgttctcttttacccagaattacaaggatcagcatacaaacagcagagaggagttgattataaatgatggaattatcatgaaataatatttcttcaagctccgcaatcaatctaaaagaagctaaaattgtgttcttaaaatccttctggtgtaaaaagcatttgggtttcgttaatgttttggtttggcttataagaacaccttactcttatgaactaacaattcatgattcatgaggctaggcccattcaaataagaaacacacattgctaaacaacatacaaaggctcatccacctaagaggcctggccagcaaccaggagccaacagagctgctttgtatttcttcagggagatccctctgcctacaactgtatttttgtgttgtgcattttcaaagtgtgttgttgaaaggttatgtttaatttttcatgatgcattatttttcctcatgcacacatttttagcatgttatttttgttgttatttccggaatgaatttaatattttagtttctgcatgtgtgcacatgcatgggtatatgtaaattgatttcattatctttaattagtaaaaactcactctcccccaccttctcccaacaaatataactactgtgaaagctgaatcactaggaaactcaatggtcatactactgcatggagaaaaagaagaaaaaaagccaacacacaaagagaaataggtaagtgagatgaagatatcattggggtctgtgtcacatttctagttgttccagaggtcagactgcattcctgagctctccatggcttcttgtttattattcacttcatctttggacttcattagattcccatgtactttccaatatattctttttttcccttccaaatagtctgatctttgtttgtaatcaaaaggttcacattattggttccatttgttacagcatgggagaacacttttttcccaaagaactcaaaatagtttttaacatttcacggacgcaaaaaaaaaaaaaaaaaaaaaaaaaaaacctgagcatttctgatgtttagaaatattaaaaaaaagaagaagaggttgaaatgtctaatataataacctggtcagttactggtacatactgagctaacgctaaaattttcaaaatgactcctcttcattccctagtctatgtggttcaaactcaaaatgggcatacagtcatcttaaaataggttcagctatctctagcaattataaactctttccatgaataaactttttctaagcacctaaaatcacatgaatatatctgcctgacaaaaatttgggaagtccagcatctctgatttaaaaagaagaaactatttgtaattttagtctcttgttcttaatgcaggatctgaccattggttagtaatgcaacagctgcgattagcaatgaaggaaaactattttcagagtcttctcatgacctagccacattagcaatctaaaaataaaaaaggaaaagtttttaaaagcttaaccttttataaagtgactaaacttcatcaagccatcacaaacagatttctaggactttttttgagaagaagaaaataggatcattagtttaatgacagtaacatttgtgcgggtatacaaacaacatatatgtcagaacaatttaaaaattatatactgaatatgctttatggctttttatagtattttgttgaatctatatttgttttggggagttttgttttaggttctatgtgtgagtgtgagtgtgtttgtgtgttctcgattttaaaactatttcttgagttctttagaccataagaacataatgtataatagtaaagacttatttcaatttatttgaacttttttcaaaagtaacatagattggccaggtgcagtggctcacacctgtagtcccacactttgggaggcagaggcgggtggatcatgaggtcaggagttcaagaccaacctgaccaagatagtgaaaccccatctctactaaaaatacaatacttagccaggaggggtggtacatgcctgtaatcccagctacacgggaggctgaggcaggagaatcacttgaacataggaggcagaggctgcagtgagccaagatcacgccactgcactccagcctgggtgacagagcaagagtctgtctcagaaaagaaataaataaaatacagtacataaaaaataaaaaataacatggattaattgactcttaagagaactatagcaaataatatgtggtgcaaaaaaaggtttattatggctgggtgtggtggcttacacctgtaatcccagcactttgggagacaaaggcaggaggattgcttgaggccaggagtcaagatcagcctggtcagcacagagagacacctagtccctacaaaaagtaaaaaaaaaaaaaaaaaattagccaggcatgctggcaggtgcctgtagtcccagttacttgggaggctgaggtgggaggatcacttgagccctggagttcaaggctgcagtgagttataatcacaacactacgctccagactgggtgatagagtgagaccctgtctcttaaaacattaataaataaataaaagttttaaaggttaatttttacagctacagataaagatatagtgcagagaaagaatagtggctgcggaaaagtcattttgagacaggaagttcaggcttgctcatctggtcaagttaatatctggaagatgaaggctgaagcccacatctctcaaggaagtaagattttgcttgaaattacactattctcagtcgtataaaatcagactagtaagtaaataagtgcgatgtggaagttcagaaggattccttctcctttactgacaggtcaaaaagcctatgaagaacagcagaagtcatgagggaattctggctctgatgttcattcaccctttttctctgatccaaatcagcatctccttcggcccaaaggctggaggatactcttctagtgtcacttctcttccagaaaagggaagagcttactgttagaaactgctaagccccaagtcactctcaggctactgtattgctttacctcaaaaacatccttaacaacagtatttcagtaaatctgacttcatgcaccgttaagaatgaaggatgctgtcactaatgctaaaatcttcctgattttagatatgttaaaatgtgaaaaaaatacatttaagaatctaaaaaccatgtatcagccacatacaactaacatcaaagaactgccagctatattcctttcctttcctttttttcttttttttttatttcaataggtttttggggaataggtggtgtttgattacatgaataagttctttagcggtgatttttgagattttggtgcagccatcacctaagcagtgtacactgtacccaatgtgtagtctttttttttttttttttgagacggagtctcgctctgttaccaggctggagtgcagtggcgtgatctcggctcactgcaacctccgcctcccgggttcaagtgattctcctgtctctgcctcctgagtagctgggactataggcatgtgtcaccatgcccagctaattatttgtatttttagtagagttggggtttcaccatgttagccaggatggtctcgatctcctgacctggtgatccgcctgcctcagcctcccaaagtgctgggattacaggggtgagccggtgtgcctggccccaatgtgtagtcttttatccctcacaacccctcacccttttccccgagtccccaaaggctaatgtatcattcttatgcctttgcatcctaatagcttagctcccacatatgaatcagaacatatgatgttttgttttccattcctgagttacttcacttagaataatagtccccaattccatctactcctttcctttcataacttttcttctacaactaccacaactatcccaggttagaccaacattacctcaggcttagtctgctaaaaaagacttactattggatgcatccctacaaatctcctccaggtctctgatccatcccatctcacatacagtctccagatcatggctcatccacttatctgggaagctttcatgagaaagcttccatggatccacccactgactcttcactctgacgttcaggcactctaccaccttgactccatctacttttacaggcttacatttcccaataagcatcggcaaaaaattgtttcatagcatttctatgtattttgcttaaaaagagggtttcataattaaataaactagcataaataacattaaatactttttttactacaagactgctcagaatctttaatatgtaatgtttgaaaaatttccaggaggcagatatagtacccaatgtttccaaaactaatttcaccatagaaacctctgtgtgcatgttatctcttgggactagtattcttggtgaaataaactatgactttctgcttcccatatttattcttctgatttcttcccataattattcctctgatttctagtccttgcacattcaagtcactttgttgaggatgcctttcccttatgtgcctccaatgcgtattagtatttatcaacttcactttttttctaggcctagttcaaatatcagttcatttttaaagctccccttgaggtctctagctgcaagtaatatctcccagagaacactgtttctatttttctttcattatctaacactttctacttttctatgaaagctatttttacagtattttattcaatccttataatccctttggaagcatcatctggaccttatcattgtattcttctcagcacccaacagaaaaattcaaatatagcttaatccttataacttcttctaactctctcaggaccccttcacagaccaagctccttcaaatgctctttgctttgaaaacaatgaatgaaatatttaaaatctttaaaatcatgtaggaacaagatgtaacattttcaaagaaaaactttgtagttctaacattttactgaacatctggtcacttatcttgtcatttgtaattaaaatggcttttctataacccatgttttggcgggaaaagtgaaacaaaaacatttgtctctacataaggtcgacttacaaagttttttttcttgatttgcctgaaattaaatatataatgttcctactgcaagtaaaaactaccaaggaacacttgttaaataaactggtaagacttaagatttcagggccttgacttttcctggtactcctcaatttcagtcttttgataatggaatcttccacacagccaacactgcaactggtgaggcataagttctcttttcaaaacataacacatgaataagtttaaagattatgatcttcctttaatgtagttccccatcatgtgttctaacgtgccattagtactgaacaggcacatgttaaaggtgtggagctagcattgattcattaataatagtaatagctaacactcagtgccactctatgcgccagagagtgcttatgtgctttgtgtgcattctctctcttaaccctcacaattctttaaagaaagcactattattgactccacaaataagaatactttaagaggtgttatgtaatttagccaagttcacacagccagtaatgacagttccaagatttcaatccaggcagtctgactccagagcccaaactctaagccacaccactcccttgcctgccttctatttaggtacacaggaactactgtgcagttacattcatggctgaagagccactcctatcaaccctatcaataagcacacttctttgtgccattgctgacaatcagaagatatgccacaatatcagaaagcaataatgtctgtgctccttcccagacaaatgaagtatgtcctcctggagaaagacaatgtaacatatgaacatgatttttacttttttatgattcaattaatccattcattaaatacatttaatgaatctattacttctgtattccccaaagtaaagctagatatcgtcttcaattcctggatgactgccacaccagaagtagtcccttctcctgaagccctccctccacatagcctccacacagccaggatcaaccacgaccatcagctagcaagacaatataaaacaaaatgtttgggccaggtgcggtggctcacgcctgcaatcccagcactatgggaggctgaggcgggcagatcatgaggtcaggagatcgagagcatcctggccaacagggtaaaacctcgtctctactaaaaaacacaaaaaattagccgggcatggtggtgggtgcctgtggtcccagctacttgggaggctgaggcaggggaatcacttgaacccgggaggcggagattgcagtgagccgagatcacgccactgcactccagcctggtgacagagagagactccgtctcgaaaaaaaagaaaaaaaaagtttggcatcatcctttccatgtacagtgaaatgagaaatcatatgagaatctgtggacactgtgaaatgacaaatctgcttcctaagaattcaatggagttactcactcagcgataagaccgagtccattcttcaactgaagaattagctgctcagaattatagtaggacttccatcgctaagcatcgtactccagcttaggagaaagcaattatagcaatctaaagatgcacatcattagtagactactaaggtctaaagcctatcgttatctattctttcaactgttcagtaaatatatattaaatgtagacactgttctaagcatactgagatcagtaaagacaacgagatgttcatggagtctacgttccacaagcaatggcagttagatctaggaacgtcatacagagtgctagaggggatacctccctgaggaggaactaggatgactggaagaaatatgtcaatgtgaagatctgtggtaaatagtcattccagacaaactaacagcaagtacaaattacatcaacaagttaactaacctacaaacaaatgaatactcagaatgaatttcaatgacctatcctgactaaagtaccgatggggtccccaacctatgatggattgacttgcaatttttctacttaacaatggtgcaaaggtcatatacattcagtattaactgtccttagagtacccatacagccatcctgtttttcactttcaatacagtattcaatacattgcatgagatattcaacactttattataaataggccttgtgtcagatgactttgcccaactgtaggctaatgtaaatgttctgaacatatttaaggtggaataagctaggttgtaattttcattaggttaggtgtattaaaagtatttctacttagaatattttttcatttatgataggtttatcgggatgtaatcccttcataaatcaagaagtatctgcacatttgttaagaaaatgtaaggccttaaatccaagtgatgctactagtaaactaggggaagtcacttagcttatgtgtgtgtcaatttcatcatccttaaaaggagggacaggaacacatgaccgtaaggtaccttccaactcgaaattcttagaattctatggtcacgaagtctaaacttcaagttgctttttcaaagtagataattaatgtgtacttccaccattatagccttgccctgcctccctggtgacagagctgacaggggctatgtcaaagatgtgctccagaaaggactaaagctatcatccaccaggtgataagcctatgacctccaggtgactaatacattattccaagcaactgagctaatggccaatacaaaaaccttcttggctttttgataaaaataaagattcatacttcctcatcccgtcctactaattagactgcaataaaacaaaggtaatagttccaattccaaagttatagcaaagtaaaatctgacaactaaaaacttcaccaacatctaatctataaaatatatatctttttacaatgcattccattgcattccagtggcaagacatgagagcagagaaatgttttaaaggggcatttctgtttaaaaaagaaaatcctagaggctcttctagaagtttgccttagtgactcagaatgtaaacttactcaattcagtgaggtgtgcattattaattagataatttctaccttgagagacttacaaaaaagatcaaatagacagagaacatcaaccataatgagatatatttgtataatcatcaatgcaatataaagttaattttaaactataggcattttatcatttttgaattcacttattaggtatgaaattttatttataaaagatcagaatgaaaatttcagtagtttgtaagagattttacatggaattgtgatgatgaaaaggttccctgtgggaataatagaatcaccttgatggatgagtattgaatgagtatgtttatacaatatgaggaatttaagggaagaaacttagtcttgaaaattgtactccaccaagtcacttagcaatgagttaagaaagaaacggctctaaaaccatggaaattcaaactctcaggaagcagcttaatacagctttgacaggagacagatagggagaaagtttaattctgtacttttaactccgtagtttcctcgactgtaaatagaaataatgtctcctttctcccaagattatttaaaagattatatgggcattgaattctaaagtaactaatgaagatattaacatattttacaaaatcgatatatgctagttgtcctcccaagtcatcttttgaagtctttgactttacttgattgaacaagaatttatcaagtgttcattctatatcagagagtatactaagtactaatgatgcaatgagactaaaatatattacctacctttaataatagcagaaaagacagagaggacatgataactagtgaagcagcttatgcacttgcatgagagtgtataaaacacacatacaaaaatttaattctgctttaaaaaataataaacaagaaaagtcacaaaagggtgactttaaggtttgacgttgaaatataagcaggaattggtcatagcaaaaaacaagccacattaggaaaaattagacattaattcaggaaaatttggattaggaagtctactgtgtgctagattctgaactggcaccacacacccccggggagaaacctggagacgtgaacatacctagtgtcttccaaaaagaacaagcacatcccacacacaaacatttaaagaaatctttattagtcaacgtgtgatttttaatttttttcttttttttttttttttgagatggagtcttgctgcgtcacccaggctggagtgcaatggtgtgatctcggctcactgcaacctctacctctcaagttcaggcagttgtcctgcctcagccttccgagtagctgggattacaggcacccaccaccatgcccggctaatttttgtatttttagtagagacgggtttcaccatgttggccagtctggtctctaactccagacctcaagtgatccgcccacctcggcttcctaaagtgctggaattacaagcatgagccatcgtgctcggccaaatattcttaattattgtgcaaatgtgtggactttgtattgtgttgggaatgttttccagggttcttcataaattttaaataaatatgcagccttaaaacacaagcatccatgataaataaaatatattttgaaaaagaatacaaaatatctttgtgagctaagcagtctgaaaatgtcttttttaataaataaaacaccagattccaatctctccagctcaactggtggtcatagctgatgatgtaggaatgaaatcaatttaaaaaaaaatatggtttagaatttagcagatgtcaccaataatgtcaagagtacatcaaccgaaatgaaatgccattttagttagggcaagcctcattatgaactgaaaatgctcaagacatggtcatgttaaactatcaaaaatcctagcatttccctggatgtaattgtttgtttttctttcttcctttcttaatgaagcaatggtcttttacaaaacctcctttaagcgcatccaacgcaataaaagctcaacatgagatctccttttcaatcataagtacctaacactaaaactgtttccaaatgtaaagccaagagagaatccaaatgaataacggtttgcctactaagcagagctatgtggcaggctgacattttcatggaaaatatactgttctccacctccaacttttttagacatagtggaaagatgtaatattatttatgttcttaccccaatgcaaaaaggaaggaaggaaggaaggaagaggaagaaaaaaagtgagggaagagaaaggaaggaaggaagagaaaaagcacggttgaaaatacagctccttagagtcttctaatacaatttgttaaaattgtcataaaccattgtgatcaccaactactattttcaaaggattttgttttaaatgctcaaaacagaaaatcaaaaaccccaatgaaaactaaacactgcacctcatttacaaaataggtagactgtgataacttcttattgtacgaatatttggatatactttaaataggattccatttttaagttaaaaaacctgatacaattaaatcttttaggaattactactgcagtatataaaccaaactgcacctttggtgcctttgcaaatgcaatagtgtaataatagagagaagttcctaggagacaatggctaaacaaatgtacatttttcttattataaaactctgtccatttatagttatgtaataatgagccttgatagtttaacatgctttatataaaactgtagaatcatttaggccctttacaaaccattaagattatcagctctgatgtgaatcatacaaaaatatgcctatgtccctgtttcagtcccaagataaaactattttaagtgagtcatcaattccagattttcaaagtcaaaatatcctcacaaagggctcagctgagtcttttgaacacaggtatgaagtacaaagtgaatctaaaccaatgttacccctaccatacaggtatgttgtgttcacaaacacacacacacacacacacacacacaccctaactcaatgtagtttattcaattttatttttacatttttattattaatttttattcggtattttcattattttaaattttatttccttaatccaggtatattcacttaactgtcttatgattttgcagctatagtttattttaccctgattttaatattagtttaaatattttatcctttattctttattattcaattccctttaactatttgtatcaatacataaggtttgtacatagttatgtggtacatgtgatatttagattcatgtatacaatatgtattgatcaaatcaaagtatttaggatatttactcaaatatttatcatttatttgtgctacgaagatttcaattcttctacctattttgaaatatacaacatattgttaactatagtcaccctactgtgctatcaaacacgagaacgtattccttctatctaactgtatgtttgtatccatcaaccaacccctcttcatccccgctttccaccccgcaacccacacacacccttcccagcctctggtaattatcattctactctctacttccatgagatcaacttttgaaactcccacatgtgaatgagaacatgtgatattgtctttctgtgcctggcatatttcacttaccatagtgaactccacgtccatccctgctgttgcaaatgaccggatttcattctttttattccagggcatttctaatagttttttttttgtattttgtttgtttgtttgtttgtttttgaggcagggttttgctctgtctccaaggctatactgcagtggctcaatctcagatttcagctcattgcaacctctgcctcccaggctcaagtgatactcccacctcagccacccaagtagctgggatcacaggtgcacaccatcacaccaggttaattttttgtatttttgatagagacagggtttcgccatgttgcccaggctggtcttgaatccctgagctcaaacaatcctcctgcctcggcctcccaaggtgctgggattacaggggtgagctaccatgcccagcctctaacactgttttttttttttttttacagacatttataagtaacttttacttacagatactaagaagatacttgagcacagcagagaaagtcataagtacacagtccaaaagccataaagaaaagacagaaagaaatctttgaatgattttgtattaaatcaccccaaatcccaagtcagagatttcttaggctaatacgagataagataatttatcctaaaatcaccattaggcaacggtggctgacaaacccatcttgattccatttagacaacagtctaggaactacatggataaaattactcctgcaggaagatgacaaactagcctccaaaatagcccaggtgaatgcaaacaaaaagattatcttgtctctgggacgattcacaacctctccgatgaggcaggtagatatacaaataacatgatctctgagtacaattgtataattgtggacttttctcctgagcaaaccagccatagacagacaagaaggcatatggaactttcctaaatgagtctttctactcagtttcaaaacgactaataatacaaataactgaatacttctgaacctccctttcaacgtttttggaaagatacacaacacccggggcaattgaatatagctgtgaacaatggcagagcagatcccaacactaaatagccatatgacttggaacaaactgcttaccctcctgaaatttcagtttacttactcagtcatagaattcacctcatatattactgctgaagtgttaaatgagagcacaaatgtggagtgtgtccggcactcaaagaactcaataaatataattagttaaaaaaaactaagcatcaaaattaaagtactggaatcttttttatgctggtccattccagaataaacttgaataaatagagctatttcacttcaggaaaggaatttagctgggtacagtggcttatgccagcactttgaaaggccaaggtgggaggatcacttgaggccaggagttcaacaccagccttggcaaaatagcaagaatctgtctctacaaaaaaataagaaaaaaaaaagttgagcatggtggtacacacgtgtagtccccaccactcaggaggctgaggtaggaggatcacttgagcctaggaggtcaaggttgcaggcaggcaggcaggcaggcaggcaggcaggcaggcatagaaaggaaggcaagaaggaagtaagacaggaaggcaggaaggcaggaaggaaggaaggaaggaaggaaggaaggaaggaaggaaggaaggaaggaaggaaggaaggcaggaaggcaggcaggaaggcaggcaggcaggcaggcaggcaggcaggcaggcaggcaggctggcttagatattcctcacatgtgagcctccccagtgtgctctctttataacaaaaatcaagaaaatgctatgttggatatgctcccaaataggttctacaattttttaaaacaatttcaaactttataattttcaaaatcttagtttgcaatggacatcctgacagggtctaaaattgtaagtcaaatgaatgtgtaattaaacagcttcccctaaactagttggtcttttgaggatgacataaataatgtggaattacttttttaatttaaaaaaaaaacttttttcttgatatggaattcatctcaacataactagccagtggtttaaatttgaatttactacagcaccgaggaagaggctgggcaaagaccaagagtcgcacagaacaatgtgggtcagctgatgaaaggagaaggaaatgatagttttctatctttctggtgtatggtcttaaagcagttcgttatctgttacttgaaagagaaatgctaacccaaagaactgttagagacttctcttaagggacgaatcacaaagagatgatgaataaagggcaggagagcaaggcatgactgtaacagcttggccctgggtgaagctagacaaaaaatttcagaaaagccccaactcaaaaattacaatgaaagtaagttgttgtgtgctttctagtcatcaaaagtgttctaataaaaaatgagttctcaaataaaccatactagaaataaacattttggcattataacaggatgtagtttaattaaataagtcaactaattgaccaaattattcagtcaactggccaaaatgagaaagaggaaaaaaaaaatatatatatatatatatagcaacaattttacctcttaacactttgtgagagtcccaggtaaagcaacaaaagatatgaaaaaaatcaatcccttttttcaatccaaaaagataatttgttgctctttgggtctcgaccaacatttttccaaagcactgttttaaaatctcaagatagtccccaaaagactggtagatagtttaaatttcattttaaattacagttttaaatatttgtattaagattggaaaataataaattaaccataatagcaattaaaactatactaacaagtaaaataatccaactgaaggaaacttttacaatatatttcacctaatggagcttaaagaaaatcagatttgaaagttttgcggaggaggaatattcagagacacatatagtttctaaagacaatttttgacattgtcgcttactttagaaattggtgtaaagctgctttctctaaaacgacttttcttttccatgctttcagtatatactgacactaatttcatcaattgagattatttatgggacttaaataaaaaggtgcagtggcgctaaataataagtgctaacaatcactgttgagtgatttttttttttataaaatgatatgctgagaacttcacatgcattttttattttagcctcccattttataggaaacaaaggcacagagtaccaggtaacttgccaagatcaccggataggaaagggattaaaacctaggcagtatttgtccttctgtgactgataagattttgctttgagttatctaaattagtcaaactcataggaacagaaaatagaatggtggctgccagggtatgaagagaaggggaaacaagaattgctgttcaatggatataaagcctcagttacgcaggatgaataaggcccagagatctgctgtacaacgttacacctatagttagcgatactgtattgtgcacttagaaattgtttaagagggaaatcttgtgtttttaatttatgatggttaagtattcctaccatcagaggcatcctaaccagagtcactccatcttgaatgaaggtgggaaaaagtcaaatctgctgggttactttccctggggttcagcactcttggtcacaagatattcatggttgagggactaagttaatagtgttaactaactgtataagacccagaacttatggaaatgccctagtactttaagaacaaaaaccattcttagtttgagaataggttttgctttaaagataagcgtaatataagaaagtaacaatattaatagcctgccacaagctaatcacaaaccatcataaaagagtacatcaaaacctatttatataagcaagcattgtatttgaaatggcggtgtgcctcctcttgcattctgaggacaccctactctgcaactaagtagtatctaataaactatgttaccttcactatactatactctgccactcgccctgaattcctttccatgagagatccaagaacccactcttggggtctgggacaagaacccttttccggtgacattaccacaataaataaaaataaattacataattaaatacatttttaaacaaacaggtcgactccaaagccttagcgattatttaggcggtaattaagctgacccaaggcaggaggagagtgtagaataaagatgttcttgctagaaagaatagaatgagacaaaactaaatgagtagcaggcagagaaataatgaaggcagacccaaaatagcagtataggcagggctgatgagggggtgtaccgaggtatagcatagcaaatgggctatgaggagtgtgaatatgtggaattgaaacagctcccaccttcggccagaagctgtcgcgattcccagaagggcagggttaacaggacacagtcatccctcgcataggcgggagagatcagtttcaagatcccagcttatacccaaatccgtgcatactaaagtcccacagtcagccctgaagaacctgaacatccgaaaagttgcttctccccatatacgggtttcccatcccgggatactgtaatttcaatcaccatttggatgaaaaaatatccgggtatataaacggccccacgcagttcaagcccgtgttgttcaagggtcggctgtgcatacattggggctgattcgctcagtcaaaccacctaacatcacagacgtttctcaaagagagtcttgcctgtaggtgacctccactgacatctctacctctgctaaggagtaaaggaataaatgaaaattctgcgtgccacttttgaatggatgccaacccttggctcttcattctacctactcttatacacacagtaacactctaaaccataataattctactgtaagtttcttctttgaaatggcaatcgccagcagggaattctgtaagaagaatctactctatcactgccagggcacacagaattttgaattaaggaaacagctggctgcttgccacaggcaggaaatggagaagagccagtcagcattcatctctctacttctgtccaactaactacttctagctctcttcatctgccttcatcttacctcttttgatttggggattgaatcaaagagctgttgtgcacctcagatgcaatggagtatcaacttacaaaaagatacaaacagtgaactagggctgccccaggtgccaagttaggctgagaaaagcctaaagacaaaggagttcaggctgcaagactgaaacctgaacacactgatgaatacagtaccactacttaagctcttactgatcagctgcttctgaattaatcaccaaataatgggcagcatttacagagagctcctagtactcctggtacacaaaaaatacttccaatagttgcatcaactctgggaagaagttttgctttcccattgaaacagaagtttagagaaaaaaaaaatgaccatataattattcagtgatggatcagtattccaattagaactccaaacttaacgttctttccattaaacagtggaataataccagggaaacactgagatttgcttagaaagtactttggagtgatcaaagaattgtttttaaaaaaacggaaaaatttcttagaagatcaggattccactaaatggtcataagttctttattagatgggaatcaaacatttaggagcaaaattgattgaacagttatgcatttccccttccccttcctgcttcacatattttacaatgaaattactgaagtggtggggtggggggctatgaatgagcacggtagataacacctgtatccaaaaagactacaaataatacaatgagtgcagaaactttgattcaccattgagtacccagtcaagaacagagtctggccaatatattttttaataaaataattcattaagaaaaatggaaaactattcccactaatgtaatttgaaacaataatccttagtacatagaactaattcaagcatgaaaaaattacagtaggtttcagataatagaatctccttcaaaatgctttattcatgatttctgctatggtttaataattcaaaaacctatgctttggggtaaagagaaagtatcacaaaaacagtccaaacaccaaggagtaaagcctaccgattacaatgaatgacaatctgtgaccctgaggataattatatgctgcccctaattagtcttccaaaagtttgagaattcatctgctgaaagtgaaaatgcagttgcaaatagatagacttctaaacatctgaatggttcccagagtaaataattaaatatatttggtctgtaatggacctcaaccatgtgctaattccaagctactactttacattcacattctgattgtgatttacattctgactcatactagaagcagaagagtagacaagaaagaagaatatcccaccctatcttttccttttctttgagttagctgcctgtagaaaatattcaaagtaccactgagccttgaacaacagagctggaactgcacaggtccaaatatgtagatttgtttttcaaccaaaccagagagaaaatacagtatttgtgagactcaaaacctgcatatccagagggccaactgttcatacatgtggatttcatggggccaactgtaggacttgagtatacatggattttggtatgggcaagggggttctggaacaaatccccatatttacccagagacaactgtggtataaattagcctttggcatcctttcacctccattttcttgcaaagctcctgctacttaatttcttatctctcaagggttccaaactgtcttcatggtaggttatggatgagagcttgcctcagctaaggattcaatgctatgcaattgcttagatcctctttctttctcaatcaaaactctttcccccgatttcagatgagtgttagaaaggaaacaatgcaattaactcatgctaaagtatgatttttaaatctaatttttaaaatatatttgtatgtttcaaaaacttgttttaacatactaaatgcaatatagtgaaattttcccattctgcaagtaactgctgccattagtatcttgtgaatccatccttaatttctatgtatatctgtatgcgtgtgtgtatatatacaatcaagaagaaatatatgtcatttctctccttaatagaaggtagtacactatatgtgctgtcagacacctttattttttatctttaataaaatgccttgacctttccatatcagtatataaagaaagaactgcctcattattttaatttttttaacagctggagagtattcaactgtataaatggactacaattgatttaagtagttccatgctgatggacgtttagtggcttttcaacttttgctattaaaaaaaaaataccacggtgaatatcttgtacgtagacattttgaataaattcccagggaaggtgttgttagatacagccatctgtatttgatggatgctgctaaattaccccctacactgtgtgttccaacttacacaccaaacaacagcatataagaattgctgtttccaaaatctatgctaatatagagccacatcaaatttctgaatatttgacaatcttagaggtgaaaaaaatgacaattcttatgattttaatttgcatttctttgttataaggattattaagcctcattttaaaaatctgcttaaaggtttatatttccttttctgtaaatggttcatatcttaccaacactatgaattttgggtagccacttaaacctctgaaaagcattccatgttttctaaggagactcagtcacccaaattagtctgtaaacggtgctatttgaaaaaacatgaagtgaaatggaaactttaggcagttgtggggagaacattctactgggcaaaagtaagcaacaaagagatagtttagccttgtctaaaggtctttgaagtgctcttttattaatcaaaaaaaaaacaaagattagaaaattaaaacaattggcaaacagcattggttttcatgtcaaggaccagggcccaccctcaagtcccctctcccctaggccttacattaaggcctttcattcttgaccagctagtctctcctctagatagtgtagaaaaaagctaatacacataagcttgggagtcagatctatcttccatgaaactaacaaaagtataacacagtccgcaaacaaggattcacaagatggattcacttctaagagtcaaccaaaagattagtaatttaagacgatatatacagaatggtttacacatgaaagagagctagacagctggttttggtcactattgcagtaataacaaaagattatgaaagcacaaatggtctgtactatcattctaaagagaagccatcagaaaagaaagcctagaaaaatggttcagaagagaccacagtggacaccaacactcagtagctataagcccaacatgtaaataacaatcaaaactaaatctccagagatctctgacttccaaactcagaccgatctaggagtcatcaaaagtcagatctcaagtgttaactccatatttgaataaatatcagaaaagacaagtaaagatgaatactgctagacatgtcttcaaaatacttcataatgttctttacaaaattctgaatagagttgtacatttgtttaaagtttaaatatgcaaaagatagttctggaatggagtaaagcaggtagactttcctccctgaattccctgcacgctgtcaggttaaattcttctagccttggggccacagtcacctcatttttcaattcattgcctacctccttttgcagctccctctttcatcattttatctctgtccaccttcttttccttcaatggtggtgggatcagcattgactagggatctaagtccaacatctaacctcctcctagaccccatacccacctcaagtaaactatttttcaaataggtaaacatttgcatgttatcaaatgcagcttcaaaacaagtccatggccctcccacctacaactatatggccacccataagccctcctatataggaaactggccaccagtgcccataaaatatacctaattatttctggccctgtatacttgtactctaccaaacacctatctcatttctcccacacagtggtgagcttccaaagaataaaagtgcatcttcatacataacgaaaagtatcttcaaactaaacttgtgcaaaaatggtagtacaatctgtactatgcagcctctactatatcctgagcagaacaactgaggatagaggcatataaagggttaagggaaaaagtctaattcattcaccgatggacccctgcatcttcatggctctaattaacatagccagtacattaatacagtatcagttaaagaataatcaggaaacttaatgactaattgagaagaaaaactaagatttattgtaaaaggaatttgaatttgtatagcattggtgaagcgcaaacatatgtgtactttcatcagaactgtaaagttcagaactttagtaattggttaccatcttaaaataaagctgacaaatcaagttaaaataacatgataacatagtacacttcacaaaaaaaaaaccaaaaacaataagattaattatttaaaatggtagcagacaggaacactgaggtcattctgaaaaacagaattttcttggaatttcacatggttatcagtacaccgtctttaaatatgctcagtctaaatcagtaataagcaccacatcacagattactgaaacacacaagtctttatgattctatctgccaggtacctggaggagggagacgtaagaaggagatgagggaagaggggtgaggaagtgaattgagaagaagaaaagtaggagggaataagggatgcggagactagaaaaatagaggaggaaagaagagaggaaaggggaaagaggaggaggaacaaagtgggaaaagaaaagtaaaattatcatattataatccaaaggtacaagttgtctggagcctggatttgagggaacactagattagggagcaagtatagtcatccaagtggcagagactaaaacggtgaggttggggtgaaatgcaataaagtagaaagatctgttattaaactaaatacagcttaatacttgaaggtgaggcagagacagagaaggaattatgactcccaggtttctgatattaatcactaactgagtcaaagccagcagggaaggttggaggaagaaaatacatatttgtacaggaatgtaatgatttcagtttgctatgcctgggaaataagcaaatagagatatggaaagagtgaaagtttccggggcttgacagagacactctcctagaccagatttttttttcttttgtttttgagatggagtctcacactgttgcccaagctggagtgcactggcacgctcttggctcactgcaacctccacctcccaggttcaagcaattctcctgcctcagactcacgagtagctgggactacaggcacgtgccaccacacctggctaatttttgtactttttgtagagacagggtttcaccatgttggccaggctggtcttgaactcctgaccttgtgatccacctgcctcggcttcccaaagtgctaggattacaggtgtgagccagcactcccagccttcctagaccagaatttattcaggctcttctaagcccatttctcaactaggccccaagaatgccagacgtgaatagcccaatgttagcaaaatcctgcttatcagtttagtgagaaccctccaacctattatacatctgatcaaattcctcattcccccgattcccatccccaggtgatgtatctcaccaccctggcttgcctttagcaagaattctgttaggtctgtttaaccagaatcccctttttcctctgagatttcctcttagtaattttccattcactgactcccaaccctgcttctgtggctataaatccccacttgtccatgctgtattcagaagtaagcccagttatatgctgagccctctttccctctattgcaatagttcctgaataaaatctgttttttatcgctttaactactgtgcagctctggttttctttaacaggctcaaagagaggtcaggactggagtaacaaatttagagtaatgaatgagtttatagatggtaagtaagaaataatgacttccgaggttgagccaagcagaatgtccagaaaagtagaagaaaaaacagaaatgaaattatgaagaaaagggaagtagcttcctaaggagcttgttgccaaaagagtatttattgtccattcaaagaacaacagatcttccttcaaagccaggattttcacacaccatttatatgagcaggtgaaattattgagagaaaagataagaatttgagtctcaacacttcatgtataaaatagttcattggactgctaggaaaattaatgtacatatattccacatttatatacaataccataaatatacttacatataaagtatgtgtgtagagtatatatataatttctggcacacactgatgctcaaaaaaatgagagctcctttctattatagaataaaagggccaggtgcggtagctcatgcctgtaatcccagcactttggtgggaggaaagcttgagcccaggagttggagaccagctgagcaaaatagcaagacccccaactctactattttatttatatatatatatatatataatttatatataatagtataaatactatatataatttatatataatagtataaatactatatataatagtatattatataaatactataaaatagcatttattctcatcctttcttttatatatatgaaagtataaatacacttacatataaagtatatttgtataatatgcttatatagctgcttcgtgacttttcagctttaggcatcatctattgtattagtcccttttcacactgctctaaagaacttccctgagactgggtaatttatataaagtatatatatgcttacatataaagtatatgtatatatatatacttacatatatacatgaaaggatgagaataaaaatgcattaaatgcatgtagttctaattacagtatacatttttcttcctaatatttgaccaacttttagaagcaaagcaatggcaattatatatttgatttttttaaatgttttgagttttcttgttttgccttaggaatgtatagtgatatttacattatcattatagctgtatgaccaggtaaaccatattaacaataagactgcttactgtcattggtggagtccaccaaataatggctattggatgggtaacaaactgctcctgatgctgaattctttcacctgttttcttttgtttttgaaactgagcaacaattaacctcgacagggttgctagaaaattccaagtatatagacctaacatgttccatcttgtataggttaagactgggccagttttcttcaattagaatcctacactggcctctcaccaaaaggcatgttaactgcagaatcagatccaagagaaaaagaaaaaaaaaaaatctaccattctctaagtaacggtgatgaactcacctatgactttgcaacctgcacttctcactaatgttctcagatgtctggctggataagcgatttccagataaacaagagaaagggtaaaacctctttcagaaaactccctcaattagcaatcaccttcatttagcagcagcacctctaccatgccagctgcagggggaattaattaaatttaatagaagccacgggggaagtaattaaatttaatagaagtcatggattccaaatgaagataaactgtatttgtaatcagacctactgtgtcacttactcccaggtctgtaaaagcatgagccaagtactgtacaaaccgctttccacagaaacaccaagtttctggatcactctgtcattctcacttcaaaatgtagaataattgatacggcatgctatggaaagcattcctaattttttaaaaattctttctgcaaaataaaaagtctgtgacactgttacatgtcaattatgtgtaaacgagcagatctgaatagcacagaagccgtagcacagacaagaagtaatgagaggttggcatgtttgctttgggaaggaaaactagcagcccattcatctaaatgcagttatgtttcaatttaactaaattataaggtttgaaattagcaatgcttcaagcactctgggctaccgctcccaccagaacacttcatctttaatacctgctccagcttgcaaataaaactaaggaaaacagtaggggaaaaatgctcaaaacagcttttctaacaactgcaatcttgtgttttttacccctcagaatatctaaagcttaaataagacaaagtcaagtaatactttttcttttcaaaactatacagtatattctactgcatagttacttaaatttttatcttatttatcataataaagtgtaagcttcttaaggacaaggatgatcccagtttcaagtttcctatttctaaaatacttagcacagtgctttgcacatggtgagggggtacgaaaatgtttatcatcccactttaatgaaaaaaagatagcatcactctctatgaaatcattaccaacactaaaagcagctcctggtttgaataagcaagctgttatcttggttggtagtgaaaagccctgccagaatgccaagatttctacctgacctgtgaaataagagaaatcctaattttggagttattctgaggattaaattatatgcagtttattaaagtactttaagagaaaataataatagctaacatataacaagtctccaccatatgtcaggcaccatgctgagcactttacatagatcatttcattaaatgctcacaaaaccactaggagttggctactttttttatctctaatttacagtagaagaaagtaagatttagagatgttacataactgatctagagatccactaaataattagtggtcagacccaatagctaatgagtggtgagatctgacccatgcttaatctattatgagtgcttaaagtagcgggaaagctgtggccatttttgagtgtgcagattcaaaaccgtgcctttttttttttttttagatggagtctcactctgtcacccaggctggagtgcaatggcacgatcttggctcactgtaacctccacctaccaggttcaagcaattctcctgcctcgcctcctgagtagctgggactacacgcgtgtgccaccaagcccagctaatttttgtatttttagtagagatggggtttcaccatattggtcaggcttgtctcgaactcctgaccttgtgatccgcctgccttgacctcccaaagtgctgggattacaggtgtgagccaccgcgcccggcccattcttcctaaagataagaaacgcctgtagcacaaaagcaaaggcctctttttatttggaaatattggggccaaataaacataataaaatactccatgactcagaaatatccttctttatgctgtggcaaatgcaaatgtcttgttcacatggccagccaccagccatgttggatgcccctttatgcatttcacctctaacgcacgtacacgctatactgactctcccagtagatgacggcccactattcatgccagcgtccttagggcctgccatgttacagatgctatagatacttcacaaatgcttctgaactaaataaagaactattcattttttataaccttggttctggagttctggagagataataaatgatggctatttataatcattaactcatctgagtatataattccaactgtttagctgttctgcaaagaatgtttggtcttttcatttcacaccctttctcaattaagctgagctgtaaccaagttcccctatacatattcctattatagaactcataacatttttctgcccactcacatcctcctctgctaaactataaagatcttaccttattcctcttttatcctcagcactcagcacaaagcatgccacattaggcactaaataattactggaaataatttatgcacaaggctttgtattaataagatgctagctccttaccaacaaaaatcaaagattttctaatctgtttgggatgagacagagacaagaaattatgaataccatttacaacttaaactctaatcactgaccaagcccaaaaagtactagccaagcagagcatttaagaggggttatctaacaagatattttgccttctctaagtggcaaagatgacatcagcttcttatgtgtcactgtccaatgccatgccagttttgtttgtttgtctgtttgtttttgtttttgtttttttgagaaagagtctcgctttgtcacccaggccggagcacaatggcatgatctcggctcattgcaacctccgcctcctgggttcaagtgattctcctgcctcagcctcctgagtagctgggactacaggcacccaccaccacgcctggctaattttttttttcccccagtagagacggggtttcaccatgttggtcaggctggtctcaaactcctgacctcgtgatccacccgcctcggcctcccaaagtgctgggattacaggcatgagccaccgtgcctggcccgccagttttataaaatgtgtttaaatgtttgcactcaagtgattttttaaacataagcaaacacacatgcatctggaaagggcttcacaaatctcatacttacaccattgaaaaagagacttatttaaaacccttttaacattttcttccttcatctatatcacttgatattatttaaaagagctcaatacctatactcatgtattattttatgagaatttactattttgctcactcatggtatctgatatcaatctctataaccattcttaacacacctagaaggacacttttttccagggctctacctcattcttcaatgttgcttttttctccaaaacggaaacctggataaaaaaatgaaggggaaaatacaacagtagaaaatcctagaagaaattctaataaaataatctcatctctgctctctaggtaaaaacaatgatttttttttcccaaggtgcaattttttaaattgactattaaccaagggtaggaataaatatataatatttgcatgtgaattaggtgctatgttaactcagtaactgaaaagtctaacacattcacacttacgctgtttttgcccatatgcttactttgtgagataaaactatagtagtacaaaaatcagacaaagaactctataagctggctgggtgcggtggctcatgcctgtaattccagcactttgggagggcgaggcagaagaattatttgaggccaggagtttgagaccagcctggccaacgtggtgaagccccgtctttactaaaaatgcaaaaaaaaaaaaaaaaaattgccaggcataatggcacacgcctgttatttcagctattagggaggctgagacaccagaatcacttgaacccaggttgggggcgggggcggaggttgcagcaagctgagatcacgccatttcactccagcctgggtgacaaagcaagacgcatctcaacaaaaaaaaaaaaagaaggaaaagaaaagaaaaagaaccatataagcagagaaatgatattaatactttgacagtggagaaaagtatgccacctgcttaaaccatatttgtgtctaaggatgtgcacacagttatgacaatgagcaagatcactattaagaaattcactgtgaagcattattgtactcaatttatttgaaaattaaaaacaaattatcttcttctctgtaatagcaatttaatttatccaagctgttaatgaaccaattaaacaaaaccacttgttctaatgcatggaagaaattctactcttagaaatatataccaaaataattttcacatataagtataattgctttatcgtacactataacctcccctgccccaaaccacggatactcaaagtgagtgtttctcagggccctcctggggtctttgaggtcaaaaccatttccacgtcatattaaggcactacttaccttttccactgatggtgcaatgaaactcttggttggtaaaactgttgattcctttagcaagaactaaggcaggggcaacaaattttactggcagtcattttacttttcactgacatgcaatcatagtaaatagaacgcagtttcacttgacaatatctttgataaacatgtaaaattaattgttaaaatcacaatcgttatgtcattttaatattctgtatgatgaaggaaagtatacataaagcatttctgttgcatatcaaaataagatgggttgtttatctcaaggaaagcacttatgagactgagatatgagctgaactagccactcttttcatgaaacgccatttttacttgactgattcactgaagacaaactcttcccaagtggtcatgaccaacgtttaaaatgagaaaaggagtaagcctgtcacctcaagaaaaataagtgacaatgtctgttgccaatgacaaaatttgagctcttaagccaaaaacggtatactaaaaaatttaatccaccatcctgagcttgacagctttccaactcttaaaatactttgatattaaaaatctgattgtttgatacataatgaaatatgccaacgtggggaacatctaaataacttagcaacttgatattttccaattgaccaatacatgatgtttccaaatcatgcataggtaaaagatccacccaaactacaaaaaacaccaatctattttaacaaaacagagtataaattgctcactgataaagttttagattctgattcaaactcttaagaaattataatctgtagacttttggcatagtataaaagaaggatatacacaattatttgaaaagtctataaaacacacctcctttttccaaccacatatttgtgtggggtgagtttttttaatacattcaaacaaaacaaaatatgagattgaatgcagaagaggtacaaaaatttagtcttctaataagctagaaactgaagatttgcaaaatatgttaaaaaaaaagcctcggtaaattttttttgtttgttgtttattttggaaatgtaggggttttatttcctgcaaaaatacgttttatgctaacatgtaatgggtttttaattattggttttctaatctctcagttttaatttcttatatggtaaatattgatagacataatccacataaacctaagttattttagactgtcagtaacaattttaggagcataaatgggtacttgaaccaaaaagtttggaaaccaccgaactaagtctagctatctacattatagcatggttttcaatagaatttttaccacaatcttctaataaaatgaaaatatgcttttcatatatacacataaagaaaacctaccaaatgccaagcaccatgtttattcttcaggatgcaagataaatatactttatttttgccctcaagttgcttatagttttgtaaaaagatatgctagtcattctagaactatttgaggaccggccacatggcagcttgagccctctcctaaagtctccagcactgttctgcctgttcaaatgcttcttacagttctagtgccacctttcatctctgcttatcttatttcatgtgttttcattttggtcccctttcactttctctgtatttcccaacttgcatataaaaggtcaccctcccccttaactaagcatggtcatccgagtcctctcttcttttcacttaaaatatacacaagtgcatttggtactttttccccagttaataagttgctggttgttgactgtgtcttcccttccaaatgggcttttagggatgcattacattctctttataaggttttaattatcaaatattttgatatggtaaaattatatacctatacaacctaagcttcaatcgctggggaaaataatccaagcttacttttcttaaattcacatcccacaagcataatgaggcaaaccatgcaagacacagcaaggtcttttactgagtgctcatttccaaataatgagaaacacctattgaaaaatcacagcaaaattctgaactgatcatgattagtcaataccttattctttcactgtccaacaccagggaggaactgaaaaatgaaaacaagcacactatagagatatgaccatattttcatattgaggtaattaattgggccatattctataaaacttgtgttgttattgctatataggtttcctgttttggatggaaaacaaccttaaattggcttccggagatggctactctccaacctctcttaattcctattaactcttcctctgcccagtcagcataatgtgattaagaataaagatctacatagtcagaggaactttggttccaacttcactgtgtcacattgagtactaaatttccttaagcctatttcctcagagttaataacagctgacctgcagatttagcgattaaatgctatcatgaaggtatgtaaataacattgtgaccatcaccttataaccactttgaaaatgctagctatattggtctaatcaaaataccactactgtagacaactgtatatatttccattttcccatggcagaatctgaatattacaaacagtcattccatttctttgtctcagaatggaaatagacaaatctacagggggaatgggattagacatgtgaaatatcccactctgagaagagcagagaattgggactcactgcataggctctggatctcccaacgtctgcaccccttagctccagcccaaccctttgctggacccataactttagacaagtagataaattttagcttctgttgcattaggaattagattacctacctcatgaggtgttatgagggtaaataagctaacgattgtaaagggccaagctcaaagcctggcacaaaataaatcctgaacaaatgttaacattattttttggttgcctttggagtgtttcttctacaattcatttaccttagtttgtaagatgaacaaatataaggaagcacctcccaaaactcccctatagaaatgcttcgaaagaaatccatatgctctgataaagtttggcaagaggataaataatgtggcaaaaacaaaatagccaccctgtaaatgtgcttttataataagtaataaaactttggaatttgggatgtatccaagctctacattggtgctactctacccaagctgcatgtaagaatcacatggagaaactgaaaactatgatgcatgcagggcaccaacttagtatgctgaaaactgatacataaggaagaaaattcttccaccttgccattaaaaactgtggttccaggtaaccaaatagccctggcaggtaaagcaaagttcttctatagaagttaattccagacactctatggataagaaagaataagacacaatacacaataacatatggatatataataagaaaatccccattttgcagcccttaatggaataaagcaacagcaacggtcttcagcgaagggcaaaacctttagttttaagagacctccgtcccttgccccttcagccaagtgaggacatagccagaagacagcttctatgaaccacaaaaagggccctcgccagacaccaaatctactggcaccttgaccttggatctcccagcctccagaactgtgagaaataaatttcttttgttgatcagctacccagcctctggtattctgttatagcagcctgagcagaccaagacagttcagatgctgctaagcaaactttgatgataatttaaaaagagttatctaaatagcaaagatttgtgatgtaataatgaaacatctcaaatacacaggctttaggccaggctaatgctaaccagccatctttttgctttatcaataccttatttaaaaatatttgttatttatttgtattgcaatatgatttacatgccataaaattcatcattttcaagtgtacaacgcagtggattttagtggatttacaaccatcattattgtctaactccaaaacattttcatcaccccaaaaagaaaccccatacctgtcaggagtcactaattatcctttaaagagatatacctaataaaaaatgttatatttactaatataggcatctcagcactgttcttttgtgtagatccatacttccacctggtatcatttaccttctgtctgaaggaaatccttgaatatttcttgtaatgtgggtctgctcatgataagtttactcagctattttgctttactttttgaaagctatattaacttgatatagaattatataaccagacatctggtcctgaagaaatttttttaatgctctccttttactccaaattgactaatctgaaaaataaggattcctctggggattaaatgtagggctgtatataaaagccttttgcaaagagtcaatctctaagtagaaaatattaaatattttaaaaggcaattaatagcatataaaacaaactattctaagtaactcagaagcttagtttttctagctcctaaatgatgttaattatgtatcagaaaaataataaaacttattgtatacaaaattattatgtgattcagactttcagttaattcaaacaggtgttgcccacaagtcatctaaattagcaagtttttactgcaatgctattaagttgcacagaaaaaataaataaatagatccaaaatgggtatatttgctgatttgaaatctcattataaattcttatcattaaatacactcattttcttcttagtctcatgtcaattctctgctttcctgaccttgaaagcaggtatattgcaggtagaaaactatcattcccacttaggggctacagtgagatatgctcaaatttggaaagacgctccccttttaatactgaaaacagttaaaattaaagcataagcagcatatcctacttcagaaatgatctatcaatctatatatgagctcagaagcaagtgacctgactccagaatcagattcaaatcccaactcctccacttatttcagagtgcgatttgaagcaagttagtgcccatttctctacctctccttccctcttgttttaatagggataccaaaggtcatacatttgtaatattcacactctaatgtcttatgtaatatttaatgggagggtgaagatatacagtcattttagaggagagaagaacacaatttctggtggtatttgtccagcacagttaagagttagaaaatactttcctcctagagatggctatcaggtacctggatagaaaaaatgtccagacacaatttatacagcaaacacaatacttttgaacacctaatttaggaacacctaatccagggctggttcatctaagagccatataatctacaatgtgatctcccagcgtgaaatcagtcatcaaaagaagttaatagacagaaccagggaattatcaccaattattcatgataagtcagtctcttttcagcttgttttatcatgaatcgggctcctcaaaacagataaatcaaaatgttaaccctgcaaaattcaagatccagcagtggaatggggtgacatcatcgatactctgaaaatctgccctgacaaactcttgttatgagatcataacaagatttttcaacaaacagacttaaattacccactatgtgccaggtactatgagtataacaaagacacaattcctgccttcacattccagccagggaggcagaagcccaaatgcacttgaatatgaggccagccttatgacaagttacaaaccaagggttacagaacaaaaaagtatcagaaatatttgtagattcaacaaaatttgtaagtaggaatcaaatgtaattgtttaccctgagtaaaaaaaatgagtaaaaccatatcaggagtatctaataaaatactagatactctttaatgcagcacaaaaatgacataaaaaaaggaaggcaaagtaccaaaacacactgaagttatgcagtccctcaagtatggaagataagataactataattaccatattctaaacaaaagacacagagattacataatttaaggttgaagtaccatatactttatttatatacattactaaactaaaagtatgatagttctgaacttggactatggacaactgcctgggtctttccggtttttaagcaaacattagatgagattcaaagttttacttgcaaccatcacagagaaagaaaatgtccttcattggctttttacagatagaaagagagaagagcattcatttattcacttcatgtgtggttttataatttcctctttaaaggtaagtctaaatttgaaaaatacatttcccaaaatgtttctatttccctttcttaaagacttatgtttcaataacagctcccaacccacccctgtaatccaaatcctatttggtcctgcagtgaagttaaatgtaggatcctgacatcaatttgttgccatggaaataattgagatgtcaatgtttccgcattatgactgtaccataggagcagatgggctgacaagggggaaaatctgcaaatatctctctaataattagccaaaatatgaggtaatattcaaaatttacattattataaaaatctgagtcatatctatctaaatagcacagaatacaaccaatttcaacttccaagtttactatggaaaatactttcaaagtatacaaacaggaaggtttaccatattcttttattcacttgattatgttttcttgcttgttgcatcactttttgtgctgcatctataaccaagttcagaataaatcagatttgacaaaagcaaacctcattccacacagagaagtaggtaacaatattgagtaagttgaagagacagacagacttagtccatcaactgctttctctgtcttactaaaaatattccccttgtgaagaatactggacttggctaagtaatcatatagctaatcacttgcaataaatttttgccaggtcctatatttgccattgtgcttatgaatttgtcccagaaaactgactacttgaatacaaagaccaaattcttttctgcatcctccacaatacttagccacatctcccagactaagctgaattaatagtcatttatgcattcacatacagataattttttcctaaaaatgacaagagtttgtttacttagataaaaataggtctagagattatatataggtgcacatatgcacagatatgtgcctaaatcatgaaaattgtcacttgcctgatcttcataaggtactgtcatttggaacctcttattctaccacctacagtgtgccctttttatccaaacacgaaaacattgttcttccccattgcgggctaattacgccatctgtttaaccacagtactattaatgttaactccttaacatttccacatgtactgccctcaaacaccttatactgtcaaatatacaaatagtagagaaggcaagaaaatcagtctcccaatttgtattctcaactgtctctactgggtcaacactatggtctccatagggacttgaacattcagaaaatttctctccatctcttactttagtggcacaaactgtcaagatgaatagcaataagaaaattgatctccccacctccatccaaactaaaaatcaggaaatatgtaaatgttttgggcaaaaaaaggaaacagggccagtatacagagagcagatgaagagtcaatcatctgacagggattgcttattcttaagattaagccagctgttttattcactttattataaaataagttaataaaaagatgacactctccttacagatatgagtatgcagtcataaatacagaatatatggaagataactctacactaaaaaatttaaaatatactctaagaagagtataaactacacatttgtataatatgacttgaaataaatgtctacatttaattgcttataataagaaaccatgccatttgaagcagattttaagtgtcctttttatgtgcgcatgtgcacacgcacacacttgcacacacacacaaaatggcaactgtgtggtgaacggtgtattaatttgattgtagaaatcactacacaatgtatatatgaattaagtcatgatgttgtacatcttgactatatgcaatttgtattggtcaattaaaattcaataaaactagaggaataaaaaagaaaccataccatttgagagaatcacagagcatttttcagtgtatttgtttgcttacatatgtgaaagaaatccattatgctcttctccttacactcatctctgtcaccaatgaaaaggcacacacacaaacgacggacatttctcatggtcattcaaatattccttctattattaaagctcacagaattttggaaatacatgcattgacattaaaattatatatacacttaaaaagccatcctcatggcttgaaaattggaatgtttaaatatgagcagtacaggttaaaagtatcaggaatctattgcaaaggaagaaaaagattaatggtaaatgtgttgggaatctttggcaggctcctcatttggaaaatgagtaggataaatttcattatccctatgttccttcaagttttaatatccaataaatcaaaaacatcttcttatagttatacgatcacactaaattaatttaccgggcttctataatggtcagggcatggcatcaaaacttggcaaagttcattatagcccatagcttttatgcccactacttacaatgggacaaaagaaaaaaggaagacaggcaagaaacccacaaccacctggaaaccttgttccacctcaccaagtttcaccttgaaagccattctcccaccacctggatctctgtggatcacctatgaattctgaagtgatggctttgacagctttatacccaaagctgctactaaaacacagacatccacagcaaatacaaatggagtcatttgaaccagtgaaacagcacaggccagaagtctggccctgtactctatagactgcaagaaaatgctcatagtctgttgctatcattctttaagttcctccaagtaagaaaccttcatgggctgccatttctaataaacaagacaatcatggtacttatctatcagaataataacattacactggagataacagttgtccataattaatgggaaaagattcaaagaggttgtattagtctgttcttgcattgctataaagaaatacctgaaactgggtaatttataaagaaaagaggtttaattggctcaggatcccacaagttgtacaggcagcatggtagtatctgcttctggagagggctcagggagttttcaatcatgcagaaggcaaagggggagcacagcatctcacatggcaggagcaggaccaagagaaagaagtggggaggtaccacacaattttaacaatcagatctcatgagaactctaccaggagaacagcactagggggatggtgctaaaccattcatgagaaaactcccccatgatccaatcactgcccaccaggccccacctccagcactggggattacatttgaacatgagatttgggtggggacaccgatcaaaaccatgtcaacagtggagagtaataatacattattgattatagattcattgtatgtcccagctgtggtttgaaaatcatcaagaatgcccttttccagctgggcatggggactcacacctgtaatcccagcactttggaaggtcaaggtgggaggattgcttgagctcaggaagtggagaccagcctagcaacacagtgagatctcgtctctactaaaaataaaaaattagcagggcatggtgatgcatgcctgaagtcccagctattcaagaggctgaggtgggaggatcacttgagcccaggaggttgaggctgcagtgagcagctgtaatcataccactgtactccagcctaggcaacaaagtgagacctgtctttaaaaaaaaaagaaagaatgcccttttccttccaaaagaagtaatcattaaagataaacagagttgccaatttgggggtgttccttctctattaagtcactgacacaagtcaagtgtctagaaaattctttattttggagaatcaaagcacacctaatttaatggagacacaactgctgtcccagtgtagctgatggagcagatgaaagcaaaatgcttctccccattttaagacattaaacttctgtaagaaactttcatttctccactatttgcttagttaaggtcaagctgatcaaagttgatattagttttacattggtttatttatatatttattttgaaggttaaaattagccatgtcaaaatgaaggacagatataaaataatgaacacttagaggtgtaaatataaaaataatattaacctaagatattccagtttacagtcatctttaaggaagaatagtaaaagaaaaaaatgaagctggaaagaaattattttttaaaatactcctttacattcatcttttttcatttcttataatggaccaatttaatcgaagtgtttctcttcagcacatcaacctctgtattgtcaagatttgttaggaaaaaacatatttatacatttgtagtatagatatgtataaccaccttgtgaaaaatgttttatcttttgttattccgtgtgtgtgtgtgtgtgtgtgtgtgtgaaatccagatgtcctaatgaaaagccagaattcatcagatgttggaacatcactgtggtataaaggaataaactgaagctataaaatgcattaaaaggacacttaaatacatttgcctaacaagtccccttgggggaaaaactgcattaaaataaattttgcacacacaccaattttaaaaaggaattaactgcttacaaaagttccagcacacattgacctgtttttttttcattttttaagatgaaagcacctggccacaattgacgttaacaaaaacacacacttaaattctagcaaagttgattttaataaaggataaggtaaatttgttttaactgctgttaagatataattcacataccacaaaattcacccttttaaaacgtacaattcagaggcttttaacgtagtcagagttgtgcaacaatcaccactctctgattttacctttctctctcctaaaagaaacctagtgcctactagcagtcattcctcacttcctcctccctgctttcctaggcaaccacttcccatctctgcagatttacctgttctacacatttcatacataactggaattatatagaacaaggtctattttgacttgtttattttagcataatgtttgtgattgcatttatcagtgcatcattgatgaataatattacatctaacattttcatattacatctaacatttttaaagacaagtttcagaagatttgttggtatttttttcttttgttttttaagagacagggtcttgcgatgttgcccaggctatactccaactcctgcgctcaagcaatgctcctgcctcagcctcccaagtagccaaggctataggtgtgggccactgtgcttggctagatttgtcagtcttctaatttcaggcccccatgaaaatattttttgagcagaagagattaggcaaaaaggtgtcttaagagagttagtagaaaaaaatcaataaaagactctagagcagcattctccaataaaaatataattaaatctacatacataattttaaatttgctagtaaactgtattttagaaaggaaaaatcacatgttgtttattttaatacttatgtaatccaatatagccaaaatattatcttcaatatgtaaataatataaaaactaatgagatagtaacactcttttgttcttatcatacccgtgatgtaacttagcatttattacagatctcaattcagactacccacattttaatggctcaaaatagatctagagagtggagggacatcagagaaagacaggaatggctagaaaggatgaggaacatgaagtgaaaacagagtggaaaatggaaggctatctgggaaaaaagtaggtatattttatttatttatttatttatttatttatttatttatttatttatttgagatggagttttgctcttgttgcccaggctggagtgcaatggcatgatctcggctcactgcaacctccacctccagggttcaagcgattctcctgcctcagcctcccaagtagctgggattacaggcacctgccaccacacccagctaattttttgtatttttagtagagacagggtttcaccatattggccaggctggtgtcgaactcctgaccttgggtgatccacctgccttggcctcctaaagtgctgggattacagacatgggagccaccgtgcccagtcaaaaataggtaaattttaatttcttcgttaaatattttttagtcccacatctagctacacctagaacccctatcacactgtgcatgacacttggaaaattaattaattgggttatcaaggggactataaaaaaggaacaataaatgcctgtcctcaataaacatatcaccacaaaaggtaaaatatttaaaaaactgtacattagaaagtgatgccccctatatgacaaatgcagataaagtgtggaagaaaaggttcagaatttattcacaactagaaaagtcaagcactgcccttccaagtttgtcctatattctctctgcttgtttatactatctattgtctctcttacaacagttaaaattaagtgtttgatgctagtgtttggatcacctggcagcctccaatgtgctattcccagggttaataaccagtttagaactgggggtctctgcttacacatgttgaatgcctgtgatgtacattcacctcttcaaaccacaaaggcttcaatttacctgtgaaatgcaccttgatgccacatctatccaacgtttaccaaccattcaaggcccccatcagcatttagctctataacattgatattttatcttaagtagttttatataaaacaagtttatactttaaagatatgcacctttccagataacaacataaaactaatatagctattaggaagtgagaaattgaagtattttattcaaattttatttagtttctgcaaaataattcagccttctctataaaagtcaatcttcacggtttttttttttttttttttttttttttgagacagagtttcactcttgtcacccaggctggagtgcagtggcacaatcttggctctctgcaacgcccgcctccagggttcaggcaattctcctgcctcagcctcctgagtagctgggattacaggtgcctgccaccacacccgggtaatttttgtatttttttttagtagagatggggtttcaccatgttggccaggcggtctcgaactcccgacctcaggcgatctgcctgcctcagcatccgaaaatgctaggattacagacatgagccaccacacccggccaaactttacttttaaataaatgattcctccatgaattacatgacaaacttttagataaactaaattatgcctggaatgcaaagcacctactcactattgcataatattttaggcaatgagccaaactataaaaaatacacaaaaaaaaatctcttcatgtagctaaacagttgcttcaacagaagtcaagtaaaaagtcataaattcaactattaagtcaaacaggcgtctagtctctagatggaaagaaaatatgaagacataaactagatgaaagctggcacagaaggcaaagtaaattacttaaggtccctaggacttttgagtaagaaaagagtgcattaacaacccaaaatatccatttgtgtgatctgccttaggagatataaaaggaaggaaaaagttaatttggaaaaaatcaacaaagcagatctctgaaatctgctgtgctgatagaaccatacatcaaaagtaataaattaagaatttttaacatgttattatatatttcaccaggagccatctaaagcctttattttagtttaaatatatatatatacatatacatatatatatatatacacatatatatatatatatatatatatatatatatatatacaacagatggtcacacaacagctccagcacattcccccgtgagtacctgtaacaccagcataaccaactcttccaacttgtgacaaaggacaaaattcgagccataacaccaatgttatttttttttaatttagaagaaaataaaataagatcactgagatttaaaaaaaaagacaataacaacacaaaaaaaacactgcaggtctacaggagttgcaataacagaggtcacaaaggctatggatggaaagattaaagacaatttgttctctctcccgggtttgttttttgctctgaaaaaaggtttgggattttgccaaggacaaccctacactattctgatgtattaaaagtcctcatgcaaagcaaatatgtcctacaataaagcagtcaaataaaatttataatttccaacaagagcagtttggtatgttaaaccaattgagagtaaagacaaggctgaaatgaacgtgggacccagggaaaggtagtgaagatatagaaaagctttacgtaaaaaaagtcttcacacactaaatcatgaaataaaatgaaaattttaaaagatcatgaagagttttaattaaacaagttgcttttttttcaacaatttcagggtaaaaataattgtaaaactttgatattaattttgcaaatccatattttaaattcaaattccttttgttactactataaggctataaatagctcaatttcaaacaatttaatctgtggaaagacaattcttattataaaatatttgggaattccttagggttctaagtacaaccaaatctattcatataccatgtttaaaaaaaatgtaaaaattatggaaacgaatcaataagttccaaaggtgaagcttgtttccaagcactagttcactattaacaattgtcagggctgactttatcacttgtccagaacaaaatgaaaatgcaggccttttattcaaacaccaggaaaatgaattcctttatctttcttcccaggtgtctctctcaacttgtcacttattttttatttgctattgaatgacaagctctcttgggcatgggactatccatgaggtgattagagaccctcacaggtacctggggccctgtatcataactcagtaaatacttaccaaactcaaccatacccacacctgtgcccaagctcccactaacccaccccaggaaggcaagaggcatgggaggcagaccatatgtgagcagagggtccaagcctcaagctctcggcccattgtctcatggggcttcatttataaaaccaaaatcaaagataaaattaataaaaatttcaagacagtaataacaggatattaaaccccaagtgtggaccctcttctgaatttgggatcctgtgtcactgcactggttgcctgcctaggaagcaagtcatacttgttactatgacttgttactcagttgttactcagactaagggaaaaaaattactaaatgtttttttcctgaatgttttcttgtagcaactactgtcagtttacttggctgaatctgtcttcatagtatctactgccaagtctttgtcaatgccacaattacagataaagaaatctaatagaagaaaaaacacactggatatacaatattttacctgttaattcatgtgtcagacaatccatactaagtgcaaagcaaattagttctgaagcttaaagaagacaatagcataggcaagaattgtcaaagacgaatattctaacacagattttcttaatctagaaaataaagcaattatatttgaggcactttctatgcataatgtacaagagcctcctacaggtacagggtaacaactgtaagtagatgcatttcaggtctttgaaatgtcagagtctagaaacacaagacaattaggttcctaataactagcaagggggatagtaggcatggccagatatttagacatttaaaaataaattattttaatttgggatgagaaaaacggattttatgagtactcattttacaatatacaatgttgcacacaatatacaatatggctcattttaattgaatatacaaggaaaatgaatcaacagaaaaggcagagtatgcttcaaagaaatgcacacaatatttttcagctaaggcatttaatatacataaattttaaatgaaatgtaagagaaaaataatatacaaatgaataaacccttaaaaaatatcagagagactgaagttgagaatcaactaaaactgaatgatactaaaaataacaaaagaagcttttactattatattttggacacgaggattaaagaaaattatgcttatatcaaggcagacagtgaactgcattttgttggtttgtttgaggcagggtctcactctgtcttccaggctctgcagtggcacagtcacagctcactgcagagcattgacatcccagggtgatccgcccacctcagtctcccaagtagctgtgactacaggtgagcaccaccgcgcccggctaatttttttgtattttttgtatagacggggttttgccacgttgcccaggctggtctcaaacttcttgcctcagcctcccaaagtgctaaaattataagcaggagccattggactggcctagtgcagtgttaacaatggcaaatcctatcttgctaatgttactcagtttgatgttgagagggtaagataaatatcacatacaaaaagaagaaagtaaaccctgcacatagatgagaattctacaaaatagcaaatgttcacttccagtgagtttagatatccactcccagaagaactacatcctaaccgtaagaaaacttacagatctgtgtcattgaaaccactttgtctaaggtcactgatgactttcatatcaccaacgcgaagcatgtttgcagccctcactcttcttcatatttcagcaaaattcaataccggtgatcacttacttctcttcatgttcttggcttccattatgtaaacctactagtttcttccaacctttctggccactcgtaggtttcctttgcaaattcatagtcctctcattggccattaaatgttggaatttttccttagtatcaatagcttcaattagaagcaaatgtaactgtcccattaatcctctcattggccattaaatgttggaatttttccttagtatcaatagcttcaattagaagcaaatgtaactgtcccattaatcctctcattggccattaaatgttggaatttttccttagtatcaatagcttcaattagaagcaaatgtaactgtcccattaaaattcttaaaattccataatctagatataatcctttgccctctacacctatatatccaactacctaattgatttcttgacttgagtgtcactataaactccatgaggtcaaggaccacatttgcttatattcagtatcctgcgtctaacatctcgcacaacgcgtggcaattagtggacacacaaattattatcaaataaataaataaagactattctgattagagaaatcttagttgatgatggagagggcaacactttaactgctgattgagccaccagtacaaacgaatttggggctcacaatttgtaggaatattaacaggctgacatgcatatgttactaaacatgtatgcatatacacacacacaatcttagaccaaatttcagtctggcagcatcacacaaatcctgaatttcaagtttttagttaaataaactcttcaatggaagtttattagggccttcatttaagagcctgacaatacaatacaatacaatacaatacaataacattgcttatcagtaatgtttattttcaaggaatttgcctctacttggactttttctgttctcaagtttgtattactgttaaatattatctttgatataaattgtcatgagtagaaaactttttctaaaatagatttgcagaaaagaatttcccaccaaaacctccagcaattccatgacttcggtggacaacaccaaaacctccatgttggtaattcatatttagacatgtccacccacccaagaagcaaatttccattggttctgttttattttctcctaaattttctctaacctaactagtatttggcactttgctttagtcagagatttctctaaccctttgacaaattccaatgtttctgtttcaatcagaaataatttcctaaaatctctgtacgaaatgaaaacactgcctcaagccagggaaattcaatatacacattaaacaccttttcaaaaaaaaaaaaaaaaaaaccttaatgtattcaatttcaccaacatagggtaagtttcttttccacagaagttcccattgataaagaaatctcacaattttttgaaacgaagtatttaggtgatagcaacgataaatgtacttttcacatttgtaggaaaaaaagatcactatatccatggcaagatgagcaaaaacaaaccagtatctaacattgaagaaacagaaatgactactataaggaagtgctttcctccatttattttatctagctagaaagcatatattaagccatctatcaagaaacaaaaggttagcttgtgtacttagctgtagatgtatgccaagggaagctgctgttacaaattaataaagaatgcacacaaagagagcatgcttgatgcactcggcttccaataacctaaaaatacctccaaaataatgtatattccaacatagaaatccatttcaaatccaatgaaacaaaatgctggccattttttatattattgttatttactaacaccctggagtagctttaaagagatattctagcacaagtgttgaggataggagaagaaacagaagagtaaaacaatcaagttaacttgatatctatgcctccaaacaaataagactttggctgcttcaagtcatatttttattttaatgtgaatatttagattagacttgtggtaggctgaataatgcgcccccaacaaacacaagtgtctatatcctaatcgctgggactgtgaatatgttaggttatccggcaaagaggaattaaggttgataatcagctgacgttgagatggggagagtgtcctggattaccaaggtgtacccaatacaatcacaagtgtctttaaatgtggaagagggaggcagcaaagaaaagagatgacagtgtgggctttaaagagagagaaaaagggccatgagccaagaaagataggtgacttctagaaactagaataggcaaggaaatggatcttcccctacagactccagaaggaacctagccctgcagaccattttatgggcccagtgagactcctgacttctgacctccagaaatgtaagagaataaatttgtgttgttttacgccgctaactttgttgcaatttgttgcagcagccatagaaaactagtataatacatacttcaacaactaacagaacaacaaactaacaacaatgaaaacattatacatcctgttattcctaagcagaataataaactaaccatcttatataacttgtagtttggggaactcatggtctatttcagaccccattaaaacaattagttattcatccttgggtctcagttttcatatatatatatatatatgagtttattggaatgttctaaggttttctagagttctcaagtgtttttgtgtcctgaatgctaattatgaagtgttgtttgagctttgactttttctatgaaatcgttttcttaacctctaatgcgtttttttttaaacaaaagtagtcatgttaaaatcaatccaacgtaagttcacaaaattattcataatagcctagtgcttttcactttgggcctctaacaaagtctctgctttactatagcactaccatcatctttcaaaaacactaagttcaagtaagagaacttggtgttgaaacttagaaagtgtttcagttaatacttgcctgcagcttttttctatgtcagaagaggcaagacaaaaaaagaaatcaatattgtgcagaatttttcttttaaataattcttaacatacagattttacaggttcaatgaggcattatctagaagaagaaacaatatctctctctttttttttttttttttttttaatggctaagaagcctttcctgcaaactattacaagtctgggctatacagcttaacatccacagttaaaaagaaaggaaaaaaaagaaactatagtacacattttcactgcatttaaccatgtagtgaatttctttcttcctttttttttttttttaaaggagagagtaagtcaccaaactgaaaataaacaagacaaggaaagttaaaatcacattacattaagagctaggttgccttctataagttagagaatcaaaatattcttagaatatatgataatgccttcaataaatatcactgaaggacatcatttaaaagcaaattttatgcaacactgttctctgggctttaaatgaatttaatattcctgggagaaaatgatagtcatggccaatagttgaaaacggtcagagaatacatatattcaacattttcccagccactgtaagaaatatgccacacatcaaggtattttacagggcatccagttttctgatataagtactgtgagattctttttacattttactcaacaaaataaaattttacttttcaagacatttggaagtagaaactgaggcaggaaatgaatgggggggaaaagtgaatgggcagaagattctagctattagggaagatgagaagaaaaggctcagacaatcctgttccagaaaaaaataataatgatagaaacttaccaagaacagtttggggcaatagagatggacagggataatattacagaggagaaaagagaagccttaaaggaaagcaattataaattactgaaaaatttaaatcagaaaggcattcactagatacaaaacaacctaaaaaaaaaaaaaaaaaaaaaactcacaacaaaagcaggtcaattaataaggagaatgtggcctggctgtgaaatggaccaggcaaatggactcactgataaaatacattcttttttatttttacctataagctagtggcccaacaggtgtatgtggagtgtgcatgaagttaacaatgggtattttcacactgtatttggggctgggtttcaaatgagttgaatatcgtcatgctgattatggtttctcttcaattactttaattgagctaatgtataataagaacatagcagaagcaaataagtctgtgtgccagcttatgagcgggcaataaaacatagccaaagaaaataagaagactgaaaaaaggcggttgcagaaacaaaagagagagagagaggaaaagagaggggggaaagaagagggtggagaatggaaagatgaaggagacagttcaagagggcaaagtagaagttgacagcaacacagccacaccttgccatctctccaaggctgcttcttccctccagagaggataaagccaagtgaaatcaggtgattctgctgagcttttgcttctaattctgttctttgtttctctgaaattttctcctcattaattctgtgttttatttgaatagtgcctcagaagcccggttgtgttgcttctgtttattcacatggttcgttatgtcacaggtggtgcacccgagctacatgcggcaagtgggtgtgtgcacatgtgtgttgcttgtttgttttgttttttgacaccctccccaatttagtttagggaactccctgaatttttgacaccccccccccctttagcttagggaactccctgaatttgtttttatctttttattttgaaataatttcaaacttacagaaaagttgcgagactaacacaaagaactcctgaatatcccttacccaagttcaccaattttcaacatcttctactatgtatttcccatctttacatctatttaccatttattatatataattctacatattaatatttttaaaacaacttgagagtggttgcatacaacttgctctttaaccccaatatttcaataatatatatttccaactgtaacaatattctcttatataatcacaatattgatgccaaattaagaaaacttaacattgatacaccacagttatataatccagagtttgacaaacctgtgaaccaaatctagtctgccacctgatttcatctattcagttttactgggacaaaatcatgccccttcttttctgcattatttgtggcagcagtgtgaacaacagcagaattggatagttgttgcatgagacaacagtattgcctgcaaattctaaaatatgtatttcttcttttattttaaaatttttcaaacacctgatataattcacagtccatattcaattgccaagtttctccataatgtcctttttaagtataatttccagtctaggattcaacccaggatcctgcatggcatttagtttcaactcacatctctaaatctcctttaatgcaaaacagttcttcagccttttttctctttcatgacactgccatgaaagaatataggccaggtatttttttagacaatttctctatttggatttgtctgatatttcctcatgatgagattcaggtaatgcattcttcaccagaatgctacaaaagtggttttgtgttcttatagtatcatacctgaaagcacatgatatctgtctgcctcccctcagtgatattaattttgacattcagtttttccactatatggttactattttttttttttttttttttttttgccttgcaattaacaaaatgtctgtagggaagtgctttaagaccatgcaaatatcctgctctctgtcaaatttctattaattccaatttagtatccaatgattattctttcccaaatcaatatttactattatggatgcaaagtggtaattttcctaattgatttttacgatcagaaatcagatgttcagaaatattaaatgactcacctcctagttatttttcaaggatgcttttgagaacttgagaactttcaaaactcttaatttccatgatcttaaagtctctcagagtacagaatgcctgaacgaatgttctgaagactcagataaccagaatctcctgctgatcagcatacaaaacctatcttgtaaagctactactgggttaaaaagctacatttttgaaactccattattttcattctagaatgagcatccatttctataataaacaaagtagaaaacaaacattaaagacaaagtaaaacaaaaacaaaacctgacatattttgtataatctgaatttttagtctgttcatgaatcactcctttccatgtaacctaacgggccacagatcttcatgcaataaccactgtcttaggctcgagaaataataaaacaaggtgtagggactgataactaaattatttgtaagatcactgccagtgttttgctaggtaacactaaaccatattcaattatacccttgagtctcctaattcaaagggagagcaggatggtaggggaaaacaaacaaacaaacaaacaaacaaaccctgaaagtcatgttgtaagagaaacatgaatgtttatttaaagcagaggtgacatcacgggacatgagagctgtcatcaaatagatgaagggttctcatatgaaagaaacatcagaaactgacttaagacattcacaaaagtttgaactgtgtcctagaaaacactacattcttcaatggaaaaaaaaaatgatcttcctaactcacctgatcctaggagaaaaaccaatgacctcagaaaataaaataaatgcttagaacaagaacaagctgtggactgaataaatggcaaggagttggcaacatatggctatataagtatctgtatactccttttctcaaatcaaacttaacttcaagaaacaaggttttcaatggctctgtccatcaaaatataaaagttttcagaacttctgcaacaactgaaaactcacaagtgcctcaggcagaagcaagaagggaaataccttcataccaatgctcactgtcattatctttttctttgcagcaaaatgtatgccccaaactgtcaacagcacaagggcaggaaaagatgctgctaaaaggaaaagatcatgtatgggtgttgcgaatgcatttacaaacacccaatgtctcaactaaaactgatgccatacaatgtaataaatagcttaagaaccattagtacttgtaccaactcaggcgataagaactactgcctttcagcattaagtttataccataaaatgtgaaacaatctcctttacacagtgtggcaaggcaggccacattcattggtataggatgatataaaatgggcccatcctctcttggttcactttgaaattcaaaccctgcctttgtgggaagctaagaaattagaagtatcattgcatagtgtttacacacagggcatctatcatcagactgcttgggccgaatcctggccctgttattatcagctatgtgaccttgggccaggtatttattttctctgtatttgtttcctcatttataaaatggtgataataaaggtaagtacctcatttagttgctgtttggattatacaatataatatttttaaagagtgacttgtgcatagaaaacatttgagaggtaaagctactttctgttggcaatagggaggcagtgaacatttaagacagactcccatgattagatttttatttcagatagatcacttcgcgagaacagcgaaagatagattggttaggggatgttatctgtgcaactaaagtggaagacaggagactactgccacggtctaggaatgatactctgaaggtcttaactacatcagtactggaatatgcagaagacataggtatgagagattttaaggagacagtgcaagatttgatgtaaggaaggtaggaagaaccaaggccaactggcaagtttcaagtttaggtaactaaaactctgcaaaattcataagaaacaaggttgggcacaaataatacaattgcttttaagtatgctgagattgaggtactcctgggcatcactgtgggttatggtcttaggtaaatctgaagcacaggctgggctgaaaaacagaggactgggctgggatatttatttgagagccatcatttcactaatgagaaaaatatgttgctattttggagaaaaagcaggaagcacttcctttaaaaagacagtatatggccatatccattatacacgatgttcagtgtcaagtatttgtgcagtatttaatactgacactaaaatcctcctatcagtagcattctactaagtctttgaactcagcacttagaattctttttcttaaaaaaaatttagaaaggatatcttaccaaaacaagttttccattacagttcagtcatcatgtcattttgtaattctccaaagaggacattcacagtacagatttacttctgtcacccaagaactacactctcaccccataaggcagtctttgtgtttacagcacttttcccctcatatcaagagcctatgtccatcatttttactggggtcataaaatcagaccctcaacaatatcttgggacacacatacacacacacacaaatgataactctggatgaagacagatatgttaattgatttgattgtggagatcattagacatgtatatgtatatcaaatcatcatattagtaccttgaatatatacttttatttgttgttggttaaatatttaagaaaacaaacaaaacaacttgggtagcatcttgctcatgatatgttcagaatgtgttgtgtgctagaaaccatccttgttgtctgaggtcaaccaatccaaaaatatgtaagcagtatgaattatcagctaaacatgaatctttagaaataatatgtataaacaatacactggagaatcataaagtcattttaataaagcaggcttagttcaacaagtgtataccatatatatatttagttttatttcaacactctttttactgtggctgagtagtgttttaaaattatttagtctcgttcatagttaagaaaacaatttcattttggtttgattcagcaaatgcattcatagttttcaggtttagcacatatttaagtcctggaaatctgcaaataattagtggggaacttaggatatgtgatattaaggtctagatgatgacaaatttcaacgagtatgggtactttctaaactgcttttctaaaaaaaaaaaatcaatcttgagagtgaaaacgaataaaatcttactaggatgttaccacagtatgtaaaataaaaaggcttccatgtgttttccaagcacttaataaagaggcaataaaaagttaaaacgtgatttccaaattttatgaagaagtcagagcaatcatgaaagccaagaaggataaaaatgtttacccattttggtgtgaaattaccctgaactaaattttagaaaaagtaacaaatttgtggcaaataaagcaagctaattttatttcaggaagctaacaaattctattaaagaaaatatacacagttacacttagtaactagcagatgtattatagctaggcaagagatcttgaaaaaaggtaacattattttcatggttgcattcaccatttaccacaaagttgcaatctcttttctgtaccctatacacagttacacttagtaactagcagatgtattatagctaggcaagagatcttgaaaaaaggtaacattattttcatggttgcattcaacatttaccacaaagttgcaatctcttttctgtaccctatacacagttacacttagtaactagcagatgtattatagctaggcaagagatcttgaaaaaaggtaacattgttttcatagctgcattcaacattcaccacaaagttgcaatctcttttctgtacactttagaataaattaaattctaaaagctaaatttcaagaataaccaccaagtttcaactaatagtatttaaaagcaccaaagaaaagactacttatttcattcaaaaagactaagaaatgaaaaactgtgtaacatgtagctgatatttgtgattaaaaaaatgtagagagaaaacattcaaatatacaatttaaacactgactttttttattagtaaaaacccaacctgattttaaaaagatcataattaaaatccgtcttttttcataggacagaaataagaaacaatgttcaattctgaggcctttgaggataatttaacaactccttctccagccatcactctccatatgccattgccactgccaccaaaatgaagaggcctaggataggaactgcacaatacgtgtaaagatacaatttaagtatcaccttacttagggcaaatgtgtggaacgtcatttaaactcattgaaagagagggtttggtattcctgcctacttgggaattaattaattcagacaatctttggagatagtgttctgatatctaccattcagtggggaaaaaaagcagaacaaagatcaaagagtttaaaaattgatgtgattttgcttatggctcatggactccttcatgccttacttacactctccttcctaactcttgttttctgatagaataccagcaaatacatgagaccttccttttttgccttctcactggatccattctggacccatcactgtgcctaagtattggtggctgcaaagagttgcagctgaccacacctcaagtactgcttggtacttttatttgatgtgctagttccggaactgctctaaccttctttggtcttctctccacactggagagtgcaatacagatattcaggtagccctaaagtgaccttcatgctgacaaatgcaaacaaaataatgttacaaaacaagaccataggcacaggccattttggatttttatgatactctgccactctcggaaagagatgatttcaaatacatgtgagttttgggggttttctgtttgttttttagcaaaagtaaagatgacgatgccttgggtgtttgctattcagcagaacattttcagttactttcattttcacttgcccatatcagagaaaagcagtattatggatacaaaaataaaattggtaagacaatattaaagttttgctaatttacaggcaaataaagaagcatctccagttttaggttaagatatattgctaggaaataaaattcctaagatacaaaattccttatagtacttcctcttcctggactcacaggtgagttgagcaaccagctccataccaacttcaccttagccatccagctggctgactcttcctcagccagtgctcctgggctcccactcctccctagagagctataaagcaagccaaatgttctcagtgggcagggggatagatttgaagctggaataaagcctcagcaaacactgactctactagagtgtagctggtattgttccagttgaaaaaagggtgcttaatgactagcccagaaaacttgtcctgccacaaagtttatggtgtgttcaatggcccagttcactagggctttacttccccagcatcaataaaactgtatgattctggtgcaaagttattgcaactaattcaatgtctcagatggaaaaaaaaaattctgcattttatttctgaaatgattatgacactaaaaattagggggaggggaacccagtaattttggccatcctcatgtagatcactgcgagcttgctttaagccgtatgaactaaatggagttataaaattccatgttgactcaatcccagtcaatgtccaaatttcactgtaacaaaatccatcttaattcacacatagtgtttacagatggtggtcatgacaccaagctggcatagggcctctttgtagtaaacagattgggagggggtacatttttaattgcaataggagtattaagaaagaggtttcacacataggttttcactctctgccttcctaagagagagatgcttcacttggatagatggtaaaccagtataggtagaatttgaaagagaaatgattagaggggatagttaattgctcgttgaaagcagaattaaaaggagaaaaaagcttttcttttctcacagcaaacaaattaagtgtcttgaattttacttaacactattttcctacttgctagaatgtctaacttctggtttttggttaaaataagcactctattcttataatcttcatttcctccacaaaattatttctttcacttcaatattcaagaaatagctcaaggctcaaggcagttgcccagaatccacttactatatctcataaccaaactcagtggtggctttctgaacctctcagattccctttgcctttcccatttctctaaatgtttgcccttgacttccaacttccagacatgttggctctgaattacacgaaagtgctgccccgactcccactccaataccacaccttaggccaatgttcttttttctgattccttcctcagtgagctcattgttctcatccactttctgttctaatgacagcctgactgtggctgaaacccaggagccatcaccaggcttgacctctctcattcccctttcgcgcttgttcttccagatgcctgcaggacatctcactcacatgtcaactaaaattggataggtgaaaacctgagctcttcttcccccaacaataagcaagtgttcctaaattccctgtaatcttcagtattacttttgtcctcccaaacccctaggctcataaagttatttgtgactctttctcttctttatcaacattcgtcctgtctaaaaaactaccatttccacctccaccatatctccgtgctctatccattcctcttcaattttaaatgtggttccagctcatgtccttattcctcacatatgaattagttagtccctagctcatccacacaccttcagtttcttctcagttctgaattgacagaataacctcacacaacaggtaaggcatcttacagagcagtttaacaccctcattttcctgatgaaaagctaaggctcaaaaaggtgaattaacttccacaagttcacataattggacgtgaagccaaggctacaaagcccagggttcatgacttccagtccagtgttctgcccactttatcagaatgcttccaataccacatcagccacccatggccaaggcccactcttcatacatcacagggaacaaaacctaaaatcttacactgtactattcaagccattaaaaatactttcactgcttctccaaattcacttctctttacccagtgctataatccctcttccttaagtcattctctttgtcacattcttaccaacatatctccgctactagattggtacacataccataccctggacagtcatttacttttatacacattacagccctgagaacaaactgcaagacccataaagagtcaaataggtttgcattttcaattctaaattcagagagagagaggaaaaaaaaaaaactaaaagctcaaattacaccttatcttttgaagtaattttgaaaatgtattttcttcattcatacatagtctttaatttcattcagctgttaacatgaaatatgtggccaattatttaggttcaactgttaactggccacttcccttacctcattgccaagatttagaatatgaaattctatatcttttttcatatttgcaattttgcataccaaatgctctgcattttagttgctttacattgatggatgtttacaacttgcaaaactccccaatagactaaccaatgcagatttcaagatgatgaacaaagattagataaatgaatggaaactcactctttaagtgaccaactaattcattattttcctaccataatgatgtctgtttccccatgtgatactgtaacattgtattgcagggattgtggtatcaagacctcctttattaagaatcccttccacatctttttctcctctagttgtaaatctacctccctctttcttgacctgattcagtatcattcctcagttgccttggagatattctgattgaaaatattataattataattataatactgttgacttgttgataggtagtcttcatcctctaccaagaactttcatgaatatacattttaagagtatccagcaagacatacatacttcaaagaattgggtcttataggtcttttatcttttccaggactacatagacaacattttgcagaaaacaagcacactacaaaggctggctaactaaatgaaggggggttctaaaatgaactgtttggctaccgtacattttcttctcagaactgaattttgttctaatcaaatatgctatcccaaaaataaataaataagaactaatgaacgaatcctgcttgcatggatttcaggcaatgacacgaattagcaatttacactgtttctttttggttgtttgtttttaggacttgcccctagcagttcaaacaagaaaattgactctgccggccctaatgagacctagaactgtgctgaatgatgttggaaaacattccccagatcttttaagacgtgaagtataagtgaaacaggcagggctataatatccacccaagcctacagtgaatttggaaatacatttcggagttgcatctctgtttacattttctcatagttcatattgcactgtaatatatttgttcttagccacaatgtattgcttacgctactctgaaatgggagcggccttaaagaaaatcctgcctatgaatgagatgtggtcatgagacatgggaggaaaaggggtggagaaagaaaagaaggactagaaacagagacctgtttaaaataaaatttatacaccagaagaggtggatagaaacatactttaggaaacagactcaatggaaaggctaaaagtaaactagcaatgtggacatcttagatagtgagaagttaactcaaagtagtaacagccaaatcacagaaaagcgcctcaaaagccacccatgtaccacttcagttcgtcggtcagtgaacagtttctgctactgatgaacacacaccaaccaaacagcaaggtgctaggaaatacagagaattccctcttctactgtttgcaatcaacaagacagcaattgttcttggttgaatggcttattctgggaattcttctgacaggagggatcagatagcatctgtctcttacaagcaaaggcattaagccaatgaagagttattattccagacaacaacaaatgaagtcagagcacggaaccaggtggtatcctgctcataaaaccacttgatgcaccaacattgtccttttttcttagctgggccaactaaggctaacttccttagctgcatgattcttaataaaataaaattatactaatctgaatgtctcttaaatatttagacagaagccctcaacagtgtagtaatgccaacaacactaggcccagcaatttatctatttattttcaaaagtttgagcaaagtagtaccttattacattatcaaggcctacaaaagtcgtgttttttctacaactttttttatccaacaaattcatttacatcttgtttctaccactcgaaatgtttaaaagcaaaaaagcagcatgtctttcattaaaataatttaattcaataatacaattctgattttacttcctatgagaggtatttttttctagcaacttgctttatcctattaattcatttacatctgctactttgtgtgtttaaaagcaaaaagcagcatgtttcttataaaaataatttaattcaaaaataatattaattttgatttttcatttccttttcatcttcttctccctctgatattataaatttgcataggtaaagtgtagtaatattgaacctgactctctttctgggtaactatgtattaattaaggtgaacaagggaaggtccaaaacatagtaatggaactctaatgtgactaaaggaactgacacgttcccctaatctcaggtctcagacattgcacaatgcattcaatgtcattttgcacccaatcacagctatcccttgatatgacgaaccaacctgtcccaaataaaatctctgcactccctcatcagatagtcagtgcctgcaactagtttagaattatactataattaaactgaaactctaattaaaagtactaggctaacgtgatatgaaatgttcacagcccaattatgtctgcttgccattgtcctctggtgtgtatagatgatatctttttatgaaaataatggaacacagatttagtaatgacatcctgggcaggatgtcctaataatttccagggtcagtcatttcctttcccatgtattttcccctcttcgtggttctgttatgcatccctggtttcccttaattcctcagaaacatatcctagctactgaccaaagtgcccttcaaatataattaactggtaaatcctagatagacaccttatggttaccacgtgtatcaaataaaacaaacaaaaatcccccatttttttctcatttggtattaatggacttattcatcacccttggtcctaaattatgctgaagacagactaaagtacagtgatcttttagcaaacctatgttttctcaaaaatataggtttcagtaccaccaacccttctttttacttccttctctagaagccttaatgataaatgcttagcaagattttaaaccccaacagtaaaattataactattttgaaaacataatgcttgctacaggttaatttcaatcctgtttgtaatcttaaattttaaagtaaattattaaccttcaataaatttctacctagaggctttaaactagcttcaacaaatttgaataagtctgagtttgtgatgctaatttcattgttgttgagccagttatcaagtgataatacttacatatatttgtccccatggttacaagtaaactagggaagaaactatttcctgactaatattttataaagtaaacttttaaaacacaaataagtcacttgtaaattttgttaatgctttattttaaaaacaaagtgttgagaaaatgttgaattatacttctgaaatacaaaatgaggcaatggaaaattgcaccaatttatattttttctgctaatagtgtccttgaaaataaatttaattagcatagtttgttcaaatcgaatcacatttttaaactcaatagtttcctttcctttcagaaaatgcaaatcaaatccacaactctaactactataattttaatttgcttcaaaacacatacaaatatcataaaaattaaatttccattttaagaagcagacagtctcaacaggaggcacatgggatcaaatgcattagactgaggtctctgaacccacaatgaaaaggaagaatgaggtccatataccaaatgtaaattatacgcagttttaatgctacccacaaataaatacaagctatataattacaattcaactgtatgattaggaaaattatcagaaatacctagttgtctacaaaaatgttaacctatgactctgtggcaatcaacccataatcagttttaaaaatttagaacagttggttatattagtacacatcacaaatttatcatcaggttctaagtaagtaaccagctattgtgctatttagtcttcatgtagttctgctgccatcagattttcaaccatttctttcactgggaagaaaacagagtgaatggaaaaatctcctggcatctcatgccaatgtagccttacatagatctatatcattaaaatgttttacctagaaagtcattcattgaaaatgcatgcacacacacacacacagataatgcctaatatataacaatcactgttattacaaaggcaagttcccagtcatgaagagacacagagataatgtgtctcatgtgtgttgctatgataaataaaatgaagcaaataaaagaagactattttgcacagttgctgtccccatgaggaatgctagcgaatgaaggaagagcccatggaagagcgatggagtagctcttctaaggggaccaagactgaaagtaatcaccaccaaagaaaggatttcgaaggagaagagggatgttgacaagttccaagaataaacagaatggagcttctgctggaaatatgttattaagtaataaattaataatgaccagataagcaatgtctgattctacgaaaaataattgtaaaacaaagaaaaatcagcgtctttcttgagtgataaacacactttttaaaatctacataccatcttttcatttttataacaaagtcagaagacaagctatcctcattttgatcaagaagcaattgtttaattaatgccacttaagtagtgactggcagagtttacatttgtgttcaattttagttgaattctaaaatgtatgttcattaaatagtttcatattttctcaataatccagctgttaaaaattaacccacagaatactaccaaaaatgcacaaaattctgttatctttgtttttttaaaaaaaactaataaaaagggggtgacagttttttagttagtttagtttaaaaaactaataaaaagggtgtgcttgtctgattattattaatgtattacttaataacatagttccagcagaagcaccattctgtttattcttggaccttgtcaacatccctcttctgctttgaaatcccaagtatttattagtaacatggataaagtggtaaactaactatgacaccaattaatatattatatggtttttatgacaaacataaagaaaaagtttaggggaaaaaatcatgttacttcaaaaaggcagaaaacacaattatatctatactctgattataattattgaaataatttatgaatatggccaggcaaggtggttcatgcctgtaatcccaggactttgggaggccaagactgaaggattgcttgaactcaggagttcaagaccagcctgggcaacatggtgaaaccctgtctacaaaaaaatacaaaaattagccaggcatggaggcatgtgcctgcagcatccacctactggggaggctgaggtggaggtggcagtgagctgagatcgtgccactgcactccagcctgggtgatagaggcagatcctgtagaaagaaagaaagacagaaagacagaaaggaaggaaggaaggaaagaaggaaggaaggaaggaagaaaggaaaaaaataaaaagggagggagggaggatttatgaatatgaacacagaaaaaatatttaattgacatagatatcactttggttgtgacagaaattcaactgaaactagctcagaaaaaaagaaaaaatgtattgacttgtggaatcaaaggaaatgttgaatagttaaaccacaggatacacaagaaagaagctagctctcaacaacaactgaaccagggaatgttaacatggcagagtacctccagttcctctccctaattctcttctactgtttgtttcacatggcaggaaagctgcatgttgtgagcgctgacattttaaattttacaatgttcactacctgtgagaggatggctttctgaagtaggactcatattttcctggtgtagctcaggaacccacctcctggataaaagaaggcaggacaccttgaccgaaagtccctccaggactgtgttgggcttcagaaaatgacacagaagtatggcactgtggcacactgggaaactgggaaggcctcaaaaacagcctcagaagcaaagccttattctgactttctcctgcccttctgtctcctatccctctatctcccctgaagcaagtcatagaaaacaaaatttgttttccccaaggcaactcctctcctccaaaacaggccataaaacccagaaaggtcaccctctcccttctccatccttccctaaagagcctcattccagggcgggtccagcagcatacccaagaggaagcaatactacagaaaggccaagaagaatgaacagacaggtgttcacaaaagggaatgatctaatagtaacagagtgatgggggagtgtccattcttcatcaatcctaagaataaaaatagagttttccctgcgtctttgggccttcatttcagaagactcccaggtcacataaaacttgattaaatacatttgctatgcttttctcttgttaacctgtcttttgtaataggagcggtcagatgagagccttatcaccagtaagaaaaggtatcaaacttttctgcccccaaaaccgcattcaatgaggtgtagattcctgtattagtcagggttctctagagggacagaactaataggatagttgtatatgtgaaggggaatttactaaggagtactgactcacacagtcacaaggtgaagttccacaataggccgtctacaagctgagaagcaaggaagccagtccaagtcccaaaacctcaagagtagggaagctgacagtgcagccttcagtctgtggccacagatctgagagcccctggcaaatcactggtgcaggtccaagagtccaaaagctgaagaacttggagtctgatgttcaagggcaggaagcatccagcacaggagaaagatgaaggccagaaaattcagcaactctgttaattccactttcttctgcctgctttattctagctgcgctggcagctgattaggtggtgtccacccagacatagggtctgcctctcccaaaccactgactcaaacgttcatatgctttggcaacaccctcaaagacacacctaggaacaatacttcgtatccttcaatccgatcaagttgccactagatattaaccatcacaattcccaaagcaaaatctggatgctgttatcagaatggagaatagatactgggcatccacaagccagatgcctactctctaggagccaatagaatacgcgatttctaacataaacaaaagcagataattttctttgaaataagggttccacctcacctttcttgttgaatatgctggataattacattccaaaattgcttactggagtgctcagagcaaaacctccataggatttctggcagtaggcagtaaaggcatatggttcaagaagaaaagcatcatacataagttggcataatggtactgaagttttgcaataaataaatttaaatgtcatttaattctttgaaatctaaagggaattcttaaaagtaaatttcaactatgaagaaaatgcaataaatactttttcagcttgtaccaacaaatagagtgttttaaaagtaggataagtttactcacacacaaaaaaaaaataagaaaaactactctaagctataaagccactgatctctaatgagaaagaaaaaaactctaccatatattaaaataatctttttctcataatttacatttctttatttttaccatgaataggagaaaaaagcatactttaaaaaataattaattaataattcatgtgattctctagtacactttccacaaatcataaacttgagttctgaaaatatttccacagcaacgaatattagtgccataagttgaggagtgcaccttcaggtattaaataaagtaacatataaagagaaatattttattttgaataaggaacatgtttttactgatatgcagaaatagataacaaattggcttcatgatggaaaaaaactgcataaattgttccaaaggcagtttatgtttattttcacagtttagagtaaagctcaatgcattctcctgtttcttcttatcctggtaagagtcctgcacacagagcagataatggcttgatccatgagctggaacaaacttcacctggaaatgatgcatatgctccggcctgaatcatgataactaaagtgatagtaacatggtttcagaaattaaacaatacttgtcatataactctcttagtcatataaaattaaggaaaatataaaatcaataaaatctaattttattcttttcatatgtggccatgtatctgtattaaattacactatatgaaaggcacatggccatgtacacattgtctgttcttcatttaattacctcattaaaaggaggatcaggaaaagagtccatgtattcattataagttttgttttcctatacaaccaactcaattttaaatttgcaggaaatgtttaatgagctcagaaataaactttttataatttcccagatcaaccctaatgtagatatgtatgcagtataatccattctgcatctgcattttcaggaagcttcccacacttactcaccctcgatggtcattgtattgcatttttacaactgtatcatttcttcaggtatgctgaagcttaagtgtctacgaaaaaacgctactacattttaagaactattttaaaacatgtaacatactaaacatatttaagtaattaaaaagtactcaattcatcagaccagtcataggtgttaacatggtcactttaattcaaacaactgcttttctctcctcttttcttcttcctgtcctttcacaaaaaaaaatcttttccaaaagatgacagtcaagaatagactacaaaagcattcttttactgaatcaatgagactaaaactggggaaaaaaatgaagctgagttttgctgttatttgaaaagttaattcgtgacaagaaaaatgttaacatgtttgctgaccctacttattctgagccatgaaattgctcaaaccagagcaaactgccaaccatgacgagagtaaaggattctgcagatgcatcattcctacatagtatagcccaaggtgaacagtccatgagtattatacactagaacgcagagggctgggtacagaaaataaggggaggaaagatgccagaggcagaatatggtcataccgcccaggccccaatactgggaagttctgtcttcatgagaagcagtacagcatggtgattaacagcattgattccacaatcacactccccatgtgtaaatcctaattctgtcattttctagccatgtgaccttggggcagtcgctcaacctctctgtgccttcattttcccacacagcaaaatgtgtatgtattagtatactagggccaacatagcaaaataccacagacttgaaggcttaaataattaattaattttctcatagttccagaggctgaaagtccaagatcaagataccaataaggctggtttctcctgaggactctccttgatttctggatagccaccttctggtcttctgtcttcatttctgtgaacacacattcttggagtctcttcctctttttataaggacatcagtcatagtagattagggcccactcttatgacatcatttaaccttaatgacctctttaaagtccctacctccaaatacaatcacattgggggttagggcttcaacatatgaattttggggaatacaattcagtgcataacaaacagtataaaacaataatagctacctcacatgactgtggtgatgattagatgtattactatacaagtgcctggctcatgggaagttctatataaatgcttactattaggctaagccccattaaattcacatgtctaacaagtatccacaaatcacagcatcaagtggatgaaaacagacatttgcagtctgtctttaagatttcttgtattgggacagtgatatctttggggataaatggaggacacatcttgctgataacatctatctcaattcaaaacatgggtggttaatatagaaatgttagtggttcctaacaggagcaaaaccaatagatagctttgattttctcacattcccagtgggacacaaaggctttttgtgtctcaggattatgtgctgataaagaatgcggaaagaatgtttatgaggaagcagacaaaagcagcctggctccggtgtatccacacttggcagctgtaatgcagtttcggctacaccaataatttccaattatttttacctgcagtcaattctcaagctagaagactgtggtgagaatatgagattaatttagacaggctcaggcactcatgtgaacaccaaaatctgccactaaaacaaacatcaggcttacattaatctatcattttttttctcttgttaccttttcaatcgcccttcatgatcctggccagggttctgtgtgcgtgatagatggcgaatggaatggcagacagcagcagaacaacagcagcaaaagttaccgaccacaagcacagacactgaaaacgaaagcggcttggtaactaacaggctaatcttcacggcaggaagaatacttggcaatgaaacttcccctgggaattgattcactactgttcacatttgtttaaatgaatttaacataatcttctaattgtggaagtctgatcctatcactcccctgcctatctgcctaaaactcttccatatcatcaggttgcctccaagataaagtcatcattcccttgcataacacccaagggtttcatgatctagtcccaacaaattgccacattcatctctattacagaatcttcaaagataccagtagcagttcctagtaccgtacttctgggcccttcacatgctgccttctctatcaagaaaaccctcctcattggctctgataactgctctatgtctttggtctcaatgctgatatcccctcctaggcaaattccatccatccacccccaactgagtagtttgcctcttcagcatgttcccagaataccccaaatctaacactattatgggatatatcatactgttacattgtacatatttaagcaactgcctactcaaaattttcaagagaaccttgtagcctaactatccaaaaatgaaaattccaatatattatggtggttgagatcaagtatttctatatcagacagacctgagcttgaaacttatttgtcttttattactcatatggccccaagagaagctgtaacatggagacacaataatatttattttacgggattttgaagtatttaataagtaaatacacttgccgcagcacctggcatgaggacaagttcatagctgttattttcatgctcagtatctaattcatctcctactactctattgaatataacccactcttcaagttggactgtttggcctgaaaatagtcttaagttttctcttcagctgaaatactccatctcccaatctttgcatatggaaacccttgccttccaaaaaccccttgctagtgccacactttccacctatcctttccaagcctagacctgctttctcccttctcttggatagcccccttgtgctttttggaaagggcaggagacactgatgtttgctcatttttgtggcaacccataccccaaattttcccccaatccagagtgtggtgtcccatgtgccaccaaaatgtaagtattttagaagccggaatatgtgtttttattgctctctaacaatatctggcacatggtaggcactcaacaatatatgttaaatgaatgagtgagttggctgtttctattgcaaaagaaagccagcattcacctcctttactttttcctaagagcaaattctattgaccaaaattcactaaaaactggaaattaaaactgcaatttttaaaaatttattacatacgaacatctcaagcccagtcaatgtaccccccgctaactggctgggcgcggtggctcacgcctgcaatcccagcactttgggaggccaaggtgggctgatcacgaggtcaggagatcaagaccatcctggctaacacagtgaaaccctgtctctactaaaaatacaaaaaattagctgggcatggtggcaggcgcctgtagtcccagctgcttgggaggctgaggcaggagaatggcgtgaacccgggaggcagagcttgcagtgagccgagatcgtgccactgcgctccagctgggtgaaagagcgagactccgtctcaaaaaaaaaaaaaaagtacctcccgccccctacacacacacacacacacacacacacacacacacacacacacacacacacacacagaaacaactatacttatactgtggtcaattcatagaactagaagagagtttagaaatcaccaaatgcaaatgctttattttaaccacatggtaaacaagcacaatgggtgacttggtgtcatcaaggcacttttcctccatctcttcatctggaaactccaaaggtaactgtcccctcatctatgatgctttatccaacttctccagatacagccagtaactctgtcatctgccttctctaagcacttcatttctacgtgagttataacatttatctacatgtccatttctccaaacagactgaagctcctagagggcaaaacctaaacaaagcctaacatagtgctggtacacactagtggtttaccacattggttaacgttaaatatagacaaacagtagttactagaacaggtgtctgtggtccaactacctgggcagctgaggcaggaggatggcttgagcccaggagtttgaggctgcaatgagccatgacctcaactgtgaacagccaccgcactccagcctgggtaatgtagcaagaccctgtatcttaaaaaaaaaaaaaaaaaaaaaagtgtagttacttgaacctgctaattgataaattttaattgtttcgataagattacgtgttatgctgacattcaccatcaccattttttaaagatataatgatttagtagattttaaatttaaaagataaaataagctacattatagtaaattttgacaacaattttccttctaaatatatccctgaaattagtatattgtgtttcagataagatgtaggaagctttgtgatccgccagacttgcagtgtgtaaatagggaacaactttgaaactgctgcccaacagctggagtactcagcgggagcactgcagttaaaaaaaaacacttttgtttccctgggggcaaaaggctagagccaaacacaatagtacaaccaaaacaacaaaaggagaaaaaatgtttacaggatttatcttgacgctttgggaaggaaaataaaatattacaacacttcaatggaagtggcaccacgccgtcatgcaatccaaaagcattttaaaatctgcccatgatgttttttctagtaaacatttccaaaagagcctgaaacttgatttatgtgtgtgaaagagaattagagtatacctccctacattttacaactcacattaaaactgtcataacgccctgaaagtataggggagaaagtaagagctgaattgctatttttctgacattagtaagcagtcacattgtaaagcctttgctattctcacaaaaaataaataaataaaataaacaaaaatctcagttctcaactctccggtatgtgttcattttctaagacaaaccactaaagaaaatataagaattttaaaaatatttcttcctttcttcatattttattatacatcaactctgtgcaatttaaaacaaactgtgtgggtgagtgtgtgtatctatccattcatacacagtctaaagaagagaaagtgaataggcaaagaacttcaaaaatagcaaagcttatcactcaaggaagttaaaggagaatcaatatagaaaggtgcctggggtaaggacccagttgtttagaactgaattttaaatgactacattttaaacaaatgcatatgtacatagatatatactttaaatcttaataagagacgcaatttcagggaaaagataaaagaatatatagccatgttgcctaaaaaaggaattatgtgaactgtaaggaaaaggtaatatgcaaatttgtttttaaatcctcgtggaggcaagagcctaaaaaaaaaaatcctccttaaatgttacagttcaaaccaaatactcaggcagcatctctcatccttccctctctctaagtccccacaaatctactagcatgctccatcactcccaccttcaaaatacctttacctgtacacttctctcaccctacagtcacttagactgcaacaatgtcctcctaactggtctcaccaaaatccacgtggcccctccaaaccctttttcacactatactgagggcgatacttatgaaaatttgatcatgtcttttcctttaagtcgtcatcgttagttataaggtcctgcatgctctggcttttacctgaagctttggccactctcaccagactctccttcacgcctcttccccagccatagtgagtgggcttctctcagttgctgcaatgcactgcattctctccaatgcaccgcattctctccagtctccatgtcttcacacaggtgggactctttgcttgtatctcctgcctagctttcctaatgtcaaaattcctgtgcactccttgggtaagacacattcttctaaaccccctatatttttttctggactttccaaacttaggattacatattgacaagtatatgtttcacatccatctaccccagactgtaaaagtccaggatgaaaagtccacaatgaaaaggactatgacctcagtccctaaagcatgccacagtgaaggtgctcaatatacagctgaagactgagagtgtctttcaaaatctcaagaaaaaaagcaaacttgatgaggaagcccatcttagattccagcaatgtgattatcagaaaaaacatttccctaaatcttaaggcagaaaagtagagcagggatgggggctagtcctaaaacccagtccagtagtaaagtagagaatagagaataataattgtaaaattccacctctgattattatatattatatctaaggaatttgtcatatactttgtaaccctatggttcctcgcagaatgttgtaaatatggttagcatttaatgaatatttgatgaataaccatttttaagataaaatattaaacctaagtgaagtgacaactttaagaccttgagatgtgagatcaggtccagatgttatccttacatggtcctgtcctgaacgatcagaaagacagtcatgtttgaaatcatataatttctttcagtttgatcattagtaacaacatatgcagctttttaaattattagcatcctgtaagatttattatcttctaaacaaatattgtataatctaactctaattgcttcttggtttatgaaaagcaaaagtgttacacaaggtataataaactaatgatgttgtaatgtgacattttcaggtgtggcttttagaattactctcataacacaattatttataaaccaagaagactataatttttctcacaaaatcttactcaaaatataattgtgcttggcattacaataaaccaaagaaggccaagttgttctggaatcagtaaaacattacaggtaacaaacatgagtttacttataaaataaaaatcgtaacatccaaaaagtacaccaaaataactctaagccaaaaccctcctacatgcacaatagtatgtgattaatcacttataaaattgccttatgtcaactgtcggaattgaagatgactatattctatactaccagcaagtgttcacattagagggaaataataaacatgtatgttccagtcagtagcagaacactaattttaacattaatcattttatgatcccaggaagaggaggaaaaaaataacattaaactcacttttaaactatatttaatttaattatgcctggctatatatacttaaaaaataaccattttatgctgagctcagtggttcacacctgtaataccagctactctggaggctgaggcagggcgatcccttgagcccaggagtttgagaccatcctgggcaacatagggagaccctgtctttaataataataataatttgaacacaaactagacagaaaataggttgctttaaatacttgagatttttatcttggtttgaaatgagtaaatagaaaatgtcaaatttcaatcagataaacatcaaagtgagagggtcacccatttaaacaccttggcttccttgttttgattgaattcatcctatttcccctcttttaaaatttctcactctgtcattcttataccttctttcccattattatacattccagtgttaatacatccatattttgatgagctctgttctcttaatttggatccaaatttttaagtaattatcacctatcaaaaaggttgtttttttttttcctttctattagatgtagctaacaaataaacagtaaaatctcattaactggaggtggggtgagatgactacgaatcactttaaaatctgaactgtagaacattttaaaagaatatgttgtgtatattacgaagtatttttaacaataagtagttttaagaacaggttgactaatatgcatccttaaagaatttttctcatgagtagatttagatacttttctattagcataatgtttgtctgagttgtaaaaaaaaacaaaaacaaaagcaaaaaaacaattaattttcttaggagctgtaaataaatcccctgaaactgtagtcatcctgcttccttaacaccctttttctgtcaagaatgttaaaaagacaaatcacagcctagcttccattccaagcattctcccatccaaactacggacagtttccagtttcaaaacagaacccttctcaacctgggctcctggatactgaggggacttttcaggcttgccccttgttgatgcagcccagagaatctacatttggaatatttatttaagaaacctcattacttggaagaatactggcttttcttgcccacttaaacgaaccagctccctccaacccatgggggagacgtttactcagttcaataaacagcacttggcaaagagcccttcctctactttatttgcatcccaatatcctcttctgcttttagcaagatgaggctaagggaatgctggagaacagtggcatcaatgctcctctgtccagataactgtctgatcctctaaaggttgagaactatgtctaagtatgacaatgtgcataactcaaagtcttcaggatatatactgaattataaggttatgccacactgatacataaaatgtaaaatatatatttttatgattatattttggattaggccacagaataaatatggaataaaaacatatatcttgacaaaaaattcagctggatacccacatagatagataaatagaatgaatggcagagagagagaagacaggcagcggacagctactctgctagctattttcaattactgaaatatctctactcacaagttttacagttgattggaggttttgtgtatcttttttattcctttgttgttgttaagtcttggatatatttttattggtcaaaattatttcaatgttccattgagtatcacaataggtatttcaacgtaaattttaaatcgagttttatttacatagtgttattttgttttaaaatcaaaatgcagctttatttgaagacaaatgtgaataatgagttcatacaggtatgtccaaagtacatttgccttccattgcttttgtcaagagtaataccaaaataggaaaagtaaataaaaaaaaaaccttagctttattcacaacatcctgtcataaagaagaaacaaaagactgtgtaaaaagtactcaacaggactgatctctacaagtgaaaacactgaactgtaaatcttcaggttcgaaaaatattttaaaagacaatccagtcttcctaagtcaaacccagtagtcaattagtatttgaagggccaaagggcaaggcattacaatcatagtaacttacatatgtgtagctcaatttggaaaagaatatccaacataaattacccagtttgattctcacaaccctgtaaatatccagaaattatacacgaattgaggataaggaaacaggctatataagttaaattactcatttaccaaattacgcaaactctatgctctttgcactgtaccaggaagtgccacgacataatagttaagagaaaaaacttggagcttataaagttgtgtgaataggatttatagcaaacattgtatgagagaagtatagtaactttcccatatttttggccagacccacagttagaaattctttttgcattgtgactcagtacacagacatataaggatacataaatctattccattaaaaccaaagtttcatgaaacaatacttctctcttcctctacaaaatgtatgattacctttgttattgtttttgttatattctatttcatggttggtctggttttcttccttaagctggttgctacctactgaattgaattcggtacccaccaaatgggtggttacatacaatttgaaaataatgagctgatacttagctcaatgctaggaccagtaaacactaaaatgttagttattgaaaataatttttaaagttatgtccctataggttggtggactcaaaacactcaaaagggatacaatgtttacctctgaaatactcaggcaagacatgtaaatggcccagagaaacatacaccaatggcttcagtttctgatgcagaggcaggtaaaatcctgatgctcatgtattgttgtcattatgtcatcaggctgcagtgaaggagtggctaaatatagtgagacatgaactaaaaatctttatcaggccctgctgaataaacagaatgttgaaatagagagtaatacaaattagaagttgtcagaaacagatgctctaaaaatgggtcatcctagttaatacaatcatgtgattaactgaaaatttgggggggggagtctcatttcaatcactgtggccactactggtaagctttccagccttatgaattacaatttacccagcataattacatttttgattatgcttagctaattcagccatcactctgaatatcaattaattgttaaagtattataggcataaaggtaagagattgagtttaacgtctactgatcacaggtcacacagaagagattgctctttaaaaataaatccctgagagtttatatgaacatatgtctttttcctattatataaccatttaagtacaggaaacaatcgacttagtgctacacctttattaattctgaatattatttgtctctatgtcttctcccacttggtttcctcaaggagaaagagtactaactgagaagagttaaaaatctacattttgttttgcacagtctgaggaatctttattatgaaatctatactctgttgcccgggctaagtgcagtggcataatctcagctcactacaacctccgcctcctgggctcaagcaatcctcctgcctcccaggtaggctgggactagcccgggctaagtgcagtggcataatctcgacttattgcaacctccacctcctgggctcaagcaatcctcctgcctcagcctcccaggtaggctgggactacaggtgtgtgcaaccacacccagctaatttttgtatttttaatagagacagggtttcaccacgttgaccaggctggtctcaaactcctgacctcaaatgatccatctgcctcagcctgccaaagtgctggattacaggcatgagccactgtgcccagcctgaaatctatgtttaaactgtaaagtttggaatgcttccaaattcttgaaattgttcatatataagggaaagtaaatttttttcctgctacaagataaaagattttatataagatatacaaagagaaatcatatggagaaaatccattttcccaaaataagtcataagtcacttggggactgtcagcactttgtcatatattactaaactcaaatcacacacacacacacacacacacacacccttcccattaaaagggaaaaaatacatatacaacatattcacaatctgccaatttcaagaactttcttacaatatgccttaaaatgtgaatatcttagttttagacactaggttttttgtgggcggagcctaacaaaggcatgtggagcacaggaatttccatttagcgctacattaatcttacatgacattttttggaacatgaaatatttttgtcctatataaacaaatattataagagcatatgttaaaacaacattccacttttctaacactgatagagattaaataatgaaagaattttaaaactcaagtgaaataatcaaaagtaactttagctaacaaatagtaataactgcttaaaagtaactgataattcagtagaaaataatgataaaagaccattaaatcaaagcccaaatgcagtattaagatgaaaaaacatgctttatatttaataatgtatattttgtagatgttaacaatttcacatacatacacccaaaattaaaatccatcaaagtggcaatgtatagcagaattggatgaaaatctacctacttttacagacatgttgattcttccaatatttctgaataacttaaatattgggtgctcttgtgagccacgggaggtttgttagtacaaagatgatgtagtaatttacaagctacatttactgaaaacccactacctactgtgtagtatttgggaaagatggtgtttagcatgaaaaatgtccatagttcaaagacattgaaaagtttaccttttatatagtcctagcagtgctctaagttaacaggacttaaagagagcttgaatagtcatatcagcacctgagaccaaagagagtcaatcctgtatagtggggaaacttgagttaaacagaaaaacagtcttcttcttggggatttattcctgagattaagctccacagtggatgcaccaaagccttctgacatcaacattttgtgtcaacgaacctaaagtttcttgataactaaacccctgccagggagtttcaaaatggaccaggttttcttacactaaactgttcaattaggaaagtgttatagaaagatcccataattaaagaggattatctcactggattcctcacacccatatgccaaattataaggcatggagtagtgggctgggctgaaaccagcctataccagctcctgaaagtcagttgctaaaatgttcaggaattttgtgggccagttattagtcacaaccattatttaaaattaaattatataaacttacagctaaataaattatattaaaaacagaggtaataaatcaaaacttatcactttctaattattttactattaattatatttgcaggatatttacttctcttgtatctgtatggtggaagtactaaataagggtgtgttactatgcatctcttcctaattttgtgttcagtgatgtcacattggtcctttgaattcagccatggtggtagtatttataccatggaaactggcaagtgctaaaacctgaactttggccaggcatggtggctcacatctgtaatctcagcactttgggagtccaaggcaggcagatcacgaggtcaggagttcgagaccagcctggccaacgtggtgaaacccccgcctctactaaaaatacaaaaattagccgggcgtatggcatatgcctgtaatctcagctactcaggaggatgaggcaggagaatcacttgaagccaggaggcagaggttgcagtgagccgagatcgcgccactgcactccagcctaggcaacagagcgagactccatctcaaaacaaacaaataaaacctgaactttttggcttgagagctgattattaaacatttaccaccatcgctattacttcctcattttcccaagtacattttgtgcccattcataaggattttgccaattgatggcctgatccgagaaacttaactaatcacccaggagtgagtgactgtactttctccacgtcctgatggcactttttgtacctcccactcttaattatatcttacttatttctagatcttctaaatagtctgtaaggtcattaagtgcagggacttagtcaactaaatcattttgccctctgtgctatatacactgcctggcacagaatgaacatgcatttactatttgattaacttaaccaaactaacatgaaagaaatcagataaactctgtcatacatattttgttaaatgaagagaccctagctcaccagcctaactttatgtattttgttttagagacaaggtcttgctctgttgcccaagctagagtgcagtgcccaatcaccactcactgcagcctttaactactgagctcaagcaatcctccagcctcagcctccaaaatagctgggactaaaagcatgcaccactatgcctggttattattgtgtgtgtgtgtgtgtgtgtgtgtgtgtgtgtgtgtgtgtgtagagataaggtcttgctattttgcctaccagactaactttattagggatagtaatcaatcctggaaatgcacaaatcaatggttcccgccccaataaggtgttgccaacaagaccatattaagaacacagactgatatcacctgttttaacaagctttgaaggatatcatatttgataaaaatgtacagaatagatatatcctttttgtcattgctcacataaaagacaacacgtgatgtaactgcaatgccaacaaatcaggtgacaagaacaataagagtcttgacctaaaaggacccctcttattctttcaaagcattagcctctggaaaggtaaatgctgacatgacatcctgccccttctctgtcccctgccctttacttgactacatgtgaaagcaacaggaaaaactcttaataaaattatatgcttttctaaaatgtgttggcaactggaagcagcctgtagtataactgtcaatgagcaaggagcaaggatagagtactttcagccaatggtgtgccaaattgtgaacaaactgtggagagagtccaggaaagatctcaagtggatacttcagtgaacagtaagtaactaagaacttcaaaggattgccctacagactcctgaacctaaattaaaggtaaaaacaacagccctcagagcaattagcaggcttcaactgggatgtgcattcctgataagaattagccgggaaagggcacaatgtaccttgcaaaatctgaaacgttgcctaaggagtaagcaatcagagcacctgggttcttctggcaatatctgcgctcacctttcctggttgtgggtttgtccgataccctagtgcaaatagattgaaagccagagcctgaatcacactggttaaaatttatggtttctcatgtacactatcatatttaagtatactactatctagtgttttcattatagagatctcccattttcagttactcattttctgattcagtatcctttaggtattattgtgaccaaaatatgtagcagtctgctttccaaataataagtgagtcacgattctggggtccaggacaagcaagtatacatccctgcttttagaactgtttcatatttaaatttagatgtgccatagaagttttgaagttttgttaatgctccttttattgagactgaatctggtcaaacagtataccaaaatgataacaacttaagaaatttacttgtttttttttttttttgagacggagtctcactctgtcaccaggctggagtgcagtggcgaaatctcggctcgctgcaacttctgcctcccgggttcatgcgattctcctgcctcagcctcttgagtagctgggactacaggcctgaccaacaggaagaaaccccatctctactaaaaatagaaaattagccatgcgtggtggcacatgcctgctatcccagctactcaggaggctgaggcaggagaatcgcttgaacctgggaggcggaggttgcagtgagctgagatcgtgccattgcactccagcctgggcaacaagagcgaaactctgtctcaaaaaaaataaatacacacataaaataaaaaataaatgaagatgagtttatgaagacagctgctgccaccgcaatcacaaagaagacctaggttagtaggagcatccagtcagaacacaaagttgcaaatattgtaaggacattatctcagtgacattcaagcctgcagtgcaaagagcttctccggtaagaaagttaacagggatttctaacatctggagtgcacaagtgttacacaaggaaaagagaagtttgtgtcaattaaagctagaaaagatagtgttaaaaagttggaaaaataaaagaaatctaaagctcgagtctaacataaaatccttctcacagcttagaaaagctttcctctgtgttgacaggtcaaagagcaactctgcaaatgagctaataattgtcaaaactttagccagacctttccaccatgtgccaggactaagtggctttacccagagaacagcagcttgaaaaagtcttggggttcaaatagatttgaaactacctcattgttttgtgaactaaggaaaattaaatagctaggcaacctccaaaaagaaaaagaaaaatgttatatagaattcataaacacgttctaaaagccagtgcatttgtttagcatatgtgtcaaatgcaaacagaagcaatagtgatattcctttctcattctataaccattggggaaacaatataccaacattcttaggcattaaagagatccctcttatcttgttgattaattctaattctctcattctaaatctgagtgctactcccagataggacataatacttactgggatgggcactgcttggagtggcagagatttcattcctccactttctggtcaattcttattttaaccttattcccaatttagaattttcatattttatcatctgagattaaatcgttctagaaggtaagcaattctttgtaggccaaaaacttcccacctccctcaacctacctagagaattttaaatgcattttccaaagatgttgggtaggtttttatacatggcaagaccctgatctctacaaaaaaatttttaaaaattagccaggtatggtggcgcacacctgtggtcccagcaactctgaaggctgaggcaggagttttgcttgagcccaggaggttgaggccacagagagctatgttcacaccactgcattccagtctggttgacagagtaaaactctgtctcaaaaaaaaaaaaaaaaaaaaaaattattataagtcactgtaacctctaacataaaaaaagaataagtttgcttcttgttttcataaacactggattatattctataaagtgatgcttgtggtctttgttaatcagcatattgagctgatttacttcaggcatcctattatttattctctggtggttttattttaaagtaaaagataatgtagttagagattttaagagataacagcatgagattagatattctgcaaacactggcaatttcattaacaataataactaaaatggacaaattttattagtgtgccaggcactcatttaagcactgtaactcaatatttctcaaaacctacatctggaatgggtactttcccattttgaatatgtggaaactgaaggaaagtggtcagatcatgtagtaaaaacatgttggaatgtatattcccactcaagcagtcaagttccaatgtccgcactcttaaacactatgctctatactatgtgtggagatcagcatttgataagtattcttttgcttaaacacaaaatgggcataaaatatcagtgactcaactaacaaaaaacagttttttaaatttctatttttgaaccttgggtatatgtaatctagtaactttaatttggcttaggaaaaatttacacttctccaaaattgcttttctctccttaattcacactagaggcccactctagaggccatgtgggcctcttttaagacagaagttcaaaatccccatttcctggtaagaccgtgagtgtacttaaataactactgttgtccccttcataatgaatgaccaaacagtgccttatgggatgcaggtgccagggcaattaggtgatggtcacagcccaccctcattcctggctgataggactctgccagccactggtctccctctcttgtggctgcccactagacagggcaatgggctacagaagcaatagcagagagagggctgatcaaagtccaggcaagagaggcagttcataagcagctgcaggtcagagcaaacaggattctgcagccaaacaaccagggattatgcatgtgaatattcaggttgtaaatgcacattgacatacactgtagtctaagaggctgtccaccaatcttcttgatcctgcttccagagggagagttagtgacagcaaacctccagaaaacaaatgtgctctctcctctgcctgactttgtttacatttcggattactcaagttttgggaaattccacttggcggaattttactatcattgtggcaatgtgtttgtaattctttttcggtaggcttttacttgtttgggtagttttgagactatggaaagactactgatagactggaattatcctaggcaagttctgaagtgaatcagcaaactgtaagacagacagagctttgacacttgccacatctcaggagtatggtcagttataaaatatatggtcagttaccaacaaagccccaagcttcacttgtgaatcactagatgtgggcagcgatgcaaatattaccatgccttaatagtcattaacattataaatgctgcacaggcactgggacaagtcactgctggcttacttgccagcatacccaaaacctggcacagcatgggcacatagtaaggtgctcaaagattcatggagtgaaagaataaatgaaaggatataaacctcatcaggatcatgctcttaaaaaccaggcagaacagcttagatggcaagagcatgttctagcttatcacgaaaatttttaaaaggaaaaaagtatacacacaactttctatatatgatatatataagtacttaaaacacatttacatttctttaataacttattttataatcacataatctatattgaatatctggaggaaatacaaatacagtaggacccccttacccacagtttcactttctgtggtttcagttgcccttggccaactgtggtccaaaaatattaaatgaaaaatttcaagcagggctctgtggctcacacctgtaatcccgcactttgggaggctgaggcggcaggtcacctgaggtcaggagttcaagaccagcctggccaacatggcaaaatcccgcctctactaaaaacacaaaaaaatagccgggcatggtggaggcaggtgcctgtaatcccagctacttgggatgctgaggcaggagaatcgcttgaacccaggaggcggaggttgcggtgagccaagatcatgccactgcactccagcctgagcaataagtgcgaaactccatctcaaaaaaaaaaaagaaaagaaaagaaaagaaaacgaaaaaatttcataaataaacagcttttaaattacacacccttctgagtggcgtgatgaaatcacatgctgtctcactccgtcctacccgggacatgaatcatccctttgtctagtgtgtccatattgtacagcccacttgcctgttagtcactcagtagccatttccattatcagattgaaacaacatggtatagtatatttaagggtgggttccatacgagtttcagacgtctaccgggcaccttggaatgtatcccccagagatatgggagggctagtgaactacctggtagcattaaagtttatttatacatacataggaaatacatatatgtgaaaaaagttggggggactgctctttatgatacatgattgcagaatcacccattattcacaagaaccatgctcattcttctttattataccactttccccaacattgagaggcaatgtatcacttaaacatgcaaatatatgaagcatttatttattgttttcatttcccttcttcagcatacacactttttgtgccttcagcaatactttccttattgtcaaagtttctattcctaacaaaatttacatttttatggtagtttacaaatataaaactactttcacatatattattcatttcaccttaaaagtgtctggttcagtagactagacaagacattaaagtcattcttcattgtaatattctcattttggtgataaagaaatgaaagatcaagcagaaaggactgctcccaaatttcagaaagtgacagagcttaagactggaacataagtcctcctgtagcaaggccagtgctctgtgcattaaacagcctcctgcatagatctccaaaggcattggttctgaggtaggttgctgccagccccttcacctcattcatatatttcctgagcatttaagtgttggtttagataaaggggcataatgagtcaacaccagatagcaatctgctccaactgaccaggtggttagggcaaattattacaaacttcatcatttaggactgacagtcatcacataaggacataaataagacagaaaaagagtcataagttattatcataagttatttatgataatagacaaaagtgtacgaaaacaagcctccagtgacaaagggaagcatgatgaagtcagtaaaccttcctcctcaaccactgtctacacccctatgtgccaggccagctgccctggccattgaaggtccattacggaccattaaagtgcctggagactatcccctggcctcaactggcacagccatggtcctcagtcaaatccactagcactaacatgtgattaagacagcctgggtaaatctctcattaggagaggaggtagctaggcaaacagctgctacttctctacattttattcattattcagtaccccaagatatttcttatagcaactcttcctaatatcccatgttgctcagatatacataataaatttaggcagcagaggttagaggatcaaaattaaaaataaaatcaccatcatctcttgaggttttcaaaaatagtagagttagtaggttttgtctgtgtcaatatcatttaccacagcttactttaccctttgctttctattaaaaataaataaatgcatacatgcaaacacctatacatgcatacatgtataaattctgtcatgatatctgaaaaccaagcagttatctaagatagtctcttgcattcacagacatattatcaccttatatgcagactactattctaatcaaatccaatcactaagtcaggtttatatttggaaatattgtttcagaaatttggaatacaagccaaaaattttttaatcttaaataataattatatagattactgttaaggaaaatgatatatatatagtatacattaatatatgatacatatatagtaagaacactaacctatacattaaaatctttaatttgagctcaagttcttcctacctgtatgactttgggcaacttacgtcaaatgaaggggtcattaatttctaagatcttttttaacaccaaattctacaaatttttaatgttagactaattcaatactgagacaaggaaaataaaataatggaaataatataaattcatgctttaaagtagtccttaaagggaaagccaataaataaacactctcagattaaaaacaggtgatctgtaaatgtatacaagcctgccagacacaaattgcctctttcctctctttctcttccacgctttcccacttagagatcacctagtggtccacaacagagaacaatctgatcctactgtctcttccccatcatctcccatcttctttcttccccattagaaagattacaaaccctgggccaagccaatcagcacactaacttcccctcagtcagagccttagattcaatggttggaaacaagatcagtggattcaagcactgtaaaccttagagccttatcaggtgcaaccagcagataattcacatttccttaagggacttgaacctgggatcttgttcggtgggagctgccacagccatcgtgcctctatatggagcctaagaagctcctggaataccctagaactaaactaagcaggcagagaaacatcatgtctcagtggaattacgtcaacttctaaatcaagctccacctgaactgtagttaggagagacaaataaattcaccttttgttgcaaccagtctgggttacattttctgccaagatgcaaccaaagaaatgtctaatctttaaacatttgtgtacattcattaacgaatcttgactctaccagtgactcatatagccacttgggacaagttattacttaacccctcgaggccttagtttgtaaaatggagatgatcctcatcttaaaggatattgtgaggatttaaaattatgtaaaacactgatcacaggccctagcaggtcatgggctctcagtaaattacagctcatattgttatttttgcaattgctttaggaaaagctctcttctccaacatataagaaaataaatgaacctaattattgctcataagaataaaagcagtactagtaaaaaagacaagttccagaatttggagtcaaactagaaaaagtaactgtgaagttcttgaagatatacgaaagtgccctctcagagtctctccaccactacttctcctctaacagtgatcagtctcctattaaatctttctttaaacattagtgtctaaattaagtacatatggaaatacactgatttacagttcattaattcaataaattatatattttatatttaagacaatataggttatgcagacttttatttacagtatcaaaaatatagagaacgttgctattatcccaaactccagcttctgatctcatgatacagccaactgtaatgggtgaacattaatttttacttcttgttttttattagtctctgccataaccacgtcattatgccaatattttctgaatcactagtgaatggcaaaaacaaatatagcagttgtgatttaatcagagacaacactgttgaaacagctagcacaagtagacacatttagaatagtaaatggataacaaaaaacacttacaggctcattaataagaaggcaattaggtcttctgggaaaattcattttctaaaagaatgctaaagcaagctataaaatgcaagtaaaattgtgttttgacatgaatagtgtacactgtctattacatcataatttttctcttgagaaaactgacaagaatctctgttcttaaatatgagcacaaaagataataaaaagaacaccagttatatttaatgcattctacctaccaactcccattcattaaatttgactgtcctataaatgagctccttactacaaagatcttaaattacacttagatgaaaaagagaattataaagcaagagactgctactagtaatgtcagagggaatagtatttcctgtatcaacataacattatgctaaaaatgatttgcatatagcatgtttggttccttgaagagtatgtttatctttaaatattcttatacaaaatattcataaccaaaactagtcttacttttagtctcttatgaaaatattttttttcaaagtcatctgagcattcttttaaaaagcttgtatagtactgttgttttgatgtgtctggaatattaaataataatcaagtaaatattgatcagaaatatactccaggggccgggcatggtggctcacacctgtaatcccagcattttagaaggctaaaacaggaatatcacttcagctcaggagttcgtgaccagcctgggcaacatggtaaaaccccatcttgactaaaaatacaaaaattagctgggcatggtggcgcacctgtaatcccagctacttggaagcctgaagcaggagaatctcttgaacccaggaggcagaagtttcagtgagccgagatcgtgccactgcactccagcttgggtgacagggcaagactccatctccaaaaaaaaaaaaagaaagaaagaaagaaagaaataaagaaaaagaaaaagaaaggaaaaagaaatataaatccaaggaaatgtatttcaggttatcattaatccttttgcaatattcttgaaattctatggtaaagttcatgtgacaatctttttaaactgagctttctttgtcctagagcagtgtttcccagaattaaatgttccatcaaatcacctggggatttcatcaaaatgcagattctgattcagtagatctggggtgactctgatgatcacagatcatcacaaatttccagatgatgctaattatattggtccatgaaccacaaaatcccaggacaccttgcagtgaggaatccaatgaccatgaagcaatcagtcatcaatccctgggtgggtagtgaggaccctagaaagccttcctctctactcttgaatttactgaatgacctaagaaaaatcacatcaaggaactgttgccagtctgtcacttaagcagctgctaggtcacctccactatccaacacggattaagggaatttctgtggctggtcagctgctgccttgaacagcgcttggagaatcggcctatgagcagctggttaaggaacaggctgcactgggaagggtttatattaatagataccaatctggagaaagatttattattttatccttaaaagtataacagtatagtatagtatacagtatagattatatacagcttattttccacttgtttctacatctatgaaataaagtagtgatctattttcactactctttccaaaaatgttaagtatggagttttgataccatctctagatgcccttaccttctttctaacctaaatgtttctacaactaagtcctagcattgttaagatgtgtgtgtgtgtgtgtgtgtgtgtgtgtgtattcacacagaggactacatacttacatctttcacatttcccaacaaaataaatacaaacaataactccactacgcactattttattttgccttgtttctgaattccccttattaaaacaattcctagaatgacacctgttggaggattcagccagcactgccctgttcatcattttcattatcagagctcaataatcatatcaagtggaaacacggattattccatttaggacaacttaatttgatcctaaaacaactgtaagtgacaaaataagccacttgtaatttttatggattatcaacacacgaaggagaatgccaaaaatttcaaccagagttaagtggggaaatggcaatgttccacgagaggatcaatgtgatccttagatcccaggcccagtgttttcccagaacctcaacaatctaaaaaaaacctcacgaaactaagttttaaaattacatacacttagttttcattattaaaatattaaatacagatcaaaagaattcccacaagaatacaaaaggaaaataaacatacttcccacaacagaatcttcatgaaactttaaaaaccttttatgtgaaactacgtttctttaggagtattttcacaaaacacatttgcactaatgtggagtgtgaagtttacaaactattcagagttcacactgatatcaaacatcataacattttttcagttttccaaggcatagttgtatgtaacttatctcacttatctcaaaatatcaagcaatgtggttctgaaattgtctatccccatttataaaagggaacttaaagacttcagaaacagcaacaaataaatgttctgtgacattaaaagattagttcatggatatgcaagtttgctttttgcttcaattgaaataaaaaatagcctgattaatgtattattcacttactttgttatcaaatactgttttaagacctatcatgaattgatgtcttgtacttttttttttcagtactatgacaaacagcatgagttttgattaaaaaaacaagtcatgttcaaaagcaattacaacctttttaggcaaaaagaaacaccatttgaagaaggaacacagaccagatacatatgatcaaagtgtaaagactgagaagaatacacagagggaaatttttacattgacagaactagaaaatgtgtttgcgcaaaggcaaaggctgatttcaataaacaagtcaaaaataccataggacttttttcctcttctaaaaattaagtaaaagatcaaaaacacatacacacactcacacacacacatacacgtgcacacacacagaatccctgtgttctttgttttgtctttaagaacaatctgtaaactttcttgatgcttcctgctctcaatcttccagcatctctcttcctgcactccatgaaaagcaagtaggggaaatgggagcagcacagatccctatttagcatgatgttcactgtctttaataccagtttgagtagacctggtatactgcactttaaaaatattagtagccaacacactttttctatatggaatcttatcacatgaattaaatattaccttaaaggccagaaaaacctgtaacaaaccatcattgctagaaatatgagatttggtgggaatgttggcattagctttggttagtggatgagtcatatttccagttcttaaggacatgtacagcactaaaatatatttggcaaaaacaaaagggctgtgatcttgtgtatatatatgtggggctctgtttttgctagaaaagagtaggagggagtgtgggagggggcagagtggcagaggggttgatttatttttgaaattcacttttatgagcacaaagagaagagctgtcagcagcacacatgccaatgtccaaacagcagccagactctcctctttccgtctgggtaggccagacacaaaactacatctcacgacctaggaaaatcaagagtcagatgcaagagaactagagagagaaaaaaaaacagtcctggaaatgtccagctacatatgattgctagtgattagaacgtggagttttaatgaattgagggatcgagggatatttagccaatcaaaaccaaaaaaaactaacaggcaaaccttaaagcaagctggctccaaagtatcttcctagcaggtaataagtataagagaaattaatctcacctaaagagacaacaaggagtcagatactgctcaggtgctgcttagatgagttacagcattctaagtgcacatcaacagggtgacatgtcaggaactatagacaaagcaggatctcgagctgtatttccaggctcctatcatacaagagagacaatagtccctctctaggtcattgataagactgcatctagaaagctacatattattctcaacacagagttgaaaacctgaaccaacagttaaacaaacagctaaagaaactgactaaaaatatttttttctgtagttagaaatgccaggaatgttaatagtgactcttccatgggtctaactcaagtaaggatttatacgaggtaagttaaaaaaattaaggataatcgatcattgtgctgacaaaattatggtctggccaatctagtatgtttatgtttaacaataactatgttaaacaataattaaatgaatgactggctgagtgaaaacacacacacacatgcacacacacacgtgcgcacacacacactcacacacaaatcctgaacagcctgcacttactggagagagaatttggaaggagtaaaaagctgagactaaggcacttaatgatgattacaccccagatagctgcacagtgctttacaatttacagtgctagttcccataaattacttcatttaatcataaaaaacatgtggaaaggtcaagttgggtattattatccccattttacagaggagaaagctgagtttccaagtcaccttacctgcatctggtttcgtcagtcatctaagtccttctacagaaaactttcttacattatatcaagagatcacagctatacaacccagtgaataaactttaatacttctttattcttctatgcctcggtttcctcagatatgacatgggtgtcattttaagtgagaggtgaaactgaaagaatgtatgagttgggatttacagaacgttctggttttaaagaggctcacagtgcagcagttttacactttaactgcaaaagctaagaaaaaagtcacaataatgaaaacactcttacatttttggtttaaacaaagaaaactgaataagtatatgacacatcaaagtcccaacaatgctcagcctttcaaaatttgcttttgaagcttactacattaggaaccacatgatatcggaaagtaaactgatcttaatgagtatgatttgaaagacatacttcagatatttttaaattctcaacatgaatttgtcttggacttttaaagtgggtttatttaaatttctcaaaaggaataaaagttcactagttaaagtaaaatataagaaaaaccagcaatatggaatacacctccaatcttcaatacatctctaatctatgtctgcaacaaatctgactgccatagaattttatgacaataaaatatcaaatgatttatggtagccagaaaaaaaaggaagtatttacaaaacaaacttataatttgtggagaaaggcaaatccacaatctgactttaaactctgggaataaaagacattcatttctgggcatacattcctaaagggcaaaatcttgagatgcaatcctgtgattactgtactttttaggaatgcacattatattaattaaatatacaacatcatgtcaaatgttatgctttgtcactaaagaaaagccaggcatatttagttaaagtacttagaactagatatctaagaacacaattgtttattgtacgtatctaaactccaggtatcagaaaagctcattttcacattcagctggaggaaaagtagtatttatttgttaattaaagggtaaataacatttaaaaagagaaaaagttttctaactgctgaaaatatatccatcgctgttgagacattaatagttgcaactcttgaatacatgtaagtttaattatgcaactggtagagttcaaactttcaattaacaaactacaagccttttcaagcgtaggctctccgtgcagtgacaaacactgtgcagaaatcaatactcactccaacttgcctgcatataatgagttacatcaagcacggtttcaatgctaacgggcattatatgtcagaaatgcatgcagtaatgcttactccagaaagaattcaattaaaccattggattattttttgcatagagctgttaccctctgcgtacatcaattatatacagggcttttcctctgcgtgctgccatttcataatctctgcctgaatgtacgacacatgctgccacctgaatctgttgtttaactccctttacagagttctaaatggggcgggggtaggagagcaatggaagggaaataaacgattactccagaaaacaacaatttgagtttatttccaggaaacagggcctccacaacaacgtgagaaactgtcaggtacaaagtaagttatttgcgtcctgcggcttcagccaggagcgtggctgtcgcttttcccgtcttctccatcaccctctggccaccactgcgtctccatctgcaccgcgaaccccagcagcagatgcgctcgccagccaagcgaagctgggtaggttggccagaaaagttgtcaggactggcgggaggtagacaagtgctcgggagcccgctccccagcgtccacctggtgaaacttcagagcccccagaggagagaacgaaagaagcaaccaacctacacgaaggataacaaaactggaggggaacagagggcgggaccgggagagccagggttcacggacttctctgagcggcttgaccgagaacccccagggctacagcgagacgctccacttgtctccttttgggttctccggcagaaggcagacatttacagtccgcttccagccccaggccggatccggggagcgcggggccagagccccaggccggatccggggagcgcggggccagcctggcggtggttttgcccgaggagcgggctcccacgcgcgagtcaggcttcctccaccaggcgcccagacctcgatgcccatgaacgctcagagtgggtccttagaaccgcatttcaacacatcttacagggctccgccaacacacacacagaacatgctccaagcagtgcccgagcgcacagggcaagcccgggagcaacccagagctgggggaggagaaaaggggactccgggagggacggggaagtagttagacaatagtcaggggaggttattcccgggacaaaaagcacctggcaaagcgcgccgaggtcagtcccttcgaatctccacatttctgacaatggcttcccagggaatttgtttaaacacccaagtggcagacagcaacaaacccgcaccacaagcaacagagtgccgtcacgggagtcgtaactactttttctttctctcttccccactagcccggcgcaggccacgcgagacgccgaagccagcaggtccccacactctccggctagaccgtgccagcctgagccccgagcaagcttcggagaggaacaatgggtgccccgcgtcccacctggcacgaactctggggacagccctccctctaccctgtgttccccacccccggacagagagagctccccacgatccttgtccccagccctagcggggacctggctcacccctcgtgagcccaggactccaggcgttcgtcggggacgccccccggccactcacctgcggagaactggccttgggccgatcccaggagaggccaaggagagaggagcaagagcgccacaaaagcaggcagcgccgccgccgcagtcgtatccatgccgagtttgggagaagtttcaagcagctttgcaaagagctgccggggggatcgccgcgaaatccacgacggaggagcgggccgggcctcgcggggtgaggacggtgagaggacagccgcccgcccgccctttttccttcttcgcggtcgccaaactacctcaggggcgaaagcgtcgccagcgtcgccggccggccgcggcggcagctctccatgctcggcggaggctgctcctgttagtcaagagttactttgctcggggagggacgggggcggagccgggggtgacgtcgccccgcgggctccgggcgcttctgaggaatgcgggctcgggcgcggcgccgccaccgcctcctgccggagagacgcgcgccagccccggccgcgcgccccgcgccgcctttgttcgcagcctgggccccgccgccagccgctgctcggagggagcgagcgagaaaggggagccggcgcagctcgctgccctgttccagaactcagaatttgagaggcgagagttcggtaagccgtgcgaccagacgaccgaggacgcgcgcagagaaacccccgccgtccgaggagaggcgtcctggggttccgtcccaaggtggaggtccccccgagcggttgctgattgaaaggggagtgtggaagcgccctgaggaaacacccgcctgccttgaaaactccccgttccttattcttgtaataaggaataagacaccccacccccatcgaaaacttgtcccttattcatagaataaataaaacttgaaccagaataaacgatc

SEQ ID NO: 971 - DNA, 419 bp, Homo sapiens
  misc_feature (358)..(358): n is a, c, g, or t
  misc_feature (380)..(380): n is a, c, g, or t
ttttttttttcatagaaacagtgtctcgttatgttgcccaggttggtcttgagctcctggcttcaagcgaccctgccgtcttggccttccaaagtgctgagattacagagatgagccaccacaattagccaatgccttaattttttattttaaggcattggttctttttaatattcaaaaggaccttacaaggtaggtaccaatattatttccattttagaaatctgaaaactgaaagggtaagtaatttttcaagactatacagctgatctaaatggcataaaaatcacactagttacaaaggctaaatcagtgttcgactacataatgaggggatgggggcaattatttacaaaancataggtcaggaaaattgtccnggtaaactcttgggtgggaccccaaatttattttccctt

SEQ ID NO: 972 - DNA, 1250 bp, Homo sapiens
aagcttcgacggccgccagtgtgctctaaagggtggacagtcatggcggcccggcgcggggctctcatagtgctggagggcgtggaccgcgccgggaagagcacgcagagccgcaagctggtggaagcgctgtgcgccgcgggccaccgcgccgaactgctccggttcccggaaagatcaactgaaatcggcaaacttctgagttcctacttgaaaaagaaaagtgacgtggaggatcactcggtgcacctgcttttttctgcaaatcgctgggaacaagtgccgttaattaaggaaaagttgagccagggcgtgaccctcgtcgtggacagatacgcattttctggtgtggccttcaccggtgccaaggagaatttttccctagactggtgtaaacagccagacgtgggccttcccaaacccgacctggtcctgttcctccagttacagctggcggatgctgccaagcggggagcgtttggccatgagcgctatgagaacggggctttccaggagcgggcgctccggtgtttccaccagctcatgaaagacacgactttgaactggaagatggtggatgcttccaaaagcatcgaagctgtccatgaggaactccgcgtgctctctgaggacgccatccgcactgccacagagaagccgctgggggagctatggaagtgacccaaggctgcccactggagacgcctctccctgcagtcccccgagaggtgggagactcgcggaaggccccgtccccagcggagtccagaccccacaacttcaggagctctttcccggcagcagagatctgcaggctgcctcttctgccccggagctggggtgcactggggacccccgtggtggggaccttggcagtgtggacatgagcagagcgatggagcagtctcctgccctctcccctgtcctgatggcactctgttgtattttcttactgaagttcagtgataactctgagcagtttcattgtgatcactgtaaatggtaatcagttggaattctcctaaatgtcttccagacactagtaaaaaaacgacctgaaaaaaaaatttttttttttttttttttttttttttttaaagttttcagacttatttcacagcgattgacacagaaacatacctctgacatgattagaagcatgccagaacagactggtgaaaaggtttactttagagcattttttttttttttttttttttaaagttttcagacttatttcacagcgattg

SEQ ID NO: 973 - protein, 212 aa, Homo sapiens [sequence omitted]

SEQ ID NO: 974 - DNA, 259 bp, Homo sapiens
  misc_feature (8)..(9): n is a, c, g, or t
  misc_feature (27)..(27): n is a, c, g, or t
  misc_feature (45)..(45): n is a, c, g, or t
gtgcaggnnctggggccttctgctgcnaccacacccagctcaggnctgggccagcccctgcccccagcccactgagggggtgggcttactccctgggcagtcttgggggccagagctgaggccagtccatattacagtggctgggctgtttttttcagtagcccctagcattggctgggattcctgttcctgggtgcgcctccacctaccttctgatgtttcctggctatggtggggtgggaacctcagtttcccccaa

SEQ ID NO: 975 - DNA, 336 bp, Homo sapiens
  misc_feature (4)..(4): n is a, c, g, or t
  misc_feature (13)..(13): n is a, c, g, or t
  misc_feature (17)..(17): n is a, c, g, or t
  misc_feature (103)..(103): n is a, c, g, or t
  misc_feature (106)..(106): n is a, c, g, or t
  misc_feature (108)..(108): n is a, c, g, or t
gcgncgcgccttnaggngatgcccgcgcctccgccgcctgagaggaggtcgagctgccgccgggggattgctggaggagcttggagtgcggggcgcccggcantgngngagccgccacagccatggattgcaaagatagaccagcttttccagttaagaagttaatacaagcccgtctgccgtttaagcgccttgaatcttgtcccaaaggggaaagccgatgacatgtcagacgatcagggtacttctgtgcaaagtaaaagccccgatttagaggcctctttggacaccttgggaaaacaagctgtcatgtggggttctgacattaggacttta

SEQ ID NO: 976 - DNA, 658 bp, Homo sapiens
  misc_feature (567)..(567): n is a, c, g, or t
gataagaaaatggagaatactgtatttgctttagaaagtttttacatatagataaacacgcagtttaagataacagtaaaagcgccctacagggagtgagagatacctctgaagctgctaagaaatactggaaatagcttttgcataagaatactacaatctcactctccgcttttgctagcgacagggtccctctttctaacccaggccaccatgcctctgctggactgccaagtcgacaccaggagcaccgagtgggaggagaaccccaaaaagaaaagagacagttgagcggggagaaagacagagagagggagaggagagaaagagaaagggagaggagaaaaagcaatatcatatacaggcaatttctacacatatattacaaactgggaaaatgaccgatcattaagatatacataattcatataaaattttgaaataaaaataaaaatctgttacagtcataactattctttttccacatttataaccagtacccacacaggcagtgacagagtggagagaaaaaggtgcttacgaagaaaatgattgtctgctggacangaaacagaagattgcatttgtgtgaccagtgcttgactaaataacgatggaggatagaatgaatgaagcgagagatataaaagaggagaga

SEQ ID NO: 977 - DNA, 657 bp, Homo sapiens
gtggcaagaaataactggcggcagctacgggggatcctgtgactctctaaactgcagttcgcccttttagtagtgccttggatgttgggtttggcatgagttgacccaggaatgaagctgaacgagtatcggctggactgaatgctcccaaggacattaagggcttattactacaatggtgactctgctgggtctgcgcagcgtcgcttaacatgtggagttcagctgcttttgatcatgagtgctccctaccccagcaccgattgctgcccagctattggaacactgtataacgaccgaatcacactcgagtctttcaagactgcagatagagaagctccttttggaacagagcagcaaatgagatatgggaatccagtaaaatcaggcactgctcttgaaagaccctgtactcctcaacaagttcctcctcttgacatttgcagatctaaagaagtaccacttctactattggtttcgctatcctgccctctgtcttccagagagtttacctactcattcaggggccagtgggtttggatcaaaggttttcactaaaacagattgacagcactagagtgtgcatatgataatctttgtcaaacagaaggagtcacagctcttccttacttcttaatcagtatgatgagcacatgg

SEQ ID NO: 978 - DNA, 332 bp, Homo sapiens
tttttttttttttttttttttttttttttttttttttggatttgaaaacatttttaataaataatgggacaaaattacttttctgattattggattttcagtatgcaaaattatggctaaaaataaggggctttttacatgaacataatgaaaacattaatcacatggattgttcccttagtactgcaccccttttttatggaactttttcaaattatttaaatgaacaagtttggttttggggaacaccaccctttttttttggggttcaattttgttgggctttgttttccactggggtcaaacctgatacttatctatctatgaataaa

SEQ ID NO: 979 - DNA, 653 bp, Homo sapiens
ataggatatggaactatgacctcgatacgactcggtgcagccgtatttctactgcgacgaggaggagaacttctaccagcagcagcagcagagcgagctgcagcccccggcgcccagcgaggatatctggaagaaattcgagctgctgcccaccccgcccctgtcccctagccgccgctccgggctctgctcgccctcctacgttgcggtcacacccttctcccttcggggagacaacgacggcggtggcgggagcttctccacggccgaccagctggagatggtgaccgagctgctgggaggagacatggtgaaccagagtttcatctgcgacccggacgacgagaccttcatcaaaaacatcatcatccaggactgtatgtggagcggcttctcggccgccgccaagctcgtctcagagaagctggcctcctaccaggctgcgcgcaaagacagcggcagcccgaaccccgcccgcggccacagcgtctgctccacctccagcttgtacctgcaggatctgagcgccgccgcctcagagtgcatcgacccctcggtggtcttcccctaccctctcaacggcagcagctcgcccaagtcctgcgcctcgcaagactccagcgccttctctccgtcctcggattctctgctct

SEQ ID NO: 980 - DNA, 397 bp, Homo sapiens
gtcgacgctctagtggcacacacatccacgaggctacccccaggttacctgccctaggtccacctccacccacagtcctgtgtgtaggaatcgaggaaacgggatgtccctgagcccttgtctccaaagggccggccaagggtgcccgccagcctgactccatcaaccctccatgaccaaatgatagctggcgggctctgcaggctacccaaggccctctgctacctcccaccctgccagctggaagggatgggccctgttctgtgaattgactacctgtggaaatgtgaccaattagtgtgaaatgcatgtttagcaagtgttaggtactgtatttgaaccaataaatgtgaatccttctgcacatggaaaaaaaaaaaaaaaaaaaaagtcgacg

SEQ ID NO: 981 - DNA, 514 bp, Homo sapiens
ttttttttttttttaatggtggctgtgaattgcagggtactttgaaggccgccaactgaaccaagagtagtaactagattaattatatgacagaaagagtgaatttagccttggggtatttattaacttctattatttagatatgcaattttgtttaccactatctcttcacagcattcatatgttaactaagctcttttgtgttaacaagtttatgacaagactgtgaaagtaaaaataatttatctgcttgaagacaaaaaagggaaggagaacaaggatagaaacattgtgaattaatttgtacaaatagaaagcagaccagcaggacaggagctcttttgcagtgctgccggatggtgtctagaaaaatcccagtaatcatgtaggctccatattatttttgcctggggcaaaatgatgtatcttctgtatttagcttttaaaattagtgaaacaaatggcattatttattaaaattctactcaggataaaaaaaaactcgtgccgaatt

SEQ ID NO: 982 - DNA, 493 bp, Homo sapiens
  misc_feature (41)..(41): n is a, c, g, or t
  misc_feature (163)..(163): n is a, c, g, or t
ctgacgacgtgctgcgtcgttacttttgaaacgcttggggnggaagtgctgttggagccgctgtggttgctgtccgcggagtggaagcgcgtgcttttgtttgtgtccctggccatggcgctgcagctctcccgggagcagggaatcaccctgcgcgggacgnaaatcgtggccgagttcttctcattcggcatcaacagcattttatatcagcgtggcatatatccatctgaaacctttactcgagtgcagaaatacggactcaccttgcttgtaactactgatcttgagctcataaaatacctaaataatgtggtggaacaactgaaagattggttatacaagtgttcagttcagaaactggttgtagttatctcaaatattgaaagtggtgaggtcctggaaagatggcagtttgatattgagtgtgacaagactgcaaaagatgacagtgcacccagagaaaagtctcagaaagctatccaggatgaaa

SEQ ID NO: 983 - DNA, 1700 bp, Homo sapiens
gcagccgcccgggcccccgccagcctccctcctcgcgtccctcggtgtcctccgcgggccggcgcgatgcggctgggcccgaggaccgcggcgttggggctgctgctgctgtgcgccgccgcggccggcgccggcaaggccgaggagctgcactacccgctgggcgagcgccgcagcgactacgaccgcgaggcgctgctgggcgtccaggaagatgtggatgaatatgttaaactcggccacgaagagcagcaaaaaagactgcaggcgatcataaagaaaatcgacttggactcagatggctttctcactgaaagtgaactcagttcatggattcagatgtcttttaagcattatgctatgcaagaagcaaaacaacagtttgttgaatatgataaaaacagtgatgatactgtgacttgggatgaatataacattcagatgtatgatcgtgtgattgactttgatgagaacactgctctggatgatgcagaagaggagtcctttaggaagcttcacttaaaggacaagaagcgatttgaaaaagctaaccaggattcaggtcccggtttgagtcttgaagaatttattgcttttgagcatcctgaagaagttgattatatgacggaatttgtcattcaagaagctttagaagaacatgacaaaaatggtgatggatttgttagtttggaagaatttcttggtgattacaggtgggatccaactgcaaatgaagatccagaatggatacttgttgagaaagacagattcgtgaatgattatgacaaagataacgatggcaggcttgatccccaagagctgttaccttgggtagtacctaataatcagggcattgcacaagaggaggcgcttcatctaattgatgaaatggatttgaatggtgacaaaaagctctctgaagaagagattctggaaaacccggacttgtttctcaccagtgaagccacagattatggcagacagctccatgatgactatttctatcatgatgagctttaatctccgagcctgtctcagtagagtactggctccttttataatttgttaccagctttacttttgtgataaaatattgatgttgtattttacactcttaagtcttaaccacagtcagaattatcttaatgtagaattataattttggctcttttaggaaaaaacaaaatctgatatttttccaaacgtattgagcaacaaaatattaatattgtgccatatgacaacaaagtctttcctaaatactccatctgtttagtactgtattgtggaatatttgagttctatttccagacttgaaaacatggaggattttagagatgcctgaacaatattatttaagtagtatgtgaccgagctataaattttttgtttttgttctaagtagatttaatttgggaactgacaggacaatgtttttaggtttagcattttgtttaaaaacctttaaagaaacctttagaaggacttagacctcacatattaatgttgagaagttctgcttaattttaaaatggtttctataaagggttttattgtatgaaatagaactttatatttttgcatatgtatagaggataattatatttaatgtataactatagcattatggtgagtggaatttgacattgtccaaacctttttcatttttgagtgattaaaaatgaaatgtcctttgtaaa

SEQ ID NO: 984 - protein, 317 aa, Homo sapiens
MRLGPRTAALGLLLLCAAAAGAGKAEELHYPLGERRSDYDREALLGVQEDVDEYVKLGHEEQQKRLQAIIKKIDLDSDGFLTESELSSWIQMSFKHYAMQEAKQQFVEYDKNSDDTVTWDEYNIQMYDRVIDFDENTALDDAEEESFRKLHLKDKKRFEKANQDSGPGLSLEEFIAFEHPEEVDYMTEFVIQEALEEHDKNGDGFVSLEEFLGDYRWDPTANEDPEWILVEKDRFVNDYDKDNDGRLDPQELLPWVVPNNQGIAQEEALHLIDEMDLNGDKKLSEEEILENPDLFLTSEATDYGRQLHDDYFYHDEL

SEQ ID NO: 985 - DNA, 2076 bp, Homo sapiens
cggggaaggggagggaggagggggacgagggctctggcgggtttggaggggctgaacatcgcggggtgttctggtgtcccccgccccgcctctccaaaaagctacaccgacgcggaccgcggcggcgtcctccctcgccctcgcttcacctcgcgggctccgaatgcggggagctcggatgtccggtttcctgtgaggcttttacctgacacccgccgcctttccccggcactggctgggagggcgccctgcaaagttgggaacgcggagccccggacccgctcccgccgcctccggctcgcccagggggggtcgccgggaggagcccgggggagagggaccaggaggggcccgcggcctcgcaggggcgcccgcgcccccacccctgcccccgccagcggaccggtcccccacccccggtccttccaccatgcacttgctgggcttcttctctgtggcgtgttctctgctcgccgctgcgctgctcccgggtcctcgcgaggcgcccgccgccgccgccgccttcgagtccggactcgacctctcggacgcggagcccgacgcgggcgaggccacggcttatgcaagcaaagatctggaggagcagttacggtctgtgtccagtgtagatgaactcatgactgtactctacccagaatattggaaaatgtacaagtgtcagctaaggaaaggaggctggcaacataacagagaacaggccaacctcaactcaaggacagaagagactataaaatttgctgcagcacattataatacagagatcttgaaaagtattgataatgagtggagaaagactcaatgcatgccacgggaggtgtgtatagatgtggggaaggagtttggagtcgcgacaaacaccttctttaaacctccatgtgtgtccgtctacagatgtgggggttgctgcaatagtgaggggctgcagtgcatgaacaccagcacgagctacctcagcaagacgttatttgaaattacagtgcctctctctcaaggccccaaaccagtaacaatcagttttgccaatcacacttcctgccgatgcatgtctaaactggatgtttacagacaagttcattccattattagacgttccctgccagcaacactaccacagtgtcaggcagcgaacaagacctgccccaccaattacatgtggaataatcacatctgcagatgcctggctcaggaagattttatgttttcctcggatgctggagatgactcaacagatggattccatgacatctgtggaccaaacaaggagctggatgaagagacctgtcagtgtgtctgcagagcggggcttcggcctgccagctgtggaccccacaaagaactagacagaaactcatgccagtgtgtctgtaaaaacaaactcttccccagccaatgtggggccaaccgagaatttgatgaaaacacatgccagtgtgtatgtaaaagaacctgccccagaaatcaacccctaaatcctggaaaatgtgcctgtgaatgtacagaaagtccacagaaatgcttgttaaaaggaaagaagttccaccaccaaacatgcagctgttacagacggccatgtacgaaccgccagaaggcttgtgagccaggattttcatatagtgaagaagtgtgtcgttgtgtcccttcatattggaaaagaccacaaatgagctaagattgtactgttttccagttcatcgattttctattatggaaaactgtgttgccacagtagaactgtctgtgaacagagagacccttgtgggtccatgctaacaaagacaaaagtctgtctttcctgaaccatgtggataactttacagaaatggactggagctcatctgcaaaaggcctcttgtaaagactggttttctgccaatgaccaaacagccaagattttcctcttgtgatttctttaaaagaatgactatataatttatttccactaaaaatattgtttctgcattcatttttatagcaacaacaattggtaaaactcactgtgatcaatatttttatatcatgcaaaatatgtttaaaataaaatgaaaattgtattat

SEQ ID NO: 986 - protein, 419 aa, Homo sapiens
MHLLGFFSVACSLLAAALLPGPREAPAAAAAFESGLDLSDAEPDAGEATAYASKDLEEQLRSVSSVDELMTVLYPEYWKMYKCQLRKGGWQHNREQANLNSRTEETIKFAAAHYNTEILKSIDNEWRKTQCMPREVCIDVGKEFGVATNTFFKPPCVSVYRCGGCCNSEGLQCMNTSTSYLSKTLFEITVPLSQGPKPVTISFANHTSCRCMSKLDVYRQVHSIIRRSLPATLPQCQAANKTCPTNYMWNNHICRCLAQEDFMFSSDAGDDSTDGFHDICGPNKELDEETCQCVCRAGLRPASCGPHKELDRNSCQCVCKNKLFPSQCGANREFDENTCQCVCKRTCPRNQPLNPGKCACECTESPQKCLLKGKKFHHQTCSCYRRPCTNRQKACEPGFSYSEEVCRCVPSYWKRPQMS

SEQ ID NO: 987 - DNA, 380 bp, Homo sapiens
  misc_feature (12)..(12): n is a, c, g, or t
  misc_feature (329)..(329): n is a, c, g, or t
  misc_feature (377)..(377): n is a, c, g, or t
aaaaactcaaanaagaaaaggtttatagggaagattctgcttttgacgaatattgtaacaaaaatcagtttctggagaatgaagacaccaaatttagcctttctgacgatcagcgagatcggtggttttctgacttgtccgattcatcctttgatttcaaaggggaggacagctgggactcgccagtgacagactacagggacatgaagagcgactctgtggccaagctcatcttggagacggtgaaggaggacagcaaggagaggaggcgggacagccgagcccgggagaagccgagactacagagagcccttcttccgaaagaaggncagggactatttggataaaaactctgagaagaggaaagagcagaccgnaaa

SEQ ID NO: 988 - DNA, 417 bp, Homo sapiens
  misc_feature (60)..(60): n is a, c, g, or t
  misc_feature (116)..(116): n is a, c, g, or t
  misc_feature (122)..(122): n is a, c, g, or t
  misc_feature (162)..(162): n is a, c, g, or t
  misc_feature (189)..(189): n is a, c, g, or t
  misc_feature (201)..(201): n is a, c, g, or t
  misc_feature (300)..(300): n is a, c, g, or t
gccccgcagcgccggagttcaaagccggttcccgccaagtcccgtcctgcagcagtctgnctcctctttcaacatgacagatgccgctgtgtccttcgccaaggacttcctggcangtggantggccgcagcaatctccaagacggcggtagcccaatcgancgggtcaagctgctgctgcaggtgcanatgccaagcaancagatcactgcagataagcaatacaaaggcattatagactgcgtggtccgtattcccaaggagcaagggagttctgtccttctggcgccggtaacctgnccaatgtcatcagatacttccccacccaggctcttaacttccgcctttcaaagataaatacaagcagatctttcctgggtggtgtggacaagagaacccagtttttggcttctactt

SEQ ID NO: 989 - DNA, 279 bp, Homo sapiens
  misc_feature (56)..(56): n is a, c, g, or t
gggcggtggtcgccggctggggcgcgacggtggcccagttctgggcggggtgggtncccagccgggggaccccttggcgccgggccctccctctccccgttcttttcccccttcccagttctttcttctgcggaaccttcacccctccagtgggtgcgggaccctaggcaggaggccaggcaccgccgctctgtctgggggccccgaagcagttaacgggccggtcagcaaagtggtaaagccggtgccctctgtgggggctttgggccaggggtctcc

SEQ ID NO: 990 - DNA, 111 bp, Homo sapiens
  misc_feature (17)..(17): n is a, c, g, or t
  misc_feature (51)..(51): n is a, c, g, or t
agtcaagtgacgcgaancggccggcctgggcgccgactgcagaaccgggangctggtggtcatgccggggttcctggttcgcatcctccttctgctgctggttctgctgct

SEQ ID NO: 991 - DNA, 4939 bp, Homo sapiens
ttctctctcctccttgcaattttcctttctgtctgggagcacgccaagatgtcccttgtgactgtccccttctaccagaagagacataggcacttcgaccagtcctaccgtaatattcaaacacggtacctgctggacgaatatgcgtcaaaaaagcgagcttccacccaggcatcttcccagaagtccttgagtcagcggtcgtcttcacagagagcctccagccagacgtccctgggaggaaccatctgcagggtctgtgcgaagcgagtgagcacgcaggaagatgaggagcaggagaacagaagcaggtaccagtccctggtggccgcctatggtgaggccaagcgacacggcttcctcagcgagctggcccacttggaggaggatgtccacctggcacgctcccaggcccgcgacaagctggacaaatacgccattcagcagatgatggaggacaagctggcctgggagagacacacatttgaagagcggataagcagggctcctgagatcctggtgcggctgcgatcccacaccgtctgggagaggatgtctgtgaaactctgcttcaccgtgcaaggatttcccacgcccgtggtgcagtggtacaaagatggcagtctgatttgccaggcggctgaaccgggaaagtacaggattgagagcaactatggcgtacacacactggagatcaacagggcagactttgacgacactgcgacatactcagcagtggccaccaatgcccacggacaagtgtccaccaacgcggcggtggtggtgagaaggttccggggagacgaggaaccattccgttcggtgggactcccgattggattgcccctgtcatcgatgattccgtacacgcacttcgacgtccagtttttggagaagtttggggtcaccttcaggagggaaggcgagacggtcactctcaagtgcaccatgctggtgacgccggacctgaagcgggtgcagccgcgcgccgagtggtaccgcgatgacttgctgttgaaagagtccaagtggacgaagatgttctttggagaaggccaggcctccctgtccttcagccacctgcacaaggacgacgagggcctgtacaccctgcgcatcgtgtctcggggcggcgtcacggaccacagcgccttcctgtttgtcagagatgctgacccgctggtcacaggggcccccggtgcacccatggacttgcagtgccacgacgccaaccgggactacgtcatcgtgacctggaagccgcccaacaccaccactgagagccccgtcatgggctattttgtggaccgatgtgaagtaggaacgaataattgggtgcagtgcaatgatgcaccggtgaaaatctgcaaatacccggtcacagggctttttgaaggaaggtcttacatattccgagtgagggcagtgaacagtgcgggcatcagccgaccctccagggtctctgatgcggtggctgcacttgaccccttggacctcagaaggttacaagccgttcatttggagggagagaaggagattgccatttatcaggatgaccttgaaggtgacgcccaggttccagggcctcccaccggtgtgcacgcttccgagatcagcagaaactatgtcgtcctcagctgggagccacccactccccgtggcaaggacccgctcatgtacttcattgagaagtcggtggtggggagcggcacgtggcagagagtcaacgcccagacggctgtgagatccccgagatatgccgtgtttgacctcatggaagggaagtcttatgtgttccgagtgctgtcagcaaaccggcatggcctgagcgaaccttcggagataacgtcccccattcaggcccaggatgtgaccgttgtcccttctgctccgggtcgggttcttgcttcccgaaacaccaagacgtcggtggtggtgcagtgggaccgacctaagcatgaggaggacctgctgggctactacgtggactgctgtgtggccggaaccaacctctgggagccctgcaaccacaagcccatcggatacaacaggttcgtggtgcacggcttaaccacgggagagcagtacatcttccgagtcaaggcggtcaatgctgtggggatgagtgaaaattcccaggaatcagacgtcataaaagtgcaggccgcactcaccgtcccgtcccatccttatgggattacgctcctcaactgtgacggccactccatgaccctcggctggaaggtcccgaaattcagtggtggctcgcccatcctgggctactacctggacaagcgtgaagttcaccataaaaactggcacgaggtcaattcctcacccagcaaaccgacaatcctaacggtggacggcttgacggaaggctcactctacgagttcaaaatcgccgccgtcaacctggccggcatcggggagccctcagatcccagtgagcacttcaagtgtgaggcctggaccatgccggagcccggtcctgcctacgacttgacgttctgtgaggtcagggacacgtccttggtcatgctgtggaaggcccctgtgtactccggcagcagccctgtttctggatatttcgtggacttcagggaggaggatgctggagagtggatcactgtcgatcagacgacaacagccagccgttatttaaaggtctctgacctgcagcaaggtaagacctatgtcttcagggtccgggcagtcaatgcaaatggcgtggggaagccctcagacacgtcggagcctgtgctggtagaggcgagaccaggcaccaaggaaatcagtgctggtgtcgatgaacagggcaacatctatctgggcttcgactgccaggaaatgacagacgcgtctcagttcacctggtgtaaatcctacgaggagatttcagatgatgagaggtttaaaatcgaaaccgtgggggatcactccaagctgtacttaaagaatccggataaggaggatttagggacttactccgtgtctgtaagtgatacagacggagtgtcctccagttttgttctggacccagaagagctcgagcgtttgatggcattgagcaatgaaataaagaaccccacaattcctctgaaatcggaattagcttatgagatttttgataaggggcgggttcgcttctggctccaggctgagcacttatcaccagatgccagctaccgatttattattaatgacagagaagtctctgacagcgagatacacagaattaaatgtgacaaagctactggcattattgagatggtgatggatcgatttagtattgaaaatgaggggacctacactgtgcagattcatgatgggaaagccaaaagtcagtcttctctagttcttattggagatgcattcaagactgtgctggaagaggctgagtttcaaaggaaagaatttctcaggaaacaaggccctcattttgctgagtacttgcactgggatgtcacggaagaatgtgaagttcgacttgtttgcaaggttgcaaacaccaagaaagaaaccgttttcaaatggctcaaggatgatgctctgtatgaaacggagacactgcctaacctggagaggggaatctgtgagctcctcatcccaaagttgtcaaagaaggaccacggtgaatacaaggcaaccttgaaagatgacagaggccaagatgtgtccatccttgaaatagctggcaaagtgtatgatgatatgattttggcaatgagtagagtctgtgggaaatctgcttcgccactgaaggtactctgcaccccagaaggaatacgacttcagtgtttcatgaagtattttacagacgaaatgaaagtgaactggtgtcacaaagatgctaagatctcatccagtgagcatatgagaatcggggggagtgaagagatggcttggctgcagatatgtgagccgactgagaaggataaaggaaaatacacttttgagattttcgatggcaaagacaaccatcaacgctcccttgacctgtccggacaagcttttgatgaagcatttgcagaattccagcaattcaaagctgctgcttttgcagagaagaatcgtggcaggttgatcggcggcttgcctgacgtggtgaccatcatggaagggaagaccttgaatctgacctgcacggtgtttggaaaccctgaccccgaagtgatttggttcaagaacgaccaggacatccagctcagcgagcacttctcggtgaaggtggagcaggccaagtacgtcagcatgaccatcaaaggcgtgacctccgaggactcgggcaagtacagcatcaacatcaagaataagtatggcggggagaagatcgacgtgacggtgagcgtgtacaaacacggggagaagatcccggacatggccccgccccagcaagccaagcccaagctcatccccgcgtctgcctcagcggcaggccagtgaaggcgttttcctagcctggagatgggaaaatatgcttggcagagacaggaatgctgtgtgcttgttccaaatgagcagctggcatccgagtggtgtcctgtgtgggctgatagttgatcacacattgtgcttttgatttttgcatttggtgatgaatattttatacccgtctaagggagaaagctaatgttttccacaagactgaacaacgtgtatttacacgagggtagacggcagatgcctgacagagagtgggttggcagacaacacactagcattttcacgggtgtgggcacatgggtgtggcacctggacgtgtgcagcatgtggcggtctctgtgtgaagccaccgtgcttctctttggggggccgcgagatctagcatctctgaaatcctggctgtcgaggctttgaagcatgtgttacctggttaagcttgttttctcttgctttaggcaaataaaagtttaaaaatcaaaaaaaaaaaaaaaaa

SEQ ID NO: 992 - protein, 1465 aa, Homo sapiens
MSLVTVPFYQKRHRHFDQSYRNIQTRYLLDEYASKKRASTQASSQKSLSQRSSSQRASSQTSLGGTICRVCAKRVSTQEDEEQENRSRYQSLVAAYGEAKRHGFLSELAHLEEDVHLARSQARDKLDKYAIQQMMEDKLAWERHTFEERISRAPEILVRLRSHTVWERMSVKLCFTVQGFPTPVVQWYKDGSLICQAAEPGKYRIESNYGVHTLEINRADFDDTATYSAVATNAHGQVSTNAAVVVRRFRGDEEPFRSVGLPIGLPLSSMIPYTHFDVQFLEKFGVTFRREGETVTLKCTMLVTPDLKRVQPRAEWYRDDLLLKESKWTKMFFGEGQASLSFSHLHKDDEGLYTLRIVSRGGVTDHSAFLFVRDADPLVTGAPGAPMDLQCHDANRDYVIVTWKPPNTTTESPVMGYFVDRCEVGTNNWVQCNDAPVKICKYPVTGLFEGRSYIFRVRAVNSAGISRPSRVSDAVAALDPLDLRRLQAVHLEGEKEIAIYQDDLEGDAQVPGPPTGVHASEISRNYVVLSWEPPTPRGKDPLMYFIEKSVVGSGTWQRVNAQTAVRSPRYAVFDLMEGKSYVFRVLSANRHGLSEPSEITSPIQAQDVTVVPSAPGRVLASRNTKTSVVVQWDRPKHEEDLLGYYVDCCVAGTNLWEPCNHKPIGYNRFVVHGLTTGEQYIFRVKAVNAVGMSENSQESDVIKVQAALTVPSHPYGITLLNCDGHSMTLGWKVPKFSGGSPILGYYLDKREVHHKNWHEVNSSPSKPTILTVDGLTEGSLYEFKIAAVNLAGIGEPSDPSEHFKCEAWTMPEPGPAYDLTFCEVRDTSLVMLWKAPVYSGSSPVSGYFVDFREEDAGEWITVDQTTTASRYLKVSDLQQGKTYVFRVRAVNANGVGKPSDTSEPVLVEARPGTKEISAGVDEQGNIYLGFDCQEMTDASQFTWCKSYEEISDDERFKIETVGDHSKLYLKNPDKEDLGTYSVSVSDTDGVSSSFVLDPEELERLMALSNEIKNPTIPLKSELAYEIFDKGRVRFWLQAEHLSPDASYRFIINDREVSDSEIHRIKCDKATGIIEMVMDRFSIENEGTYTVQIHDGKAKSQSSLVLIGDAFKTVLEEAEFQRKEFLRKQGPHFAEYLHWDVTEECEVRLVCKVANTKKETVFKWLKDDALYETETLPNLERGICELLIPKLSKKDHGEYKATLKDDRGQDVSILEIAGKVYDDMILAMSRVCGKSASPLKVLCTPEGIRLQCFMKYFTDEMKVNWCHKDAKISSSEHMRIGGSEEMAWLQICEPTEKDKGKYTFEIFDGKDNHQRSLDLSGQAFDEAFAEFQQFKAAAFAEKNRGRLIGGLPDVVTIMEGKTLNLTCTVFGNPDPEVIWFKNDQDIQLSEHFSVKVEQAKYVSMTIKGVTSEDSGKYSINIKNKYGGEKIDVTVSVYKHGEKIPDMAPPQQAKPKLIPASASAAGQ

SEQ ID NO: 993 - DNA, 1938 bp, Homo sapiens
ggccagcatctgcctccactgctctgtgctgggatcatggaacttgcactgctgtgtgggctggtggtgatggctggtgtgattccaatccagggcgggatcctgaacctgaacaagatggtcaagcaagtgactgggaaaatgcccatcctctcctactggccctacggctgtcactgcggactaggtggcagaggccaacccaaagatgccacggactggtgctgccagacccatgactgctgctatgaccacctgaagacccaggggtgcagcatctacaaggactattacagatacaacttttcccaggggaacatccactgctctgacaagggaagctggtgtgagcagcagctgtgtgcctgtgacaaggaggtggccttctgcctgaagcgcaacctggacacctaccagaagcgactgcgtttctactggcggccccactgccgggggcagacccctgggtgctagaagcccacaccctctaccctgttcctcagcatggagctctggcatccccacctcagtatctaacctgaaccagcctggcttttcaaacactccggggggaggtagtcccagcctcccccggaaccctctaccaatgccttctgaccttctgaagctttccgaatcctcccagttgaggcagtagctgtgtcctctgagggtggatgggaatcttgggagaagcccaagcaagggagccctcagaggtggtgtttggaccaaagcatcggggtggggaggggtctgccgctgtcccccacctgctggcccccttgtccttcctcaccccctccaatatagtctcggagctacaaccgcagcagccactataaagggcaatattgatctttctgtccatgtggctctatcttttaaaacctcaaggccctccactgtcctaagataaagcctctcataggcactggggaccctgcacagtctggccatgtgaccctctccccaggcaagctctgaagtccctgcaggtggaggccatgcctgtcttaaactcagttgcatccctggtgcccaaagcaacaccagaaccaagaaggagctccataaatccttcttgggtgaagcctagacaaagccgccaggtcttgtggctccaggcaccagagccttgagtactttctcctgcctccaggcattggctcagggtgaattacaaggggctactgaatggctattactttcatcacgactgatccccacctcctcagggtcaaagggctactttctggaagtctccccaggctgactccttctccctgactgcaagggctcactccctcctccaagctcccacaatgcttcatggctctgccgcttacctagcttggcctagagtggcaaatggaacttctctgatctcccccaactagactggagcccccgaaggatggagaccatgtctgtgccatctctgtttcccctgttttcccacatactaggtgctcaattcatgcctgtgaatggcgtgagcccataatggatacacagaggttgcagcagatggtgtgggtacctcacccagatatcatccaggcccaaggcccctctccctgagtgaggccaggtgttggcagccaactgctccaatctgcctccttcccctaaatactgccctggtctagtgggagctgccttccccctgccccacctctcccaccaagaggccacctgtcactcatggccaggagagtgacaccatggagggtacaattgccagctcccccgtgtctgtgcaggattgtctgggttgaatgacactctcaaattgttcctgggatcgggctgaggccaggcctctcctggaaccacctctctgcttggtctgaccccttggcctatccagttttcctggttccctcacaggtttctccagaaagtactccctcagtaaagcatttgcacaagaaa

SEQ ID NO: 994 - protein, 145 aa, Homo sapiens
MELALLCGLVVMAGVIPIQGGILNLNKMVKQVTGKMPILSYWPYGCHCGLGGRGQPKDATDWCCQTHDCCYDHLKTQGCSIYKDYYRYNFSQGNIHCSDKGSWCEQQLCACDKEVAFCLKRNLDTYQKRLRFYWRPHCRGQTPGC

SEQ ID NO: 995 - DNA, 383 bp, Homo sapiens
tttttttttttttttttggtctgagaatgatggacatttagacactggcgccaggtttgcgcctgaccggcgccacacaggggtgggcggagcaaagacacacaggtgggctacaggtgtcacacggcaccagccagggcccggggtggctggggtgaggatgggtgtttggccactgaccaggagtcaggtcaagtccagctggtcagtgccacgggctccaggaggggagggcagtgccataaccctcctggtgtccagcgtcaccaggcggtcgtcacataaagcagcctcggcccggggcccgggtctgcagcatgtgggcagggtcagcttttcttccatggcgggtggcattgtctggggcggatactggctctcga

SEQ ID NO: 996 - DNA, 297 bp, Homo sapiens
  misc_feature (253)..(253): n is a, c, g, or t
  misc_feature (273)..(273): n is a, c, g, or t
  misc_feature (287)..(287): n is a, c, g, or t
  misc_feature (293)..(293): n is a, c, g, or t
aatttggattaacatctttaggaaacacgagttttacagacttttcttgcaaacatcctagagaactgcgagaaaagattcctgttaagcagcccaggatctgctctgaaaccaggtctctaagtgaacatttctcaggcatggatgcatttgagagtcaaattgttgagtcgaagatgaaaacctcttcatcacatagctcagaagctggcaaatctggctgtgacttcaagcatgccccaccaacctatgnggatgtcattgctggacatnttttagatatctcngattcnccta

SEQ ID NO: 997 - DNA, 610 bp, Homo sapiens
agcaaaaacagcttttttattgtggtagtttgtggtatgtgctcctggatcatgcagaaaaaaggctgggccctcagttagctccgggagccattcttaggaccctccggctgcacacagagaggggctgggtagctggctgggctggggcacgcattcactgggctggcacaggctgaggggtctctcgcccactatcattaggcccctccagcccgttatgctcaccccccggctcaggatgctccagggcgtgccgggtatcagcctgccagagctgcaccaggtccgtcggggtctttcctgccaggttcttggtcatcatgtcagccccatgcaggagcagcagtttgatgattttgtagcggttgagcctcacagcgtcatgcagggcagtatccccttccctgtctctggcattgatttccaggcccagggatagaaagtgctccacaatctccacctgccctgtccggactgccacgtgcagcggggtgctcagcagcttatccctcacattggtgtctgctccatggctttgcagaagttcaccacctctaagtgccccgcgcaggccaatgcatgctgtcagtccagcgatcctgaagtc

SEQ ID NO: 998 - DNA, 330 bp, Homo sapiens
  misc_feature (111)..(111): n is a, c, g, or t
  misc_feature (138)..(138): n is a, c, g, or t
  misc_feature (174)..(174): n is a, c, g, or t
  misc_feature (300)..(300): n is a, c, g, or t
aaacccaaaattaaacatgagagaaacccaaagtttcttccaaaattacatttatttttctcaattcagaaaagtctcaacaccacaatttatctgtttaatgttttcatntacatttggctttatcccaaaaagggnttaacagtgtcaccaagttaccaggtctctgtttcntcatatttacacaagatgaaggaaactcaatctgttcgtatttgccccaggtaataggttctatgtagtgacaggcatttcactatttgacttagtgtttgccaaaatgaaagtaaaggggaattngggtccagagctgaggacagatccatttgg

SEQ ID NO: 999 - DNA, 697 bp, Homo sapiens
atccttaattaaattaatcttcccccccccccccccggccgcggcaaccagcacaccccggcacctcctctgcggcagctgcgcctcgcaagcgcagtgccgcagcgcacgccggagtggctgtagctgcccggcgcggcgccgccctgcgcgggctgtgggctgcgggctgcgcccccgctgctggccagctctgcacggctgcgggctctgcggcgcccggtgctctgcaacgctgcggcgggcggcatgggataacgcggccatggtgcgccgagatcgcctccgcaggatgagggagtggtgggtccaggtggggctgctggccgtgcccctgcttgctgcgtacctgcacatcccaccccctcagctctcccctgcccttcactcatggaagtcttcaggcaagtttttcacttacaagggactgcgtatcttctaccaagactctgtgggtgtggttggaagtccagagatagttgtgcttttacacggttttccaacatccagctacgactggtacaagatttgggaaggtctgaccttgaggtttcatcgggtgattgcccttgatttcttaagctatggcttcagtgacaaaccgagaccacatcactattccatatttgagcaggccagcatcgtggaagcgctattgcggcatctggagctccagaacccgcagatcaaccttctt

SEQ ID NO: 1000 - DNA, 420 bp, Homo sapiens
  misc_feature (112)..(113): n is a, c, g, or t
  misc_feature (284)..(284): n is a, c, g, or t
aaatacatttcatttcatttgtacaatgagaaaaaagatgaaaaggcaaggttgttattgcagttgacattgtcagccctgccttttggctttatgtaatttaaaatagaannggggaaggaggacaaaacagaagctcaactttagaaaccaatggacatcacctccctctttgagaggagctgcttgtgaaccaggctccagtcttccctgtggcctctcacagtaacccctgcccctttcttacctcacaggggcaagagggactctaaagagggcgtacnaattagaaggcacctgcaagccctccttcctcaagcaaggaaatcaatgtggaagccccagaaggacattttatctcagagagagcatgcttggccacaggaccccagttgcagcctgcttcctgcaccgtgggtc

SEQ ID NO: 1001 - DNA, 4249 bp, Homo sapiens
gggaaagcgaggagccgcggcggcgtggagccggcgggcccgggcgggggctccccggagccctaccaccccaccctgggcatctacgcccgctgcatccggaacccaggggtgcagcacttccagcgggacacgctgtgcgggccctacgccgagagcttcggcgagatcgccagcggcttctggcaggccacagctattttcctggctgtgggaatctttattctctgcatggtggccttggtgtccgtcttcaccatgtgtgtacagagcatcatgaagaaaagcatcttcaatgtctgtgggctgttgcaaggaattgcaggtctattccttatcctcggtttgatactctaccctgctggctggggttgccagaaggccatagactactgtggacattatgcatctgcctacaaacctggagactgctccttgggctgggccttttataccgccattgggggcacagtcctcactttcatctgtgctgtcttctctgcacaagcagaaattgcaacctctagtgacaaagtacaggaagaaattgaagaggggaaaaacctgatctgcctcctttagtttggaagagacaatgccattttctcccttgagtaatcttgtgaaacagtccacagtttcatcatttgagtcaagtggagaactaacctttacctaccaaagccacgttccacggcccgaggcttaaacaggaccaatgagaggccacatccagctacgcaaagttactggacatgcggtctgcagtgcacattataaggaatggaacatgaaaatagtatataatcctagacctggagttgccaagttctgtcagactccatctcccccaggttcaatgatggatgataatctaaatcattagggcagcagtttctctggtaacggaagagaccgtccgccagatctgcaggctgtttctgctccaacactgcttgcttgtgagcatctctgcctcagaatggggttttgggttggagttcttgttttcctctgttctttcaagttgtctccaacgaacagaaaactataaacttactggggacaggatgtgtgctaaagggcacagcaagacactgtcttttgcttagctgaccaaaggggtcagcagggatggcgtggagtcatgctgtggaacttattctaggctgaatcctagggtaaggtggatcaactgaactgtcactccagagattttagaaatttgagtaaagaaacaataaggacctatacaatcatatgagaacaaaaatatgaaatcttgctagtgaagacgtattttttcttcttcccagcagccaggctagcaccagttctggcccagtctcctcttcttctggagatcacatgtttttcttctaaggttaggattgtgctttgactgcgaaaggaaacctcactgtttcctccttccagggactgaggtctccaagctagctgtggcttatgcagatgttcactgggaggacctgccagaatctcggcacttggggggagacctttactcccagtttggtgaccatgctgtagtcagctctatttccaatcccgacagtagcagaatggcattctacaacaaaaagaagctagttatgggagttaagtttttgtagttactggtgttgatcctgaaagcagactgagataacattaaattgctgcaactgaagaactgcagccaagaccttaattccaggaaagcacagaggacaaagttaattcaaaaagaggcgctagatcaaggtcacagcactgcctacacctgtttacaaaaagaatcaaataccactatgaataaggattcaggggtttttaatctactttccataaattaccaatatcactgattcaggaagatagtatctcagaatgaccagagcagcacagaaacaagctactctgacattatgggagcttcaaaattgtatcatgatacagaaacactccttagcactttaagaaagtgagatggaactgccagatttctggaaggagaaaaagtgtaggtatttgggttcattaatctgctcacttgaggactttgttttgaaaaagtaccttctgtggacaaggtattgtgctaccagctatacaaccctgacttcagagtttgcaaccttgccctgagtgaatcatgttaaagctgtctgagtctaaagcaccgtatcttggtgcagaacagataattatacagagatggaatgggacaaccgcagttttactacattctggtgtttggcctatatgagaaaccatcttctcacagattaagggctaagggcaaaaggggtgggaggtgtggaactagccttaatgagtttcccattcctgaaccaaaattcaaagtgagtgagatgtaaatcctgtgattttggtgaagaaaaaaacgggtatcttcatagcagcctaggaaaccttaaccatatctctaacaccacacagaaagaggctggaggagccactggacaaagcttctgtctctgtgtgtacatttataatgttctaaccaagtctcaaaccttgatgaaaaacacaaaatttttccataaacttatcagaagactcacttttctttctttcttggatagagaaaccattttctgacactaggtttacaatctcagtgtccttacaagttaagtcctaagctcacaggatcctccgagcatgtccatcacctgctctttggctaaggtggcagtgtacctctagatcaacctgggaacagtcacaagggagtgtgacttcttggccataataaactcactcgatagtgtttatgttattaatctgaatgcaacagaagacaaaagcacaggcatgcacacacacagaaccccaaaccactaaaaactacctaaacactgacttagtaaatagtaaaaaggtaatgttgggacttttaaaccttgaatccattagccaggcttgggatgaaaggaccatctaaaatcatgctagtctaaaccatgctcttccacacagctgtttaaaaaccactgggtatgaggaatatgctagaaagaaatgttaaaaatagattgttggctcacacttatttttctaataaataggaccattattactaccaggaaagtcttatttattttgcctgaaattggcttaaagaaagtctcatgacgggatgggatgggctgcgcttctcaatgaactctgaggcagaaatatttgccttggattctgtggattctttaaacctgtgtgctaataattcaaacaatgttgcattaattgtataagggtttttgtatagttttcaaacatctgtggtgtaatgatctttgttaaacatatattctgtaaagtgccatagtctttttttatgtgtagcatatttaaaaatatatatgtatattatacatacacaagtttgtgtgaaagatgtgcaataacaaaggtgtatgtatgttttgttgttttgttttggaaactggacaggagtcaaaacagggatgtttgtttctgttttggcaaaggagagttccacatttttgccttcatggcttattcagtaacccataattttaatgctacacaaatcttatgtgaagaaaagactggtatgaaatcattttttcctgggtctaaaataatcgctagtgttatgtcaaagttaagcccgcacgccaggcccagttaatgctagtctttcatgtgaaatgtgaagctgccatgttgccttttctcttagtaggataactagtagctggtacataatcactgaggagctatttcttaacatgcttttatagaccatgctaatgctagaccagtatttaagggctaatctcacacctccttagctgtaagagtctggcttagaacagacctctctgtgcaataacttgtggccactggaaatccctgggccggcatttgtattggggttgcaatgactcccaagggccaaaagagttaaaggcacgactgggatttcttctgagactgtggtgaaactccttccaaggctgagggggtcagtaggtgctctggagggactcggcaccacttgatattcaacagccacttgagccaaatataaaattgtatttacagctgatggactcaatttgagccttcaaacttgtagttatcctattatattgtaaactaatacattgtctagcattgatttggttcctgtgcatatgtattttcactatgtgctcccctccccagatcttaattaaaccagattttgcaattc

SEQ ID NO: 1002 - protein, 193 aa, Homo sapiens
GKARSRGGVEPAGPGGGSPEPYHPTLGIYARCIRNPGVQHFQRDTLCGPYAESFGEIASGFWQATAIFLAVGIFILCMVALVSVFTMCVQSIMKKSIFNVCGLLQGIAGLFLILGLILYPAGWGCQKAIDYCGHYASAYKPGDCSLGWAFYTAIGGTVLTFICAVFSAQAEIATSSDKVQEEIEEGKNLICLL

SEQ ID NO: 1003 - DNA, 551 bp, Homo sapiens
  misc_feature (42)..(42): n is a, c, g, or t
tagctcggtaccctgctgaagaatgttggttggaggacctgnggtatctaaaactttgacaactaaggtcagtgaagcagcactcaaaacattctgaattgttaatgtgtactttccagagtcatttctgttggcattttcaatggtcagtgatgtacgagagtctgtggtatcaacataagctctagtacggaggtcagtgtctggcttactccacaagacattgggtactggtcttcctcggaaaggcacagtcatggtaaatgaggcaccagccttgacaatcaaggtcttcctcatttcactgtcaatatcaaataaaggttcttcttctctttcctttgctatctgagggtcagagctatcactggggtcactagcaccaaccttattgacagattttactctgaaaacatattcagctcctgttgttagtccgcttattgtatattctgtccctcgtaagctctgaatggaagttttccagtcagtgtcatcagattttttgtattctacagtatatcctaccatctcctccatccaaacccaaa

SEQ ID NO: 1004 - DNA, 322 bp, Homo sapiens
tttttttttttttttttttttttttttttttatttaaaagggcatagattctcaaaaagtcagagatgaagggatcccagggaccctttaacctaggggttttcaaactctcatgtgcatcaaaatcacctaaaagggtggcctcaccccaaagtttccaatttagtggatctggggggggggctgatcatttgcatcccaggtgatgtaaacgctgctggtcccaggaccacacttggagaaccactgatttgatacagcccccaatttcatagataatgggaacaaaaagggccgccaaacaaaaatgacatgcccaagt

SEQ ID NO: 1005 - DNA, 2171 bp, Homo sapiens
tcaacacgtgaattcccacagaagctgctcagggactatccatggcctccccgtggccaacttgagtctgctctgcagctttaggcccgacttggaaggcccatgggctgcagatgaggaaactgaggtccagacagccgaagagtggtagtgtccaggacacacaactgggccggcggcggcggctgccccgagggacgcggccctaggcggtggcgatggggaccgcccggatcgcacccggcctggcgctcctgctctgctgccccgtgctcagctccgcgtacgcgctggtggatgcagatgacgtcatgactaaagaggaacagatcttcctgctgcaccgtgctcaggcccagtgcgaaaaacggctcaaggaggtcctgcagaggccagccagcataatggaatcagacaagggatggacatctgcgtccacatcagggaagcccaggaaagataaggcatctgggaagctctaccctgagtctgaggaggacaaggaggcacccactggcagcaggtaccgagggcgcccctgtctgccggaatgggaccacatcctgtgctggccgctgggggcaccaggtgaggtggtggctgtgccctgtccggactacatttatgacttcaatcacaaaggccatgcctaccgacgctgtgaccgcaatggcagctgggagctggtgcctgggcacaacaggacgtgggccaactacagcgagtgtgtcaaatttctcaccaatgagactcgtgaacgggaggtgtttgaccgcctgggcatgatttacaccgtgggctactccgtgtccctggcgtccctcaccgtagctgtgctcatcctggcctactttaggcggctgcactgcacgcgcaactacatccacatgcacctgttcctgtccttcatgctgcgcgccgtgagcatcttcgtcaaggacgctgtgctctactctggcgccacgcttgatgaggctgagcgcctcaccgaggaggagctgcgcgccatcgcccaggcgcccccgccgcctgccaccgccgctgccggctacgcgggctgcagggtggctgtgaccttcttcctttacttcctggccaccaactactactggattctggtggaggggctgtacctgcacagcctcatcttcatggccttcttctcagagaagaagtacctgtggggcttcacagtcttcggctggggtctgcccgctgtcttcgtggctgtgtgggtcagtgtcagagctaccctggccaacaccgggtgctgggacttgagctccgggaacaaaaagtggatcatccaggtgcccatcctggcctccattgtgctcaacttcatcctcttcatcaatatcgtccgggtgctcgccaccaagctgcgggagaccaacgccggccggtgtgacacacggcagcagtaccggaagctgctcaaatccacgctggtgctcatgcccctctttggcgtccactacattgtcttcatggccacaccatacaccgaggtctcagggacgctctggcaagtccagatgcactatgagatgctcttcaactccttccagggattttttgtcgcaatcatatactgtttctgcaacggcgaggtacaagctgagatcaagaaatcttggagccgctggacactggcactggacttcaagcgaaaggcacgcagcgggagcagcagctatagctacggccccatggtgtcccacacaagtgtgaccaatgtcggcccccgtgtgggactcggcctgcccctcagcccccgcctactgcccactgccaccaccaacggccaccctcagctgcctggccatgccaagccagggaccccagccctggagaccctcgagaccacaccacctgccatggctgctcccaaggacgatgggttcctcaacggctcctgctcaggcctggacgaggaggcctctgggcctgagcggccacctgccctgctacaggaagagtgggagacagtcatgtgaccaggcgctgggggctggacctgctgacatagtggatggacagatggaccaaaagatgggtggttgaatgatttcccactcagggcctggggccaagaggaaaaacagggaaaaaaagaaaaaaaaaaagaaaagaaaaaaaggaaaaaaaaaaaaaaaaaaaaaaaaaaa

SEQ ID NO: 1006 - protein, 593 aa, Homo sapiens
MGTARIAPGLALLLCCPVLSSAYALVDADDVMTKEEQIFLLHRAQAQCEKRLKEVLQRPASIMESDKGWTSASTSGKPRKDKASGKLYPESEEDKEAPTGSRYRGRPCLPEWDHILCWPLGAPGEVVAVPCPDYIYDFNHKGHAYRRCDRNGSWELVPGHNRTWANYSECVKFLTNETREREVFDRLGMIYTVGYSVSLASLTVAVLILAYFRRLHCTRNYIHMHLFLSFMLRAVSIFVKDAVLYSGATLDEAERLTEEELRAIAQAPPPPATAAAGYAGCRVAVTFFLYFLATNYYWILVEGLYLHSLIFMAFFSEKKYLWGFTVFGWGLPAVFVAVWVSVRATLANTGCWDLSSGNKKWIIQVPILASIVLNFILFINIVRVLATKLRETNAGRCDTRQQYRKLLKSTLVLMPLFGVHYIVFMATPYTEVSGTLWQVQMHYEMLFNSFQGFFVAIIYCFCNGEVQAEIKKSWSRWTLALDFKRKARSGSSSYSYGPMVSHTSVTNVGPRVGLGLPLSPRLLPTATTNGHPQLPGHAKPGTPALETLETTPPAMAAPKDDGFLNGSCSGLDEEASGPERPPALLQEEWETVM

SEQ ID NO: 1007 - DNA, 1882 bp, Homo sapiens
gggcaggaagacggcgctgcccggaggagcggggcgggcgggcgcgcgggggagcgggcggcgggcgggagccaggcccgggcgggggcgggggcggcggggccagaagaggcggcgggccgcgctccggccggtctgcggcgttggccttggctttggctttggcggcggcggtggagaagatgctgcagtccctggccggcagctcgtgcgtgcgcctggtggagcggcaccgctcggcctggtgcttcggcttcctggtgctgggctacttgctctacctggtcttcggcgcagtggtcttctcctcggtggagctgccctatgaggacctgctgcgccaggagctgcgcaagctgaagcgacgcttcttggaggagcacgagtgcctgtctgagcagcagctggagcagttcctgggccgggtgctggaggccagcaactacggcgtgtcggtgctcagcaacgcctcgggcaactggaactgggacttcacctccgcgctcttcttcgccagcaccgtgctctccaccacaggttatggccacaccgtgcccttgtcagatggaggtaaggccttctgcatcatctactccgtcattggcattcccttcaccctcctgttcctgacggctgtggtccagcgcatcaccgtgcacgtcacccgcaggccggtcctctacttccacatccgctggggcttctccaagcaggtggtggccatcgtccatgccgtgctccttgggtttgtcactgtgtcctgcttcttcttcatcccggccgctgtcttctcagtcctggaggatgactggaacttcctggaatccttttatttttgttttatttccctgagcaccattggcctgggggattatgtgcctggggaaggctacaatcaaaaattcagagagctctataagattgggatcacgtgttacctgctacttggccttattgccatgttggtagttctggaaaccttctgtgaactccatgagctgaaaaaattcagaaaaatgttctatgtgaagaaggacaaggacgaggatcaggtgcacatcatagagcatgaccaactgtccttctcctcgatcacagaccaggcagctggcatgaaagaggaccagaagcaaaatgagccttttgtggccacccagtcatctgcctgcgtggatggccctgcaaaccattgagcgtaggatttgttgcattatgctagagcaccagggtcagggtgcaaggaagaggcttaagtatgttcatttttatcagaatgcaaaagcgaaaattatgtcactttaagaaatagctactgtttgcaatgtcttattaaaaaacaacaaaaaaagacacatggaacaaagaagctgtgaccccagcaggatgtctaatatgtgaggaaatgagatgtccacctaaaattcatatgtgacaaaattatctcgaccttacataggaggagaatacttgaagcagtatgctgctgtggttagaagcagattttatacttttaactggaaactttggggtttgcatttagatcatttagctgatggctaaatagcaaaatttatatttagaagcaaaaaaaaaaagcatagagatgtgttttataaataggtttatgtgtactggtttgcatgtacccacccaaaatgattatttttggagaatctaagtcaaactcactatttataatgcataggtaaccattaactatgtacatataaagtataaatatgtttatattctgtacatatggtttaggtcaccagatcctagtgtagttctgaaactaagactatagatattttgtttcttttgatttctctttatactaaagaatccagagttgctacaataaaataaggggaataataaa

SEQ ID NO: 1008 - protein, 336 aa, Homo sapiens
MLQSLAGSSCVRLVERHRSAWCFGFLVLGYLLYLVFGAVVFSSVELPYEDLLRQELRKLKRRFLEEHECLSEQQLEQFLGRVLEASNYGVSVLSNASGNWNWDFTSALFFASTVLSTTGYGHTVPLSDGGKAFCIIYSVIGIPFTLLFLTAVVQRITVHVTRRPVLYFHIRWGFSKQVVAIVHAVLLGFVTVSCFFFIPAAVFSVLEDDWNFLESFYFCFISLSTIGLGDYVPGEGYNQKFRELYKIGITCYLLLGLIAMLVVLETFCELHELKKFRKMFYVKKDKDEDQVHIIEHDQLSFSSITDQAAGMKEDQKQNEPFVATQSSACVDGPANH

SEQ ID NO: 1009 - DNA, 500 bp, Homo sapiens
  misc_feature (383)..(383): n is a, c, g, or t
  misc_feature (463)..(463): n is a, c, g, or t
gccagggtgagccccgcgtcccggcgccactcggcccgcgcctctccgcgccgccccgcgctccgcaccgcgccctctccgcgtccccgcccgcgcggccggaccgggcagccagaaaaatcatttttcttctctgggaaggtgaacatttgtagcattgatttcccggatctggtaacatggcaaaagatgccggtctaattgaagccaacggagaactcaaggtcttcatagaccagaaccttagtcccgggaaaggcgtggtgtccctcgtggccgttcacccctccaccgtcaacccgctcgggaagcagctcttgccaaaaacctttggacagtccaatgtcaacattgcccagcaagtggtaattggtacgcctcangagaccggcagcgtcaaacaccctgggtgggtaggaagcccacacacccccagcactcactttgcctctcaagaaccagncttccgactcctcaccttgggtctgccgggaagcgca

SEQ ID NO: 1010 - DNA, 2786 bp, Homo sapiens
agcactctccagcctctcaccgcaaaattacacaccccagtacaccagcagaggaaacttataacctcgggaggcgggtccttcccctcagtgcggtcacatacttccagaagagcggaccagggctgctgccagcacctgccactcagagcgcctctgtcgctgggacccttcagaactctctttgctcacaagttaccaaaaaaaaaagagccaacatgttggtattgctggctggtatctttgtggtccacatcgctactgttattatgctatttgttagcaccattgccaatgtctggttggtttccaatacggtagatgcatcagtaggtctttggaaaaactgtaccaacattagctgcagtgacagcctgtcatatgccagtgaagatgccctcaagacagtgcaggccttcatgattctctctatcatcttctgtgtcattgccctcctggtcttcgtgttccagctcttcaccatggagaagggaaaccggttcttcctctcaggggccaccacactggtgtgctggctgtgcattcttgtgggggtgtccatctacactagtcattatgcgaatcgtgatggaacgcagtatcaccacggctattcctacatcctgggctggatctgcttctgcttcagcttcatcatcggcgttctctatctggtcctgagaaagaaataaggccggacgagttcatggggatctggggggtggggaggaggaagccgttgaatctgggagggaagtggaggttgctgtacaggaaaaaccgagataggggaggggggagggggaagcaaaggggggaggtcaaatcccaaaccattactgaggggattctctactgccaagcccctgccctggggagaaagtagttggctagtactttgatgctcccttgatggggtccagagagcctccctgcagccaccagacttggcctccagctgttcttagtgacacacactgtctggggccccatcagctgccacaacaccagccccacttctgggtcatgcactgaggtccacagacctactgcactgagttaaaatagcggtacaagttctggcaagagcagatactgtctttgtgctgaatacgctaagcctggaagccatcctgcccttctgacccaaagcaaaacatcacattccagtctgaagtgcctactggggggctttggcctgtgagccattgtccctctttggaacagatatttagctctgtggaattcagtgacaaaatgggaggaggaaagagagtttgtaaggtcatgctggtgggttagctaaaccaagaaggagaccttttcacaatggaaaacctgggggatggtcagagcccagtcgagacctcacacacggctgtccctcatggagacctcatgccatggtctttgctaggcctcttgctgaaagccaaggcagctcttctggagtttctctaaagtcactagtgaacaattcggtggtaaaagtaccacacaaactatgggatccaaggggcagtcttgcaacagtgccatgttagggttatgtttttaggattcccctcaatgcagtcagtgtttcttttaagtatacaacaggagagagatggacatggctcattgtagcacaatcctattactcttcctctaacatttttgaggaagttttgtctaattatcaatattgaggatcagggctcctaggctcagtggtagctctggcttagacaccacctggagtgatcacctcttggggaccctgcctatcccacttcacaggtgaggcatggcaattctggaagctgattaaaacacacataaaccaaaaccaaacaacaggcccttgggtgaaaggtgctatataattgtgaagtattaagcctaccgtatttcagccatgataagaacagagtgcctgcattcccaggaaaatacgaaaatcccatgagataaataaaaatataggtgatgggcagatcttttctttaaaataaaaaagcaaaaactcttgtggtacctagtcagatggtagacgagctgtctgctgccgcaggagcacctctatacaggacttagaagtagtatgttattcctggttaagcaggcattgctttgccctggagcagctattttaagccatctcagattctgtctaaaggggttttttgggaagacgttttctttatcgccctgagaagatctaccccagggagaatctgagacatcttgcctacttttctttattagctttctcctcatccatttcttttatacctttcctttttggggagttgttatgccatgatttttggtatttatgtaaaaggattattactaattctatttctctatgtttattctagttaaggaaatgttgagggcaagccaccaaattacctaggctgaggttagagagattggccagcaaaaactgtgggaagatgaactttgtcattatgatttcattatcacatgattatagaaggctgtcttagtgcaaaaaacatacttacatttcagacatatccaaagggaatactcacattttgttaagaagttgaactatgactggagtaaaccatgtattcccttatcttttactttttttctgtgacatttatgtctcatgtaatttgcattactctggtggattgttctagtactgtattgggcttcttcgttaatagattatttcatatactataattgtaaatattttgatacaaatgtttataactctagggatataaaaacagattctgattcccttcaaaaaaaaaaaa

SEQ ID NO: 1011 - protein, 157 aa, Homo sapiens
MLVLLAGIFVVHIATVIMLFVSTIANVWLVSNTVDASVGLWKNCTNISCSDSLSYASEDALKTVQAFMILSIIFCVIALLVFVFQLFTMEKGNRFFLSGATTLVCWLCILVGVSIYTSHYANRDGTQYHHGYSYILGWICFCFSFIIGVLYLVLRKK

SEQ ID NO: 1012 - DNA, 286 bp, Homo sapiens
ttttttttttttttttttttttttttgccaggcccgatggtttttatttctttcagttatgcttgcggctggagtggggacgggggaagagcccatggcctgggctccctggagaccaggtctgatgataccagctgccataggtgaggtaccaggcaaaggtgcccactgcggcgcccaccaccttgtgagtgtactggtggaaatagatgacggtacagagcagcaagaagttccagaggcccagcagcagcacgttcagcaggaagacaaggcgcagtggggc

SEQ ID NO: 1013 - DNA, 6465 bp, Homo sapiens
ggccgcgtcttctgcgtcacgaacagccagtccattgaagacttgaacaagtgggccctatttcttgtgtctccttttatacttgaagcagaacacatagcatttgtgacggagagcatttgggtacaaagtgagaatttacagagatcatcctcttcagaaacaacggagtgtcgttctgtcgtccaggctggagtgcagtggtgtggtctcggctcaccacaacctctgcctactgggttccagtgattctcctgcctcagcatcccgagtagctgggactacaggtgcacgctaccatgcccggctaatttttgtatttttagtagaggcgggggtttcaccatgccatccaggctggtttcgaactcctgacctcgtgatccacctgtctcggcctcccaaagtgctgggattacaggtgtgagccaccgcgcctggccctgtattttcaaattctttacctctgcgtttccagccttgctccatccaatttgttactagagctttttaacaatttcacgttgaattaagatgatttggaagaggagaaacaagagtcagaaaaattagcagcatccgtgatctgactctgggtaccagtgggttgttgagatttctgttccccactcactgcagagctgctgcctgccaatgccccctgttgggcagggccacctgtgctagtttaacctggggtctttcactcccggactgcttcttggatgtgagttttaagttgagcagagaagatatgccttgcctgctgccatacattgtaacatcaagtcaagagctttagttacttaacagatttctgctggctgctattataggaggaaactcctttgtttagggacagccagggcttccttagctttgatctttgggagtgagccttttgcttgacttcccttctcttttccatgcctttgtttccatctcgaagtgcaaatttaaagtgtcctgtttgcctttatccactggaaggcaaacaccctggacgacgtatcagtgacagcgcggttctgctttgatcggagcacccagcgctgcttgaaggcgtttgcatggtccatggctcatggaccacgctcctagaaaacggaaatgcacttagattgtcaagtggtcagactgttgtttgccattagcttgcagacctggggatccttatcggctaattgctgaagcaagtgtggacaacttcagcaagctgggggtggcgttcatggaagatagactccacatggataatggactggtaccccaaaagattgtgtcggtgcacttgcaggactccactctgaaggaagttaaggatcaggtctcaaacaagcaagcccagatcctagagccgaagcctgaaccttctcttgagattaagcctgagcaggacggtatggagcatgttggcagagatgacccaaaggctcttggtgaagaacccaaacaaaggagaggcagtgcctctgggagtgagcctgctggggacagtgacaggggagggggccccgttgagcattatcacctccatctgtctagttgccacgagtgtctggaacttgagaacagcaccattgagtcagtcaagtttgcgtctgccgagaacattccagaccttccctacgattatagcagcagtttggagagtgttgctgatgagacctcccccgaaagagaagggaggagagtcaacctcacgggaaaggcacccaacatcctcctctatgtgggctccgactcccaggaagccctcggccggttccacgaggtccggtctgtgctggccgactgtgtggacattgacagttatattctctaccacctgctggaggacagtgctctcagagacccgtggacggacaactgtctgctgttggtcattgctaccagggagtccattcccgaagacctgtaccagaagttcatggcctatctttctcagggagggaaggtgttgggcctgtcttcatccttcacctttggtggctttcaggtgacaagcaagggtgcactgcacaagacagtccagaacttggttttctccaaggctgaccagagcgaggtgaagctcagcgtcttgagcagtggctgcaggtaccaggaaggccccgtccggctcagccccggcaggctccagggccacctggagaatgaggacaaggacaggatgattgtgcatgtgccttttggaactcgcgggggagaagctgttctttgccaggtgcacttagaactacctcccagctccaacatagtgcaaactccagaagattttaacttgctcaagtcaagcaattttagaagatacgaagtccttagagagattctgacaacccttggcctcagctgtgacatgaaacaagttcctgccttaactcctctttacttgctgtcagctgcggaggaaatcagggatcctcttatgcagtggcttgggaaacatgtggactccgagggagaaataaaatccggccagctctctcttagatttgtttcatcctacgtgtctgaagtagaaataaccccatcttgtatacctgtggtgaccaacatggaggccttctcatcagaacatttcaacttagagatctatcgccaaaatctgcagaccaagcagttggggaaagtaattttgtttgccgaagtgacccccacaacgatgcgtctcctggatgggctgatgtttcagacaccgcaggaaatgggcttaatagtgatcgcggcccggcagaccgagggcaaaggacggggagggaatgtgtggctgagccctgtgggatgtgctctttctactctgctcatctccattccactgagatcccagctgggacagaggatcccgtttgtccagcatctgatgtccgtggctgtcgtggaagcagtgaggtccattcccaagtatcaggatatcaacttacgagtgaagtggcccaacgatatttattacagtgacctcatgaagatcggcggagttctggttaactcaacactcatgggagaaacattttatatacttattggctgtggatttaatgtgactaacagtaaccctaccatctgcatcaacgacctcatcacagaatacaataaacaacacaaggcagaactgaagcccttaagagccgattatctcatcgccagagtcgtgactgtgctggagaaactgatcaaagagtttcaggacaaagggcccaacagcgtccttcccctttattaccgatactgggtccacagtggtcagcaagtccatctgggcagcgcagagggaccaaaggtgtccatcgttggcctggacgattctggcttcctccaggttcaccaggagggcggcgaggttgtgactgtgcacccggacggcaactccttcgacatgctgagaaacctcatcctccccaaacggcggtaatgccgggcgtccccgagacgcggctgcctgtccgtgcccatgcatctggaaatctaatttagagttgtaggtgaattttcttttcctccaattcatttgttaagtctttgttctttttctgtgtttctgtttgtttttaggtttgttttgttgtcgttttctttggtgtttgaagaggctctgggatagatggttaagaagtagaaaatttagtttagggaaagccctcccacaggtgggaaattgctctcccctctgtggcttggacttacgtttattgtcaaggggagtttttacatggaaatgacaatgggaaaattcagatattttcttagtagtgcagacctttacccctagtctatgaaaaaacaaaccaaaatatgctcttgcgcccaggccagtggtgagttagaggtatgctatcactgtttgtaagcatctggggaggtactgaactgtaagaacatgcttggacacttagtcattgttctgtgtttttattaatgaagaaaagggaagacagacttccaagagttactgtccacccggtggtgtggccccatagcgaagtctaaatgcctgtagagatagagctagctggtgtggttgcagtgaccttgtagaggaaatcagttcattactttgacatcattcagtgagctctcctttcctaaggaagtttaaatgtccttagttagggactgactttcttaagtaagtttaaatttactacatattgtgaagagacaggatcaagttcagaatccttaaatgtctgattaggcatcacttggatgaggaggtgggcgatttggctctgacagctggagatgaaggcacactcataccacatacaagggaggatttggagcttttaagccagtttcagatttactctgaaatgtggagcattcctgcaagactgtgcagctcacggaatatagaagacatggcattttactcagaagtcataagtttttgcccccctcatttacctcgtattaccaagaaagaaaatgttatcgatactaaacaccatcagttcagagggaggatgtgtgtgtgtgcccgcatatgtgtgtgcgtgcgtgtgtgcgcacatagctttaaaagaagacattcaaaatttgatgtgctacaagcctcatgaaagaacaaaagaaatgaagccttttgatatgcattcgctattcccagatgtacgccatgccttttccatgtccctcctatctctgttgaacttatgaatcatactcattacttttcagctttttaaaaggccaatttttgtccagttttctctcttccagtcccagctgaaattagtggaaagaaagtttgatggagctttcagctttgaacaaaatcccttcattgtaaactagcaccatctttatccaggtcttacccagtcaggctaattccagaaacttgtggtttttagtatagtctgtctacctttagccaggcacaggacagccctatgaaaaaatacccaatatatattttttggaaatgaaacattaaaagaacttaaaaagtaatttttggaaatgaggcttcaattagaattatttttctcaaaaaacaaacaaacaaaaaacacaaaaaaaaccactcttctccaaatgcccaagccttctttcaaaattagttagaaacttaagtaaaatacaagtccacaccatccccaaattacaaaatggacttacccttgagagggcatctgcagaatatcatcagggacaaagatctcgaggctaacgatgtaggtttcatttctcagactttgtaatataaggcaagccctctctcagagctgccatcatcactttttgaatttctttgggggttatttaatgaaaaacatgctatgttttgttttaagctgaagtcctattctggacactctgctttgggaaaaaatgttatcatttaatttcctttctgcaaattaaaactaatgaagtgtggccttgtcaaaggctatggagatgttccgggcatactgctgtgctctgtgctttccagcaggcgctcctccctcacgcaggagactcagttgtcctgagagagatgaagcagccttgaagcagatgctgcgttttccataaacctgattttgcctcacatgaaccaaagactctcaaaactccgcttctatagaattagctgaataaaggcattttactgatagctgttcgtgttagcgaaacctgtctacctgctatagcacactctccgatttgggccatttatgcaccccgcaacctgggatctcaaggagctttaaagtcttaatgggaacttggcattttcctgatgatctttaaaatgtggtcactaaactcaggattggcgtgtgcttttagaacactggagtagcccttgttttagaggctgtgcattgagtatcgaccgtattttgtaaaaggcaagatatcctcccttccaggctggtaacgggtttcaaggggactcttgaggaagtgccccctaaaatagaacacagcaataactgggcttcctgtccccacccccaccccagcagtgctctctggcactgggaactctgctagggagtggtggaagtaggaaggatttgtgtgcaaaggaaaatcgtggttgagtttcactgcagcaggctgacgttgcctgatgtgagagcaagtggccgactggggtgcgggtgcacaggtcgggggagcacaggccacagagcgcagctctgggggtcccccaaggcacagcatatacagcatggtcgccccttgccctggagtctgggaacaaagagaggagccagcctccccgcactgcttcagatggaaaagggaggcagggtgggcttccgttctccagatctgtttgctcttaacaggcagaacatgggagaatccttattcctggttaatcactatgcatatttgaaataaaagaaagcgtaagcctctgcaattttaacttctcaaaggatgtctctgaaaagaatcactttaaaccaatgcctataaaaagcaagtctaccaaaataaactaagactttctatgtg

SEQ ID NO: 1014 - protein, 726 aa, Homo sapiens
MEDRLHMDNGLVPQKIVSVHLQDSTLKEVKDQVSNKQAQILEPKPEPSLEIKPEQDGMEHVGRDDPKALGEEPKQRRGSASGSEPAGDSDRGGGPVEHYHLHLSSCHECLELENSTIESVKFASAENIPDLPYDYSSSLESVADETSPEREGRRVNLTGKAPNILLYVGSDSQEALGRFHEVRSVLADCVDIDSYILYHLLEDSALRDPWTDNCLLLVIATRESIPEDLYQKFMAYLSQGGKVLGLSSSFTFGGFQVTSKGALHKTVQNLVFSKADQSEVKLSVLSSGCRYQEGPVRLSPGRLQGHLENEDKDRMIVHVPFGTRGGEAVLCQVHLELPPSSNIVQTPEDFNLLKSSNFRRYEVLREILTTLGLSCDMKQVPALTPLYLLSAAEEIRDPLMQWLGKHVDSEGEIKSGQLSLRFVSSYVSEVEITPSCIPVVTNMEAFSSEHFNLEIYRQNLQTKQLGKVILFAEVTPTTMRLLDGLMFQTPQEMGLIVIAARQTEGKGRGGNVWLSPVGCALSTLLISIPLRSQLGQRIPFVQHLMSVAVVEAVRSIPKYQDINLRVKWPNDIYYSDLMKIGGVLVNSTLMGETFYILIGCGFNVTNSNPTICINDLITEYNKQHKAELKPLRADYLIARVVTVLEKLIKEFQDKGPNSVLPLYYRYWVHSGQQVHLGSAEGPKVSIVGLDDSGFLQVHQEGGEVVTVHPDGNSFDMLRNLILPKRR

SEQ ID NO: 1015 - DNA, 550 bp, Homo sapiens
tttttttttttttttttttttttaaaaaaaaggggggtttattataaaattctaaaaatgtactttaaagtacagtcatgaaaatactgcataagtaaaaatgtgtcttcatactgcaaacaatcacacagattttatattgtccatggaattaatacttaaaaaaattcttctttttagttaaaaagagtcttcaaagcaccattattctaataaaagttattttgcatatcaaagttcatctttggtctttttccctatggcaagtacaagggaaaaggtcgccctcagtctgtggttctacccttttcatgccctctcggatttggggctcactcacttgtaaattggcatattcctggaaaagtttgaaataataacagaatatgtcatcgcccatgaaattatttcttgcaaattcttgtcctgcttttgctatctttttggcctcttcatcgagatctttcgcccatttaagtttttctagcagatcgctcaggttgctcttaactggaatgtagtgtttccagggctgcagctcattgtaaaa

SEQ ID NO: 1016 - DNA, 244 bp, Homo sapiens
ttttttttttttttttttttcaagatttacccattttttattttttataaaacaagctacaaatagtttccctctctccttcacaaaggaaaaccacacaacaccacctacacacacgatcctgtgggagacaagatgcctggggagatctcgaagatccaaacatctacaggcaggcgccgtctccatgtgtgcatgcttcctccaggcctgaaagtggggccagtgtctcgtgcaaggccca

SEQ ID NO: 1017 - DNA, 3198 bp, Homo sapiens
ttgggaggagcagtctctccgctcgtctcccggagctttctccattgtctctgcctttacaacagagggagacgatggactgagctgatccgcaccatggagtctcgggtcttactgagaacattctgtttgatcttcggtctcggagcagtttgggggcttggtgtggacccttccctacagattgacgtcttaacagagttagaacttggggagtccacgaccggagtgcgtcaggtcccggggctgcataatgggacgaaagcctttctctttcaagatactcccagaagcataaaagcatccactgctacagctgaacagttttttcagaagctgagaaataaacatgaatttactattttggtgaccctaaaacagacccacttaaattcaggagttattctctcaattcaccacttggatcacaggtacctggaactggaaagtagtggccatcggaatgaagtcagactgcattaccgctcaggcagtcaccgccctcacacagaagtgtttccttacattttggctgatgacaagtggcacaagctctccttagccatcagtgcttcccatttgattttacacattgactgcaataaaatttatgaaagggtagtagaaaagccctccacagacttgcctctaggcacaacattttggctaggacagagaaataatgcgcatggatattttaagggtataatgcaagatgtccaattacttgtcatgccccagggatttattgctcagtgcccagatcttaatcgcacctgtccaacttgcaatgacttccatggacttgtgcagaaaatcatggagctacaggatattttagccaaaacatcagccaagctgtctcgagctgaacagcgaatgaatagattggatcagtgctattgtgaaaggacttgcaccatgaagggaaccacctaccgagaatttgagtcctggatagacggctgtaagaactgcacatgcctgaatggaaccatccagtgtgaaactctaatctgcccaaatcctgactgcccacttaagtcggctcttgcgtatgtggatggcaaatgctgtaaggaatgcaaatcgatatgccaatttcaaggacgaacctactttgaaggagaaagaaatacagtctattcctcttctggagtatgtgttctctatgagtgcaaggaccagaccatgaaacttgttgagagttcaggctgtccagctttggattgtccagagtctcatcagataaccttgtctcacagctgttgcaaagtttgtaaaggttatgacttttgttctgaaaggcataactgcatggagaattccatctgcagaaatctgaatgacagggctgtttgtagctgtcgagatggttttagggctcttcgagaggataatgcctactgtgaagacatcgatgagtgtgctgaagggcgccattactgtcgtgaaaatacaatgtgtgtcaacaccccgggttcttttatgtgcatctgcaaaactggatacatcagaattgatgattattcatgtacagaacatgatgagtgtatcacaaatcagcacaactgtgatgaaaatgctttatgcttcaacactgttggaggacacaactgtgtttgcaagccgggctatacagggaatggaacgacatgcaaagcattttgcaaagatggctgtaggaatggaggagcctgtattgccgctaatgtgtgtgcctgcccacaaggcttcactggacccagctgtgaaacggacattgatgaatgctctgatggttttgttcaatgtgacagtcgtgctaattgcattaacctgcctggatggtaccactgtgagtgcagagatggctaccatgacaatgggatgttttcaccaagtggagaatcgtgtgaagatattgatgagtgtgggaccgggaggcacagctgtgccaatgataccatttgcttcaatttggatggcggatatgattgtcgatgtcctcatggaaagaattgcacaggggactgcatccatgatggaaaagttaagcacaatggtcagatttgggtgttggaaaatgacaggtgctctgtgtgctcatgtcagaatggattcgttatgtgtcgacggatggtctgtgactgtgagaatcccacagttgatcttttttgctgccctgaatgtgacccaaggcttagtagtcagtgcctccatcaaaatggggaaactttgtataacagtggtgacacctgggtccagaattgtcaacagtgccgctgcttgcaaggggaagttgattgttggcccctgccttgcccagatgtggagtgtgaattcagcattctcccagagaatgagtgctgcccgcgctgtgtcacagacccttgccaggctgacaccatccgcaatgacatcaccaagacttgcctggacgaaatgaatgtggttcgcttcaccgggtcctcttggatcaaacatggcactgagtgtactctctgccagtgcaagaatggccacatctgttgctcagtggatccacagtgccttcaggaactgtgaagttaactgtctcatgggagatttctgttaaaagaatgttctttcattaaaagaccaaaaagaagttaaaacttaaattgggtgatttgtgggcagctaaatgcagctttgttaatagctgagtgaactttcaattatgaaatttgtggagcttgacaaaatcacaaaaggaaaattactggggcaaaattagacctcaagtctgcctctactgtgtctcacatcaccatgtagaagaatgggcgtacagtatataccgtgacatcctgaaccctggatagaaagcctgagcccattggatctgtgaaagcctctagcttcactggtgcagaaaattttcctctagatcagaatcttcagaatcagttaggttcctcactgcaagaaataaaatgtcaggcagtgaatgaattatattttcagaagtaaagcaaagaagctataacatgttatgtacagtacactctgaaaagaaatctgaaacaagttattgtaatgataaaaataatgcacaggcatggttacttaatattttctaacaggaaaagtcatccctatttccttgttttactgcacttaatattatttggttgaatttgttcagtataagctcgttcttgtgcaaaattaaataaatatttctcttacctt

SEQ ID NO: 1018 - protein, 816 aa, Homo sapiens
MESRVLLRTFCLIFGLGAVWGLGVDPSLQIDVLTELELGESTTGVRQVPGLHNGTKAFLFQDTPRSIKASTATAEQFFQKLRNKHEFTILVTLKQTHLNSGVILSIHHLDHRYLELESSGHRNEVRLHYRSGSHRPHTEVFPYILADDKWHKLSLAISASHLILHIDCNKIYERVVEKPSTDLPLGTTFWLGQRNNAHGYFKGIMQDVQLLVMPQGFIAQCPDLNRTCPTCNDFHGLVQKIMELQDILAKTSAKLSRAEQRMNRLDQCYCERTCTMKGTTYREFESWIDGCKNCTCLNGTIQCETLICPNPDCPLKSALAYVDGKCCKECKSICQFQGRTYFEGERNTVYSSSGVCVLYECKDQTMKLVESSGCPALDCPESHQITLSHSCCKVCKGYDFCSERHNCMENSICRNLNDRAVCSCRDGFRALREDNAYCEDIDECAEGRHYCRENTMCVNTPGSFMCICKTGYIRIDDYSCTEHDECITNQHNCDENALCFNTVGGHNCVCKPGYTGNGTTCKAFCKDGCRNGGACIAANVCACPQGFTGPSCETDIDECSDGFVQCDSRANCINLPGWYHCECRDGYHDNGMFSPSGESCEDIDECGTGRHSCANDTICFNLDGGYDCRCPHGKNCTGDCIHDGKVKHNGQIWVLENDRCSVCSCQNGFVMCRRMVCDCENPTVDLFCCPECDPRLSSQCLHQNGETLYNSGDTWVQNCQQCRCLQGEVDCWPLPCPDVECEFSILPENECCPRCVTDPCQADTIRNDITKTCLDEMNVVRFTGSSWIKHGTECTLCQCKNGHICCSVDPQCLQEL

SEQ ID NO: 1019 - DNA, 563 bp, Homo sapiens
  misc_feature (11)..(11): n is a, c, g, or t
cgagagggcanaaaaccttcgggctaggtagcgaggcctgggtggttgggagcggcgtggagcccaatcgttcgctccccttcccgggtccgcgcgcggcgccgcctccgccattgctgcgagcaggagcaggagacgcggagctcggagcgctgagctgacctgccggagccgggcgtgggctgcagcctcggagctcccggaacgatggtgaagttggggaacaatttcgcagagaagggcaccaagcagccgctgctggaggatggcttcgacaccattcccctgatgacgcccctcgatgtcaatcagctgcagttcccgcccccggataaggtggtcgtgaaaactaagaccgagtatgaacctgaccgcaagaaagggaaagcacgtcctccccaaattgctgagttcaccgtcagcatcacggagggtgtcaccgagaggtttaaggtctccgtgttggtcctcttcgccctggccttcctcacctgcgtcgtcttcctggttgtctacaaggtgtacaagtatgaccgcgcctgccccgatgggttcgtcctcaa

SEQ ID NO: 1020 - DNA, 10172 bp, Homo sapiens
atggggagaagacggaggctgtgtctccagctctacttcctgtggctgggctgtgtggtgctctgggcgcagggcacggccggccagcctcagcctcctccgcccaagccgccccggccccagccgccgccgcaacaggttcggtccgctacagcaggctctgaaggcgggtttctagcgcccgagtatcgcgaggagggtgccgcagtggccagccgcgtccgccggcgaggacagcaggacgtgctccgagggcccaacgtgtgcggctccagattccactcctactgctgccctggatggaagacgctccctggaggaaaccagtgcattgtcccgatttgtagaaatagttgtggagatggattttgttcccgtcctaacatgtgtacttgttccagtgggcaaatatcatcaacctgtggatcaaaatcaattcagcagtgcagtgtgagatgcatgaatggtgggacctgtgcagatgaccactgccagtgccagaaaggatatattggaacttattgtggacaacctgtctgtgaaaatggatgtcagaatggtggacgttgcatcgcccaaccgtgtgcttgtgtttatgggttcactggtccacagtgtgaaagagattacaggacaggcccgtgtttcactcaggtcaacaaccagatgtgccaagggcagctgacaggcattgtctgcacgaagactctgtgctgtgccaccactggacgggcgtggggccatccctgtgagatgtgtccagcccagcctcagccctgccgacggggtttcatccccaacatccgcactggagcttgccaagatgttgatgaatgccaggctatcccagggatatgccaaggaggaaactgtatcaatacagtgggctcttttgaatgcagatgccctgctggtcacaaacagagtgaaactactcagaaatgtgaagacattgatgagtgcagcatcattcctgggatatgtgaaactggtgaatgttccaacaccgtgggaagctatttttgtgtttgtccacgtggatatgtaacctcaacagatggctctcgatgcatcgatcagagaacaggcatgtgtttctcgggcctggtgaatggccgctgtgcacaagagctcccggggagaatgacgaaaatgcagtgctgctgtgagcctggccgctgctggggcatcggaaccattcctgaagcctgtcctgtcagaggttctgaggaatatcgcagactttgcatggatggacttccaatgggaggaattccagggagtgctggttccagacctggaggcactgggggaaatggctttgccccaagtggcaatggcaatggctatggcccaggagggacaggcttcatccccatccctggaggcaatggcttttctcctggcgttgggggagccggtgtgggggccgggggacagggacctatcatcactggactaacaattctgaaccagacaatagatatctgtaagcatcatgctaacctttgtttaaatggacgctgtataccaactgtctcaagctaccgatgtgaatgcaacatgggttataagcaggatgcaaatggagattgtatagatgttgatgaatgcacatcaaatccctgcactaatggagattgtgttaacacacctggttcctattattgtaaatgtcatgctggattccagaggactcctaccaagcaagcatgcattgatattgatgagtgcatccagaatggggttctttgtaaaaacggtcgatgcgtgaactcagatggaagtttccagtgcatttgcaatgccggctttgaattaactacagatggaaaaaactgtgttgatcatgatgaatgtacaactaccaacatgtgtttgaatggaatgtgcatcaatgaagatggcagcttcaagtgcatctgcaaaccaggatttgtcttggctccaaatgggcgttactgtactgatgttgatgaatgccagaccccaggaatctgcatgaatgggcactgcatcaacagtgaagggtccttccgctgtgactgtcccccaggcctggctgtgggcatggatggacgtgtgtgtgttgatactcacatgcgcagtacctgctatggaggaatcaagaaaggagtgtgtgtgcgtcctttccccggtgcagtgaccaagtccgaatgctgctgtgccaatccagactatggttttggagaaccctgccagccatgccctgcaaaaaattcagctgaattccacggcctttgtagtagtggagtaggtatcactgtggatggaagagatatcaatgaatgtgctttggatcctgatatatgtgccaatgggatttgtgaaaacttacgtggtagttaccgttgtaattgcaacagtggctatgaaccagatgcctctggaagaaactgtattgacattgatgaatgtttagtaaacagactgctttgtgataacggattgtgccgaaacacgccaggaagttacagctgtacgtgcccaccagggtatgtgttcaggactgagacagagacctgtgaagatataaatgaatgtgaaagcaacccatgtgtcaatggggcctgcagaaacaaccttggatctttcaattgtgaatgttcgcccggcagcaaactcagctccacaggattgatctgtattgacagcctgaaggggacctgttggctcaacatccaggacagccgctgtgaggtgaatattaatggagccactctgaaatctgaatgctgtgccaccctcggagccgcctgggggagcccctgtgagcggtgtgaactagatacagcttgcccaagagggcttgccaggattaaaggtgttacgtgtgaagatgttaatgagtgtgaggtgttccctggcgtttgtccaaatggacgctgtgtcaacagtaagggatcttttcattgcgagtgccctgaaggccttacgttggatgggactggccgtgtatgtttggatattcgcatggagcagtgttacttgaagtgggatgaagatgaatgcatccaccccgttcctggaaagttccgcatggatgcctgctgctgtgctgtcggggcggcttggggcaccgagtgtgaggagtgccccaaacctggcaccaaggaatacgagacactgtgcccccgcggggctggctttgctaaccgaggggatgttcttactgggcggccattttacaaagacatcaatgaatgcaaagcatttcctgggatgtgcacttatgggaagtgcagaaatacaatcggaagcttcaaatgccgttgcaatagtggctttgctctagacatggaggaaagaaactgcacggacatcgacgagtgcaggatttctcctgacctctgtggcagtggaatctgcgtcaatacaccgggcagctttgagtgcgagtgcttcgaaggctatgaaagtggcttcatgatgatgaagaactgcatggacattgacggatgtgaacgtaaccctctcctttgtaggggtggcacctgtgtgaacactgagggcagctttcagtgtgactgcccactgggacacgagctgtcaccatcccgtgaggactgtgtggatattaatgaatgctccctgagtgacaatctctgcagaaatggaaaatgtgtgaacatgattggaacctatcagtgctcttgcaatcctggatatcaggctacgccagaccgccagggctgtacagatattgatgaatgtatgataatgaacggaggctgtgacacccagtgcacaaattcagagggaagctacgaatgcagctgcagtgagggttatgccctgatgccagatgggagatcgtgtgcagacattgatgaatgtgaaaacaatcctgatatctgtgatggcggccagtgtaccaacattcctggagagtatcgctgcctctgctatgatggcttcatggcttccatggacatgaaaacatgcattgatgtcaatgaatgtgacctaaattcaaatatctgcatgtttggggaatgtgagaacacaaagggatccttcatttgccactgtcagctgggttactcagtgaagaaggggaccacaggatgtacagatgtggatgagtgtgaaattggtgctcataactgcgacatgcatgcctcatgtctgaatatcccaggaagcttcaagtgtagctgcagagaaggctggattggaaacggcatcaagtgtattgatctggacgaatgttctaatggaacccaccagtgtagcatcaatgctcagtgtgtaaataccccgggctcataccgctgtgcctgctccgaaggtttcactggtgatggctttacctgctcagatgttgatgagtgtgcagaaaacataaacctctgtgagaacggacagtgccttaatgtcccgggtgcatatcgctgcgagtgtgagatgggcttcactccagcctcagacagcagatcctgccaagatattgatgaatgctccttccaaaacatttgtgtctctggaacatgtaataacctgcctggaatgtttcattgcatctgcgatgatggttatgaattggacagaacaggagggaactgtacagatattgatgagtgtgcagatcctataaactgtgtcaatggcctatgtgtcaacacgcctggtcgctatgagtgtaactgcccacccgattttcagttgaacccaactggtgtgggttgtgttgacaaccgtgtgggcaactgctacctgaagtttggacctcgaggagatgggagtctgtcttgcaacaccgagatcggggtgggcgtcagtcgctcttcatgctgctgctctctgggaaaggcctggggaaacccctgtgagacatgcccccctgtcaatagcactgaatattacaccctgtgtcccggaggtgaaggcttcagacctaaccccatcacaatcattttagaagacattgacgaatgccaggagttaccaggtctctgccagggtggaaactgcatcaacacttttgggagcttccagtgtgagtgcccacaaggctactacctcagcgaggatacccgcatctgtgaggatattgatgagtgttttgcacatcctggtgtgtgtgggcctgggacctgctataacaccctgggaaattacacctgcatttgcccacctgagtacatgcaggtcaatggaggccacaactgcatggacatgagaaaaagcttttgctaccgaagctataatggaaccacttgtgagaatgagttgcctttcaatgtgacaaaaaggatgtgctgctgcacatataatgtgggcaaagctgggaacaaaccttgtgaaccatgcccaactccaggaacagctgactttaaaaccatatgtggaaatattcctggattcacctttgacattcacacaggaaaagctgttgacattgatgaatgtaaagagattccaggcatttgtgcaaatggtgtgtgcattaaccagattggcagtttccgctgtgaatgccctacaggattcagttacaatgacctgctgttggtttgtgaagatatagatgagtgcagcaatggtgataatctctgccagcggaatgcagactgcatcaatagtcctggtagttaccgctgtgaatgtgccgcgggtttcaaactttcacccaatggggcctgtgtagatcgcaatgaatgtttagaaattcctaacgtttgcagtcatggcttgtgtgttgatctgcaaggaagttaccagtgcatctgccacaatggctttaaggcttctcaggaccagaccatgtgcatggatgttgatgagtgcgagcggcacccatgtggaaatggaacttgtaaaaacaccgttggatcctataactgtctgtgctacccagggtttgaactcactcataataatgattgcctggacatagatgagtgcagttccttttttggtcaggtgtgcagaaatggacgttgttttaatgaaattggttctttcaagtgtctatgtaacgaaggttatgaacttaccccagatggcaaaaactgtatagacactaatgagtgtgtcgcccttcccggctcttgctctcctggtacctgtcagaatttggagggatccttcagatgcatctgtcccccagggtatgaagtaaaaagcgagaactgcattgatataaatgaatgtgatgaagatcccaacatttgtctttttggttcctgtactaatactccagggggcttccagtgcctctgcccccctggctttgtactatctgataatggacggagatgctttgatactcgccagagcttctgcttcacaaattttgaaaatggaaagtgttctgtacccaaagctttcaacaccacaaaagcaaaatgctgctgtagtaagatgccaggagagggctggggggacccctgtgagctgtgccccaaagacgatgaagttgcatttcaggatttgtgtccatatggccatggaactgtccctagtcttcatgatacacgtgaagatgtcaatgagtgtcttgagagcccaggcatttgttcaaatggtcaatgtatcaacaccgacggatcttttcgctgtgaatgtccaatgggctacaaccttgactacactggagtacgctgtgtggatactgatgagtgttcaatcggcaatccgtgtggaaatggtacatgcaccaatgttattgggagttttgaatgcaattgcaatgaaggctttgagccagggcccatgatgaattgtgaagatatcaacgaatgtgcccagaacccactgctgtgtgctttacgctgcatgaacacttttgggtcctatgaatgcacgtgcccgattggctatgccctcagggaagatcaaaagatgtgcaaagatctggatgaatgtgctgaagggttacacgactgtgaatctaggggcatgatgtgtaagaatctaatcggcaccttcatgtgcatctgccctcctggaatggcccgaaggcccgatggagaaggctgtgtagatgaaaatgaatgcaggaccaagccaggaatctgtgaaaatggacgttgtgttaacattattggaagctatagatgtgagtgtaatgaaggattccagtcaagttcttcaggcactgaatgccttgacaatcgacagggtctctgctttgcagaggtactgcagacaatatgtcaaatggcatccagtagtcgcaatctcgtcactaagtcagaatgctgctgtgatggtgggcgaggctggggccaccagtgcgagctttgcccacttcctggaactgcccagtacaaaaagatatgtcctcatggcccaggatatacaactgatggaagagatattgatgaatgtaaggtaatgccaaacctctgcaccaatggtcagtgcatcaataccatgggctcattccgatgcttctgcaaggttggctacaccacagacatcagtggaacctcttgtatagaccttgatgaatgctcccagtccccgaaaccatgcaactacatctgcaagaacactgaggggagttatcagtgttcatgtccgagggggtatgtcctgcaagaggatggaaagacatgcaaagaccttgatgaatgtcaaacaaagcagcataactgccagttcctctgtgtcaacaccctgggggggtttacctgtaaatgtccacctggtttcacacagcatcacactgcttgtatcgacaacaacgaatgtgggtctcaacctttgctttgtggaggaaagggaatctgtcaaaacactccaggcagtttcagctgtgaatgccaaagagggttctctcttgatgccaccggactgaactgtgaagatgttgatgaatgtgatgggaaccacaggtgccaacacggctgccagaacatcctgggtggctacagatgtggctgcccccaaggctacatccagcactaccagtggaatcagtgtgtcgatgagaatgaatgctccaatcccaatgcctgtggctctgcttcctgctacaacaccctggggagttacaagtgcgcctgcccctcggggttctccttcgaccagttctccagtgcctgccacgacgtgaatgagtgctcgtcctccaagaacccctgcaattacggctgctctaacacggaggggggctacctctgtggctgcccccctgggtattacagagtgggacaaggccactgtgtctcaggaatgggatttaacaaggggcagtacctgtcactggatacagaggtcgatgaggaaaatgctctgtccccagaagcatgctacgagtgcaaaatcaacggctatcctaagaaagacagcaggcagaagagaagtattcatgaacctgatcccactgctgttgaacagatcagcctagagagtgtcgacatggacagccccgtcaacatgaagttcaacctctcccacctcggctctaaggagcacatcctggaactaaggcccgccatccagcccctcaacaaccacatccgttatgtcatctctcaagggaacgatgacagcgtcttccgcatccaccaaaggaatgggctcagctacttgcacacggccaagaagaagctcatgcccggcacatacacactggaaatcactagcatccctctctacaagaagaaggagcttaagaaactggaagagagcaatgaggatgactacctcctaggggagcttggggaggctctcagaatgaggctgcagattcagctctattaaccgttcacagacttgggcccaggctcaaatcctagcacagccagtctgcagaagcatttgaaaagtcaaggactaattttaaagaggaaaaataataataactcttgtttctttcctccctgtcttagactttgaatgttgaccctcacagggagggataatttagactctggtatggccaaagatttgagctcaaaggcaaccgtggttactgtattttttatataacttcattttaaaatatattaaaagaaacctaaatgttcaagatatcagcatatggcactaaatgcacaaaaataatgtgagcttttttttttttttcctgttagcagtctgtaacactttgggtattttgctatagttgctaattaaaaaaatatagatgtttatttatttttaatgcagtaatatatggagaaatgaacaaactatgtaaacaaaaagggaaactcacttgtttttctttagatttataaatttgagctattttttttagaggtgctttttaaaaatccaatagatacaagagatgtttcctttggttttctgccagtcatccagctgatacacacctgatcgattttaaagaaagccacacagagctgaatcgggcagtgctaatcaataatttaaaagacatgaatgtcattagatcctttataacgtagatcgaagccaaagcagctcatttgtgacaacatttcatatcaccagacacaccaggcaacagaagttgaagcacaaccactgtagcaaaataccttgactgcttgtgagaccattagcattgcaggccaaaccgtactgtatttccttctcataacctcaaggaaccatatgtgctacccacaacacctcattcttacccagggtgcgctgcgtcctcatggtactgtaggcagctgaagaaccgccgttcccttgaaagggaacacctggcattctgtggtgtttcgtgctgtcttaaataatggtgcatttattatgttcaagttatttcaggattgccatatgtgcaaacaaatcatgcaatgcagccaaggaatatatgttgttgttgttgttttaaacccattttttttttagaattttcattaatactgtagttatacaccatatgcctcattttatcatagcctattgtgtatgaaagatgtttgtacaatgaattgatgtttagtttgctttagtcatttaaaaagatattgtaccaggatgtgctattaagagcacgtatccattattcttctcaacccaagaacctgtttcctggaccagtgaccaaacctcatatgtgaaatggccaaagcacatgcaggctcctggttgttcctctcaaacctgtgctgaccaaagattagtaaccagttatacccagtattttgaggttttattgtttttttaataactaaaaaaaaactcgtgccgaattc

SEQ ID NO: 1021 - protein, 2911 aa, Homo sapiens
MGRRRRLCLQLYFLWLGCVVLWAQGTAGQPQPPPPKPPRPQPPPQQVRSATAGSEGGFLAPEYREEGAAVASRVRRRGQQDVLRGPNVCGSRFHSYCCPGWKTLPGGNQCIVPICRNSCGDGFCSRPNMCTCSSGQISSTCGSKSIQQCSVRCMNGGTCADDHCQCQKGYIGTYCGQPVCENGCQNGGRCIAQPCACVYGFTGPQCERDYRTGPCFTQVNNQMCQGQLTGIVCTKTLCCATTGRAWGHPCEMCPAQPQPCRRGFIPNIRTGACQDVDECQAIPGICQGGNCINTVGSFECRCPAGHKQSETTQKCEDIDECSIIPGICETGECSNTVGSYFCVCPRGYVTSTDGSRCIDQRTGMCFSGLVNGRCAQELPGRMTKMQCCCEPGRCWGIGTIPEACPVRGSEEYRRLCMDGLPMGGIPGSAGSRPGGTGGNGFAPSGNGNGYGPGGTGFIPIPGGNGFSPGVGGAGVGAGGQGPIITGLTILNQTIDICKHHANLCLNGRCIPTVSSYRCECNMGYKQDANGDCIDVDECTSNPCTNGDCVNTPGSYYCKCHAGFQRTPTKQACIDIDECIQNGVLCKNGRCVNSDGSFQCICNAGFELTTDGKNCVDHDECTTTNMCLNGMCINEDGSFKCICKPGFVLAPNGRYCTDVDECQTPGICMNGHCINSEGSFRCDCPPGLAVGMDGRVCVDTHMRSTCYGGIKKGVCVRPFPGAVTKSECCCANPDYGFGEPCQPCPAKNSAEFHGLCSSGVGITVDGRDINECALDPDICANGICENLRGSYRCNCNSGYEPDASGRNCIDIDECLVNRLLCDNGLCRNTPGSYSCTCPPGYVFRTETETCEDINECESNPCVNGACRNNLGSFNCECSPGSKLSSTGLICIDSLKGTCWLNIQDSRCEVNINGATLKSECCATLGAAWGSPCERCELDTACPRGLARIKGVTCEDVNECEVFPGVCPNGRCVNSKGSFHCECPEGLTLDGTGRVCLDIRMEQCYLKWDEDECIHPVPGKFRMDACCCAVGAAWGTECEECPKPGTKEYETLCPRGAGFANRGDVLTGRPFYKDINECKAFPGMCTYGKCRNTIGSFKCRCNSGFALDMEERNCTDIDECRISPDLCGSGICVNTPGSFECECFEGYESGFMMMKNCMDIDGCERNPLLCRGGTCVNTEGSFQCDCPLGHELSPSREDCVDINECSLSDNLCRNGKCVNMIGTYQCSCNPGYQATPDRQGCTDIDECMIMNGGCDTQCTNSEGSYECSCSEGYALMPDGRSCADIDECENNPDICDGGQCTNIPGEYRCLCYDGFMASMDMKTCIDVNECDLNSNICMFGECENTKGSFICHCQLGYSVKKGTTGCTDVDECEIGAHNCDMHASCLNIPGSFKCSCREGWIGNGIKCIDLDECSNGTHQCSINAQCVNTPGSYRCACSEGFTGDGFTCSDVDECAENINLCENGQCLNVPGAYRCECEMGFTPASDSRSCQDIDECSFQNICVSGTCNNLPGMFHCICDDGYELDRTGGNCTDIDECADPINCVNGLCVNTPGRYECNCPPDFQLNPTGVGCVDNRVGNCYLKFGPRGDGSLSCNTEIGVGVSRSSCCCSLGKAWGNPCETCPPVNSTEYYTLCPGGEGFRPNPITIILEDIDECQELPGLCQGGNCINTFGSFQCECPQGYYLSEDTRICEDIDECFAHPGVCGPGTCYNTLGNYTCICPPEYMQVNGGHNCMDMRKSFCYRSYNGTTCENELPFNVTKRMCCCTYNVGKAGNKPCEPCPTPGTADFKTICGNIPGFTFDIHTGKAVDIDECKEIPGICANGVCINQIGSFRCECPTGFSYNDLLLVCEDIDECSNGDNLCQRNADCINSPGSYRCECAAGFKLSPNGACVDRNECLEIPNVCSHGLCVDLQGSYQCICHNGFKASQDQTMCMDVDECERHPCGNGTCKNTVGSYNCLCYPGFELTHNNDCLDIDECSSFFGQVCRNGRCFNEIGSFKCLCNEGYELTPDGKNCIDTNECVALPGSCSPGTCQNLEGSFRCICPPGYEVKSENCIDINECDEDPNICLFGSCTNTPGGFQCLCPPGFVLSDNGRRCFDTRQSFCFTNFENGKCSVPKAFNTTKAKCCCSKMPGEGWGDPCELCPKDDEVAFQDLCPYGHGTVPSLHDTREDVNECLESPGICSNGQCINTDGSFRCECPMGYNLDYTGVRCVDTDECSIGNPCGNGTCTNVIGSFECNCNEGFEPGPMMNCEDINECAQNPLLCALRCMNTFGSYECTCPIGYALREDQKMCKDLDECAEGLHDCESRGMMCKNLIGTFMCICPPGMARRPDGEGCVDENECRTKPGICENGRCVNIIGSYRCECNEGFQSSSSGTECLDNRQGLCFAEVLQTICQMASSSRNLVTKSECCCDGGRGWGHQCELCPLPGTAQYKKICPHGPGYTTDGRDIDECKVMPNLCTNGQCINTMGSFRCFCKVGYTTDISGTSCIDLDECSQSPKPCNYICKNTEGSYQCSCPRGYVLQEDGKTCKDLDECQTKQHNCQFLCVNTLGGFTCKCPPGFTQHHTACIDNNECGSQPLLCGGKGICQNTPGSFSCECQRGFSLDATGLNCEDVDECDGNHRCQHGCQNILGGYRCGCPQGYIQHYQWNQCVDENECSNPNACGSASCYNTLGSYKCACPSGFSFDQFSSACHDVNECSSSKNPCNYGCSNTEGGYLCGCPPGYYRVGQGHCVSGMGFNKGQYLSLDTEVDEENALSPEACYECKINGYPKKDSRQKRSIHEPDPTAVEQISLESVDMDSPVNMKFNLSHLGSKEHILELRPAIQPLNNHIRYVISQGNDDSVFRIHQRNGLSYLHTAKKKLMPGTYTLEITSIPLYKKKELKKLEESNEDDYLLGELGEALRMRLQIQLY

SEQ ID NO: 1022 - DNA, 443 bp, Homo sapiens
ggcacgaggcggagacgacggcggcggcagcgctccaactggctcctcgctccgggctccgccgtcgagccgggagagagcctccgccagcggccaggcaccagccagacgacgccagcgaccccggcctctcggtggcaccgcgctaactcaggggctgcataggcacccagagccgaactccaagatgggaggcaagctcagcaagaagaagaagggctacaatgtgaacgacgagaaagccaaggagaaagacaagaaggccgagggcgcggcgacggaagaggaggggaccccgaaggagagcgagccccaggcggccgcatagcccgccgaggccaaggagggcaaggagaagcccgaccaggacgccgagggcaaggccgaggagaaggagggcgagaaggacgcggcggctgccaaggaggaggccccgaaagcgg

SEQ ID NO: 1023 - DNA, 350 bp, Homo sapiens
  misc_feature (145)..(145): n is a, c, g, or t
  misc_feature (231)..(231): n is a, c, g, or t
  misc_feature (277)..(277): n is a, c, g, or t
ccggcccaactgcggcgtcatcccggctataagcgcacggcctcggcgaccctctccgacccggccgccgccgccatgcagccctccagccttctgccgctcgccctctgcctgctggctgcacccgcctccgcgctcgtaaggntcccgctgcacaagttcacgtccatccgccggaccatgtcggaggttgggggctctgtggaggacctgattgccaaaggccccgtntcaaagtactcccaggcggtgccagccgtgaccgaggggcccattnccgaggtgctcaagaactacatggacgcccagtactacggggagattggcatcgggacggccccccagtgctt

SEQ ID NO: 1024 - DNA, 1434 bp, Homo sapiens
ggttgggatctgaggggtcctctctgtgcccatcacagtttgagcttcagggaaaagaagaagaggtctttgcccttcgtttttccacgggaggagaatcaagagtgagccatggagctacgtgtggggaacaagtaccgcctgggacggaagatcgggagcgggtccttcggagatatctacctgggtgccaacatcgcctctggtgaggaagtcgccatcaagctggagtgtgtgaagacaaagcacccccagctgcacatcgagagcaagttctacaagatgatgcagggtggcgtggggatcccgtccatcaagtggtgcggagctgagggcgactacaacgtgatggtcatggagctgctggggcctagcctcgaggacctgttcaacttctgttcccgcaaattcagcctcaagacggtgctgctcttggccgaccagatgatcagccgcatcgagtatatccactccaagaacttcatccaccgggacgtcaagcccgacaacttcctcatggggctggggaagaagggcaacctggtctacatcatcgacttcggcctggccaagaagtaccgggacgcccgcacccaccagcacattccctaccgggaaaacaagaacctgaccggcacggcccgctacgcttccatcaacacgcacctgggcattgagcaaagccgtcgagatgacctggagagcctgggctacgtgctcatgtacttcaacctgggctccctgccctggcaggggctcaaagcagccaccaagcgccagaagtatgaacggatcagcgagaagaagatgtcaacgcccatcgaggtcctctgcaaaggctatccctccgaattctcaacatacctcaacttctgccgctccctgcggtttgacgacaagcccgactactcttacctacgtcagctcttccgcaacctcttccaccggcagggcttctcctatgactacgtctttgactggaacatgctgaaattcggtgcagcccggaatcccgaggatgtggaccgggagcggcgagaacacgaacgcgaggagaggatggggcagctacgggggtccgcgacccgagccctgccccctggcccacccacgggggccactgccaaccggctccgcagtgccgccgagcccgtggcttccacgccagcctcccgcatccagccggctggcaatacttctcccagagcgatctcgcgggtcgaccgggagaggaaggtgagtatgaggctgcacaggggtgcgcccgccaacgtctcctcctcagacctcactgggcggcaagaggtctcccggatcccagcctcacagacaagtgtgccatttgaccatctcgggaagtgaggagagcccccattggaccagtgtttgcttagtgtcttcactgtattttctttaaaaaaaaaaaaaaaaaaa

SEQ ID NO: 1025 - protein, 416 aa, Homo sapiens
MELRVGNKYRLGRKIGSGSFGDIYLGANIASGEEVAIKLECVKTKHPQLHIESKFYKMMQGGVGIPSIKWCGAEGDYNVMVMELLGPSLEDLFNFCSRKFSLKTVLLLADQMISRIEYIHSKNFIHRDVKPDNFLMGLGKKGNLVYIIDFGLAKKYRDARTHQHIPYRENKNLTGTARYASINTHLGIEQSRRDDLESLGYVLMYFNLGSLPWQGLKAATKRQKYERISEKKMSTPIEVLCKGYPSEFSTYLNFCRSLRFDDKPDYSYLRQLFRNLFHRQGFSYDYVFDWNMLKFGAARNPEDVDRERREHEREERMGQLRGSATRALPPGPPTGATANRLRSAAEPVASTPASRIQPAGNTSPRAISRVDRERKVSMRLHRGAPANVSSSDLTGRQEVSRIPASQTSVPFDHLGK

SEQ ID NO: 1026 - DNA, 5440 bp, Homo sapiens
  misc_feature (61)..(61): n is a, c, g, or t
  misc_feature (148)..(148): n is a, c, g, or t
  misc_feature (214)..(214): n is a, c, g, or t
  misc_feature (387)..(387): n is a, c, g, or t
  misc_feature (886)..(886): n is a, c, g, or t
  misc_feature (1628)..(1628): n is a, c, g, or t
  misc_feature (1631)..(1631): n is a, c, g, or t
  misc_feature (1634)..(1634): n is a, c, g, or t
  misc_feature (1662)..(1662): n is a, c, g, or t
  misc_feature (2506)..(2506): n is a, c, g, or t
  misc_feature (2590)..(2590): n is a, c, g, or t
  misc_feature (2761)..(2761): n is a, c, g, or t
  misc_feature (2814)..(2814): n is a, c, g, or t
  misc_feature (2827)..(2827): n is a, c, g, or t
  misc_feature (2870)..(2870): n is a, c, g, or t
  misc_feature (2944)..(2944): n is a, c, g, or t
  misc_feature (3842)..(3842): n is a, c, g, or t
  misc_feature (3896)..(3896): n is a, c, g, or t
  misc_feature (4096)..(4096): n is a, c, g, or t
  misc_feature (4130)..(4130): n is a, c, g, or t
agctcagatgccagagggaaccagccctccttctttgcatgcccccctgctgggaaggccnacagctacccgccaccttcgccctctgcaagacacccagaggaggctctttccagtggcacagtcatggggttggagggggcacagncagcccagccaggattcctcatgggaagtgtgtggtgcctctttagacttgcctgctaacgggagnctctgcccataacttcctcttcccactggagttcgttcaggaagccagaaccagcatggggatgctcagccctccaagatcccctaggaccatgggcagcccacccctcagcccagcttttgcctactttgaagacctcaaggacaagagggccctaatcttaccgagccagnccctcctcaatccaaggccttcttaggcgttgccaaggaaactgatgcagcagccaaagagcctggcccaggtctccatgacaacctaccacagcccaccagggtccatccatctgtgatgtcacctgagccccaaatggatgccctcccacccccaccacacttgtcacaatcagatgtcacagtctgatagcaggtccctgtcacaaaatacctcacagcctgacctgcaaccctcagacccctgagagatgagcagggagctaagacactcctcatgccttgaccacaccctgtgtttatgccccttttgggtgggggcctgaacctccaggccctggatgtgccctgggtggctggctcagcctacagctagagggaagaagggagaccttgacgactcgaagtgctgctcctgctggcattcaacacccattggcctggatttccccaactctgggcaacttccagtccaggagcagaataaccagagccacgnccagggccagggctggggcagattatttatttttagcagagttgctggcagctgcctggtgggtgctgggaggtgggatggggactgagtttaatcccttccctcttctgggctggggtatcctccccagggttcaagcaggcatctccacctgcaactctgtcagagctgcccccacccccaacaccctctcagggcctccaggggtcatgggtgacacaaccctcacactcaccactgaaggttaggctcattagggagaatcttcaactccaggatggggagtggaaaggattttgtgtgaatttaggacaccccctaaattctagctcagcctgagcctatggggagtgggtgtcatgggcagagaagggggatctctgtccagcctgtaactagcttacttgctaaaaggacgagccgggacttggggagaggaaagggagaattcagtctcacggggccagaccgaattcttcctccagagggcagttgctgcttttggctgattgggtttaccccgctgcctgcctccccatcacgtactcccaccgcaacctcgctctctctctccttctcacacacaccctcaagctccggacctcgcctaaccggtcagcccctctattcccagacagctaccgctactcccctggcgggtagggcggggtgtcggggatgtaaggtccgaggaagagggtgggggattccccctggtgggggtggacagacacgtcagccnccncancagcgtggaccgggggcgggagcggggncgggtggaggcttaaataaggcgactctggaccagagcccatgcggctgagaaggcggtggctgcagcagcagcggcggcggaaaccctaaagtccgagtccggactacgagtgcgtggcctcctaatccggatcctagtcctgagcgtgtctgtgtgcgagtgggtgagtgtcctggcggagcggggtcggggcggctgcagatggatgcgccaggtccggaggggtcccgggtgaggcgccgcgacctgggggctgggagggctgcggcgggacctcggccggagcatcccgcctgactccgggttggcaggtgcgccccgggtcccgcctcctcgcggcttacacggccactcgggttcctgatcccctagacggtcccggacgcgatgaccctgaacggcggcggcagcggagcgggcgggagccgcggtgggggccaggagcgcgagcgccgtcggggcagcacaccctggggccccgccccgccgctgcaccgccgcagcatgccggtggacgagcgcgacctgcaggcggcgctgaccccgggtgccctgacggcggccgcggccgggacggggacccagggtcccaggctggactggcccgaggactccgaggactcgctcagctcagggggcagcgactcagacgagagcgtttacaaggtgctgctgctgggggcgcccggcgtgggcaagagcgccctggcgcgcatcttcggcggtgtggaggacgggcctgaagcagaggcagcaggtgaggggaccagccgttcaggggaggggcatcccggggctaggactaggggctgagaccggtactcaaagccgcaaatacgttnaattatattgttgttgttgttgttattattattattattattattttattattattattttgagacagagtttcgctctttttnccaggctggagtgcagtggcctcgatctaggctcactgcaacctccgccttcaggtttcaagggattctcctgcctcagcctccagagtagctaggattacaggcgcctgctaccacgcccggctaatattgtgtttttagtagagttggggtttcaccatgttggccagntggctggaatttctgacctcgtgatccgcccaccaccttggcttcccaaagtnctgggattacagncgtgacagccgcacctggccaatactgtggaattctattggcnctttcagaatcattgccctacctacccacttcataaatggggaaaggaaaggagaaatcgggacaccccccagncctttggtaggaagaaatgcccaggtagaaggccagggcatagatatggctactctgtgggatgggactggacatccctccctgcctatcagggacaggtcagtttctaacagagtttctaaccagagggatttctaagagaggagccctaggtggccaaggtccaggggggatgtgggtgaaggtcaggcacaccatgccctccagcccccacttccctgcctggcactgctgttgccacataccagcatctgcaagtggagtggagggtaaaggagggctctggggaagagttggagggtgtggccagaacaggaaacctggcagcagcggctttgacaaccagctggtaacctgtctactgccttctgctagggcacacctatgatcgctccattgtagtggacggagaagaggcatcactcatggtctacgacatttgggagcaggtagggtgcaagcagagacccagggcaggggagggaggagtgagttgggttagaggtctgggagtgccaggctcgtgtcgggggcatgaggactgttgggcagatgtgtgttgtgtgttctccaggacgggggccgctggttgcccggccactgcatggccatgggggatgcctatgtcattgtgtactcagtgacggacaagggcagcttggagaaggcctcagaactgcgggtccagctgcggcggcacgtgcaaacagatgatgtgcccatcatcctcgtgggcaacaagagcgacctggtgcgctctcgtgaggtctcggtggatggtgagtaggcggcaggttgcagggggaggagagcccatcggcctctgatccaggcagtcttggctcagcttgagtccctggggatcatcagaggctaaaaatgttcagaaagaaaactngggaaatgggagagagctggtgcctgctcacagggctccggaaggccccacagntggggaaagaaccaaatctgataggggagctgggcaccgcaggcctcctcctgccccctcttggtcctggcctggctggttgggggggtaaatgggtggaagagagtgtaggggaacaggccaggaggtcagagctgtgtgctaggtctgggccattcttagagtagacttggcactggggaagacccttcccacttggnctcagcatccttttctgtggacccagtactgagnccctcagaggaaccagcagtgattggtgacttgtctccgcaaccccagtccactggatcattcattcatcatgatatataacctcgaattaaaaaatactaagttgtgccgggcatgggccagggggtcgtaacgcctgtaatcccagcactttgggaggccgaggcgggtggatcacgaggtcaggagatcgagaccatcctggctagcatggtgaaacccccatctctactaaaaatacaaaaattagccgggcgtggtgcgggcgcctgtagtcccagcgactcgggaggctgaggcaggagaatggcgtgaacccgggaggcggagctttcagtgagcagagatttggccactgcactccagcctgggagacagcgagactctatctcagaaaaataaaataaaataaaataaaatactaagttgtccaacatagttctcattttcctgtgtttactactgtcgtactttgtttaaatatcaggcttcaaattatttcaataaatggatctccttttgagggccactgttttgggggctccttaaacgcaggactctgcctcagtacaggagctggggtctctgctgtttccggggaggaccttgcaaattctcgagtggcagcttccatgggtggccactgttggaggggactcctacttcacccaccctttgtttactggtgcctgcctttccccaccacaatgtccaggcgctgtttgaaggtgtcgtgcgccagatacgcctgcgcagggacagcaaagaagccaacgcacgacggcaagcaggcacccggaggcgagagagccttggcaaaaaggcgaagcgcttcttgggccgcatcgtagctcgtaacagccgcaagatggcctttcgcgccaaatccaagtcctgccacgacctctcggttctctaggtcccacccgctcccactatggtgggagacgaacggaagggttggtgggctggcccagccaactgccccgggtgcctcagagcaggctcagactctgggtccctcggagctgccagccgggcacccccaacctcatggtcatggacagatagacagtgctgccctgcgaagtggctctcaggggccagtgagggctgggcccacagagatgcatgcgcaggctcatatgcgtcccaagcagccgcagcgcagccgccgggcaggcctgcgtgccgggagaggactctgccttttttcacagcccgggtgtgcctgccctggagggaggctcttcagtgcggtagctacttgtttacatgcagatttttgtaataaaggctatttcctgata

SEQ ID NO: 1027 - protein, 308 aa, Homo sapiens [sequence omitted]

SEQ ID NO: 1028 - DNA, 1160 bp, Homo sapiens
gcggcggcggcggcggcggctcctcagagtccggctcaggctccggctgcggctccagcccgcgatgccccattccgtgaccctgcgcgggccttcgccctggggcttccgcctggtgggcggccgggacttcagcgcgcccctcaccatctcacgggtccatgctggcagcaaggctgcattggctgccctgtgcccaggagacctgatccaggccatcaatggtgagagcacagagctcatgacacacctggaggcacagaaccgcatcaagggctgccacgatcacctcacactgtctgtgagcaggcctgagggcaggagctggcccagtgcccctgatgacagcaaggctcaggcacacaggatccacatcgatcctgagatccaggacggcagcccaacaaccagcaggcggccctcaggcaccgggactgggccagaagatggcagaccaagcctgggatctccatatggacaaccccctcgctttccagtccctcacaatggcagcagcgaggccaccctgccagcccagatgagcaccctgcatgtgtctccaccccccagcgctgacccagccagaggcctcccgcggagccgggactgcagagtcgacctgggctccgaggtgtacaggatgctgcgggagccagccgagcccgtggccgcggagcccaagcagtcaggctccttccgctacttgcagggcatgctagaggccggcgagggcggggattggcccgggcctggcggcccccggaacctcaagcccacggccagcaagctgggcgctccgctgagcggcctgcaggggctgcccgagtgcacgcgctgcggccacggcatcgtgggcaccatcgtcaaggcacgggacaagctctaccatcccgagtgcttcatgtgcagtgactgcggcctgaacctcaagcagcgtggttacttctttctggacgagcggctctactgtgagagccacgccaaggcgcgcgtgaagccgcccgagggctacgacgtggtggcggtgtaccccaatgccaaggtggaactcgtctgagctgggaccctgctcccacgcctgcttcttaaggtccctgctcggccggtgtaaatatgtttcaccctgtccctctaataaagctcctctgctccaccttgaa

SEQ ID NO: 1029 - protein, 330 aa, Homo sapiens
MPHSVTLRGPSPWGFRLVGGRDFSAPLTISRVHAGSKAALAALCPGDLIQAINGESTELMTHLEAQNRIKGCHDHLTLSVSRPEGRSWPSAPDDSKAQAHRIHIDPEIQDGSPTTSRRPSGTGTGPEDGRPSLGSPYGQPPRFPVPHNGSSEATLPAQMSTLHVSPPPSADPARGLPRSRDCRVDLGSEVYRMLREPAEPVAAEPKQSGSFRYLQGMLEAGEGGDWPGPGGPRNLKPTASKLGAPLSGLQGLPECTRCGHGIVGTIVKARDKLYHPECFMCSDCGLNLKQRGYFFLDERLYCESHAKARVKPPEGYDVVAVYPNAKVELV

SEQ ID NO: 1030 - DNA, 289 bp, Homo sapiens
  misc_feature (164)..(165): n is a, c, g, or t
  misc_feature (177)..(177): n is a, c, g, or t
cctgagaagccaactcagactcagccaacagagattgttgatttgcctcttaagcaagagattcattgcagctcagcatggctcagaccagctcatacttcatgctgatctcctgcctgatgtttctgtctcagagccaaggccaagaggcccagacagagttnncccaggcccggntcagctgcccagaaggcaccaatgcctatcgctcctactgctactacttttaatggaagaccgtgagacctgggtttgatgcagatctctattgccagaacatgaattcggg

SEQ ID NO: 1031 - DNA, 409 bp, Homo sapiens
  misc_feature (98)..(98): n is a, c, g, or t
  misc_feature (110)..(110): n is a, c, g, or t
  misc_feature (121)..(121): n is a, c, g, or t
  misc_feature (139)..(139): n is a, c, g, or t
  misc_feature (223)..(223): n is a, c, g, or t
ctgtcccgacccccggcctggcccactccgacccatacccggccgaaggttccgctggacacgcaggcggcctccggagcagcccaagcccatgaggncagcgcgcccgnccgccggtgcntgacgagacggagctccntggcccccagaggaggagcagaggatcaatgcggttcaagaatcgattccagcggttcatgaaccatcgagctccagccaatgncagctacaagccaacttgctatgaacatgctgctaactgttacacacacgcattcctcattgttccggccatccgtgggcagtgcctcctccatcggctgtctgatgactgctgggaaaagataacagcatggatttatggaatgggactctgtgccctcttcatcgtttctacagtatttcacaa

SEQ ID NO: 1032 - DNA, 4915 bp, Homo sapiens
gagaatcagagagagagagagagtctgtgtctctgggaaagaagaacatctctgcttcacagtgatttgcgctgggggagaggcatcaattggcttcggacccaagggggagacgagaccaggtcaccccggttaagaccaagtgagcgttgcccctccctctcccaactctctacccgggaatgtctcggcgaaagcagcggaaaccccaacagttaatctcggactgcgaaggtcccagcgcgtctgagaacggtgatgctagcgaggaggatcacccccaagtctgtgccaagtgctgcgcacaattcactgacccaactgaattcctcgcccaccagaacgcatgttctactgaccctcctgtaatggtgataattgggggccaggagaaccccaacaactcttcggcctcctctgaaccccggcctgagggtcacaataatcctcaggtcatggacacagagcatagcaaccccccagattctgggtcctccgtgcccacggatcccacctggggcccagagaggagaggagaggagtcttcagggcatttcctggtcgctgccacaggtacagcggctgggggaggcgggggcctgatcttggccagtcccaagctgggagcaaccccattacctccagaatcgacccctgcaccccctcctcctccaccaccccctccgcccccaggggtaggcagtggccacttgaatatccccctgatcttggaagagctacgggtgctgcagcagcggcagatccatcagatgcagatgactgagcaaatctgcaggcaggtgctgttgcttggctccttaggccagacggtgggtgcccctgccagtccctcagagctacctgggacagggactgcctcttccaccaagcccctactacccctcttcagccccatcaagcctgtccaaaccagcaagacactggcatcttcctcctcctcctcctcttcctcttcaggggcagaaacgcccaagcaggccttcttccacctttaccacccactggggtcacagcatcctttctctgctggaggggttgggcgaagccacaaacccacccctgccccttccccagccttgccaggcagcacagatcagctgattgcctcgcctcatctggcattcccaagcaccacgggactactggcagcacagtgtcttggggcagcccgaggccttgaggccactgcctccccagggctcctgaagccaaagaatggaagtggtgagctgagctacggagaagtgatgggtcccttggagaagcctggtggaaggcacaaatgccgcttctgtgccaaagtatttggcagtgacagtgccctgcagatccaccttcgttcccacacgggtgagaggccctataagtgcaatgtctgtggaaaccgttttaccacccgtggcaacctcaaagtgcatttccaccggcatcgtgagaagtacccacatgtgcagatgaacccacacccagtaccagagcacctagactatgtcattaccagcagtggcttgccttatggtatgtccgtgccaccagagaaggccgaggaggaggcagccactccaggtggaggggttgagcgcaagcctctggtggcctccacaacagcactcagtgccacagagagcctgactctgctctccaccagtgcaggcacagccacggctccaggactccctgctttcaataagtttgtgctcatgaaagcagtggaacccaagaataaagctgatgaaaacacccccccagggagtgagggctcagccatcagtggagtggcagaaagtagcacggcaactctcatgcaactaagtaagttgatgacttcactaccaagctgggcactgcttaccaaccacttcaagtccactggcagcttcccgcttcccctatgtgctagagccttgggggcctcaccctctgagacatcaaagctgcagcaactggtagaaaagattgaccggcaaggagctgtggcggtgacctcagctgcctcaggagcccccaccacctctgcccctgcaccttcatcctcagcctcttctggacctaaccagtgtgtcatctgtctccgagtgcttagctgtcctcgggccctacgccttcattatggccaacatggaggtgagaggcccttcaaatgcaaagtgtgtggcagagccttctccaccaggggtaatctgcgtgcacatttcgtgggccacaaggccagtccagctgcccgggcacagaattcctgccccatctgccagaagaagttcaccaatgctgtcactctgcagcagcatgtccggatgcacctggggggccagatccccaacggtggtactgcactccctgaaggtggaggagctgctcaggagaatggctccgagcaatctacagtctccggagcagggagtttcccccagcagcagtcccagcagccatcaccggaagaggagttgtctgaggaggaggaagaggaggatgaggaagaagaggaagatgtgactgatgaagattccctggcagggagaggctcagagagtggaggtgagaaggcaatatcagtgagaggtgattcagaagaggcatctggggcagaggaggaggtggggacagtggcggcagcagccacagctgggaaggagatggacagtaatgagaaaactactcaacagtcttctttgccaccaccaccaccacctgacagcctggatcagcctcagccaatggagcagggaagcagtggtgttttaggaggcaaggaagaggggggcaaaccggagagaagctcaagtccggcatcagcactcaccccagaaggggaagccaccagcgtgaccttggtagaggagctgagcctgcaggaggcaatgagaaaggagccaggagagagcagcagcagaaaggcctgcgaagtgtgtggccaggcctttccctcccaggcagctctggaggagcatcagaagacccaccccaaggaggggccgctcttcacttgtgttttctgcaggcagggctttcttgagcgggctaccctcaagaagcatatgctcctggcacaccaccaggtacagccctttgccccccatggccctcagaatattgctgctctttctctagtccctggctgttcgccttccatcacctccacagggctctccccctttccccgaaaagatgaccccacgatcccatgagcctgtttttctgtacctgctgctctttgtcccacagagcagaaacagcttcacaaaaggacctcccagagttatgagccctgattttgtctttttctctaagttcttaacatgttatgtccctagtggcttttctgtagtccctgagcttggaaattactgtgcttacaaggggatggccccctaaggaatttttcttccctcctcattctttgtacctgaggaacatagattctctgcagctttctcaaggggaaccctctccagcttccctggtgtgacccttcttccccctcctctctcctctccctttccctttggtaggtgcacctgagcacctacatttggcattgcagcctagccaaaaagggctggcagctgtctctggagggcccagtgccactcctctggggtgacctttctgctcagctggtgggtatgggtcccctatctttctagaaccagtatgtggcattcctgtcaaatgggctgcccatgaagccctggaattccagctccacctccactaccactccaagcctggccccaccagtgctgtttggcctaggaactgtggctgggaaggtgcctccaacaatgggatccagggaagccaaggagaagacagcccccctcctatttcagcctcctgcacccaaggcagtgcctgagaagcccatcatagacaagaagtagcaaactgtacattccttcttcctccccctgctccagaaggtgccggtactgaagatgctccagtaattggtgacccaaccctaggaagtagggagaaatgaaggaagggcataggaaattttcccaggtaaatcccctgatggtcacattaaggtaaaggttttggctggtcagtgtgccaagacctctccagcttctcattcatgatgacctctcaaagttgggaaacaagctgatttcttgccaagaggtctcccaggagatatttgggaaatgtgaagttcgtatctttaaggagcacttttggtcagcatggttgatgaactaatgatgagagagttaaggaatgttgctagaacatagggcttgctggtacctatgtgactaagaaagggacatgatgtaagggaaaaggcctcaaattcttgtgaatgtggacattctcgttaatattcttttgggctaatagtgacatagtgtgcagaggtgtaccagggatcatgggggatttcctagcactagtatgcttctagttttagataactccctcctttattccctggccccttgtattttccttatcttcctctttcaagacccctacccattttgcctatccgtaggctggggcttgtgtctttgtcattgtctggttcttaagagtcccagactttgggagaccagctccaggtggcgtcctccctgcctctccgtcttgtaatgagttgtagtatttactcttaacataggatcatttggaacaggagttctgaggaggagagagtgagggttttgctattgactgacttgaacgatggcttctcctcaagctgtaggctccagagcttcctaacctagtaaaatgtcaagaacagacgggagatattagtgtctttccctctatcattaaaggtgttttaaccaagaaaaaaagaaaaaaaaaaaaaaaaaaaaaaaaaaaaaaaaaaaaaaaaaaaaaaaaaaaaaaaaaaaaaaaaaaaaaaaaaaaaaaa

SEQ ID NO: 1033 - DNA, 2816 bp, Homo sapiens
aggttcggggcgcgggtctcttccgcggaaactgacattgcgtttccgttgtcggcctcccactgcagtatcaccttctcccccaagtgtgacaaccaaagatgtctccagatattgccagatgtcctcttggaagcaagatcgctccgggttgagatccacagagctaaacgttttagagtaccaaccattgtgtgctgtgaggtaaaggagccatatattgaagaccatgtctgggagcttctactttgtaattgttggccaccatgataatccagtttttgaaatggagtttttgccagctgggaaggcagaatccaaagacgaccatcgtcatctgaaccagttcatagctcatgctgctctcgacctcgtagatgagaacatgtggctatcgaacaacatgtacttgaaaactgtggacaagttcaacgagtggtttgtgtcggcatttgtcactgcgggacatatgaggtttattatgcttcatgacataagacaagaagatggaataaagaacttctttactgatgtttatgatttatatataaagttttcaatgaatccattttatgaacccaattctcctattcgatcaagtgcatttgacagaaaagttcagtttcttgggaagaaacaccttttaagctgaatgcagaaaattccaaaataaatgatgtcaccacaatggtgtatactcaggaatgtgtacattgtaagttacttgattaaatagcctggaaaacttttgtgtattctcagcttatctaaacctaatgaaattccttttatatttaaaaatagtacattctgtctcatgtcacgtatcaatagatcaattggtatttccttgtgaacagtgttatttataaagagttcattatcaataatcatgttttttttttttttttttttctgatacagagtctcactctgttgccaggctggagtgcagtggcgcaatcttggctcactgcaacctccgcctcccaggttcaggcgattctcctgcctcagcctccaagtagctgggactacaggcgcgtgccaccacgcccggctaatttttgtatttttagtagagacagggtttcaccatattggtcaggctggtcttgaactcctgacctcgtgatctgcccgccttggcctcccaaagtactgggattacaggcgtgagccaccgtgcccaaccatgaaatatttttacttaaaaattgggaataagctcgctttttttttttttgagatggagtcttgctcctgttgtgcaggctgtagtgcagtggcacgatcttggctcactgcaacctccacctcccgggttcaagcaattctccttcttcagcctcccgagtagctgagattataggcgtgcaccaccacacctggctaatttttgtatttttagtagagacagggtttcaccatattggtcaggctggtcttgaactcctgacctcgtgatccacccacctcaggaagtgctgggattacaggcgtgtgagccaccacgcccggccatgaaatatttttacttaaaaattgggaataagctttttggttttttgtgggtttttgtttttgttttttgttttttgtttttttgagatggagtcttgctcctgttgtgcaggctggagtgcagtggcacagtcttggctcactgcaacctccacctcctgggttcaagcaattctccttcttcagcctcccgagtagctgggattacaggcatgcaccaccacacctggctaatttttgtgtttttagtagagacggggtttcgctattttggccgggctggtttcaaactcctgacctcagttgatccacccgcctcagcctcccaaagtgctaggattacaggcatgaaccaccgtgcccggccaggaataagcttttgacttacccaattcagataggttgatctttggggttttttttttttttttgagatggagtttcgctctgttgtccaggctggagtgcaatggcagttgtttcaccgtaacctctgcctcctgacttcaagcaattctcctgcctcagcctcccaaagtgctgggattacaggtgtgagccaccgtgcccggcccagataggttgatcttaatgtaacaacccaaaaataaatgtcatagtcaagatttggtagataaatttaaaattaaaatattctgcagttgggagtgaaatgtgatagcacatacgttgacattatgcatttagagatgttataaaaatgtataggcagtatacacagcactactcaagaagccaaagaaacacttgtgcagtgctaagtgtcacatgtctgcttccaccagaggctaggaatagtgatcctgctataatgtgagaacccaaatcatgtttataaaataggacgctgggagcagttgcaggccacagtgaagtgtgttgcttctgtcactttatattcttatatttcctttccctcagacagtaaactgttgatactcgtacttgtaaaaaattgtaaggcaatttttagtattgttgtcaaagaaaagcttggattacattaacatttgtattcagtcttttaggtgatacaccagagggggctgggaattgtctctttgttcctataagtagatcttaatgtaaaatagtaaatgtccattgaaaagcaagtaatacagcctgtgctaattgggagcacttgaacaattttgttccattctgagtaacttttgagcaagtaattctaagctttgtcttgtatccttgtgtgaaattgcataatttttaccctatttgatttcttaaataaagatgtttgctcaaga

SEQ ID NO: 1034 - protein, 140 aa, Homo sapiens [sequence omitted]

SEQ ID NO: 1035 - DNA, 2650 bp, Homo sapiens
agggacagcccagaggaggcgtggccacgctgccggcggaagtggagccctccgcgagcgcgcgaggccgccggggcaggcggggaaaccggacagtaggggcggggccgggccggcgatggggatgcgggagcactacgcggagctgcacccgtgcccgccggaattggggatgcagagcagcggcagcgggtatggcaggcagccggcgggccggcctccagcgcaggtgcccgagaggcaggggctggcctgggatgcgcgcgcacctgccctcgccccgccccgcccgcacgaggggtggtggccgaggccccgccccgcacgcctcgcctgaggcgggtccgctcagcccaggcgcccgcccccgcccccgccgattaaatgggccggcggggctcagcccccggaaacggtcgtaacttcggggctgcgagcgcggagggcgacgacgacgaagcgcagacagcgtcatggcagagcaggtggccctgagccggacccaggtgtgcgggatcctgcgggaagagcttttccagggcgatgccttccatcagtcggatacacacatattcatcatcatgggtgcatcgggtgacctggccaagaagaagatctaccccaccatctggtggctgttccgggatggccttctgcccgaaaacaccttcatcgtgggctatgcccgttcccgcctcacagtggctgacatccgcaaacagagtgagcccttcttcaaggccaccccagaggagaagctcaagctggaggacttctttgcccgcaactcctatgtggctggccagtacgatgatgcagcctcctaccagcgcctcaacagccacatggatgccctccacctggggtcacaggccaaccgcctcttctacctggccttgcccccgaccgtctacgaggccgtcaccaagaacattcacgagtcctgcatgagccagataggctggaaccgcatcatcgtggagaagcccttcgggagggacctgcagagctctgaccggctgtccaaccacatctcctccctgttccgtgaggaccagatctaccgcatcgaccactacctgggcaaggagatggtgcagaacctcatggtgctgagatttgccaacaggatcttcggccccatctggaaccgggacaacatcgcctgcgttatcctcaccttcaaggagccctttggcactgagggtcgcgggggctatttcgatgaatttgggatcatccgggacgtgatgcagaaccacctactgcagatgctgtgtctggtggccatggagaagcccgcctccaccaactcagatgacgtccgtgatgagaaggtcaaggtgttgaaatgcatctcagaggtgcaggccaacaatgtggtcctgggccagtacgtggggaaccccgatggagagggcgaggccaccaaagggtacctggacgaccccacggtgccccgcgggtccaccaccgccacttttgcagccgtcgtcctctatgtggagaatgagaggtgggatggggtgcccttcatcctgcgctgcggcaaggccctgaacgagcgcaaggccgaggtgaggctgcagttccatgatgtggccggcgacatcttccaccagcagtgcaagcgcaacgagctggtgatccgcgtgcagcccaacgaggccgtgtacaccaagatgatgaccaagaagccgggcatgttcttcaaccccgaggagtcggagctggacctgacctacggcaacagatacaagaacgtgaagctccctgacgcctacgagcgcctcatcctggacgtcttctgcgggagccagatgcacttcgtgcgcagcgacgagctccgtgaggcctggcgtattttcaccccactgctgcaccagattgagctggagaagcccaagcccatcccctatatttatggcagccgaggccccacggaggcagacgagctgatgaagagagtgggtttccagtatgagggcacctacaagtgggtgaacccccacaagctctgagccctgggcacccacctccacccccgccacggccaccctccttcccgccgcccgaccccgagtcgggaggactccgggaccattgacctcagctgcacattcctggccccgggctctggccaccctggcccgcccctcgctgctgctactacccgagcccagctacattcctcagctgccaagcactcgagaccatcctggcccctccagaccctgcctgagcccaggagctgagtcacctcctccactcactccagcccaacagaaggaaggaggagggcgcccattcgtctgtcccagagcttattggccactgggtctcactcctgagtggggccagggtgggagggagggacaagggggaggaaaggggcgagcacccacgtgagagaatctgcctgtggccttgcccgccagcctcagtgccacttgacattccttgtcaccagcaacatctcgagccccctggatgtcccctgtcccaccaactctgcactccatggccaccccgtgccacccgtaggcagcctctctgctataagaaaagcagacgcagcagctgggacccctcccaacctcaatgccctgccattaaatccgcaaacagccaaaaaaaaaaaaaaaaaaaa

SEQ ID NO: 1036 - protein, 515 aa, Homo sapiens
MAEQVALSRTQVCGILREELFQGDAFHQSDTHIFIIMGASGDLAKKKIYPTIWWLFRDGLLPENTFIVGYARSRLTVADIRKQSEPFFKATPEEKLKLEDFFARNSYVAGQYDDAASYQRLNSHMDALHLGSQANRLFYLALPPTVYEAVTKNIHESCMSQIGWNRIIVEKPFGRDLQSSDRLSNHISSLFREDQIYRIDHYLGKEMVQNLMVLRFANRIFGPIWNRDNIACVILTFKEPFGTEGRGGYFDEFGIIRDVMQNHLLQMLCLVAMEKPASTNSDDVRDEKVKVLKCISEVQANNVVLGQYVGNPDGEGEATKGYLDDPTVPRGSTTATFAAVVLYVENERWDGVPFILRCGKALNERKAEVRLQFHDVAGDIFHQQCKRNELVIRVQPNEAVYTKMMTKKPGMFFNPEESELDLTYGNRYKNVKLPDAYERLILDVFCGSQMHFVRSDELREAWRIFTPLLHQIELEKPKPIPYIYGSRGPTEADELMKRVGFQYEGTYKWVNPHKL

SEQ ID NO: 1037 - DNA, 450 bp, Homo sapiens
ttgtagaggcgagctcttgctatgttgcctaggctcgggcttgaactcctgagctcaagagatcctcccactttggcctcccaaagtgctcggattacaggcccagcctcaagatattttttaaagtcatgctttaaggtggcattccacgttaaaatattctccctcattcacttcaagacaggttgatcagccatcaaggcctgccctagacatacagggtcgtgtggataacaggcacgttttgggggcttcctttgcaaatcaaatctctctaagagatggcaaacaccaaaaaaagggatccattataggttgctcatgttatatgccctcacaaaagtgacaacatttctcctacatggcttgcttggaataagaactattataaaagaagtcctctgaatatataagtgtgtgtgtgtgtgtgtgtgtgtgtgtgtgtgtgtg

SEQ ID NO: 1038 - DNA, 441 bp, Homo sapiens
cggttgtcgccccagtggccgccctctgagcacgtgttactgccagtctgcgtcacgttgggtaaatacatgactggccgacgscgccgggcgggggctatttaagagacagmcgcccgctggtcctccctgaacttggctcagctgccgggctgctccggttggaaacgccaagccagctgcgtcctaatccaaaagccatgaacagcggcgtgtgcctgtgcgtgctgatggcggtactggcggctggcgccctgacgcagccggtgcctcccgcagatcccgcgggctccgggctgcagcgggcagaggaggcgcccgtagcagctgagggtatcgcagagaacggatggcgagtcccgagcgcacctgggcgccctgctggcaagwwacatccagcaggccggaaagctccttctggacgatgcatcgttaagacct

SEQ ID NO: 1039 - DNA, 3817 bp, Homo sapiens
tgaattcgtgagagacttgagggaggcgctgcgactgacaagcggctctgcccgggaccttctcgctttcatctagcgctgcactcaatggaggggcgggcaccgcagtgcttaatgctgtcttaactagtgtaggaaaacggctcaacccaccgctgccgaaatgaagtataagaatcttatggcaagggccttatatgacaatgtcccagagtgtgccgaggaactggcctttcgcaagggagacatcctgaccgtcatagagcagaacacagggggactggaaggatggtggctgtgctcgttacacggtcggcaaggcattgtcccaggcaaccgggtgaagcttctgattggtcccatgcaggagactgcctccagtcacgagcagcctgcctctggactgatgcagcagacctttggccaacagaagctctatcaagtgccaaacccacaggctgctccccgagacaccatctaccaagtgccaccttcctaccaaaatcagggaatttaccaagtccccactggccacggcacccaagaacaagaggtatatcaggtgccaccatcagtgcagagaagcattgggggaaccagtgggccccacgtgggtaaaaaggtgataacccccgtgaggacaggccatggctacgtatacgagtacccatccagataccaaaaggatgtctatgatatccctccttctcataccactcaaggggtatacgacatccctccctcatcagcaaaaggccctgtgttttcagttccagtgggagagataaaacctcaaggggtgtatgacatcccgcctacaaaaggggtatatgccattccgccctctgcttgccgggatgaagcagggcttagggaaaaagactatgacttcccccctcccatgagacaagctggaaggccggacctcagaccggagggggtttatgacattcctccaacctgcaccaagccagcagggaaggaccttcatgtaaaatacaactgtgacattccaggagctgcagaaccggtggctcgaaggcaccagagcctgtccccgaatcacccacccccgcaactcggacagtcagtgggctctcagaacgacgcatatgatgtcccccgaggcgttcagtttcttgagccaccagcagaaaccagtgagaaagcaaacccccaggaaagggatggtgtttatgatgtccctctgcataacccgccagatgctaaaggctctcgggacttggtggatgggatcaaccgattgtctttctccagtacaggcagcacccggagtaacatgtccacgtcttccacctcctccaaggagtcctcactgtcagcctccccagctcaggacaaaaggctcttcctggatccagacacagctattgagagacttcagcggctccagcaggcccttgagatgggtgtctccagcctaatggcactggtcactaccgactggcggtgttacggatatatggaaagacacatcaatgaaatacgcacagcagtggacaaggtggagctgttcctgaaggagtacctccactttgtcaagggagctgttgcaaatgctgcctgcctcccggaactcatcctccacaacaagatgaagcgggagctgcaacgagtcgaagactcccaccagatcctgagtcaaaccagccatgacttaaatgagtgcagctggtccctgaatatcttggccatcaacaagccccagaacaagtgtgacgatctggaccggtttgtgatggtggcaaagacggtgcccgatgacgccaagcagctcaccacaaccatcaacaccaacgcagaggccctcttcagacccggccctggcagcttgcatctgaagaatgggccggagagcatcatgaactcaacggagtacccacacggtggctcccagggacagctgctgcatcctggtgaccacaaggcccaggcccacaacaaggcactgcccccaggcctgagcaaggagcaggcccctgactgtagcagcagtgatggttctgagaggagctggatggatgactacgattacgtccacctacagggtaaggaggagtttgagaggcaacagaaagagctattggaaaaagagaatatcatgaaacagaacaagatgcagctggaacatcatcagctgagccagttccagctgttggaacaagagattacaaagcccgtggagaatgacatctcgaagtggaagccctctcagagcctacccaccacaaacagtggcgtgagtgctcaggatcggcagttgctgtgcttctactatgaccaatgtgagacccatttcatttcccttctcaacgccattgacgcactcttcagttgtgtcagctcagcccagcccccgcgaatcttcgtggcacacagcaagtttgtcatcctcagtgcacacaaactggtgttcattggagacacgctgacacggcaggtgactgcccaggacattcgcaacaaagtcatgaactccagcaaccagctctgcgagcagctcaagactatagtcatggcaaccaagatggccgccctccattaccccagcaccacggccctgcaggaaatggtgcaccaagtgacagacctttctagaaatgcccagctgttcaagcgctctttgctggagatggcaacgttctgagaagaaaaaaaagaggaaggggactgcgttaacggttactaaggaaaactggaaatactgtctggtttttgtaaatgttatctatttttgtagataattttatataaaaatgaaatattttaacattttatgggtcagacaactttcagaaattcagggagctggagagggaaatctttttttcccccctgagtgttcttatgtatacacagaagtatctgagacataaactgtacagaaaacttgtccacgtccttttgtatgcccatgtattcatgtttttgtttgtagatgtttgtctgatgcatttcattaaaaaaaaaaccatgaattacgaagcaccttagtaagcaccttctaatgctgcattttttttgttgttgttaaaaacatccagctggttataatattgttctccacgtccttgtgatgattctgagcctggcactgggaatctgggaagcatagtttatttgcaagtgttcaccttccaaatcatgaggcatagcatgacttattcttgttttgaaaactcttttcaaaactgaccatcttaaacacatgatggccaagtgccacaaagccctcttgcggagacatttacgaatatatatgtggatccaagtctcgatagttaggcgttggagggaagagagaccagagagtttagaggccaggaccacagttaggattgggttgtttcaatactgagagacagctacaataaaaggagagcaattgcctccctggggctgttcaatcttctgcatttgtgagtggttcagtcatgaggttttccaaaagatgtttttagagttgtaaaaaccatatttgcagcaaagatttacaaaggcgtatcagactatgattgttcaccaaaataggggaatggtttgatccgccagttgcaagtagaggcctttctgactcttaatattcactttggtgctactacccccattacctgaggaactggccaggtccttgatcatggaactatagagctaccagacatatcctgctctctaagggaatttattgctatcttgcaccttctttaaaactcaaaaaacatatgcagacctgacactcaagagtggctagctacacagagtccatctaatttttgcaacttccccccccgaattc

SEQ ID NO: 1040 - protein, 834 aa, Homo sapiens
MKYKNLMARALYDNVPECAEELAFRKGDILTVIEQNTGGLEGWWLCSLHGRQGIVPGNRVKLLIGPMQETASSHEQPASGLMQQTFGQQKLYQVPNPQAAPRDTIYQVPPSYQNQGIYQVPTGHGTQEQEVYQVPPSVQRSIGGTSGPHVGKKVITPVRTGHGYVYEYPSRYQKDVYDIPPSHTTQGVYDIPPSSAKGPVFSVPVGEIKPQGVYDIPPTKGVYAIPPSACRDEAGLREKDYDFPPPMRQAGRPDLRPEGVYDIPPTCTKPAGKDLHVKYNCDIPGAAEPVARRHQSLSPNHPPPQLGQSVGSQNDAYDVPRGVQFLEPPAETSEKANPQERDGVYDVPLHNPPDAKGSRDLVDGINRLSFSSTGSTRSNMSTSSTSSKESSLSASPAQDKRLFLDPDTAIERLQRLQQALEMGVSSLMALVTTDWRCYGYMERHINEIRTAVDKVELFLKEYLHFVKGAVANAACLPELILHNKMKRELQRVEDSHQILSQTSHDLNECSWSLNILAINKPQNKCDDLDRFVMVAKTVPDDAKQLTTTINTNAEALFRPGPGSLHLKNGPESIMNSTEYPHGGSQGQLLHPGDHKAQAHNKALPPGLSKEQAPDCSSSDGSERSWMDDYDYVHLQGKEEFERQQKELLEKENIMKQNKMQLEHHQLSQFQLLEQEITKPVENDISKWKPSQSLPTTNSGVSAQDRQLLCFYYDQCETHFISLLNAIDALFSCVSSAQPPRIFVAHSKFVILSAHKLVFIGDTLTRQVTAQDIRNKVMNSSNQLCEQLKTIVMATKMAALHYPSTTALQEMVHQVTDLSRNAQLFKRSLLEMATF

SEQ ID NO: 1041 - DNA, 296 bp, Homo sapiens
  misc_feature (20)..(20): n is a, c, g, or t
  misc_feature (44)..(44): n is a, c, g, or t
  misc_feature (120)..(120): n is a, c, g, or t
  misc_feature (194)..(195): n is a, c, g, or t
  misc_feature (272)..(272): n is a, c, g, or t
  misc_feature (290)..(290): n is a, c, g, or t
accaatctgaagtgggagcnggcccctgagcagtgttctctgtnctgagcggcgggactgagctgttgagttagagccaacatgagtgagctacaaggtgctggggcaaccaatggaaangacaagacatctggtgaaaatgatggacagaagaaagttcaagaagagtttgacattgacatggatgcaccagnngacagaacgtgcagcggtggccattcagtctcagttcagaaaattccagaggaagaaggctgggtctcagtcctagntgggagaaccccctcctngtccac

SEQ ID NO: 1042 - DNA, 466 bp, Homo sapiens
aaattttgagtgacttgagtctcttgcagtccctgattacacagaacctttctgggctacttggagcatcacgaatagtctttcctgtacttaccagatttcaagtattcataacttgactccctaagtgtacaagttgggaatagtacagggccaagttcaagtcgcatatgctgtactgttcctcctgcaaatgtggggaaagaagagggagatactagaggaactgaggctccacccattcattcagttgctctaagcaccagaggacttgtttcagaaaaggggagtgggaacgccctccgactttgccctcctccggagcatctctgggacgcagggagtctggctagcgttaataggaaaggttgctcggcagagtggccctggagtactgacttgtctctccctcctttgtcaaggtccatgtttttctggctcttcctgcacactcatccctagatta

SEQ ID NO: 1043 - DNA, 5093 bp, Homo sapiens
gctgcggaaggccaaggaatgggaattgaagaacgggacctaggggacagcagcaccactccagcctcagagactgcacacccccttgcctgtatcctcatctgtgtgacggcaggaagctctgcccagagtggcctcagctgcacgactccagaggctccacgactgagctctgaggccagtgcctgtcccccaggcccacttgtattctttctactgtaaaatggcgcctttaaaaaagatgtaagactttggttcccaactttgttaaaaaacaaaaaaagtgatggaaaggtgtttgaaaggatgctatcaggcgacgtgacatctttctaaccagacaggccattgctttcaccgattccaacccagccctggactgaggatggatggttccatgagcccccagatgaaaacctggattcgacagggaagagcttggatccccggctgccccgggcatgagtgtggctggcgcatgggcactgggctcgccttgcacgcccaccaggagggccaggggcatacgcagtcctgacgtggactttgtgtcttggagtaccctctccacgtgcccgtccccctcgtcatcagaggtaaaggcatgagaaaatcgcgctgtgaaacgttttttaccttttattattattttttggacagatgcttttgtcaccaagacatgaaaagctgccattcttcttaacctgttttttaagaatgtctttttactgtgtgtcacacttagatcaaggagttttcagaggttccttattttattaattatttgtgctgcttttgacaggtagcagagggttttaatacttcactaacagtacaccctcctcccccttgggctagcatccccagcccttaatccacgtcggagccggcaggtgcttctcacaccaggagcctctgggggcaggggctggctcctcgccgctgtacaggacgtttactgctgcttggggccagggcagtcctttgaaagggaagcaagttccggaatttgttccctcatggaactataacaccttagagcaagaggcaggaattccagggcctcctgcccctccccttcctccagcttgtcaagttaaaccactaatgtgttggtgggcctggccgtgctgcctctcctgagtagggtgggtgcaagtagggcctctttcccagctttcttgcttgccttctgtgcaatatttcttggagaatttggatgcctaaggcataaaggaaaaaaacagagttcatagtttgagctggtatttaccccctgggtttaaaaatcagattaacttcttggtctcccggaggctgctgtcaggaattctccagtacgggaagatgcagtcacttatgacgaaataagtcacccctgaacgcctccgcaggcagattcatggagaccagtcccagtagcaaccgccccttccccaagcatagaatacagaggtgccatacttggtgtaagccttccttctgtccactgtccagaatgtcctttttcacacggaggaagagatggcgggaaaacactgactgactccttgggtttcccccagacatactttcagagcgctagctgtgtggtgcacgggactttacagttaggattcatgtttaaggtggtggcgcttgaggcctgcaagggccacgttggattactgaagcggaaagcggtctcccatgtataagaaaaagttttacaacacgaattggaagctgcttgagtccacctgaacttgaattgattgcaaagccatctgccgggaacggttttgggttcctgagccatcagccagcctttctttcccctctgatgcacgttcctcccggcctagtccgtggaggcccatcacaccagcatccgtgacgccagcttcccactaggacatccaggcaggtcgggcggggacgccacacgcctcagggccgtccgctgcattgccatagaggagccctccctccagtggtcacttcccaccattgcaggcagacttcccaccattgcaggcagctgggcccacttcatatcacacaaaatgaattttctataaagggaaaaaagtttgctcctccatagattttttagctgccttcgggtcaaatagtttccctggttgacgctcttgggccactctgattggcagcctgctttgccaaagagaactgtgtgaggttttggtggttagtaagagaagggggagatggccagcctgaagtcacggtcctggcccagcacaggtgggcagcagcgagctggcaggtgaagtgtgagcagcacgcaaagtgtcacgtgggccttagccgtcacccaccagcttcctcaccaggcaaggaggccccggagccttagcagggacttgcccgacggcacagctgattggtgctcgactcccagcatgcatattttggttgtaaaaacccaggtttgtaattcacatccacaaccctaagccttttaaagcggaggcaaacgttaacgaaccccatcgtggtccatggagcctttcaaaatgggtgccctggaggggcctgacagtgggttccttccatggcggatactcccttgatatttcacattccatcaaagtttaaagcatttacttcagaataagttatttatgtgtatatgttcaataaatatagtttttaatttatatctgtacatattagacacacgcgagccatcttgccagaattctgacagtgatgtcattttattcccctcccaaaacatgccccaggaacaagcaccccttgcctctgtggcagctgcgagtgtgtctgatttcataacgaagccaggctgagggcaagaggcccgacaggcaggccagggtccccggagaagccggatttcttcgcaatgtcactggtacttagcagatggtcgtgttcacaggggctagccacctgtactacggtgccgaccgcaatgcgaggaatgtggtggccacgcgatggagctggccggaggacaggtcaggtgagggggccgacccctgcggggctcagggctccttccattctaaccttgagccacagtgtcactcttcagggctctgctcctggctctattttgttaaggtgtcatcagccttcagcctccatttatatatttttataatgttaagccactgaccaactttttcatagaaacaactatcagattcgagggctccctttgtccccctgacctgggcacaggcatgggccatggctccctcttcccagaatctgcggggaactggggcaaggcccatctgtctgcaaggctggtagctctctccctcggcttccagagtccacggcagttgcaaggtaaccagtgtggatctgctgagtcaccccaggcaccagacttaccccaggagcatgggccactgtccatggggccttccttgagaccttcccttggggctggcgggcggcggcttaccagctgggtcagtcccatctcgcccctctgtgcctatgccctggcgttgccaggcttaaccttcccctgtatcttactcatcccagaattattactggccatttctaaatagacaaaaactaccctaaaatgtggagatttactccttttgaaaagtctgtttcaaaaagtgtggcctcagctctggaggccacccccaggaaggagtttgaggttcattgtcattatggccacagtttggtgcttgtgcacgggactcaaagggcagcgtcgaagctggggttaggtgtagggttgtgascaaagctcccctgtttgtggccacaccttccctttccaaaaaggctattaattctactcacccactatttggggggatgtaaattttgcccacagactttgccacccaggtgaggtgctgtgttcatgcacggaactgatgtcattagacaccatccaaggatgggcagcctgcagtgtggccggcgactgccatccagagaaaaggcaccttgtgccacagggcggggccgacaccctgagctcacaggtggcccctgcattcaggtggatgtccatccttgaaacagcctcttctgggaacacagcactggaggtctccaggcatcagggttggccggcagggtgccctgcagcttacataaaggtcgtggcaatgtttcaatgttaaactaaactattgccttcctcttacttttcctaaaatgattttctaatgggaacagtcacttcaagttcatgacatagtttgaaggaggataattcattttttcctggttgtcgctgtcttcttatccccttggtgggctgggttcatactgtgaaataaactaaaatgaaaccaaaacgttcctgccataaatacgtggcacagcactgcagaaaaagcagtcacctctattcgtgagtccccaagccatagcagggcgtctgtaaaagaagggaaactgcacctaggaagtggtgggcgtcagacgcatcctttcgcccgtagttcatgaaatagttccggctttggtcttccagaaaatctcaacttcaccgtgcacaagtgttaccgggtctttttagtgtagccatggaagatactttcaaaaggacatcttcagatcataagtcttaggaccaaaggtgtttttaatgagataatctttttgattttctaacaagaaaggaaatattcactttacattttaacatcaacttttaagtgatattcagaattaattgaccatggtgatacgttgtaaaatgttttcatattaagaatgtaattatttccttattgtattttttaaaagctaaagtcatatttaaaattctctttgaaagaaacaggcaaagaaacagcaaagatttttttaaattaaatatgttagtagtgcccacttcaaatgactgtaaatatattttcactgtttctcaatgtatttaattcataaagtaaaaattttatgaaaagaaacttgcaaggaaaatcctagttttcagtccactcgccccactttgtagtagcttcactgaatttcctgctttcctggttgaattttctactgtttcacgtggtgtaaccctagactggcgcccttggcgtgcccctttgtgtatgaataaacttctctccccc

SEQ ID NO: 1044 - DNA, 330 bp, Homo sapiens
  misc_feature (233)..(233): n is a, c, g, or t
ctttcccgagtccgtttgaggaagtccccgaggcgcacagagcaagcccacgcgagggcacctctggaggggagcgcctgcaggaccttgtaaagtcaaaaatgtcagaaacttccaggaccgcctttggaggcagaagagcagttccacccaataactctaatgcagcggaagatgacctgcccacagtggagcttcagggcgtggtgccccggggcgtcaacctgcaagantttcttaatgtcacgagcgttcacctgttcaaggagagatgggacactaacaaggtggaccaccacactgacaagtatgaaaacaacaagctgattt

SEQ ID NO: 1045 - DNA, 202 bp, Homo sapiens
  misc_feature (109)..(109): n is a, c, g, or t
cgggggcgcgctcgggtacctgtaccccacgtagtcgccggttaccgatcggactaagttccagtggtgatttacaagtcaagttaaaatgtccccagaagtggccttnaaccgaatatctccaatgctctcccctttcatatctagcgtggtccggaatggaaaagtgggactggatgctacaaactgtttgaggataact

SEQ ID NO: 1046 - DNA, 364 bp, Homo sapiens
  misc_feature (44)..(44): n is a, c, g, or t
  misc_feature (295)..(295): n is a, c, g, or t
  misc_feature (305)..(305): n is a, c, g, or t
taaacagtatatttggtggtctctttgtctgcttttatttccangttcgatcttctgggtttagttttgtctttaaaaagaattcaaaaaaagactgacaatgacagttttgagttggatagtgaaaaagtggagcctccataatcagtgtggttgccttcagacctgagtacttagctgagggtgggtgagagccctttgttccaaaagtccattagttttgctgttgtttaggagtaggtggttgttgttgtttttactttttttttttttggcttttgtaatggaatccatnttcacatccngtgaactctgtctcctgaaaccctgaagtatttcctagaacccgaaatattggttttcc

SEQ ID NO: 1047 - DNA, 4517 bp, Homo sapiens
ctgattccataccagaggggctcaggatgctgttgctgggagctgttctactgctattagctctgcccgggcatgaccaggaaaccacgactcaagggcccggagtcctgcttcccctgcccaagggggcctgcacaggttggatggcgggcatcccagggcatccgggccataatggggccccaggccgtgatggcagagatggcacccctggtgagaagggtgagaaaggagatccaggtcttattggtcctaagggagacatcggtgaaaccggagtacccggggctgaaggtccccgaggctttccgggaatccaaggcaggaaaggagaacctggagaaggtgcctatgtataccgctcagcattcagtgtgggattggagacttacgttactatccccaacatgcccattcgctttaccaagatcttctacaatcagcaaaaccactatgatggctccactggtaaattccactgcaacattcctgggctgtactactttgcctaccacatcacagtctatatgaaggatgtgaaggtcagcctcttcaagaaggacaaggctatgctcttcacctatgatcagtaccaggaaaataatgtggaccaggcctccggctctgtgctcctgcatctggaggtgggcgaccaagtctggctccaggtgtatggggaaggagagcgtaatggactctatgctgataatgacaatgactccaccttcacaggctttcttctctaccatgacaccaactgatcaccactaactcagagcctcctccaggccaaacagccccaaagtcaattaaaggctttcagtacggttaggaagttgattattatttagttggaggcctttagatattattcattcatttactcattcatttattcattcattcatcaagtaactttaaaaaaatcatatgctatgttcccagtcctggggagcttcacaaacatgaccagataactgactagaaagaagtagttgacagtgctattttgtgcccactgtctctcctgatgctcatatcaatcctataaggcacagggaacaagcattctcctgtttttacagattgtatcctgaggctgagagagttaagtgaatgtctaaggtcacacagtattaagtgacagtgctagaaatcaaacccagagctgtggactttgttcactagactgtgcccttttatagaggtacatgttctctttggagtgttggtaggtgtctgtttcccacctcacctgagagccattgaatttgccttcctcatgaattaaaacctcccccaagcagagcttcctcagagaaagtggttctatgatgaagtcctgtcttggaaggactactactcaatggcccctgcactactctacttcctcttacctatgtcccttctcatgcctttccctccaacggggaaagccaactccatctctaagtgctgaactcatccctgttcctcaaggccacctggccaggagcttctctgatgtgatatccacttttttttttttttgagatggagtctcactctgtcacccaggctggagtacagtgacacgacctcggctcactgcagcctccttctcctgggtccaagcaattattgtgcctcagcctcccgagtagctgagacttcaggtgcattccaccacacatggctaatttttgtatttttagtagaaatggggtttcgtcatgttggccaggctggtctcgaactcctggcctaggtgatccacccgcctcgacctcccaaagtgctgggattacaggcatgagccaccatgcccagtcgatatctcactttttattttgccatggatgagagtcctgggtgtgaggaacacctcccaccaggctagaggcaactgcccaggaaggactgtgcttccgtcacctctaaatcccttgcagatccttgataaatgcctcatgaagaccaatctcttgaatcccatatctacccagaattaactccattccagtctctgcatgtaatcagttttatccacagaaacattttcattttaggaaatccctggtttaagtatcaatccttgttcagctggacaatatgaatcttttccactgaagttagggatgactgtgattttcagaacacgtccagaatttttcatcaagaaggtagcttgagcctgaaatgcaaaacccatggaggaattctgaagccattgtctccttgagtaccaacagggtcagggaagactgggcctcctgaatttattattgttctttaagaattacaggttgaggtagttgatggtggtaaacattctctcaggagacaataactccagtgatgtttttcaaagattttagcaaaaacagagtaaatagcattctctatcaatatataaatttaaaaaactatctttttgcttacagttttaaattctgaacaatttctcttatatgtgtattgctaatcattaaggtattattttttccacatataaagctttgtctttttgttgttgttgttgtttttaagatggagtttccctctgttgccaggctagagtgcagtggcatgatctcggcttactgcaacctttgcctcccaggtttaagcgattcttctgcctcagcctcccgagtagctgggaccacaggtgcctaccaccatgccaggctaatttttgtatttttagtaaagacagggtttcaccatattggccaggctggtctcgaactcctgaccttgtgatctgcccgcctccattgtgttgttatttgtgagaaagatagatatgaggtttagagagggatgaagaggtgagagtaagccttgtgttagtcagaactctgtgttgtgaatgtcattcacaacagaaaacccaaaatattatgcaaactactgtaagcaagaaaaataaaggaaaaatggaaacatttattcctttgcataatagaaattaccagagttgttctgtctttagataaggtttgaaccaaagctcaaaacaatcaagacccttttctgtatgtccttctgttctgccttccgcagtgtaggctttaccctcaggtgctacacagtatagttctagggtttccctcccgatatcaaaaagactgtggcctgcccagctctcgtatccccaagccacaccatctggctaaatggacatcatgttttctggtgatgcccaaagaggagagaggaagctctctttcccagatgccccagcaagtgtaaccttgcatctcattgctctggctgagttgtgtgcctgtttctgaccaatcactgagtcaggaggatgaaatattcatattgacttaattgcagcttaagttaggggtatgtagaggtattttccctaaagcaaaattgggacactgttatcagaaataggagagtggatgatagatgcaaaataatacctgtccacaacaaactcttaatgctgtgtttgagctttcatgagtttcccagagagacatagctggaaaattcctattgattttctctaaaatttcaacaagtagctaaagtctggctatgctcacagtctcacatctggtgggggtgggctccttacagaacacgctttcacagttaccctaaactctctggggcagggttattcctttgtggaaccagaggcacagagacagtcaactgaggcccaacagaggcctgagagaaactgaggtcaagatttcaggattaatggtcctgtgatgctttgaagtacaattgtggatttgtccaattctctttagttctgtcagcttttgcttcatatattttagcgctctattattagatatatacatgtttagtattatgtcttattggtgcatttactctcttatcattatgtaatgtccttctttatctgtgataattttctgtgttctgaagtctactttgtctaaaaataacatacgcactcaacttccttttctttcttccttcctttctttcttccttcctttctttctctctctctctttccttccttccttcctccttttctctctctctctctctctctctcttttcttgacagactctcgttctgtggccctggctggagttcagtggtgtgatcttggctcactgctacctctaccatgagcaattctcctgcctcagcctcccaagtagctggaactacaggctcatgccactgcgcccagctaatttttgtatttttcgtagagacggggtttcaccacattcgtcaggttggtttcaaactcctgactttgtgatccacccgcctcggcctcccaaagtgctgggattacaggcatgagccatcacacctggtcaactttcttttgattagtgtttttgtggtatatctttttccatcatgttactttaaatatatctatattattgtatttaaaatgtgtttcttacagactgcatgtagttgggtataatttttatccagtctaaaaatatctgtcttttaattggtgtttagacaatttatatttaataaaatggtggaatttaaa

SEQ ID NO: 1048 - protein, 244 aa, Homo sapiens
MLLLGAVLLLLALPGHDQETTTQGPGVLLPLPKGACTGWMAGIPGHPGHNGAPGRDGRDGTPGEKGEKGDPGLIGPKGDIGETGVPGAEGPRGFPGIQGRKGEPGEGAYVYRSAFSVGLETYVTIPNMPIRFTKIFYNQQNHYDGSTGKFHCNIPGLYYFAYHITVYMKDVKVSLFKKDKAMLFTYDQYQENNVDQASGSVLLHLEVGDQVWLQVYGEGERNGLYADNDNDSTFTGFLLYHDTN

SEQ ID NO: 1049 - DNA, 493 bp, Homo sapiens
  misc_feature (374)..(374): n is a, c, g, or t
  misc_feature (390)..(390): n is a, c, g, or t
  misc_feature (395)..(395): n is a, c, g, or t
  misc_feature (454)..(454): n is a, c, g, or t
  misc_feature (481)..(481): n is a, c, g, or t
gatatcccagggtgttctcacgaaaattaatttcaaatctaaaaggcaaggataatcactactttcagcagtaaaaggtaacagaaagaaattgcagtttaagcacagttagcatataattaagaacaagaaaaattaaagtattcttaaatatgtgttgctttaatttttctcctgatggcttttcagattaccttaaaaagatctatcaagactcctcctctagaaaagatctattaaaagccacagacacttgggagatccatgagaaggaaaaaaatgggtcatccttatacaggttgattatggtgagtttgtctacatgcagtgcatatggtcagcaaccaagggaaaacaacctccagatacattcncgcagggcagattttncttcngggaggaaaaacctatggttttcctataccatttgtgaagccaacagggtaaggggtanggagcagttcaggttttcatccataangcatccacatca

SEQ ID NO: 1050 - DNA, 180 bp, Homo sapiens
actggggtggtgcttagccggcgccagaccgaccctcgacttcggagaggcagcgcggttcctctgggtgcttccgcctccccttctcctgcttctccagcctcttcggcctcctcgcccgccgcgggaacccgagaccccagtgtatgccccacccctgaccccgctcgcgacatgtcc

SEQ ID NO: 1051 - protein, 2 aa, Homo sapiens
MS

SEQ ID NO: 1052 - DNA, 955 bp, Homo sapiens
ccaagagctaaaagagagtaagggggaaacaacagcagctccaaccagggcagccttcctgagaagatgcaaccaatcctgcttctgctggccttcctcctgctgcccagggcagatgcaggggagatcatcgggggacatgaggccaagccccactcccgcccctacatggcttatcttatgatctgggatcagaagtctctgaagaggtgcggtggcttcctgatacaagacgacttcgtgctgacagctgctcactgttggggaagctccataaatgtcaccttgggggcccacaatatcaaagaacaggagccgacccagcagtttatccctgtgaaaagacccatcccccatccagcctataatcctaagaacttctccaacgacatcatgctactgcagctggagagaaaggccaagcggaccagagctgtgcagcccctcaggctacctagcaacaaggcccaggtgaagccagggcagacatgcagtgtggccggctgggggcagacggcccccctgggaaaacactcacacacactacaagaggtgaagatgacagtgcaggaagatcgaaagtgcgaatctgacttacgccattattacgacagtaccattgagttgtgcgtgggggacccagagattaaaaagacttcctttaagggggactctggaggccctcttgtgtgtaacaaggtggcccagggcattgtctcctatggacgaaacaatggcatgcctccacgagcctgcaccaaagtctcaagctttgtacactggataaagaaaaccatgaaacgctactaactacaggaagcaaactaagcccccgctgtaatgaaacaccttctctggagccaagtccagatttacactgggagaggtgccagcaactgaataaatacctcttagctgagtggaaaaaaaaaaaaaaaaaaaaaaaaaaaaaaaa

SEQ ID NO: 1053 - protein, 247 aa, Homo sapiens
MQPILLLLAFLLLPRADAGEIIGGHEAKPHSRPYMAYLMIWDQKSLKRCGGFLIQDDFVLTAAHCWGSSINVTLGAHNIKEQEPTQQFIPVKRPIPHPAYNPKNFSNDIMLLQLERKAKRTRAVQPLRLPSNKAQVKPGQTCSVAGWGQTAPLGKHSHTLQEVKMTVQEDRKCESDLRHYYDSTIELCVGDPEIKKTSFKGDSGGPLVCNKVAQGIVSYGRNNGMPPRACTKVSSFVHWIKKTMKRY

SEQ ID NO: 1054 - DNA, 337 bp, Homo sapiens
  misc_feature (290)..(290): n is a, c, g, or t
  misc_feature (311)..(311): n is a, c, g, or t
  misc_feature (315)..(315): n is a, c, g, or t
  misc_feature (336)..(336): n is a, c, g, or t
tagctcgtcaagttgccgtggcgcggagaactctgcaaaacaagaggctgaggattgcgttagagataaaccagttcacgccggagccccgtgaggaaagcgtctccgttgggtccggccgctctgcgggactctgaggaaaagctcgcaccaggtggacgcggatctgtcaacatgggtaaaggagaccccaacaagccgcggggcaaaatgtcctcgtacgccttcttcgtgcagacctgccgggaagagcacaagaagaaacaacccggacttttccgtcaaatttngcggaatttctccaagaagtnttcngagagattggaagaccatgtnt

SEQ ID NO: 1055 - DNA, 1597 bp, Homo sapiens
ggctccggcttcaagatcaaaggaaatgtttccctttgtcccgtttcacactaaacgggttggggaggaaccaggggagatgtcaaccgtctgccggtgactgggaagttttctgcaagtcctccacagcatagccagcaggccacttttcactaacagaagtcacaagccaagtgagacactcatccaagaggaaggatggccagtatcttttctaagttgctaactggccgcaatgcttctctgctgtttgctaccatgggcaccagtgtcctgaccaccgggtacctgctgaaccggcagaaagtgtgtgccgaggtccgggagcagcctaggctatttcctccaagcgcagactacccagacctgcgcaagcacaacaactgcatggccgagtgcctcacccccgccatttattccaagcttcgcaacaaggtgacacccaacggctacacgctggaccagtgcatccagactggagtggacaaccctggccaccccttcataaagactgtgggcatggtggctggtgacgaggagtcctatgaggtgtttgctgacctttttgaccccgtcatcaaactaagacacaacggctatgaccccagggtgatgaagcacacaacggatctggatgcatcaaagatcacccaagggcagttcgacgagcattacgtgctgtcttctcgggtgcgcactggccgcagcatccgtgggctgagcctgcctccagcctgcacccgggccgagcgaagggaggtagagaacgtggccatcactgccctggagggcctcaagggggacctggctggccgctactacaagctgtccgagatgacggagcaggaccagcagcggctcatcgatgaccactttctgtttgataagccagtgtcccctttattaacatgtgctgggatggcccgtgactggccagatgccaggggaatctggcataattatgataagacatttctcatctggataaatgaggaggatcacaccagggtaatctcaatggaaaaaggaggcaatatgaaacgagtatttgagcgattctgtcgtggactaaaagaagtagaacggttaatccaagaacgaggctgggagttcatgtggaatgagcgcctaggatacattttgacctgtccttcgaaccttggaacaggactacgagctggtgtccacgttaggatcccaaagctcagcaaggacccacgcttttctaagatcctggaaaacctaagactccagaagcgtggcacaggtggtgtggacactgccgcggtcgcagatgtgtacgacatttccaacatagatagaattggtcgatcagaggttgagcttgttcagatagtcatcgatggagtcaattacctggtggattgtgaaaagaagttggagagaggccaagatattaaggtgccaccccctctgcctcagtttggcaaaaagtaaactttccctttcccaatttataaataatctgtctgctggtacaacagacataaatctctactctgagagtttttatacacttggaaaaatataaaattgtagatcctgcctatctttacaataaaactctccttaatat

SEQ ID NO: 1056 - protein, 419 aa, Homo sapiens
MASIFSKLLTGRNASLLFATMGTSVLTTGYLLNRQKVCAEVREQPRLFPPSADYPDLRKHNNCMAECLTPAIYSKLRNKVTPNGYTLDQCIQTGVDNPGHPFIKTVGMVAGDEESYEVFADLFDPVIKLRHNGYDPRVMKHTTDLDASKITQGQFDEHYVLSSRVRTGRSIRGLSLPPACTRAERREVENVAITALEGLKGDLAGRYYKLSEMTEQDQQRLIDDHFLFDKPVSPLLTCAGMARDWPDARGIWHNYDKTFLIWINEEDHTRVISMEKGGNMKRVFERFCRGLKEVERLIQERGWEFMWNERLGYILTCPSNLGTGLRAGVHVRIPKLSKDPRFSKILENLRLQKRGTGGVDTAAVADVYDISNIDRIGRSEVELVQIVIDGVNYLVDCEKKLERGQDIKVPPPLPQFGKK

SEQ ID NO: 1057 - DNA, 428 bp, Homo sapiens
ttttttcgagttgtcatgctttatcttttatttaacaaatacacatgcatatctatatatgcaaattagatgtctaaatctatattcgttttctgtggcaaccataacaaatgaccaccagctggatggcctccaacagcagaaacattttcttgcccagttctggaggccagaagtccgaaaggtgatgaagggccagttccttctggagactctgacggagggtgtgttccaggttcttcccactcccagggttgccagcatccttggcattccccggcttgtaaaggcatttctccaatgtctgcctccaccatcacttggccttctgtttgtgcctccctccgtgccctttctctgtgcccatctctaccattttctaaattattttctttgcccatctttgtctaagctggataaaaagccag

SEQ ID NO: 1058 - DNA, 3277 bp, Homo sapiens
gccggcgcttcccggccggtgtcgctccgcggcgggccatggccaacgtctctaagaaggtgtcctggtccggccgggaccgggacgacgaggaggcggcgccgctgctgcggaggacggcgcggcccggcggggggacgccgctgctgaacggggctgggcccggggctgcgcgccagtcaccacgttctgcgcttttccgagtcggacatatgagcagcgtggagctggatgatgaacttttggacccggatatggaccctccacatcccttccccaaggagatcccacacaacgagaagctcctgtccctcaagtatgagagcttggactatgacaacagtgagaaccagctgttcctggaggaggagcggcggatcaatcacacggccttccggacggtggagatcaagcgctgggtcatctgcgccctcattgggatcctcacgggcctcgtggcctgcttcattgacatcgtggtggaaaacctggctggcctcaagtacagggtcatcaagggcaatatcgacaagttcacagagaagggcggactgtccttctccctgttgctgtgggccacgctgaacgccgccttcgtgctcgtgggctctgtgattgtggctttcatagagccggtggctgctggcagcggaatcccccagatcaagtgcttcctcaacggggtgaagatcccccacgtggtgcggctcaagacgttggtgatcaaagtgtccggtgtgatcctgtccgtggtcgggggcctggccgtgggaaaggaagggccgatgatccactcaggttcagtgattgccgccgggatctctcagggaaggtcaacgtcactgaaacgagatttcaagatcttcgagtacttccgcagagacacagagaagcgggacttcgtctccgcaggggctgcggccggagtgtcagcggcgtttggagcccccgtgggtggggtcctgttcagcttggaggagggtgcgtccttctggaaccagttcctgacctggaggatcttctttgcttccatgatctccacgttcaccctgaattttgttctgagcatttaccacgggaacatgtgggacctgtccagcccaggcctcatcaacttcggaaggtttgactcggagaaaatggcctacacgatccacgagatcccggtcttcatcgccatgggcgtggtgggcggtgtgcttggagctgtgttcaatgccttgaactactggctgaccatgtttcgaatcaggtacatccaccggccctgcctgcaggtgattgaggccgtgctggtggccgccgtcacggccacagttgccttcgtgctgatctactcgtcgcgggattgccagcccctgcaggggggctccatgtcctacccgctgcagctcttttgtgcagatggcgagtacaactccatggctgcggccttcttcaacaccccggagaagagcgtggtgagcctcttccacgacccgccaggctcctacaaccccctgaccctcggcctgttcacgctggtctacttcttcctggcctgctggacctacgggctcacggtgtctgccggggtcttcatcccgtccctgctcatcggggctgcctggggccggctctttgggatctccctgtcctacctcacgggggcggcgatctgggcggaccccggcaaatacgccctgatgggagctgctgcccagctgggcgggattgtgcggatgacactgagcctgaccgtcatcatgatggaggccaccagcaacgtgacctacggcttccccatcatgctggtgctcatgaccgccaagatcgtgggcgacgtcttcattgagggcctgtacgacatgcacattcagctgcagagtgtgcccttcctgcactgggaggccccggtcacctcacactcactcactgccagggaggtgatgagcacaccagtgacctgcctgaggcggcgtgagaaggtcggcgtcattgtggacgtgctgagcgacacggcgtccaatcacaacggcttccccgtggtggagcatgccgatgacacccagcctgcccggctccagggcctgatcctgcgctcccagctcatcgttctcctaaagcacaaggtgtttgtggagcggtccaacctgggcctggtacagcggcgcctgaggctgaaggacttccgagacgcctacccgcgcttcccacccatccagtccatccacgtgtcccaggacgagcgggagtgcaccatggacctctccgagttcatgaacccctccccctacacggtgccccaggaggcgtcgctcccacgggtgttcaagctgttccgggccctgggcctgcggcacctggtggtggtggacaaccgcaatcaggttgtcgggttggtgaccaggaaggacctcgccaggtaccgcctgggaaagagaggcttggaggagctctcgctggcccagacgtgaggcccagccctgcccataatgggcactggcgctggcaccccggcccttctgcatttcctcccggagtcactggtttctcggcccaaaccatgctccccagcagtggcaatggcgagcaccctgcagctgggcgggcaggcggcaggcgcggaactgaccctctcgcgggactgaccctgttgtgggcagtggtctccccccttggcgcctccttgcgcaggcccagcctccactctcctcgtctaggtttctttacctccagggatcagctgtgtgtgtgtgacctccctaccgggctatcggcctcttgggagccagcggcagggccggcacctgcgtgcctgtgcccgtgtgcgtgagacagagcccttgcccctgctgctgccccgagggctgccctgccctggaagggcccctctgcctccacaccagtggagtcttcgagacttgggagctgcttggcctcattttcagccatgagcagacggcctgtggtccctgggcctgaggcacggactcgtagcaccagggtttggaggctgcgaccgccccggagagcagcttcacactggcgccacagaggagccccacgtgcactccccggcctgcatccggcttgggtacacaggcccagaggactggggtgactcacgggccctgtgctgtgatgttgagagctgagaaaaacctccaaggccctgagccccatgcccagccctgccttggtcccccaatccccagagcttggagtctgggccccacacccagccctgccttggtccctgagcctcaaagcgtggaattgctgccctgtggacact

SEQ ID NO: 1059 - protein, 805 aa, Homo sapiens
MANVSKKVSWSGRDRDDEEAAPLLRRTARPGGGTPLLNGAGPGAARQSPRSALFRVGHMSSVELDDELLDPDMDPPHPFPKEIPHNEKLLSLKYESLDYDNSENQLFLEEERRINHTAFRTVEIKRWVICALIGILTGLVACFIDIVVENLAGLKYRVIKGNIDKFTEKGGLSFSLLLWATLNAAFVLVGSVIVAFIEPVAAGSGIPQIKCFLNGVKIPHVVRLKTLVIKVSGVILSVVGGLAVGKEGPMIHSGSVIAAGISQGRSTSLKRDFKIFEYFRRDTEKRDFVSAGAAAGVSAAFGAPVGGVLFSLEEGASFWNQFLTWRIFFASMISTFTLNFVLSIYHGNMWDLSSPGLINFGRFDSEKMAYTIHEIPVFIAMGVVGGVLGAVFNALNYWLTMFRIRYIHRPCLQVIEAVLVAAVTATVAFVLIYSSRDCQPLQGGSMSYPLQLFCADGEYNSMAAAFFNTPEKSVVSLFHDPPGSYNPLTLGLFTLVYFFLACWTYGLTVSAGVFIPSLLIGAAWGRLFGISLSYLTGAAIWADPGKYALMGAAAQLGGIVRMTLSLTVIMMEATSNVTYGFPIMLVLMTAKIVGDVFIEGLYDMHIQLQSVPFLHWEAPVTSHSLTAREVMSTPVTCLRRREKVGVIVDVLSDTASNHNGFPVVEHADDTQPARLQGLILRSQLIVLLKHKVFVERSNLGLVQRRLRLKDFRDAYPRFPPIQSIHVSQDERECTMDLSEFMNPSPYTVPQEASLPRVFKLFRALGLRHLVVVDNRNQVVGLVTRKDLARYRLGKRGLEELSLAQT

SEQ ID NO: 1060 - DNA, 288 bp, Homo sapiens
  misc_feature (10)..(10): n is a, c, g, or t
  misc_feature (13)..(13): n is a, c, g, or t
  misc_feature (18)..(18): n is a, c, g, or t
cctcgtcacnttngtctnaaactcttgacttcaggtaatccacccaccttggcctcccaaagtgctgggattacaggcatgagccaccatcttcagccagatgatttttttattgagagagtgaaatgctattttgttccccaaatggcgctagtgaatcactaggagggtcccactgataggccatgtttagcactggttgccagggattctctttttgagagagggaaagcaaaatgaatggaagtacccagctggaggtttcagggcttctggaggatgctctcg

SEQ ID NO: 1061 - DNA, 357 bp, Homo sapiens
ttttaatttggctctttccttctacatacaagtgcctgtggacacagcattgtccttgtgctgttgccatttacagcagtaaaacaacagctactatttcttaagggcttatatttggttctttattaacactgtctgttttaagccttacggtaactgaggttggtatcattgtccccattttacagatgagtaaactaaggcttgtgcaatgttaattgagctgcggagaggatatatcacagctaataaattagaggggcagcattcaaccccaggtcttcctgaatgcaaagatttgtgctagtaagctctgtgttctcctctgaggtcactgtggtgggctctaggcactta

(The sequence listing continues in the following parts.)
